United States Patent Application Publication US 2007/0067865 A1 - sequence listing, part 60

SEQ ID NO: 387865 - DNA, 765 bp, Oryza sativa
ccacgcgtccgtaaaagttgatgagcctaagctagacagtaagctgttgtcaacatactttaaagagcatccacatgataatctgccttcatttgctaataagtatattatctttcgtcggggcattggaattgaccgtacaaccgattactttatcatggagaaactggatgtgatcatatcccgagcttggagctcattgctcagagttacaaggattgatagattgttctcaaaaaaaccacaggtgaagtccaagaaagacacaaagaagaccgatgaaattaatgaagacttagaagaaccagaactatttgtcgagcgtattaggctagaaaaaatcgagctaagcgtgagaaatctgatgagcaagatgacaattcaagaacccacatttgataggatgattgtggtgtacaggagggcaggtacttagactaagcctgatcgaggaatatttgtaaagcatttcaagaatatcccaatggctgacatggaaattgttcttccagagaagaagaaccctactttaacaccaatggattgggtcaagtttcttatttctgctgttattggtctggtcactttatttggttcccttgaaatgccaaaggctgatatatgggttgtcatagcaatcttgtcgggtgtgattggatattgtgctaagatctacttcacgtttcagcaaaatatgacaatatatcaaaaattgatcacaaaatcaatgtatgacaaacagcttgatagtgggaaaggaacact

SEQ ID NO: 387866 - DNA, 432 bp, Oryza sativa
  unsure (1)..(432): unsure at all n locations
ccacgcgtccggcgcggcgggtgagctggtgacgttcccgcggctgcgtctgctggcgctgctgggtctgcccaagctggaggccatccgcggcgacggcggggagtgcgcgttcccggagctccggcgcgtgcagacgaggggttgcccgcggctgaggcgcatcccgatgcggccggcggcgagcgggcagtgcaaggtgagggtggagtgcgacaagcactgggtggggcgcgctgcactgggcgagcgacgacgtcaagtcctacttcgcgcccgtgctgatctgaacaaaacaacgtcgtcgtcgctgcaatctcgccgcgccgtgccgcgcgttgcgtgcatccgattttccgatgcagaggttgaagttttggagacgtgctgatctgttagggaaggaacgtcgggggaaatttggtgactgtn

SEQ ID NO: 387867 - DNA, 562 bp, Oryza sativa
  unsure (1)..(562): unsure at all n locations
ccacgcgtccgcccacgcgtccgcccacgcgtccgcccacgcgtccgcccacgcgtccgcccacgcgtncgtgcacacatgaactgtcttgccagagtggagatgctatggtaatgatatactggaactcctttttatgggctccataatggccgcacttggcatccgactatctgagcacggaaattttcagtggcaaaaccttactgcgaatagaagcaaagcactgcaaaatctagagctttgcatgggtcaagtactcaagtttatgacctttttcagacaagggatacaatctggcttggcccaaagaacacatttcagagacagagacaatgggctccataatcttccattgaaaagaaaaataagaaactggagctggagtgggagatgtttcaagaagaattgagccatcaatctctctctctctggtttcctactggccctggagcctccatatgcaaacattcttttaataaatatgcaaattttctgcactaaaatccgccacacatcaataaaaagggcagtccttttgatgataaaaaaaaaaaacaaa

SEQ ID NO: 387868 - DNA, 466 bp, Oryza sativa
ccacgcgtccgccggaaaacactgcacaagttccacaacaaggtcttgtacatttcaaattccgattcaacggatagcaacccacgtaattggtacctaaagcccacagaacagatgtcgattgaagagtcatcctcatttgcttcataagaatttcatgatttgagcaacatttgcccctgagcagttttgtcgcaagatttcacccatacgtgaagtgtatggtgcccagccaagtacccaaaatatgtcatgctgattgttctaaagatgtgatgcttgagtagttgagttgtatgaccaaaattgctagtatgctacataccaactcgaggcgtggcacagattttagcaccctaaaggttgaaagggaagctcatctgttcttggatcgttacaccacgaagttcagaatgaacatcatatgtagatatgcagtcctctgatctttttgagtttcttttag

SEQ ID NO: 387869 - DNA, 709 bp, Oryza sativa
  unsure (1)..(709): unsure at all n locations
ccacgcgtccgcccacgcgtccgatctgcttcttcttccgctacgcttgtgggcacgatgagaagggcgaccattcttgtactgctcattgcactctcatctgttattgctccccttccattggaagctctcaatgtaagaggccatctactgaaatccaagacatttctgtctccggcattcttcctgcaccctggatcagtttcaaacaagttctactatgatgtccccttccctagaggccaccttgctctcaagagctttaatgctgaagtcgtagacgagaatggcgtccctgttccgctccatgatacttacctgcatcactgggttgtggaaccatactatgctttaaagaacagtgatagcgcagacgcgcaaaagctacccaaggggatcattgcaaggaactctggtgtgtgcaagaaaacattaggccagtactacggccttggttctgagactcgccatactgccacatgggtacctggatccttacggcgatagagattggtaatccggagaagccccctgaaggatatgagggagaaatggttgatcaatgtgcatgccattgacacaaggggtgcgatcgacaagctaggatgcactgagtgcaaagtgtgatctttacaacatgacgatcgangagtaatgggcgcaaacttcccaaanggctacattggngggtttaaaattggctggctat

SEQ ID NO: 387870 - DNA, 541 bp, Oryza sativa
  unsure (1)..(541): unsure at all n locations
attcggaacgaggtttagtgtnccgggtatcgancaattcncggcggcatcttttttgcacatgccttttggttagcgaatcagcttgcaactgtcaactgtttactgcttataacatcggtggattttacctgcttgtctccaaggatctgttgtagcattaccggagattaataaaagcagttggaataacaagatgtagctgcggctgtgacttcaacttcctgccttcctctaattcaagatgtagctgctgcctgcccacccctaccattaaccataatattgtgctcaagtggcttactgccagaaaaactgtcaaatgtattgtgattcccctaagtagctttctgcttaatttcttttctagtggggataaaagaactctgtactattactttgtattaggacgatcctctggtctgtgttgtgagttgtaagttgtaactcgtgacttggcttttactcacttttcccttctgctgatggcggacagaggactcgacaagtaacaatttctgtggctcaagtcctttcactg

SEQ ID NO: 387871 - DNA, 1170 bp, Oryza sativa
  unsure (1)..(1170): unsure at all n locations
ccacgcgtccgcacttctactctcacctctcgctaccaaacacgcgcacacgcagccgagatcgagagcgagctacttgccctagcagcagcagcagcgaggagcgcgagggggcggcggcggcggcgtgcatggcgggggctccgtcgaggtcgcgcggcgacttcgaccacctcatcaagctcctcctcatcggcgacagcggagtaggaaagagttgcttgcttctgaggttctcagatgacactttcactacaagttttatcaccaccattggcattgatttcaaggttcggacagttgagcttgatggaaagcgtgtaaaattgcagatttgggatactgctggtcaagaacgtttccggacaattacaactgcctactatagaggtgctatgggcattctgcgttgtttatgatgttacagacgagtcatccttcaacaacattaagaaattggatccgcaacataggacaacatgcatctgataatgtcaacaagattttggtgggcaacaaggttgatatggataccaaaccgggtggtgtccacagctcaaggacaaaagctccgcagatgagtatggaatgaaattttttgagacgagtgcaaaaacaaatcagaacgtggagcaggtgttctttaccattggcgagggacataaagcaaagattgaccgaaactggtgctgcagcagctgagcccccaactattcaaatcagtaggcaagaaccagatcaggcagctgcctcgtcaagatggtcagcctgctgtaacacctgatcaacgctgcggcgcactgcacggcttgtcctgttcgcagcttgcctatgacagcaaatttaccactcccatcttccgtgtattcaatgccaagatgtatatttcgcccagttgatatctaggtcaaaagatcttttacctgaccattctggtgttgtgattcctcaatgaggtgtaagggtgtttgcctgtgttctagctctgttgttagttctgaattatgcttcaaaactcttcttttttagctctgtgttcgtcagataagctgatggatttgctcctgtcatgtaaacaaaccttctaagagacagcagtatctgattgtctgaattcatgattgtgcattactgaagatttgtcctnnnnnnnnnnnnnnnnnnnnnnnn

SEQ ID NO: 387872 - DNA, 496 bp, Oryza sativa
ccacgcgtccgcgcacatactctgctgtgattgaaagccagctagaggaggtagcagcagcagcacctacgatcgcaagagagaccacggccgcggcgctcatggccggggcttcatagaggccgcgcggtgagtatgaagcacatgatcaagctcctcctcatcggcgacagcggagtaggaaagagttgcttgcttctgaggttctcagatgacactttcactacaagttttatcaccaccattggcattgatttcaaggttcggacagttgagcttgatggaaagcgtgtaaaattgcagatttgggatactgctggtcaagaacgtttccggacaattacaactgcctactatagaggtgctatgggcattctgctttgtttatgatgttacagacgagtcatccttcaacagtatccatcatacttgggcataccatttggtgacagagtgcaaatatatatatttttttcttaactgatgtgtagacatt

SEQ ID NO: 387873 - DNA, 565 bp, Oryza sativa
  unsure (1)..(565): unsure at all n locations
acgcgtccgcggacgcgtggngcttatactaaggggcagcaactcgatgctgtgaactttgcatatgaggctggtcttcaggaaaaattccccccagcccctcttttaaaagcctaccttgaagattcaaagaagataccctcaaattcagataacctgagtactagcactggccaatctgggagcaatgccaataagaaggagcagtctgcactgcgggctgttataaagtgtgttgaggaccacaaactcgaagctgagtttccattggaggatctccgtgagcggctggaagaactggagaaggccaagaccgagaagaaaaaggcggcatcaagcagttccagcggtggtagctctggtccagccaacaagcgcatccgggcaagcaccggaggaccgatgccccctgccaaggcaggccgtctcaccgactacaccggtacaccgtcttcgnctgccaccaccacgaccaatgccacattcattcgcttcccgtccatgccttctacggtacagcatctccttactcttatgataggccagctgcacaccccctctactg

SEQ ID NO: 387874 - DNA, 766 bp, Oryza sativa
ccacgcgtccgcccacgcgtccgcccacgcgtccgcccacgcgtccgagagatcttttcatcaactcagatgaatctactggaccgggcagtgaagatggttgccgaactggatgagccagaagagatgaactacgtgcgtaagcatgcacaagagcaggcacgggaacttggcgtttcattaagagaggcggcaacaagggtgttctcaaatgcatcaggctcttactcatcgaatgtgaacttggcagtggagaatgcatcatggactgatgagaagcagctccaggacatgtacctgagtcgcaagtcttttgcatttgattgtgatgctccaggggcaggcatgcgagagcaacgcaagacatttgagcttgctctagcaacagcagatgccacattccagaacctagactcatcagagatttcactaacagatgtgagccactactttgactcagacccgacaaagctggtgcaaggacttgcgcaaggatgggcgggcaccttcctcatacatagcagatacaaccacagcaaatgcacaggtgaggacattgtcagagacagtgcgccttgatgcaaggacaaagctactgaaccctaagtggtacgaggggatgatgaaaagtggctacgagggagttagagagattgagaagcggctgacaaatactgttggatggagtgcaacatctggacaggttgacaactgggtttatgaggaggcaaatgccacatttattgaagatgaggctatgaggaag

SEQ ID NO: 387875 - DNA, 619 bp, Oryza sativa
  unsure (1)..(619): unsure at all n locations
caaaggttctcccgacaggaagaacatccatgctcttnaccctcaggcaatcccaactacagctgccttgaagagcgccaaaattattgtagaccgtctgctggagcggcaaaaggttgacaatggtggcaagtatcctgagacaattgcacttgtnttgtggggcaccgataacatcaagacctatggtgagtcattggcccaggggctgtggatgattggggggcgcccggttgctgacacctttggccgtgtcaaccgtgtggaacctgtcagccttgaggagcttggacgtcccaggattgacgttgttatcaactgctcgggtgtcttcagagatcttttcatcaaccagatgaatctactggaccgggcagtgaagatggttgccgaacttggatgagccagaagagatgaactacttgcgtaagcatgcacaagagcaggcacgggaacttggcgtttcattaagagaggcggcaacaagggtgttctcaaatgcatcaggctcttactcatcgaatgtgaacttggcagtggagaatgcatcatggactgatgagaagcagctccaagacatgtacctgagtcgcaagtcttttgcatttgattgtgatgc

SEQ ID NO: 387876 - DNA, 1205 bp, Oryza sativa
  unsure (1)..(1205): unsure at all n locations
gatgaatggacgaggtcaccatggcgctctgctctgcggcgatggcccgcgctcagccgttgacctgctctgcgctctcaggagaggcgcggatcagcatgctcaagacgctgatggactcagagcaatcctgcggaacacaagcgtcggtgaacaattcattgcgaatgcgataactctgccgggtcatggggagatcatggatatgatgccagttgcagatcctgatgcagttcatgctgtccgcacctttattaagaaggagcttgccctccaactcaaagatgaccttctttcaacagtgacacataacagaagttctgaagcttatacatttaaccatgatagcatggcccgccgtgcattgaaaaacacatgccttgcttatctcgcatctctgaatgaaccggacaccactgaacttgcacttgttgaatacaagtctgctactaacatgacggagcagtttgctgcactagcagcattgtctcaaaatccaggccaagttcgtgatgacacccttctggacttctataacaaatggcagcatgattatttggttgtaagcaagtggtttgctcttcaagctacatcagacatccctggaaatgttgctaacgttcaaaagttacttggtcaccctgcttttgacatgaggaatccgaacaaggtgtattcgctaattggaggattttgtgggtcccctgtgaatttccatgcaaaagatggctctggttacaagttcttgggtgaagttgttttacagctagacaagataaatcctcaggtggcctcccgcatggtgtcagctttctctcggtggaggcgatatgatgagagcagacaagctcttgctaaggctcagctggagatgatcgtgtcagccaatgggctatcagagaatgtgtacgagatagcttcaaagagcctggcagcttgaataatcccgtgagtgaacaagtcagtcggtcctgcctctcatcacatgacatccacacagggtgctaaaagtgtagttaaactgaatatgtttatgtggcaagagtaaaagaaggctgcttttagactggtacaaaactctgttgcttatagtatcgcagaccccaaaagtaatgcaattctttcttacgcgatggctctatctggaataactggactgatagagtttcttgcagtatttgtttnnnnnnnnnnnnnnnnnnnnn

SEQ ID NO: 387877 - DNA, 729 bp, Oryza sativa
ccacgcgtccgcccacgcgtccgcccacgcgtccgcccacgcgtccgcccacgcgtccgattcctattgctgtcggacttgttgattctaccggaaaggatatgcccctagcttccatttacagtgatgggatgctccaatcactcactagtgatggccagccagtcttcactactgttcttcaatttaataagaaggaggaagaattcatatttaacaacatacctgagaaaccagtgccttccttgttgaggggatacagtgctcctgttcgtcttgattctgatctgactgagagtgacttgtttttcctacttgccaatgattcggatgaatttaacaggtgggaagctggtcaggtgctgtcacgtaaactgatgctcagtcttgtagctgacttccagcaacagaaaacactggccctgaaccctaaatttgttgatggacttagatcaatcctgcggaacacaagcttggataaagaattcattgcgaaagcgataactttgccgggtcaaggggagattatggatatgatgccagttgcagatcctgatgcagttcatgctgtccgtacctttattaagaaggagcttgcccttcaactcaaagatgaccttctttcaacagtgacaaataacagaagttctgaagcttatacatttgaccatgatagcatggcccgccgtgcattgaaaaacacatgccttgcttatcttgcatctctga

SEQ ID NO: 387878 - DNA, 617 bp, Oryza sativa
atcatactagcacagagcgccgccgccgaggagagtccaatcgagaagaagggaggagaggcaagcggagaggaagaagaagaagaagagaggatgggcttcgagaagacgatcctgaaagccggcaccggtcccaagcccgtcaagggccagaaggtcaccgtccactgcaccggcttcgggaaagataatgatctcgctaagaagttttggagcacaaaggacgcaggccaggagccattcagtttcaatataggccagggttcggtgatcaaaggatgggacgagggagttatgaccatgcaagtgggtgaagttgctcgtattcagtgcaccccggattatgcgtatggagctagtgggtttccggcctggggaattcgaccaaactcagtgctggtgttcgagattgaggttcttagcgcccagtaaacgcatcatgtaattccggatggatctaaaattccatgagtactgaaataattgtaacgtcacaacactgctgcgtgctaccgctggaatgttctatgttattgaccaagtaacgttacaccatcgtctatggacacgataataagtttcgggccgtacattttcgtattaaaaaaaaaaaaaaa

SEQ ID NO: 387879 - DNA, 461 bp, Oryza sativa
attcccggtcgaccacgcgtccgcggacgcgtgggggggacgctcctgaaggcagcgaattcatacatgcttgccgctttggtaagccaaccagcactttacgccaaggatatcattgaacagcgtatgtccggtccagccatgattcatccatcagaggcagctgccaaaggttcaagctggaaagatttggttgaacctggagtgaggcgtgcgttgttagtcggtgttggaattcaaatccttcaacagtttgctggaataaatggggttctctattacactccacaaatacttgtgcaagcgggggtggcagttcttctttccaatcttggcctcagttcagcatcagcttccatcctgatcaggtctctgaccaccctactgatgcttcctagcattggtttagccatgagacttatggacatctctggaagaagggttctgcttctgggcacaat

SEQ ID NO: 387880 - DNA, 627 bp, Oryza sativa
ttggtggcctaggagggttaagttctacagatttgggaggtatgctgggtggtggctcggatacttccttcttgagtcaggtgttgcaaaatcctacaatgatgcaaatgatgcagaacattatgtcaaatcctcagtccatgaatcagctgcttaatatcaacccaaatgtacgtaatatgatggaatctaacactcagttgagggagatgttccagaacccagaatttgttcgccagttgacatctcctgaaactttgcagcaattaatctcattccagcagtccttgatgtcacaacttggtcaacaacaagctggcccagagcgaacccaatcaggtgctggtgcaggcaatactaacctcaacaatctgatgagcatgttcagtgggctcggtgctggtggtggcctaggtgttcctagtccacccaatgttccaccagaagagctatatgcaacacaactagctcatttccaagaaatgtgtttttttgacacacaggagaacattcgagctttgattgctacatgcggtaattgtcatgctgcggtggagcgacttcttgggaaattggctgatagactggtgtgatcgagatgttctcgacttgttatctgtagtttat

SEQ ID NO: 387881 - DNA, 617 bp, Oryza sativa
  unsure (1)..(617): unsure at all n locations
ccacgcgtccgcaaatcttttggctgaactgccagaggcttttggaaaccttcaacatctcaaggctttgagtgtacggaacaatggtcttacatccctaccttcagctttcttcataaaatgctcgcagctcattacacttgatctccatggcactgaaatcacaaacgacgttcttcggcaggtggacggttgggaggagtttgacgaacgtcgaaggaagaagcatcaaaagcagctcgatttccgggtgggatcatcagttgtgttcgatgaaggtgcggatgacgattacaggcgtttataaataaaatctctctttggataagattgtgtattttatgtctccagcttaatccgttggcgcaagaataacttgtatacttaagaacaaattaggagctgatggtgctactcacatcaatcctagatatgtacttgtacttcatcctttttcaaaancccttctttttagggattctttaaactgtttagggcatcaagagtggaaaaacattactccgtccatttctatttactcgtgactgttgaccaatcctgttgtaactttgaccactaataaattttgaatggtttgaattaaaaaaaaaaaaaaa

SEQ ID NO: 387882 - DNA, 453 bp, Oryza sativa
ccacgcgtccgcttgatcattagtgataaaggcaatgtctgcctgggattcctcaatggaaaggacatcgatcatgggtcaacagtaatagtcggagataaatgctctgcgcggcaagttggttgtgtatgacaatcaacagaggcagattggatggactaattcagactgcaccaagccacaaacacaaaagggctttcccttcttcctctaacaagtattgtgcaataaacatatgtaaatgatacatagagactaccaatagagctgcttacgaatagcatatcctgttatgtgccgccctatctcctctacagtccatagtataaatcctggttgtttgttgtatacttgggtactttttgtaatatagggtgttgtatacccaagaagcagtgtatgtatattcggattaatggagtttcagatataataatcattatcgttattaag

SEQ ID NO: 387883 - DNA, 2091 bp, Oryza sativa
  unsure (1)..(2091): unsure at all n locations
tttggcgccacgtttaaagggcggagtcgctgtaattagagaagaggatttaaagagagagaaggccattctctcttgattgcttggagaggaagaagaacaagagccgccaccgccgccgttaggttttttatttattttttttctcgatctgatccgaggaggagcgaagcaaggaagggcaagatgcattcgacgaatctgctgctggaggagcccatcaggatggcatccatcctggagccatccaagcccagcttcttcccggcgatgaccaagatcgtggggacgctggggccaaagtcgcgctccgtcgacaccatctcctcctgcctcaaggccggcatgtcggtggcccgatttgatttctcgtggggagacgccgagtaccaccaggaaacccttgagaacctcaaggtcgccatcaagtccaccaagaagctctgcgcggtcatgcttgacacggtcggcccagagttgcaggtggtgaacaagagcgaagcttccatcttccctcgaggagaacggcactgttattctcacccctgaccaggggcaggaggcctccttcacaagtgctgccaattaacttcgctgggcttgctaaggctgtgaagccaggtgacacaatatttgttggggcaatacttgttcacaggcagtgagactacttcagtttggttagaggtttctgaagttaaaggagatgatgtggtttgtgtgataaaaaactcggctactctggctggttcactgttcaccctgcattgttctcagattcatatcgacttacctacactgtctgatgaggacaaggaggttatcagaagatggggagctccaaacaagattgacttcctctctctgtcttatacaagacacgcggaagatgtgcgacaggcacgtgagttcctctcaaagttaggcgaccttagccaaactcagatttttgccaaaattgagaatgttgaggggttgaatcattttgatgaaatcctgcaagaggcggatggtatcattctgtcaagaggaaaccttggaattgatcttccacctgaaaaggtgtttttgtttcaaaagtctgctctgcacaagtgcaacatggctggaaagcctgctgttgttactcgtgttgtggacagtatgactgacaacctcaggcctactcgtgcggaggctactgatgtggcaaatgctgtacttgacgggagtgatgccattctccttggtgctgagactctccgtggtctgtacccagttgagactatctcaattgtgggcaaaatttgcgctgaggcagagaaggtattcaaccaagatttatacttcaagcggactgtgaaatatgttggggagcccatgacccacttggagtctatcgcttcctcctgcggtgcgagctgctatcaaagtgaaggcttctgtcattatttgcttcacatcatctggacgcgctgcaagactaattgccaagtacaggcccaccatgcctgttctatctgttgtcattcctcgtctgaaaacaaaccaactgaggtggagtttcactggcgcatttgaagcaagacaatcactcatagttagaggtctctttccgatgcttgctgatcctcgccatccagctgaatcgaccagcgctaccaatgagtcagttttgaaggttgctcttgaccatggcaaagcttccggtgtgatcaagtcgcatgatcgcgttgttgtctgccagaaagtgggtgattcctcggttgtgaagatcattgagctggacgattagacgaccagcttgtgcttgttgatgatactacggcaagtcatggtttgccagattttgactaggccaaaaacgatgcttcttggctatatgtataattcctatataggctttccaatgagcagtttttcctatggtgtaatcataggatttgccttactatttgaaacaactacgttttagttatgtaagttatcagatttcaatgcatcatatcacttcgatgggcaaatggaataatgaaatcggtactgtaccctttggtcttttgnnnnnnnnnnnnnnnnnnnnnnnnnnnnnnnnnnnnnnnnnnnnnnnnn

SEQ ID NO: 387884 - DNA, 809 bp, Oryza sativa
  unsure (1)..(809): unsure at all n locations
ctcaaagctgagctagacaagatgtttgaattcgatggtgaattggtgtcttcaaacaaaaactggcaaattgtttatactgataatgagggtgatatgatgcttgttggagacgacccatgggaagaattctgcagcattgtgcggaagatttatatttacaccaaggaggaggtccagaagatgaattcgaaatcaaatgccccaaggaaagatgactcttcagaaaatgagaaaggtcatctgccgatgcccaacaaatcagataactaggttcagtgaagcgagcatgatacaagaggtagatcgcatggagtcttgagagagagatgccattctgcgggtcccagtcaagtaaaccccctgatgtgttggtgatcacccctgcccccccttttgcttatctgatggctgatgcaatgcaaaccctatggctttagctagtatgagatgtagactgcctattgtttatccttttgttcctttttcttctcttggcagaaagatttagggccaagatttatcattattgctattgcccctctcaactcctcccaactctctgatgtaaatatttatctacgtagccagccacccagccagaagtagagcagtagtagtagagttaccccctaccttgtattaaccagcagcctattcccccggataaatttgtgtaagctctgtagctcgagataaaaaaaaatggcgatcgaacgaacgaacaaatggcgtatgtattgtctgatctttgatataaatatttatcaatgaatgtatcatagatggatataaaaaannnaaaaaaa

SEQ ID NO: 387885 - DNA, 588 bp, Oryza sativa
  unsure (1)..(588): unsure at all n locations
cntttattttcttctcccaaataaaaaggcgtcttcgttattgtattggattccagaggtgaaagctaggaacacacaacccacacgcctcgctgcctcgattgattgattgattccttggagaagaagaaggaggaggaggagatcgagcagccgctgacgctcgtcgtctacctcccgatctgatccgaggagcgaagcgaccaggggcaagatgcattcgacgaatctgctgctggaggagcccatcaggatggcatccatcctggagccatccaagccgagctttttcccggcgatgaccaagatcgtggggacgctgggtcccaagtcgcgcgccgtcgacaccatctcctcctgcctcaaggccggcatgtcggttgccaggttcgatttctcgtggggagacgctgagtaccaccaggaaaccctcgaaaacctcaagctcgccatcaagtccaccaagaagctctgtgctgtcatgctcgacattgtcggcccggagttgcaggtggtgaacaagagtgaggctgcaatctcccttgaagcgaatggcactgttgttctcacccctgaccaggggcagga

SEQ ID NO: 387886 - DNA, 447 bp, Oryza sativa
tggagtttcactggcgcatttgaagcaagacaatcgctcatagttaaaggcctctttccgatgcttgctgttccgaggcatccagttgaatcaaccaacgctacaaatgaatccgttttgaaggttgctcttgaccacggtaaagtttctggtgtgataaagtcgcatgatcgcgttgttgtctgccagaaggtgggagattcctcggttgtgaagatcattgagctggacgattagacaagcagcttgtgctcgtcgtcgatgatactatggcatgttttgccagattttgactaggccaaaaacgttgcttcttgcctatgtataatcctatagcttcaaatgagcagtttttcctatggtgtattcataggatttgccttacagcttgaaaccattatgatttagtttaggaaattcaatttgcgcaaaaaaaaaaaaaaaaaa

SEQ ID NO: 387887 - DNA, 611 bp, Oryza sativa
  unsure (1)..(611): unsure at all n locations
ccacgcgtccgcccacgcgtccgcggacgcgtgggtcccgatccacccctcccgccgccgccaccgccaccgccgccgccgccggccggcgagagagacaggatgtacgggtgggagatgctctcgttcaacatccacgacggcttcctggaggccatcgtgcgggggaaccggtcgggcctcctcaccgccgccgactacaacaacctctgccagtgcgagaacctcgacgacgtcaagatgcacctcaccgccaccgagtacggcccctacctccagaacgaaccttcacccctgcacacaactacaattgtggagaagtgcactcttaaactggttgatgagtacaaacacatgatgtgccaggcgactgaaccactatccacattcttacagtatataacgtatggccacatgatcgacaatgttgtacttattgttaccggaacattgcatgagagagatgttaatgaactattggaggaaatgccatccattggggaatgtttgacagcattgcatctcttggcagttgctcaaaatatgcgcggtttttacagattggnttttggttgacacaccgttagccccataattttcaggatgcatta

SEQ ID NO: 387888 - DNA, 452 bp, Oryza sativa
  unsure (1)..(452): unsure at all n locations
ccacgcgtgcgcccacgcgttcgcgccatccaagcatcaaagcttctaaactgaagcttaatctatatataaggagagttcattttgattttggtgaggaagaagtagtagaagtgaattagtgatatcgatcagagtgtgaagaagatgtctctggtgaagctgtttgatacgttggcgttcgacgcctggaacccgttcagcatctttgggacgacggtggcggcggacgcgtggctggcgagcgacacgtcggcgttcgccaacacgtacatcgagagccgggagacggcggaggcgtacgtgttccgggcggacctgccggcgggggtgaagaaggaggaggtgcgggtggaggtggacgaggggaacgtgctggtgatcaccggcgagcgcagcggtcggcgggaggagaaggcccagcggtcgaccacatcgagcgcagntgcgcc

SEQ ID NO: 387889 - DNA, 601 bp, Oryza sativa
  unsure (1)..(601): unsure at all n locations
ccttatcaaaacagcatcgcgtcctctgcctcctcttccccacgncgccggccgcgccgccgctgccgccgtcgccccgcgcccttctccctcatccccgccgctgtgaggtgtcaactccgtcgccgcctcccctgtggtagcacgaggggaaccagggctcacatgctactcgatcggggcgtaactttggatagccacggcggctatgcttcttcgccttcatccctgccctctcctctttccgccgccgccaccgcacccacatctccgccgccagctggccgtctattcgatcccgaaatcctccttccgatccgccgccgccgcggctcgagctagaaaccctccgcgtctggcctccgtcggtggagccgagcgacggcgcgtgggtgacgattatgatgaagaggaagaggacttgggacaggctctcgagagaacgcggcaacttgtcgagtgcgcgatgttcgcatccgtcgctggcctcgcgtacttcctcagcaactccctcgccatcgagaattactttagctgcttttttccattgccgattgttatctcctccttaagatggggactagaagctggcaggaaaact

SEQ ID NO: 387890 - DNA, 1151 bp, Oryza sativa
  unsure (1)..(1151): unsure at all n locations
gcccctgaatcggcgtggcagcacgacatgtactcggatntcgcggcaggcgcggcggcggcacggcgganggcggngagggtctcggctatcgagactggcaccaagctctacatctccaatttggacttcggcgtctcgaccgaggatatcaaggagcttttctctgaattaggtgatcttaagaaatacgtaattcactatgacagaagtggccggtctaagggaacagctgaagttgtatttgcaaggcgtggcgatgctgtcgcagcagtgaagaaatataacaatgtgcaacttgatggtaagccaatgaaaatagagattcttgggaccaatactcctacagctgcagctgctcttccagcaaataacggaggctacgttagaaatgttgctaagagtgcaccaaggggtggcccagctggactaccgcagggtagacctcgtccaagggggggtgggaggcgccgtggtggcggaggaggcagtggtggtcctggtggatccggtggtcgccgtggcaaagagcgtagccagccaaagtctgctgaagaacttgatgctgacttggagaaataccatgcagatgcgatgcagaccaactaggtcttcaacggtgttgatatttcaacatgaaatctgaaggatgtttatctgcttgttcctgctatttgtgctaccatgttcagtggcaacaacaaaacctttgtttgtcgggtcttggtttactgaattgtacggttttatgtgtctacatagaactagagttaagtggatgctggtgaacactgttatgaatattacttggttgccacttatgttcctttttctgcggagtgaaggcctgctcgagttgctccacatacagaagttactgaagatgtatgaggtgctcgtatcttctgactcctttaacatacatcatcttcaacggcattgttgcatggttatttggacattgttcctctctgtacaagggttataaggctcagccatcctcaatgaggtggccggcgcctcttttcttatttatcattctgctattgttgattctgggcttagcaataatcttctacccgttagtgattcatatgacagcggctggaggggtcacttttattttaaagttgatttcctccttgcaaaat

SEQ ID NO: 387891 - DNA, 710 bp, Oryza sativa
ccacgcgtccggtggaaagaaggtgacgacgacggcgtcgacgtcgacgagaaggcgcctccgcctcgccggaccagcaggcgggtcgcgtcgctcgacgtcttccgtggcctcaccgtcgctctgatgatactggtggacggcgccggcggcgagtggccggtgataggccacgcgccgtggaacggatgcaacctcgccgacttcgtcatgcccttcttcctcttcatcgttggcatggctattcccctctccctcaagcaaacatgcagaggattccagaccgcggtcgagctgtgaggagagtagtgctcacgacactgaagctgcttttttggggaattctgttgcaaggcgggtactcccatgcccctgatgatttgtcttatggagttgacatgaagcacgtgagatggtgtggtattctccaaaggattgctcttgcatacttggtggttgcagttctagagatcgtaacgaagaatgcaaaggttcaggaccagtcaagttcgggcttctcgattttcaggatgtacttctcccagtggattgttgcatgttgcatccttgtgatctacctgtcccttgtatatgggatttatgttcctgactgggatttcagagtgtcagatgttaaaaatccaaacttcggcaaaatcttgacggtgacatgtggtacacggggaaaattaagtccttcttgcaatgct

SEQ ID NO: 387892 - DNA, 565 bp, Oryza sativa
gttgcgcacgacacgaccgagccagcaaagccgcccatccgccatcccgcctcaagtgcaacctctactactacaggacaaattacttcatcttgatcatgttcatccttgggataggcttcatttggaagccggttgctatacttgcagcctttatgactggaatcagcattgcatttcttaatgacagctttgcagtcactttcaatgagaaagtcacgaggactgtcagacaattttcaccacatttagctgcaaaaatgaggccaccaataacccctgttcttcgtggtagaccaagttcaaagaggtcgattcatatttgtgggcgacctcgctggctatttgtgctggtattttctgcagttagttgcatgctctggttgacttcctgcagtctcctcacagttctatgggcccttttaattgctatctttgcaactctgcttcatgctagcttcagaacacctaatctgaaagcacgtctgaatacattcagagaagaattccgagctgttttcggagggaatatagtgagctttagggttcatgttgggaagaaggt

SEQ ID NO: 387893 - DNA, 720 bp, Oryza sativa
gccctctcctcgtcggtttcgaaccatctagaagcgtcgccgccgactcgccatctcctctctaggtcaccggatttcctagccggcggcgagctcgtcggctcacgcggcggcggcggcggcgatggactggagctccgtgactgcggaggatctggtggacgcgctgcgggaggtggactggtcgacgccgccgcgccccgtctccgagttcttctccccccccacccccccgcgagcctactccaagtggaccagccgcctcaagtgcaacctctactactacaggacgaactacttcatcttgatcatgttcattcttgggatgggctttctccggaaaccagtttccatccttgcagctttttcaacaggcctcagcattgcatttctcaatgacagttttgcagttacattcaatgagaaagtcacaaggacagtcagacaattttcaccacatttagcagcaaagatgaggccacccttaagacctgtcattcgtggccgaccaagctcaaaaagatcaattcatatttgtggccggcctcgatggggttgtgttggattattttcttgtcgtaagcttgcttcctcctggattgacctcatggaagtctccttacgggttctgtgggcactaattgttggtctgcttgcaaccttgcttcacgccagtttcagaacacctaatctgaaagcacgcctgaacacattcaggga

SEQ ID NO: 387894 - DNA, 492 bp, Oryza sativa
  unsure (1)..(492): unsure at all n locations
ccacgcgtccgcacgcctncgcggtgtccaaactccagactcccccaaaaaatcccccaaaaccgaagggaaagaggaaaaaaattactcttcgctctcgcgtcgcgcacgacacgaccgagccagcaaagccgcccatccgccatcccgccgctcctgcaatctacagccgcgtcgccgcttgtccgcctgcgctcgttctcgctagggttcggaagggggagggtggggatcgcccggcgatggactggagcgcggtgacggcggaggacctggtggacgcgctgcgggaggtggactggtcgacgccgccgcgccccgtgccggagttcttctcccgcttcaccgtcccccgctcctactccaagtggaccagccgcctcaagtgcaacctctactactacaggacaaattacttcatcttgatcatgttcatccttgggataggccttcatttggaagccggttgctatacttgcagcctttatgact

SEQ ID NO: 387895 - DNA, 454 bp, Oryza sativa
  unsure (1)..(454): unsure at all n locations
ccatgcctgtgacgatttggacgacnaattcgccgtcttttgatgattgggagcggcgatactgcatctatgtctcgagactttgccatccaatgggccttcttggtgatggcgggatgttgctgtgggcaaaacacaccatccaccgctacgacctgtggagcgatgagctgacggccgtgtgcgagctgggtggcatcaggtatcagggtggtaggccaccaaggtggaagaatctcttcaacttcagcgtaatgccatacaccgagagtcttgttagaatcactgctgctgcttaaggcatccggaatccggatcctataggcttgtacttaatgtatatctcactctatttatcacctaaatacagtgcaattgccaggatctgatactgacagtgactgttttgcgtgttgtattattaatttatctgtttactactgaggtactggct

SEQ ID NO: 387896 - DNA, 669 bp, Oryza sativa
  unsure (1)..(669): unsure at all n locations
ccacgcgtccgcccacgcgtccggcggcggagagggacgccgactcgatccaggcgctgctgaattcgttccccaaggaccagctcgttgagctgctcagcgccgcggcgcttcagccacgaggacgtgctcacggccgtccaccgcgcggccgacgccgacccggcgctgcggaagatcttcgtccacggcctcggctgggacgccaccgcggagaccctcaccgaggcgttcagcgcctacggcgagatcgaggacctcagggtcgtcaccgaccgcgccacgggcaagtgcaagggctacggtttcatcctcttcagccgccggtccggcgcccgcgcggcgctccgtgagccccagaagaagattggcaaccgcaccacggcctgccagctcgcctctgttggtcctgtgccgccgggcggcatggccactaancctgccccagcggtagccccagccccagcgcagtgnnattgccgccagtgtcggagtacacgcagcggaaaatttttgtcagcaatgtcggcgcagacatagacccgcagaaactgtgcagttcttttcaaagtatggtgagatttaggagggtcctctttggctcgataaggttacngggaagccgaagggtttgctctatttgtctacaanaacctcgatagtgctaaa

SEQ ID NO: 387897 - DNA, 475 bp, Oryza sativa
ccacgcgtccggctatttttggggtttgtgccatttgcaaggaagaaatatgtcccagatctattgatagttgtatctcctgtctacatttggttggctttcatgtccttgcaggcacacaaagaagaaaggtttctttatccaatttacccattgatatgtgttgcagctgcagctgttattgacacctttccagattttttccatgacaaatattcatctgaacagtctatctttgaaaagatagcaaagggcctgcggcctttgatccttggcttcattttgtgtgcttcccacagccgaacattctccatgttgaatggatatggtgcccctattcagatctaccagcatctggaacatcatgaagatactgggcctggttctgttctctgtgttgggagtgaatggcaccgctatccatcatcgttcttcataccctcctatattaatgaagtttggtggatagatgatg

SEQ ID NO: 387898 - DNA, 520 bp, Oryza sativa
ccacgcgtccgcggacgcgtgggcggacgcgtgggcggacgcgtgaactccgacgaccaccggagtcggagagcatcaagaatcgacgacgatcgatcatggccatccccaccatcctgggcagtctgaagctcacgccatccccaccctccgccacgccggtgcgctcctccgcctcctcctccctgcatttccacctcgccaacgccggcgccgccgcgctcgtcgcggcctcgctcctcgtcgccgacccggccctggcattcaagggaggaggcccgtacgggcagcaggtgacacgggggcaggacctcaccggcaaggacttcagtggccagacgctcatcaggcaggacttcaagacgtctatactgaggcaggcgaacttcaaaggcgcgaagctgctcggcgcgagcttctttgatgcagatctgacaggtgctgatctctctgatgctgatcttagaggtgcagatttctcactggcaaatgtatcgaagggaaatctgccaatgccaac

SEQ ID NO: 387899 - DNA, 516 bp, Oryza sativa
cggacgcgtgggtagagccagagctagagcatcacagagaaagccgaacttgctcccaataaactatccatgcttcttgcagagatgatgaacagctcagtgctgttcttgccaagctcatccctgttcctcacaaagcagctggtacctgcaaccaagggcagagcatcagcagcagctgctgttaggtgcagcagtgggcccaatctgtcagaagcacatgaggaggaggatggtgtagcctccttgatggggaggaggcatgcaatggcttctgctgctgctgcctgtggagtttcagtgtttggttttgcaggtgagagcatggcagtgaagcagggccttctggctgggcggatccctgggctctctgaccctgatgaaaaaggttggagaacataccgtaggccagacgacaaggtccgtggacatggagttggatggagcccaatcattccctacagcttcaagttcgtgatggctgggaagaggtcccggtgtcgattgctgatcttg

SEQ ID NO: 387900 - DNA, 666 bp, Oryza sativa
  unsure (1)..(666): unsure at all n locations
angccttgttcaaaggtttcaacncctgcaaaagnagngatcaaatcctcaactccattgccaactgaccctgattcgnngattcctncagacgcncctgggggcccntcngaaaatccccngaatgggcaagaaatgncnctgcagccttcnctgtaatgtaagatgtattaatggaagattttgctcaaagnccngtgngatcataattctttgtgtatctgatggcccaatttctctgcgaatggctggtgtttctccttagagtatgtggcaggggaccaatgaattgctcaacatcaacatggttagctgcctctaaagatggccattgccagtccgctgatcacctccactgtcagagatcattacgtgatgtatcctgctgtatcagtttcaccatcctagtgccttgtgtcatatcccaaaaaaaaaaaaaaaaacaacactgtacagtttagactggattcatgccgaggtgacactttgggtgtgtatgttagagttcactgaaagagagcgaacatttggctctagaaatacttttgtcgttggaaattcctcgatcttattccccagaaaatgtcctgttccnctccnnnnnnnnnnnnnnnnnnnnnnnnnnnnnnnnnnnnnnnnnnnnnnnnnnnnnnnnnnnnnnnnnnn

SEQ ID NO: 387901 - DNA, 881 bp, Oryza sativa
ccacgcgtccggatgatgattccagagaatgtgttaatggtcaggagaccaagagggaactggctcgtatgtagcctactgcagcatacatggacacgggtgtctgctcagcatagtcaataatgtgcaagcgagctcttacatgaccgagattcactggctagatcgagtctcaccgagagaccagatactggcatgcacatatcagacgagggacagacatggtcatggcatgaaaggaaccatcgccctgcaaagagtatctggtatactcgacgtatcgccttgtccaaaaagaggcacttgagtcagaatgtagaaggtcctggtggatagaagccaaccaaggtggctccttcgtggatagccagagtgtttgaagcattctccatgtggaaagcacatgcagccagcggtgctggccagtgtaaccatgatattgccataggggcccggtcggccaaggttgtaaatttacaaacggcgcagatgggagttcttcaaagtgacttgagcttccgaccagaatattcgagtatttgacccctcaaggctcaagctcacatcactcagacgaggggtgacatggcagaattcatccactgatttagctactagatgctaatctgtgagatatgctttgtacaattgttagtttagttctgtaaaagaaaacaagcaattgccattagtggatgattaaagagacgcgaggaaagtcttgttaggctgacatctgtagctgacagtttcccagtagctaaccagtacatgagtgaattaagcacatgtaggttcaaatgtgctatgacgattacctgttgcgttgatgtatggctacatttgttgtgacttgtaatgaatccatgccagagtttttg

SEQ ID NO: 387902 - DNA, 573 bp, Oryza sativa
  unsure (1)..(573): unsure at all n locations
ccacgcgtccggtgacgatcttgccgacgctggtgatcaacaatgtgcagtaccggggcaaattggagagcacttcggttctcaaggcgatttgtgctggattcaaggagtccactgagcctgatgtctgcctgacaccagaaatggagactgacgagtgcctgaacaacaatggcggctgctggcgagacgagaagaccaacatcactgcctgcaaggacactttcaggggaagaatttgccagtgccctgtagttgatggtgttcagtaccaaggagacggctacacccactgcanagcggtcggaccagggcggtgcgcgatgaacaacggtggctgctggaaggggacgagagacggcaaggcgttctctgcttgctcggattcagacttgagtgggtgcaagtgcccacctgggttcaagggcgacgggctccattgcgaagacgtcgacgagtgcagcgagaagctggcgtgctcctgccctcactgctcctgcaagaacacatggggttcgttcgactgcagctgccatggcaacaacctggtgtacctcggccgcgaccacgcta

SEQ ID NO: 387903 - DNA, 626 bp, Oryza sativa
ccacgcgtccgcggacgcgtgggcggacccgccggctccaacctcgcatcactccatgcgcgagctcgagctcagctgagtggacgatggaatgaggctcgtggctgccaaaccttgctgcctcttccgaatctcaagcgtcgccgccgttgcagccggtcgccgccggccatggcgagccgcggcggcgagcggcaatgcgcacgccgaagccgaaggcgatgaggacggccaatcgctgtcggcgagggcgaggggcaggcgggcgcggctgtcggcgaggcggcgggagaggatcgtggtggtggagggcggcggcgttgggggcatcggcgagttcctgcgtcagcccgccggcgtggagtcgctgctgaacacgagggcgctgcagagcttcgcggcggtggacgaggcgccgggggcgaacacgttccggtgcacgctgcaaagcatcggcttcctcgggttccaggtcgcccccgtcctcgacctccgcgtcgccccgacatgccacgactgcaccgtcgagatgctctcctgcaggtttgagggttcaggctcagttgagcagcagaatgagctcttttcagcttttatgagcaaccatataacttggaaagacgatg

SEQ ID NO: 387904 - DNA, 524 bp, Oryza sativa
  unsure (1)..(524): unsure at all n locations
ccacgcgtccgggtactgcaagaacaactccgacgggacatgggccgtcgtcgatgtctctctcgacagcctccgccccagccctgtccagaaatgccggcgcaggccgtctggctgcctcatccaagaaatgcccaatggctactccaaggtgacatgggtggagcatgtggaggtggacgacagctcggtgcacaacatctacaagccattggtgaactccggcctcgcattcggcgcgaaacggtgggtcggcacgctggaccggcaatgcgagcgcctcgccagcgccatggccagcaacatccccaatggcgaccttggagtgattacacgcgtggaggggaggaagagcatgttgaagctggcggagaggatggtggcgagcttctgcggcggcctgacggcgtcggtggcgcaccagtggacgacgctgtcgggcagcggggcggaggacgtgcgcgtcatgacgaggaagagcggngacgaccccggcaggccaccgggcatcgtgcttaacgccg

SEQ ID NO: 387905 - DNA, 867 bp, Oryza sativa
  unsure (1)..(867): unsure at all n locations
ccacgcgtccgaaaatggatggaactgctggctaacagtcgtcaaaatttatatggccatagataattgtgcgatgtgtgtgggaggtaaaggtttctacctcaacagtaaggagacttccgacccttcaaggaaaaaccattccaaagtctctcagtatcggatggcatttgatgcaccaagaattactaaaacagagacatcaaagttgaagaacctcatttcagcatcattcaaacccttgtctcttaccatccccataggcgacggtttccatgaattgtttcctgtgggtcactgtcatttatagcagataaagtcttatagataagccaaagtttttcatttctgttggctaacaaggggaggcaaaaattgagttgcgctctcaagagtgtacaatgcttacacttgttggcacaagagattcttttgctcagtcacaggcacaactttgtgctggcatgcagctcaaggctccaacaagggcgaaatattcccaaggctttatgcccataggagaatccgacgcatactgtgctctaatacctggcttacctgaagatctcgcaaagatatgtcttgctcttgttcctcggagccagttccctgttatgggttcagtgtccaagaggtggatgtcattcctcgagagtaaggaattcattgctgtaaggaaagaggttgggaagcttgaggagtgggtgtatgtcctgactgctgatgctggatcaaaggggtcccattgggaagttttggggtgttcagggcaaaagcacagcccttttncaaccatgnctggggcaaccaaagttggttttggtgtggttgttctagatggaaggttttcgtaattgttggtatgtg

SEQ ID NO: 387906 - DNA, 541 bp, Oryza sativa
ccacgcgtccgcaattcccctctccgtcttcccagatctgcttcttgcccaccattcctctcttccttccttctcatgatttctgcgccttctgtggggatcgccttcgcgcccaagccgccaccggcagcggcggttgggtcgtaccgggcaaggaaggtccggtgcgcggtggccgtggctcctgcgccggcgccggcggggacgctgtacgacgtgctggggctgcgtgccggcgccacggtgcgggagatcaaggcggcgtaccggcgcctcgcgcgggagcggcaccccgacgtggccgccagcgccggggccgacgacttcgtcaggctccacgacgcctacgccacgctctccgaccccgacagccgcgcgcgctacgaccgcgacgtcgtcgccgtcgccttcatggcgcgcggcgcgcaccaccggacgatggcggttcccgccggcgcgccgcgctggtacggacggcgtccacgccgcacctgggagaccgaccagtgctggtagcgcacacacgcgatttctgtctctt

SEQ ID NO: 387907 - DNA, 711 bp, Oryza sativa
ccacgcgtccgcccacgcgtccgcccacgcgtgcgggcaaacccaactacaccaagggcttggggattgggggagtcagggggaaaaccctactccgtctcgccaccccacacccaaggccggcgactccttcggctccatagcgggtaagaaagggtgcaccaagatcgccggcggagatcgtcgccttggtcttgacgaggctgccgtgaccccaggcgaccggaacgtgaggagccggaccagggacaccgagagagaagcccgccgtggagacgactgccaagttcttcgcctgctccatatgtcgacatcccctccctcggacatgtcggagatggtcactgtgcaatttctggatctgagaattcatcgcatgcccgccaacgacgtcctacaacttcgtcgccgtcttcctcctctggagttgaactgcgtccaatccgtggaccaattcaaaagattccaggcgtttgtaagaaaaaatgaggagaaggagaaaagggatgaagaagaggccgagctcaacacttccctaccgatctttcttctaccggtgattcttgctaactgattaactttgctatgtgcgtgtgtttataatgtgacgaattgacactgttcttgtatccagttggcaattgtcacgagtcaaacagatctagcgcgcatatgcgctacaagaggtgaagaactggatgagcttgggta

SEQ ID NO: 387908 - DNA, 402 bp, Oryza sativa
  unsure (1)..(402): unsure at all n locations
ccacgcgtccgggaattttgcaggcggaccccttgccgccctccgctagggcgattttctactgtggggggccgcctgcaaatgggcggcgagggggcatggaattttgcaggcggcccccttgccgccctgggggagggcgattttgtactgtgctctatattttttttatataaatatcaatagggggggggctttttatattgaaaactatacaagattaaaatntccaagactggtaaaatacaattttattattttttagggcatatttggattggtaccgtacaaatattttggtagtgccaaaatataagcaagttttggcactaccaaatatttggtaaggtaaaattgcatttgatcatatttggtttgcttgcaaaatgtaaaattgtagtg

SEQ ID NO: 387909 - DNA, 673 bp, Oryza sativa
gcacgcacgctgtcgctgacgctgctgttccgccatggcgttgatgatgagccttcgcttcgcccccccagcgtccgtcgctgctccgccgccgcgacgaccacgagctgttgcctcttcggcgtcctctccggcactccaacgccgccgcccgcagaacgtccccggcgacttcttcgtcgatcaccgatgcatcgattgccagacctgccgctggatggcttcggaggtgttcaagagggtggacggaaaagccgccgtcgccgcgcagccatctccgacgaacacaggaccaaggccctgcaggctctgctctcctgtcctacttcctccattcacaccgagaaacctgcaaaggacattcttcaagtgcaaaacatgttcccgctccccatcgacaatccatcttctccctggggtttacctctgtggctatcattctcaagattcatatggagcaacttcttatcttttaacccatccagatggaaacatactagttgacagcccaaggtatacaacgaaactggcagagaacatcgaaaaacttggtggagcacgctacatgtttttaacccacatggatgatgtcgcggatcataggaagtgggctgagcggctaaaatgtgagaggatcatccattcgggcgatgtagaggatgtacttcagatg

SEQ ID NO: 387910 - DNA, 564 bp, Oryza sativa
ccacgcgtccggtttggtgaaggagagaagtttgtgaaagctgtattttcactggcaagcaaaattgctccaagtgttattttcgtggatgaggttgatggcatgttgggtaggcgtgaaaaccctggagaacatgaagcaatgcgtaaaatgaaaaatgagtttatggtgaactgggatggtctaagaacaaaagataaagagcgtgtattagtacttgctgcaactaataggccatttgaccttgatgaggctgttgttaggaggcttcctaggcggttgatggtgaatttgccggatgcatcaaatagaagaaaaattcttagcgtgatactagctaaagaagatttggcagatgatgtcgatcttgaagctgtagctagcttgactgaagggtattctggcagtgatctcaagaatctatgtattactgctgctcatctccctattaaagatatccttgaaaaggagaagaaggagaaagctttagcagaggcagaaaataggccgctgccccaatcattttcaagtaacgatgtccgtgccttacgactaagtgatttc

SEQ ID NO: 387911 - DNA, 679 bp, Oryza sativa
  unsure (1)..(679): unsure at all n locations
ccacgcgtccgcgagctggttgctgagcttgtaacagcgaatggttacaaagctgcttttccggtgaaggatggtgcagagggacgccgaggatggctgagcagtagtcttccctggacagctcccaagaagggattcagcttgagcgatctaatcggggatggcacagatggtttgcctgtcacacttgggcttgctgcagctactggtttgggaatacttgcctacacagagatagagactgtgcttcagtttttggggtcagctgccattgtccagctagttgcaagcaaactcatatatgctgaggaccgaaagagaacccttaaacagatcgatgatttcttcaacaaaaaggttgctccaaaggagcttgttgatgaaataaaggaaatcggtcaggctctgctgccttctactggtaccaagagccaaccagcaatcacagaagctgctccagcaacagcagaagctgctccagctgccgccacagctaccgctgcaccaccggcagcaccggtagaagagaccagtacagaggcagctcctgcagagccgacacctctttcaccatatacanaattatccggatctcaaaccaccatccttcccttcgccactggcaccggctgaggcgactaaaaatgagtcggaatccgagagcgcagcgaccgaatct

SEQ ID NO: 387912 - DNA, 630 bp, Oryza sativa
ccacgcgtccgcccacgcgtccggatgacttgaagtttgtagccacccaattcgggagactccacagcaaacagcgccagcatacatttagattctattcacagcaatggagaacctgggcagcttgttttatacaggcagcttggcatagatactgcagaaagaaactggaggatactttgtttgagaaggagaagaggttgcaagcggcaattgtcagtgatggttcgagttcgctcagtcttggtgcggcgctatatgcttcacgttttgctggtaatatgatgcggatcttacggagaaatgccactcgaaaggcccgtttgcaggaaagagtgcctgcaaggttattacagaagcctgcagaaccgaactttttcgctgaagatcagtaatgtccatactttgctacatgcagaaattgatgcttcagctggtaaaagttctctctcccctgctgatataccatttttcagtatatgattgaattctgtacatagatagaccatttggttccaagccttttggtttatataagataattcgatttaccggtggatcttcatctatacaatgtatatttggggttgacatggaatgcatgtattataagcattccacttccacatt

SEQ ID NO: 387913 - DNA, 1539 bp, Oryza sativa
  unsure (1)..(1539): unsure at all n locations
ttgcgcgagccctagccgccagccgactcgaccagcgcccggaggcggagcacccgccgccgccgccctcgccatcgtcggcttcacccctcatcggcaacctagtgcaggttgttttctgaagatggctgacgatttgggccctcccactgtgctccagaagatacatgggcagtccatgatgttcagcaagatctcaccttattctttgatgaagaatcccgcactctacaatgccaacacttcttacagtgtgcctctgaagtcatacaatgggatggatgggaacaatgggttctcatctgtcacatctgtatccccagtctttgcttctgccccaaaggagaaaggtctttctgggtttatgattgacttcatgatgggtggagtttcagctgctgtctccaagactgctgctgctcccattgagcgaatcaagcttctcattcaaaaccaggatgaaatgatcaagagtggtaggctctctcacccatacaaaggtattgcggactgctttggccgcacaattaaggatgaaggtgtgattgcactgtggagagggaacactgctaatgtcatccgttactttcctacccaggccttgaactttgccttcaaagaccatttcaagcgcatgttcaactttaagaaggacaaggatggttactggaagtggtttgctggaaacctggcttctggaggagctgctggtgcttgctctctcttctttgtgtattctctggattatgctcgtactcgtctggctaatgatgccaaggctgcaaagaagggtggtgggaggcaattcaatggacttgttgatgtttaccgcaagacccttgcgtctgatggtattgctggtctgtaccgtggattcaacatctcctgtgttggtatcattgtctatcgtgggctgtactttggaatgtatgattctctcaagccagtcgttcttgttggcaaccttcaggataacttccttgccagcttcttacttggttggggcattaccattggtgctggccttgcttcatacccaatcgacactgttcgtcgtcggatgatgatgacatctggtgaggctgtcaagtacaacagctccttggatgcgttcaagcagattgttgcgaaggagggtgcgaagtcactcttcaagggcgctggtgctaacattctgcgtgctgttgctggtgctggtgtgcttgctggatatgacaagctgcaggtggtcgtctttggtaagaagtacggttctggtggtggctaagactagatgatgatgataagcagtggggaactatggacatattaggtgctttcggatgctgttgcgtttaaataaatttaacgtatggacaccgtttacatgttattaggcgtcaggtgaggtttctgagtgtgtaaatcggtggcagatgcttatgccttttttgttgggggatcgagcaagacgagttttcctagttgaaaacatgccaaattattgtctgtgaaagcgtttcttgagattgttattgaaaaaaaaaaaaaaannnnnnn

SEQ ID NO: 387914 - DNA, 719 bp, Oryza sativa
  unsure (1)..(719): unsure at all n locations
cttggcttggaaaatgtcaacgttgttacacaacgcggttttgttcctgttgatgagcggatgcaagttatggacgcagatggcaatgcggttccaaatttgtattgtattggagatgccaatggcaaactcatgctggctcaatgctgccagtgcacaaggaatctcagttgttgagcgaatctctgggaaagacaacatcctaaatcatctaagcatcccggctgcctgtttcactcatccggagattagtatggttgggctaacagagccacaagcgagagaaaaggctgataaggaaggatttgagataagtgttgttaagaccagcttcaaggcaaacacgaaggctctggctgagaatgaaggagatggacttgctaagatgatttaccggcctgacactggagaacattcttggagttcacatatttaggtttgcatgctgctgacctcatccacgaggcatcaaacgccattgccctcggaactcgtgtacaagacatcaagtttggctggtcatgcacacccaactttgtctgaggttctggatgaagctcttcaaagctgccaaggttaatgcaggtgttcctcattccgtaaatgagcccgtcgcagcctagagaggaacatcatctgggatagcccccctcttggatgtccttgattcctagttacnnncaagtgtaattcggtaattcctgatcgagatccaccag

SEQ ID NO: 387915 - DNA, 821 bp, Oryza sativa
  unsure (1)..(821): unsure at all n locations
ccacgcgtccgtgccgtacaaggtgagctccgagacaggatacgtcgattatgataagctggaggagaaggccatggattttcggcccaagctcatcatctgcggcgggagcgcgtacccgcgggattgggattacgccaggttcagggccatcgcggataagtgcggcgccatgttgctctgcgacatggctcacatcagtggcctagttgccgcgcaggaggctgcaaatccttttcaatattctgatgtggttaccaccaccacccacaagagtctccgagggccaagatctggtatgatcttctacaggaagggcctgaagcctcccaagaaaggccagcctgagggcgctctgtatgactacgaggacaggatcaacttcgcagtgtttccgtcgctccaagggggccctcacaaccaccaaattgctgcgctagcggtctggtttgaagcagactatgtcacctgggattcaagtcttatattaagcaggtcaaggccaattgctgttgcccttggtaaccatttgatgagtaagggctacaaattggttactgacggaacagagaaccatcttgttctctgggatctgcgccctcttggcttgactgttgagaaggtctgtgatttgtgcagcattacactgaacaaaaatgctgtctttggggatagcagtgcaatgtcacctggtggtgtccgcattggtacacctgccatgacatcaanggggtttggtanaagangacttttgtacagatcgccgagttccttcaccaagcagtgaccactgcttggatgtccanaagagcgtgcaactt

SEQ ID NO: 387916 - DNA, 482 bp, Oryza sativa
ccacgcgtccgtctcaatcatcggaaaattcatctcaaaaaatcaccagtgatcccaatccactactacggcgagagctagctcgatggaggcatcgccgccgacgtcgccgtcgtcgctaaggcacagactgaggacgacggtgtgctgctgcttcggctcgccgggggagcggcggagcggggagaagctgaggtggaggcggcgggtggccgcgggggagttcgggtacgacccgctcagctacgcgctcaacttcgacgatggcgacggcgacgacgacgccgcagacgacgccgccgcggccttccggtacaagaacttgtcctcccggctcccgccctcgccggtggcggcgccggcgcggcggccgacggccatcgccatctcatgaactggcccccacctgtctccttctgcacgccctaactctttttcactatagagagattaaactgggtactcatgattaaactaccgca

SEQ ID NO: 387917 - DNA, 520 bp, Oryza sativa
ccacgcgtccggtgctgatggctgtgaactcaaggacttctcatgtgcatttcgccacaactatgctggcaaagatgaaaattgatcttgtagctctgccacctaacttgccacctgttaaaataaataaagcaataaaaagttgtgtgattgaagtgtactcaggcaaagttggactatcctttgtaaagtgaattatcttaattgacgcctttcagcctgtaaaatcaaatccattggctcaaagcaaagctttctctgacatttgtactaaattgattttactgaggtattgtccctcttgtattttcagggctgtgtcaacataaagtgtactcttgctgcattcgggccaagtattccatactatgtgtaacaatgtaattagacataggcatcaagttctgtatgtatgatcagaaaatgtacaccaaggagagccctgggctgttgggcacatattgacatattgtacaaagaaatgtagcaatcgcattgccaagcaaatgacttgatgaat

SEQ ID NO: 387918 - DNA, 837 bp, Oryza sativa
ggggggcggcggcagggggaggaggcttcgaggcgcgcgtggcgggatcgcgtccaccatccgcgtcatccccgacttccccaagccagggattatgtttcaagatatcacaacaatgcttctcaagccagatgcatttcgtgacacgatcgagctcttcgttgagcgatacaaggacaaagggatcactgtaattgctggtgttgaagctagaggattcatttttggtccgcccattgctttagcactaggtgcaaaatttgttccattgaggaagccaaaaaagttacctggtgaggtgatctcggaagaatattctttggaatatggtacagataaaatagaaatgcatgtaggagctgtggagccaaatggccgggccgttgttgttgatgatctaatcgctacaggtggaaccttatctgcagccggtaaacttattgagcgtgctggagcagaggttgttgagtgcgcatgtgtcattgaactaccagaactgaagggtcgggacaagctggggaacaagccagtttttgtccttgtgaaggcagactaagcggtccgaaacaactaagggcctctcaagttgtccctattaatatcagtgtccttctcgaagcatgttggaagcaactaagatatcggtcgtgacaatattagcttgttctatccagtgctctgcaataaaagtctcatctttaaatttgtaggcacatgagttatttgggaattcggacttgaatgatccttgtaatacatcaaaacacggcataattttttttaaaggagtgccaattattcatggggaatgagaatcacctattttggagttaaaaa

SEQ ID NO: 387919 - DNA, 694 bp, Oryza sativa
  unsure (1)..(694): unsure at all n locations
ccacgcgtccgctccggagatcggagctcgcgtttttacctcacgaatagcgcgagctcgcacaaattctattccgcgacgcgatagtcttgcactcttgccccgcgctgagtccttggcatctgatgctttatctctccaaaagttgcagcttaaagcatagcaagtgcggttattgggaggcttttgttgcaagaactggatttttcccgccggttattcgaatcgggaacgctggaatcactgacacctattcgtcgtgaggattgattccgcgagaactcgattcgggatcgagttctttggaagctggttccccattgctgcgccgtgcgcgcgtggaatccaataataggcgcggcttctgtgctcgtagatgagctgcggcgaccggaggcggcgagagggagcatatgggcgcgggcgtgtcagacctcgcggcggggatggaggccggcggcaaggtcgcgggccgcgccgggctgggcgagcctgccggagctgtgcgccgccgaggtgctgctgcacctggacgcgccggagatatgccggctcgcgcggctcaaccgcgcgttccgcggcgccgcggcggcggacttcgtgtgggaagcgaagctgccggagaattacgggtatctcctggacttcgtcgatggcnccatggagggcggaggaggaggaagagagaggagcg

SEQ ID NO: 387920 - DNA, 855 bp, Oryza sativa
  unsure (1)..(855): unsure at all n locations
ccacgcgtccgcggacgcgtgggcgctgagctcaaattggctgagcagggtgccctggatgtgagattaggttctccggcagtcggaatccatgagcagcagctgttgcatcgtggtacttcaggttccgatgaagctggtgcaatcaatgagatttcacccgttgaggtgtcgccgtcagaggctagttcaaatttggatactgctggggctattggtggctcccctctcatgttggagtccctgccagagaccagtgatacccgaggatgtgaacaagaggttatgcccggtgttgttgtacggtcatctaagtggggatgcaagttctgaggtcggtgtcgagtcggagcgtggctcggatgcggacggtcgaaatggccttggtgaaggggaattggtgtcgagcgttgatggaggcggcgcccagaagagctcaaaggtgactggcgtcttgtctgaagaaggtgtggacgggatggaaacagccctggagccgtgtgtggcgtctgttggctccatcacgcaggttgaggaaggtgtggacaggatggagacgagtttggatgactctgaggcttcagacggctcaaccacgcaggattttgatactgacgtggagacggagtcgagcggttcaagtatagaagaacaagacatgggatacggagtgcacatcccacacacggaacaagcgatctgtgaagtggccaggggaaacaagagttcagaggtgaagagctctgacaggatgtcttcagtaaccctaccaacacttatattgncttcaggtgcagcnatgctacctcatccttcaaaggtgctgacaggnggtgaagatgcttattttatagc

SEQ ID NO: 387921 - DNA, 518 bp, Oryza sativa
ccacgcgtccggaatagatcaaatcgaatagatagaaatagtaaatttgaatggagacacctattctatgatggattttaacttaccctctattttcgtgcctttagtaggcttagtatttccggcaattgcaatggcttctttatttctttatgtgcagaaaaataagattgtctagaaccgacgggaccgaattttctcaatgtatttccacacaggatcataatacggatcttttgtagtgtaagtaatataatatggtatgttatgtggctctttctacacacaaatgcaaacccgctatggatggggattatggatgcggatataggctacgagcataaatgcatgcatatgcggaaccgggtatagcgagtttttttaagtggatcaacaaatactttttgaatagaaagtcaatgtatctaacccattattttacaggaggatctagttggcgaaggcgatttcagaatcaaaaaaggtaaggtcaaatcatttagcttattctctcaatt

SEQ ID NO: 387922 - DNA, 664 bp, Oryza sativa
  unsure (1)..(664): unsure at all n locations
cgtccgatcccggtcacccaccgtgcgcggcgcgtgggctgcattgcggaccggtatagcgagtttttttaagtggatcaacaaatactttttgaatagaaagtcaatggtctaaccaattattttacaggagtatctagttggcgaaggcgatttcagaatcaaaaaaagtaaagtcaaaatcatttagcttattctctcaantcaatcgaccgctgttagtatatctaatatggaatggcgatccgaacacatatggatagaacttctaaaaggttctcgaaaaagaggtaattttttctgggcctggattctttttctagggtcactaggattcttagcgggtggggcttccaggtatcttggtaagaatattatatctggacttccatctcaacaaattctttttttctcacaggggggcgtgatgtctttctacggaatcgcaggcctattcattagcgcttacttgtggtgcactattttgtggaatgtaggcagtggttatgaccgattcgatagaaaagagggagtagtgtgcatttttcgttggggattccctggaataaaacgtcgcgtcttccttcgattccttatgcgggatatccaatcaattagaattcaggttaaagaaggtctttttcctcgtcgtatcctttatatg

SEQ ID NO: 387923 - DNA, 551 bp, Oryza sativa
ccacgcgtccggagaaaaatcccatctttggtctcctccccctccctctcgctcgcatcttccccggagatgccgccgccgccgagtatgcgtccgccaccgccgcccaccactccctcctcggctcgcccacctgcctcgcgcgcccgcggcggcggtgctgccccgtgcgcgccgccgtcgccgtccaggccgaggcgcaggccaaggtctcgctcatccggattggcacccgcgggagtcctcttgcactggcacaagctcatgaaacccgagacaagctgaaggctgcacactcagagttagccgaggagggggccgttgagattgtcatcattaagaccacaggagacatgatcttggacaaacccctggcagatataggtggcaagggtttattcaccaaggagatcgatgatgcactcttgcagggaaggattgacattgccggccactcgatgaaagatggtccaccatatttaccagaaggcacgatattgccttgtaatctcccacgggaagatgtgagagatgcattcatatgcttgact

SEQ ID NO: 387924 - DNA, 822 bp, Oryza sativa
gcctctctcccaaatcccaatcccgacggcaagcagaagtgcagaaccctcgccgccgccgccgccgccgccgccaccgactacccatcgacgtcagaaattcaaatcccccctgtggcagtttgaacgtgtagtattttcttccatcaatccttttataagtgaaatgcttcttgtttcaaaatttaaacaatttccagcattttggcctggaagaagaaaggtttcatccacaggtttaatcagtccaataaacccccttaataccatatctgataagcatatgttcacctgacctatagttcctaaggttcaactcaaattgcgctgcttaattggccgatatggttatccctcctccagctagggctcctgcaatcaccaagttcctgaagccctatgttctcaagatgcatttcacaaacaactttgtgagcgcccaggtcatccacaccccatctgccacggttgcatgctcggcgagttcacaggagaagcttcttaggccaagcatggagtccacacgtgatgtcgccgcggcggcgaagatcgggaagctgcttggcgagcgcctgctgttcagaggcattcctgcggtgtcggtctccatgtcaagggaccagacgtaccatggcaaggtcagggccgtcatggattctcttagagccgccggtgtgaagttgctgtgatggaagccgaccatttgtagcatctctgcttgcagtttctgacatgtaaatatgttttgttgggtacgtactgccgtctctgaaatttcattttagcttgcataatgtcgtccactggaaaaaaaaaaaaaaa

SEQ ID NO: 387925 - DNA, 379 bp, Oryza sativa
  unsure (1)..(379): unsure at all n locations
ccacgcgtccgcaaggatcgtataaagaaggtagcctcaatgaagaaaaagaagtcaagcaaagagatggacacagcagcaaagattgctgcatctgaggccgcagcaaggagcgcgaagttgcagctgcgaagaagaaagagaagagccattacaaccagcagcctgtgcggtgaattactgcccagattttggatgtcgaaaactcctaatacaatccttgttcgctctggactcacaatagacaatgttggtccactgtacttatgttgacttggggttgtaggaggttccttctgaactgttcatcacaggaaaccttttgaatcttgattacatgcaaaaaaaaaaaaaaagggggggccgcnaccggggtggg

SEQ ID NO: 387926 - DNA, 746 bp, Oryza sativa
cggacgcgtgggcggacgcgtggggtcgcactcactcactcgcatcctctcctctcaaatactcctccaccttggcgtcatcaccaccactaaccgcaacgccactgcctgaaccaagaacactgccctcctccacacgacatggcttctcaagaagagaagacgagcgtcaagtcggaggaggcctcgtcggcggcggaggagcagccacctcaagctgcagctccgccgccgcgcaggggtgtgccgccggccaaccccttcgacttctcaaccatgatgaacttgctcaatgatccgagcataaaggagatggcggagcagatcgccaaggacccggcgttcacggagatggcggagcagctgcagaagacggtgcagtcgccgccggcgcggggggcggcgcaggaggctgcggcggcggcggcgccggcgctggacccgagcaagtacgtgtcgacgatgcagcagctgatgcagaacccgcagttcgtggcgatggcggagcggctgggcagcgcgctgatgcaggacccggccatgtcgtccatgcttggcggcctcaccaaccccgcccacaaggagcagctcgaggcccgcatcgcccgcatgaaggacgacccctccctcaagcccatcctcgacgagatcgagaacggcggccccgccgccatgatgaagtattggaacgacccttgagcgctgcagaaagtcgggagggcgatgggcgtcggcccgtccggcga

SEQ ID NO: 387927 - DNA, 1121 bp, Oryza sativa
  unsure (1)..(1121): unsure at all n locations
cggaatgctctgtgcacaaagtnaaggggtaaaggatccaagagtggggcagcagcaacttgccatggttgtcatggtgcaggaatgagaacaataacaagacaaattgggcttggcatgatccaacagatgaacactgtttgccctgaatgcagaggatcaggtgagatgataagtgacaaggataaatgcccgagttgtaagggaaacaaagtagtccagcagaagaaggtcttggaggttcatgttgagaagggaatgcaacatggccaaaagattgtattccagggtgaagctgatgaagctcctgatacagtgacaggagacatagtttttgtcttgcaacttaaagaccacccaaaatttaagaggaagtttgatgacctctttactgagcacacaatctccctgaccgaggctctgtgtggcttccagtttgttctaacccatcttgatggtcggcaactcctaatcaaatctaatccaggggaggttataaaacctggtcaacacaaggccatcaatgatgaaggcatgccccagcatggccgccctttcatgaaaggtcgtctttttgttgaattcaacgtggagtttcctgagcccggtccactcactcctggccaatgccgatcgcttgagaagattttgccaccacgacccaggaatcaattgtcagacatggagctagatcaatgtgaggagaccaccatgcatgatgtcaacatagaagaggagatgaggcgcaggcagcagcacaggcggcaggaagcatatgatgaagacgacgacgaggatgctggagctggaccaagggtacagtgtgcccagcagtaagaacaattcgatgccattcggactagacgatttagcgtctcttatcatccaaagaccgcggtagctactgagttcattctattcttttttttaatgtacccccacctaaagtagctgatgcatgttatgatttctcttttgtgggaaatgttatgctaccatttttgttgtcttaagattaaggagcttgctattagtcataatgatgttgcggcctcactacaattattacagcctgccgtattatataccaaaatgagctaatcctcgacaatacttcttac

SEQ ID NO: 387928 - DNA, 1638 bp, Oryza sativa
  unsure (1)..(1638): unsure at all n locations
nttgacgcntccganttctaggtcgcgtggcttgagcggtggtgacaccgctcgcctccgtccgcctcgcctccaccgagaggttctctctgccgccgattcagatttacagggagattatcttgtgatctgtaaacatgtttgggcgtgtaccgaggagtaacaacaccaagtactatgaggttcttggagttcctaaaactgcaagcaaggatgagctaaagaaggcataccggaaggctgccataaaaaaccatcctgacaagggaggggatccagaaaagtttaaagaattatcacaagcgtatgaggttctcactgatcctgagaagagagacatatatgaccaatatggggaggatgctcttaaggatggaatgggaggaggcagtgacttccataatccatttgacatatttgagcagtttttcgggggtggtgcctttggggggagtagctcaagagtacgcagacagagacgtggtgaagatgtggcgcatactttgaaggtgtctttagaagatgtgtataatggatctatgaagaaactatcattatcacgaaatatcctgtgcccaaagcgcaaaggaaaagggaccaaatctgaggctccagcaacatgctatggttgtcatggtgtaggaatgaggaatataatgcgacagataggactaggcatgattcaacatatgcagactgtctgtcctgaatgcagaggatcaggtgagatcataagtgacagggataaatgcacaaactgcagagctagcaaagttattcaggagaaaaaggtgcttgaggttcatattgagaaggggatgcaacatggccaaaaaattgtattccaaggtgaagctgatgaagctcctgatacagtgacaggagatatagtatttatcttgcaagttaaggtacatccaagatttaagaggaaatatgatgacctgttcattgagcgcacaatctctttgaactgaggcattgtgtgggttccaattcatcctcactcatctggacagtaggcagctcctaatcaaggcaaatcctggcgaaattattaaacctggtcaacacaaggccataaatgatgagggaatgccacaccatggccggcctttcatgaagggccgtctctttgtggaattcaatgttgagttccctgaatctggtgtactctcccgtgaccaatgccgggcacttgagatgatcctaccacctaaacctgggcaccaattatcagatatggacctggatcaatgtgaggaaactaccatgcatgatgtgaacatagaagaggagatgaggcgcaagcagtatcaaaggaagcaggaagcgtacgacgaagatgaggaggaggatgctccaagagtacagtgtgctcaacagtaagaagtgtcactttctggcgcaagtgatgatactccatgtaaactaagtagtttttggtgagactgttcattttagtgtattttgtactagttaaattaaatagtgaatgtctaagttgtgtcgtttgatatataagcttgtgctaacaacataaggctttcttggccttcataagatatactcctacctaggagaaagtggtggatgagcattcgtttctgtttttaaaaaaaaaaaacatatttacnn

SEQ ID NO: 387929 - DNA, 662 bp, Oryza sativa
  unsure (1)..(662): unsure at all n locations
aanagacngttaantagtcgttnattggggatggnggaacattaaacggganagttgncngntaancnagttgaattacctcattaagggaancaaagtggagtccaccngggnggcgccgtttagaattatgaatccccgggctgcagggatttggcacgagagatctatgtggggagaccaccatgcaggatnttaacatagaagaggagatgaggcgcaggcagcagcacaggcggcaggaagcatatgatgaagacgacgacgaggatgctggagctggaccaagggtccagtgtgcccagcagtaagaacaattcgatgccattcggactagacgatttagcgtctcttatcatccaaagaccgcggtagctactgagttcattctattctttttttttaatgtacccccacctaaagtagctgttgcatgttatgatttctcttttgtgggaaatgttatgctaccatttttgttgtcttaagattaaggagcttgctattagtcataatgatgttgcggcctcactacaattattacagcctgccgtattatataccaaaatgggctaatcctcgacaataaaaaaaaaaaaaaaaaaaactcgagggggggcccggtacccaattcgccctatagtgagtcgtattacaattnc

SEQ ID NO: 387930 - DNA, 894 bp, Oryza sativa
ccacgcgtccggaagatataatccggggacatgtatggttgggtttcatttgtgtatttggcggaatttggcatatcttaaccaaacccggcgcatgggctcgccgtgcatttgtatggtctggagaagcttacttgtcttatagtttaggcgctttatctgtctttggttttatcgcttgttgttttgtctggttcaataatacagcttatccgagtgagttttatggacctactgggccagaagcttctcaagctcaagcatttacttttctagttagagatcagcgtcttggagctaatgtgggatctgcccaaggacccactcccttaggtaaatatctaatgcgttccccaacgggagaggttattttttggaggggaaactatgcgtttttggcgacctctcgtgctccatggttagaacctctaaggggccccaacggtttggacttgagtaggttgaaaaaagacatacaaccttggcaagaacgacgttcggcagaaatatatgacccatgctcctttaggctctttaaattctgtgggtggcgtagctaccgagatcaatgcagttaattatgtttctcctagaagttggttagcgacttcccattttgttctaggattcttcttttttgtgggccatttgtggcatgcaggaagagcccgggctgctgcagcaggatttgaaaagggaatcgatcgtgatttggagcctgttctttacatgacccctcttaactaagattttcttatttatacctgttctactgtttttttctgttctggctcggttattctatctagccgagccattcattcctttctatgaaagaaagataaggggccagaccaaaaaaaacaaataaagaaacaaacgtattcaatacgc

SEQ ID NO: 387931 - DNA, 456 bp, Oryza sativa
  unsure (1)..(456): unsure at all n locations
ccacgcgtccgcccacgcgttcgtccacgcgtncgcccacgcgtccgcccacgcgttcgcggacgcgtgggtacaaactggcctttgagagcatatagtactcagaaccatgtcaatggaacacttagcgctgatggtttctttgacacggtgaatggtaccaactcatattcaggtccttcagataaccagaacctgtggttgcaagatgatggcttgacttcttctcatcaagtgggcgataacatgccattttatgacgcatcatctaatcacaaatgggtagatggaaaggatgattatttgaatttgaatgacctcctctacccgccagcagaaaatcaacccctgtttgatgctggggatgacctgatggcttacttcgatgccacggaggatgatttcaaatttgatattatgggcacagaagatcctaattcttaacttccagacatg

SEQ ID NO: 387932 - DNA, 1677 bp, Oryza sativa
tttaaccctagccgccgccgccgccgccgccgtcgtcgtcatggccacccaaacgggggcagtacaatgcgtatgtgatcacggacggcgacatggccaccgacaacagcagcagcctcgccctcgccgaggtgtcccagcgcgccgctccgccccgacgtggcccgcttcggccacaggctgctctcctgctgcaggcgccagccctacgccgtgtcccgccgcgccggccaccagaccccggcggagtcgtggggcacggggcgcgccgtgtcgcgtatcccccgcgtccccggcggcgggacgcaccgcgccgggcagggagccttcggcaacatgtgccgcggcgggcgcatgttcgcgccgaccaagacatggcgcaagtggcaccgccgcgtcaacgtccacctccgccgcgtcgccgtcgcctccgccctcgccgccacctccgtcccgtccctcgtcctcgcccgcggccaccgcatcgagaccgtccccgagctccccctcgtcatttccgactccgccgagtccatcgagaagacctcccaggccatcaagatcctgaagcaggtcggcgcctacgccgacgccgagaaggccaaggactccgtcggcatccgccccggcaagggtaagatgcgcaaccgccgctacatcaaccgcaagggccccctcatcgtctacggcaccgagggatccaagatcgtcaaggccttccgcaacctccccggcgtggatgtcgccaacgtcgagcgcctcaacctgctcgacctcgcacccggtggtcacctcgggcgcttcgtgatctggaccgagagcgccttcaagaagcttgaggaggtgtatggcaccttcgaggcgccgtcgctgaagaagaaggggttcatcctgccgaggcccaagatggccaatgctgatcttggcaggatcatcaactctgatgaggtgcagtctgtggtgaagccgctcaacaaggaggtcaagcgcagggagaagaggaagaacccgctcaagaatgtcgccgctgtgctcaagctcaacccctacttcggcactgcacgcaagatggccacccttgctgaggctgcccgcatcaaggccaggaaggagaagcttgactccaagaggaccaagcttagcccggaggaggctgctaaggttaaggctgcaggaaaggcatggtacaagaccatgatctcagacagtgactatgctgagttcgacaacttctcgaagtggctcggagtgacgcagtgagcgttgtcttgttttaagttttgagtagcagcgttaccggatcttatctcaaggatttatcaatctgtttttacctgaacatctccataagaagttatctgtgggattttgagactagtttctctgttttgttaatgtgctgtcgtgagaacatagagtatgtggtttggaccagctatctaaattatgtatgcacttccatgttctctgtgatgtcctgtattttgatgctgtgatcttgtatcgctgtatcatattgttctagggctcatggcttactcggtccccatggcgctgattccattcacagtgttcagcctacttaaacatatttgcaattttggttagatgagtttgttgtgaaatctggtcagtgggcatgcctagcaagcctaaatcaagttgagcgagcctcaa

SEQ ID NO: 387933 - DNA, 423 bp, Oryza sativa
cgccaccacaaaaccctagccgccgccgccgtcgccgccgccgccgccatggccacccaaacccgccccctcgtctccgtcaaggccctggagggcgacatggccaccgacaacagcagcagcctcgccctcgccgaggtgttccgcgcgccgctccgccccgacgtggtccgcttcgtccacaggctgctctcctgcaacaagcgccagccctacgccgtgtcccgccgcgccggccaccagacctcggcggagtcgtggggcacggggcgcgccgtgtcgcgtatcccccgcgtccccggcggcgggacgcaccgcgccgggcagggagccttcggcaacatgtgccgcggcgggcgcatgttcgcgccgaccaagacatggcgcaagtggcaccgccggttaaacgtcactcgccgtttt

SEQ ID NO: 387934 - DNA, 774 bp, Oryza sativa
  unsure (1)..(774): unsure at all n locations
nngtaatacgactcactatagggcgaattgggtaccgggccccccctcgaggtcgacccatccgatcactcttcacccgccgcgccgcgaactccggaaccgaacgccacacgcgccttcctctcacttaatccgccatgcttcctcctagggttgccccctcctctctggccgccgccgccgccgcggcgcctacctatctcgccgccgcggcctcgacccctgcttccgtctggctgcctgtgccgcgtggagccggagccgtggcagtgtgcagggccgccgggaaagggaaggaggtgctcagcggcgtggtcttccagccattcgaggagctcaagggggagctctccctcgtcccccaggccaaggaccagtctcttgctaggcaaaagttcgtcgacgagtgcgaggccgccatcagcgagcagatcaatgtggagttcaatgcatcgtacgcgtaccactcccttttcgcctactttgaccgtgacaacgttgctctcaagggattcgccaaattcttcaaagaatccagcgatgaggagagggatcacgcagagaaactcatgaagaccagaacatgcgtggagaaggttcggttcatcattgtaaaccttnaaagttgccatctagaaagggtccttaatttttgnttgncttgtttgaaatttaatggagttnaactnaanntgataagtaattccanttccntttttaggaattttnggngattgcncnaaangttttnttttccctgaagngaagaatntt

SEQ ID NO: 387935 - DNA, 646 bp, Oryza sativa
  unsure (1)..(646): unsure at all n locations
ccgttagatcatcttcaccgccgcgccgcgaatccggaacgaacgccacacgcgccttcctctcacttaatccgccatgcttcctcctagggttgccccctcctctctggccgccgccgccgccgcggcgcctacctatctcgccgccgcggcctcgacccctgcttccgtctggctgcctgtgccgcgtggagccggagccgtggcagtgtgcagggccgccgggaaagggaagggaggtgctcancggcgtggtcgtccagccattcgaggagctcaagggggagctctccctcgtcccccaggccaaggaccagtctcttgctaggcaaaagttcgtcgacgagtgcgaggccgccatcaacgagcagatcaatgtggagttcaatgcatcgtacgcgtaccactcccttttcgcctactttgaccgtgacaacgttgctctcaagggattcgccaaattcttcaaagaatccagcgatgaggagagggatcacgcagagaaactcatgaagtaccagaacatgcgtggaggcagggtgcggctccagtccatcgtcacacccttgacagagttcgaccatcctgagaaaggggatgccttgtatgctatggagttggcttggntctcnaaaacttgttnatt

SEQ ID NO: 387936 - DNA, 471 bp, Oryza sativa
ccacgcgtccgattaatctcatcactcttcacccgccgcgacctccggaagcaaacgccacacgcgcctctccgccatgcttcctcctagggttgccccggccgccgccgccgccgcgcctacctatctcgccgccgcggcctcgacccctgcttccgtctggctgcctgtgccgcgtggtgccggacccggggcagtgtgcagggccgccgggaaagggaaggaggtgctcagcggcgtggtcttccagccattcgaggagctcaagggggagctctccctcgtcccccaggccaaggaccagtctctcgctaggcaaaagttcgtcgacgagtgcgaggccgccatcaacgagcagatcaatgtggagtacaatgcatcgtacgcgtaccactcccttttcgcctactttgatcgtgacaacgttgctctcaagggattcgccaaattcttcaaagaatccagcgatga

SEQ ID NO: 387937 - DNA, 380 bp, Oryza sativa
ccacgcgtccggtgagaggcgcgctgggaaactatcttctccacaaataactatctcctcctcctcctcctctccccatcagctccgccgctcgccgccggccaccctccccccttccatggtacaccatgcttctggcggcggcaactgccacagcagcgccggtgtcgtctagctctagcttcttcgccgcgacgacaagagccaccaccaccacccgcttcactgcccagctccagctctcgctgccacgccggtgccgatcctggtggggcaatgggaaagcgcgccggagcagccgccgccgcagccaccattgctgggccggtggcggcgccccgaccccggaggaccacatggacgaagctgccgccgggaga

SEQ ID NO: 387938 - DNA, 843 bp, Oryza sativa
ccacgcgtccgccacgcgtctgattgctcgctcgctcgctcgctgcgtcgccgcactttctccacagatttttctgctgctgttgcttcgtcgcctcgcccgcggattccgtactactaccggagggtttggttggttgatttggtttggtttagccatggccgggagagggaaggcgatcggctcgggcgccgccaagaaggccatgtcgcggagctccaaggccgggctccagttccccgtgggcaggatcgcccggttcttgaaggccggcaagtacgccgagagggtcggcgccggcgccccggtctacctcgccgccgtcctcgagtacctcgccgctgaggttcttgagctcgccgggaacgcggcgagggacaacaagaagacccgcatagtgccccgccacatccagctcgccgtccgcaacgacgaggagctatcccgcctgcttcggcacggtcacaatcgccagcggaggcgtcatgcccaacatccacaacctgctcctccccaagaaggccggcggcagcgccaaggcggcggccggcgacgatgacaactagattctgacgcttcccggcgatggcggcggcggtggatgtggatgcagtggatggatggatgatatgttgtgtagtagtagtagtgttctaggatgcctaggtgttgcgttgatctctagtaggatctgaattagatgcttaattgtgcttgtaccgatgctaaaactaagaaggtgcacttgtgtatgatggacagggggattagttgctctgtaattcgttacctgtgttctatataaaagtatcatcctttcgatgaaaaaaaaaaaaaaaaaaa

SEQ ID NO: 387939 - DNA, 490 bp, Oryza sativa
gactagttctagatcgcgggcgccacgccgccgccgcctcttgacctagcgccgccgccgctgccgctgccccttctcgccgccggcttcttcttcttcttccttgtgtagcgcgtgcgcctctcctctcctctcgtcggcgagtgatatggcgggacgtgggaaaggcgatcggcccgggggccgcgaagaaggcgacgtcgaggagctccaaggccgggctgcagttccccgttggcaggatcgcgaggttcctcaaggccgggaagtacgccgagcgcgtcggcgccggggcccccgtctacctcggcgccgtcctcgagtacctcgccgctgaggtgctcgagctcgccgggaacgcggcgagggacaacaagaagacccgtatcgtgccgcgccacatcacagtttgggtgcgcaacgacggagagttgaccaagctgctcggcggcgccaccatcgccagggggcgggtgatgcccaacatcca

SEQ ID NO: 387940 - DNA, 744 bp, Oryza sativa
  unsure (1)..(744): unsure at all n locations
aattcggcacgagaagccgccgaaccctcgcttctcggggacgcggaggccacgccggccaccttccactgcctcgagctcctctccttctccgggttggtgtggcgtggagatccatcctggccgacctctttcgctaggcgagatgtctgagtaccagaacgtcgttgggggtaggctcaagctgaaggggaaggcgctggatgtgaaggaagggggagtcaagaagaagaaaaagaagaagcagcaccgcgaggagtcatctgaagccgggcacggagagcttcaccaaggtggaagctctgaagtaccagctgaccctaatgatgaattgactgaagctgataagatgggagaagaagggaacctgcaaggcgactatgatcacctcaccccagctgagaggcgttacatggagcagaagcagaagattgacatgcataagctagccaaagtagccaacaagtcacacagggaccgcatccaggacttcaaccaatacctggcaaatcttagcgagcactacgacatcccaaaagttggccctggttaactttgcctattcagagcttcgcaggaatgcttcctatgctgtacccatccagccatctgttagcttgtgatgctcctacctgtattgttctaaaacatttggttgtcttcgagtgttgtatttcgaaaacccaaaccatgtttaattcaagtgttcgtattctgagtactgtaaaaaaaaaaaannnnnnn

SEQ ID NO: 387941 - DNA, 814 bp, Oryza sativa
aacttccctcaatcaggagagctcatggataagatatgcaagcaagtggataagatcagcaagtattatgaatttcactacaacactagattagtgaagccatcaatcctccactttcagcttaggaatttgttatgggcaacgtcgaagcatgatgtctacttcatgtcaaattccacagtaggccactggtcatcattgtctcacaatctatcagaggttcttgatttctccgggcatgttgctcctgcgcagaaacaccctggcagtttactggaagggtttagcggggttcaagttagcacactttcagtgaatgagggtttattggttgctggtggttttcagggagaactaatttgcaaggttgtgggagaccgtgatgttaagttctgcacaaggacaactttaagcgacaatgctatcacaaatgcgatagatatacacagatctgcaagtggaagcttgcgtgttaccgtgtccaacaatgattgtggtgttcgtgaatttgacatggaaacatttcagctcttgaaccacttcagttataactggccagtaaatcacacatctgtgagccctgataggaaacttctggcagtagttggagatgatcgggatgctcttcttgttgattcaagaaatggaaaggtaacctctaccctagttggccatctggactattcgtttgcttcggcatggcaccctgatggccgcaccttcgcaaccggtaaccaagacaagacctgccgcgtctgggacgtacgaaacctgtcaacctccctctcagtacttaggggcaacattggcgcta

SEQ ID NO: 387942 - DNA, 694 bp, Oryza sativa
  unsure (1)..(694): unsure at all n locations
ccacgcgtccgcccacgcgtccgcccacgcgtccgcccacgcgtccggacaggtggtgcacttccggtctttggagaaaccaaaggaggatgatttttgtttggaattgtcgaagcttcatacttatgatgatgttgttgagagagttgcacgccaacttggcttggatgatccatcaaaaattcgccttacatctcacaactgttattcccagcaacctaaaccacagcctatcagatatcgtggtgtagagcacctattggatatgcttgttcattacaatcagacttctgacatcttgtattacgaggttctggacattccactgccagaattgcagtgtttgaaaactcttaaagttgcattccaccatgcaactaaagatgaggttgtaatccatagcataagactaccgaaaaacagcaccatcagtgatgtgattactgacctaaaaaccaaggttgaactgtccaatcctgatgctgaactccgcttgcttgaagtattctatcacaagatttataagatatttccacctcacgagaaaatagagaacataaatgatcagtactggacactacgtgctgaggagataccagaggaagagaagaaccttggcccacatgagtcgcttgattcatgtttaccatttcatgaaagatcctaatcaaaatcagattcanaatttttggag

SEQ ID NO: 387943 - DNA, 537 bp, Oryza sativa
ccacgcgtccgcttactcaggaattctatcggcttcgatcaagcctcagagtgaagcaacaacatgcttcgctccttgacctaagagattttgacagagcaaagtttgatgttgagagtggagactcagccgatcaagctcttcttagagaacaagctgcaatcagtaggagttctggacagatggataatgtgatatcacatgctcaagcaacgctaggaactctcatgtcacaacgatcaacatttggtggcatcactacaaagataagcaatgttagtagccggcttcctacgatcaatcatatcctcgcgtcaattagaagaaagaagtcgatggacacaatcattctttcacttgtcgcgtctgtctgcgcctttcttattctcgtctactggttgtcaaagtaggggctgtcaacttgtcatagcaaaggcattagggtgttgtaagtttggatcacactgtcagtgcagataatcgagattggtgtttgtacaatattgattcaatgttatcctgttttgatggttcttc

SEQ ID NO: 387944 - DNA, 456 bp, Oryza sativa
ccacgcgtccggatctactcagtgtcaactcggcattactttgctttaggagctcttgtatctgaggaactctcctacaaactcaaagagttgcccaaggtccgctgggttcttccagactcatacctggatgtcagaaataaggactacggaggagaaccttttataaatggggaagccgttccttatgaccctaagtaccacgaggagtgggtgagaaacaatgcgcgtgccaatgaaagaagccggcgcaatgataggcctagaaactttgacaggtcaaggaattttgagaggagaagggagaacatgcagaacttccagaacagagatgtgcctcctggccagggattcaacagccctcccccaccaggtcagggcccagtcccgcctcgtgatgctccttcgatgcaccatgctcagggtaatgttcctccaccttcaccaccaaatgca

SEQ ID NO: 387945 - DNA, 592 bp, Oryza sativa
ccacgcgtccgcgcctccctcgcatcgcccctccccgaccccgccgagatcggagcaggcgccgcctccctcctcccgcctcctcctccgccatggcgcgcgtctctgctcggggggttcaccaagtcgctggccatgacggtgctctcggagatcggcgacaagaccttcttcgccgccgcgattctggccatgcgctatccccggaagcttgttcttgctggttgtctcacctcattaacagtgatgacggctctatcagtttcacttggttgggttgcgccaaatctgatatcacgcaaatggactcatcatgtgaccactctgctattctttgtgtttggcattttgtcattgtgggaaggcttcaaagaagatggagattcagaagaattggctgaagtggaagctgagctggatgctaattttaaaagcaacaaagcagaatcgaaaagtaaatctaaggcaaatgatgataaaaagaagcagcaaagaccatttgttttgcagttcttctcaccaatctttataaaggcattttccattacattctttgggagagtcgggtgataagagtcaaattgctactatt

SEQ ID NO: 387946 - DNA, 515 bp, Oryza sativa
ccctaacctccgcctcctcctcctccccctcctcccatgcccgcatcgagatcttagccgcgccggagatcgagagggaggagcggcgacgcgggcgcccccgatccctcctcctcgccgccgccgccgccggcggcgccggagcagcagcagccgacgacgacgacgaccgccgcagcagccgatcgggggagggggaggcggagggactctacggaggcggactccgggaagctcttcgtcggcggcatctcgtgggagacggacgaggaccgcctccgcgagtacttcagccggttcgggggaggtcaccgagggccgtcatcatgcgggaccgcaacaccggccgcgcccgtgggttcggtttcgtggtcttcaccgacgcaggcgtcgccgagcgggtcaccatggataagcacatgatcgacgggcgcatggtggtagcgaagaaagctgttcccagggacgaccagagcatcaccagcatgaacaatggcagcagcatagggtcacct

SEQ ID NO: 387947 - DNA, 1047 bp, Oryza sativa
tatagggaagaaatacaaaggattaaatcggatttggagaaggaaaaggctttctttgaagaggagaaacgggaagcaattcaagcccaacaagatctagcaataacacaagcagatagagatgagttgcttactctgcagatgaaacttaaagaagaaattgacagcctcagagcccaaaaaagggaactcatggctgatgcagataggctgcaagccgaaaaggaaaggtttgagattgaatgggagctgattgatgaaaagaaagaggagctacaaaaggaagcgatcagaattgctgaagaacgaagagcaataactgagtatctgaagaatgaatctgatatcatcaaacaggagaaggataatctccgtgttcagttcaaaagtaattcagaaacactctctcgtgaacacaaagagttcatgagtaagatgcagcaagaacatgcaagttggctgagtaagattcaacaagaaaggcaagatctgaagagagacattgatatccagagggtggaattgctaaattctgctaaggcaaggcagatggaaatagattcttatttgagggaaagggaggaagagtttgagcagaaaaaggccaaggaactcgaacacatcaattctcagaaggagatgatcaacacaaaattagaacatgttgcagttgaattgcagaaacttgaggatgagagaaaagaagctactttggaacgtgagaggagagagcaagagttgtctgagataaaaggcactattgaagccttgaataatcaacgggagaagctgcaagagcaaagaaaactattacattcagaccgagaagcaattacagtgcaaattcaacaacttaatgtgttggaagaactgaaaattgattctgaaaataagcaactgtctttgttacaacatgataagtcaaagctttgaagtgatataaatgtgaaagacaatcatcatgataactcccattcttcaccaaagcaacgttttggaaggaaactagacctttctccagtctcaacaccgatttcttgggttcga

SEQ ID NO: 387948 - DNA, 464 bp, Oryza sativa
cgaagagaaagcatggcaatggcaatggcggcgatgagaggggcggcggcgagcttgggtccgggcgctgtgtcttggaactcgaagcgcttcttcctctcctcctcctccaccaccagccgcccccatcgtcgtcgtctacgcgccttcccgagctcggagcaaactctggaggagcttaacccttccgttgagctgctcaggaaaactgcggaggccgttggcgatttcaggaaaacacccatctacatcgtcggaaccgactgtactgccaagcgcaacattgcaaagctccttgccaattccatcatataccgctacctctgcagtgaagagctgctggaggatgttcttggaggcaaagatgccctcaatgctttccggggaatccgacctcaacggctacctcgaagtcgagacttaaggcctgaaacagctcacctccatgggcagtctcgtgcttt

SEQ ID NO: 387949 - DNA, 2092 bp, Oryza sativa
tttgtccgttctcctcctcccttctcgcggaggccgccgcaaccaaaaaaaaaaaagtctaaccctagatccaggccccgcgtctccggcgatctcccggccatggcgactcgccgggccctctcctccctcgtccgcgccgcctccaggctccgcggggcctcgcccgccccgcgcccgcgcgggccgctccaccgaccgtcgccatcggggtacctcttcaaccgcgccgccgcgtacgccacggccgccgcggcgaaggaggcggcgcctcccgcgcccgcgacggggaaggccacgggtggaggtaagatcaccgacgagttcaccggcgccggcgccgtcgggcaggtgtgccaggtcatcggcgccgtcgtcgacgtgcggtttgacgaggggctgcctcccatcctcacggcgctcgaggtgctcgaccacaacatccgcctcgtgctcgaggtggcgcagcaccttggcgagaacatggtgcgcaccatcgctatggacgggactgaggggcttgtccgcggtcagcgcgtcctcaacaccggctccccaatcactgttcctgttggcagggccacgcttggacgtatcatgaatgttattggtgagccaattgatgagaagggtgacataacaacgaaccacttccttcccatccatcgtgaggcgcctgcttttgttgagcaagccacagaacagcaaattcttgttactggaattaaggttgtggatctgcttgcgccctaccaaagaggtggaaagatcggtctttttggtggtgcaggagtcggcaaaactgtccttattatggagttgatcaacaatgttgctaaggcccatggtggtttctctgtgtttgctggtgttggtgaacgtacccgtgaaggtaatgatctttacagggaaatgattgaaagtggtgtcatcaagctaggtgacaaacagagtgaaagcaagtgtgctcttgtctacgggcaaatgaatgagcccccgggtgctcgtgctcgtgttgggttgaccggtttgactgttgcggaacatttccgtgatgccgaaggacaagatgtgcttttgttcattgacaacattttccgtttcactcaggcgaactctgaggtgtctgctcttcttggacgtattccatctgctgtgggatatcaaccaactcttgctactgatcttggaggacttcaagagcgaattacaactacaaagaagggttccattacatctgtccaagctatttatgtgcctgctgatgacttgacggatcctgctcctgctactacttttgcacatcttgatgctactactgtgttgtcacgacagatctctgagcttggtatttaccctgctgtcgatcctctggactccacatccagaatgctctccccccatgtattgggtgaggatcactacaacactgctcgtggtgtccaaaaggttcttcagaactacaagaatcttcaggatattattgccattctgggaatggacgagctcagtgaggatgataagttgacagtcgctcgcgctaggaagattcagcggttccttagccagcccttccacgttgccgaagttttcacgggtgcacctggaaagtatgttgagctgaaggagagcgttcaaagtttccagggtgtattggacgggaagtatgatgaccttcctgagcagtcattctacatggttggaggaatcgatgaggtcattgccaaggcagagaagattgccaaggagtccgcttcataagcgatgcaatttttaacatttggaggtcaacatgttgtgccttttatgtttgttagccaggacatgtacttacatgcaggaggcccggccctgctgatcgatgtttttcccctccacttttttccaaataaggatttgcagtgacctatttgtttggcttactgcccttcaaggaagaattgagttctctttttgtgtgatgtgcggccagtccggcagtccgtgaacttgttacttgctgaaaacactgaaatattggtctcccatacaacacctctgtgaaaactcctcatttatacttccaacacgccttgagatcctaaaacacaaa

SEQ ID NO: 387950 - DNA, 633 bp, Oryza sativa
cggacgcgtgggtgctcgtggtgtccaaaaggttcttcagaactacaagaatcttcaggatattattgcaattttgggtatggacgagctcagtgaagatgacaagttgaccgtcgctcgcgcaaggaagatccagcgtttcttgagccagcccttccatgtggctgaagttttcacgggtgctcctgggaagtacgtggagctgaaggagagcgtcaacagtttccagggtgttttggatgggaaatatgatgaccttcccgagcagtcattctatatggtgggaggcattgaggaagtcattgctaaagctgagaagatcgccaaggagtcggcttcataagatctcttcattgttaagttctgtacaagttaaatttttggattctggtttctatatgcccgttctgtagccaggacgtgattacaagcaggggtgacatcttctgatgagcgatgtttttttgtcttccttttctccttttacccctaataaggaaccgcagtgacattgtattgtgctgcacaaaagtactcggaacttcgaaagcatgtgtcctttataatgcagatccatgaagcataggatcattgagttcttgtttttagttggtcaaaaaaaaaaaaaaaata

SEQ ID NO: 387951 - DNA, 596 bp, Oryza sativa
tcggctccaacttcacccacttctcattcaccatggtgcctacaagatggatctactgcgcctcccaccttctgataactgccttgctcacaagagaatcgtatgaccacttctccaccaccacttcatgctgcatccttaccacgtggaatggttacaatgcgtcgcgacatcactacgtgcagttcttctcatgtgtcacttcttgtttctggtagcgcacaaacttgttttgatgaccagcttttggaaagccacatcaaggatgagatcattgagaagagccaactaatccatgctctgccaaataatgatgataagttatcatcaagtgtgcctttcacttcaatgtccacagcttgtggggcttctacctttgaagattggatgacccttcctaagtgggcagcacaggttctgaagcatttatcgccagacatctcattcaggagcttagtggcacttggaattggttgtaaatggcacgctctgtgcttcatgtgataggcgagatgcataccgccttctttttttttgtacaaatcaactcaaagatttggctattgaaaaaggcccatactttcatctgccaagat

SEQ ID NO: 387952 - DNA, 435 bp, Oryza sativa
gccactgcgttcaaagatcccatagactagaaagataagtgtcattttcccaccttcttactaccttttcctattcttgaacacaaacatttgctacctcaaaatgatttttattcatgtgatccctaagaatattggcatgcagtctgcatacattagatgcttacaccaatactttaattagtaggtcgcgtgggccgcctgtaaacaaattacattcatgtaggtgatgactgatgaatgagagtgagtgcatcatgcactgtgcatgttcatgctcaatgtctgggcaaagagatcaacttgcatctggcaatcaaactagatatctattccattatctaaacatcttgccatgagctaatctgctaaaacagagaaggaatctgctacttctactggatcttctttcacactggaattcaattagttcag

SEQ ID NO: 387953 - DNA, 456 bp, Oryza sativa
ccacgcgtccgctgatttaacactgatggcattggcaggaataggcctgcgtcacgataagaaattaggttttgcgtcttgtgaacgaagaccaggtgctactgaaggggtaaatgtactaatcgaaaaagaaaaccaggatggacaatgggcatatggtatcacttgcattgaatacactgagtttgaaaaatatggcatcccagaaccaacagtaacaaatggcagtttgcaggctaactatccagcaaatacaaatatactatatgttgatctgcagcctgcggaggaagttggttcgcgcaaaaatgctagctgtttacccggagtggtgctaaatttgaaaaaagctgtgtcatacttggatcatctgggctttgagtgtagtgctgctggaggcaggttagaatgcacgatgcaaaacatagcggataattttatgaacacatataacta

SEQ ID NO: 387954 - DNA, 463 bp, Oryza sativa
tgcttaatatggtgcaaaggtgattggttctgcaaaggatagggatagaattccaggcattgacataactcttagtgagggtgacacatggatgtttgctggtcatcaagttcttgtaatggaaactcctggtcatacatcaggtcatgtgtgctaccacttccctggatctggagcaatatttacaggggacacattgtttagtttgtcatgtggaaagctttttgaagggactccacaacagatgtactcttcactccagataattatagcacttccggatgagacaagagtgtatcgcggacatgaatatacattgagcaattcaaagtttgccttgagcatagaaccaggaaattaagacttacaggaatacgctgcaaatgccgttgatctccgcaggaaggatacacccaccggtgccaacaacaattggggagagagaagcaatggcaatcctttt

SEQ ID NO: 387955 - DNA, 574 bp, Oryza sativa
ccacgcgtccgcccacgcgtccgaagctactgatcttagctgagctagagttccagtgatcattaaggaaagaattagcacttggtcaatcacacataggtaatgaagattaattgcgatcgagatcatatcactagctagctagctgtgtgtacggagtacggtgccatggcttccaggacttggcattgctggttgttgctcgtcttcttcctcctctccgacgacgcctccgggcagctgtcgacgtcgtactacgcagatagctgcccgtcggtggagaaggtcgtgcacgccaccgtggcgagcgccatccaggccgagcgccggatgggcgcctccctcatccgcctcttcttccacgactgcttcgtccagggctgcgacgcgtccatccttctggacgacgtgccggcgaccgggttcgtcggcgagaagaccgccgccccgaacaacaactccgtgcgcgggtacgaggtcatcgaccagatcaaggccaacgtcgaggacgtctgcccgggcgttgtctcctgcgccgacatcgtcgccctcgccgcgcgcgacagcaccgcct

SEQ ID NO: 387956 - DNA, 829 bp, Oryza sativa
ttatgtaaggcaagaaccccagttgagagtggagatggccattttgttcaggcactaggcagtgggtaggacggtgaggagtgtgtcctgcactcctgcttcccctgacgatcgatccccatgcgtgccgaagcatctgatacttttgctgtgctgttctttaatttaccctgatacttttggatatctgaagcagtagagctcgttcactcaaacaggctagcctgttttgctttctggtaagaacttaattaactagttgagatcgacatgcatggatgcgtgaatctattgttgcattttttctaatggatagctagatttgttccagctttttttttgtcaattctgttacatttgcagtgtcttcaacttctgcatcattcttctctattcttccttcactttctttcttgaactagaaaagcaaaccgcggtcccgtggccccctcttctacataaacgaaaacagcttgttgactggctccctagagctttttgtaagttgatcatcgaagtagctagttctcttcactgatcagtcatcactgttctatgttctatctgcattttccttgattttgtacttttcctgaacgaaaggacaatccttagccatcataatgctatgatcgacttattctgaagtcatccggcctcgatcctcttttgtttcggtgagatctgtaatggtttaagaaaattatggatctctgaaaaataagaaacatctagtagtatatgaaattaagaaatgtcggaccacgtcaaatcctactggtatcatataccagataactaactttttgaatggaaccaaacaccagat

SEQ ID NO: 387957 - DNA, 604 bp, Oryza sativa
  unsure (1)..(604): unsure at all n locations
tcgacgatccccatgcgtgccgaagcatctgatacttttgctgtgctgttctttaatttaccctgatacttttggatatctgaagcagtagagctcgttcactcaaacaggctagcctgttttgctttctgacacagcacacacagctacaaatcgactgtaattaaggtacgtatatataggtgacaatggacaaccagcaaggttttgcaggccatggcggtgcggcagctancttccctcctgcacctccaagctccgaatagtgatgatcccatatggttccatgcatgcatcgctgaggtgctagctagctactatagctgctcaaatcaaatgctcaatgtgtcggtaattaattaatgtggtacgtattaacttaaccgatgtacgtaatggacgctcaagctaattaagggatgtacaatttactaattaatttaatttgtaatatatagccgattaactagcaaggtgacccagtactatttgtaatttcttttcccgttatgctactaattgtggacgcacaaaccattaccggaacagaaattactactgatgaattactatatataataagcttatataaaaaaaaaaaaaa

SEQ ID NO: 387958 - DNA, 525 bp, Oryza sativa
ccacgcgtccgcccacgcgtccgcaaacggccacctcactctccctctctctatctctctcttcacatttccattccaactcaatttcctcctctcttctcctctcctcttctcacacgaagccaagaaagccaagaaatccatccatccatagcaagggagctagctcgccggcggcgatgggcaaggactgcggcaaccacggcgacgacgacatccggcaggcgtgccggcggctgctgacgatcctcttcggcctcgccctgatcgtggccatcatcgcgctcatcgtctacctcgtgctccgccccacccaccctcgcttcttcctccaggacgccacgctccgccagctcgacctctccaattcctccacctccggcgtcctctccaccgccctccaggtcaccgtcgcctcccgcaaccccaatgaccgcgtcggcgtctactacgaccgcctcgacgtctacgcctcctacaagtaccagcagatcacgctcgccgcctcgctcccgccggtgtacc

SEQ ID NO: 387959 - DNA, 613 bp, Oryza sativa
  unsure (1)..(613): unsure at all n locations
ccacgcgtccgaagatattacactaactcaccttatattagtacgagtagaagcaatgtagatcttgcaaatatgtcatcacaatggtctcacactccgcaccaagcatccatgcattctctaagaagtggccatttgtctctaccgatcaacatcaggtatacaataccacatgtttctcgttctgactatggatctgccagcctgggtttatcccatgattcctgttctcaccatggatctccgagttattatcatagctctttgggccagcaacgttcttacctgatgcaccgcaccgagtcagggccaagcctgtctactatggtgctccagtcgccacaatagagtcagtagcagtacaatggcgaatcagcagaagtctatcagctgcggtttaactcgatcattacgtcaggcctatgtacagcattgtcttgattctgatggaagcttgtctgctgtgacatggatcagtcgctccaagatgctgattgatctacgaagntcactgtttcatgagcatttgtgcacgcccctgctagatttgtctctgggagatgcaaataaaacagaaaaatcctatgcgacacataactggcaggttcatgca

SEQ ID NO: 387960 - DNA, 808 bp, Oryza sativa
  unsure (1)..(808): unsure at all n locations
tcntgtgaagcgtgatgaattgactctagagggcattaaacaattctttgttgctgttgagaaagaagaatggaagtttgacacgctttgtgatctttatgatacactgacaatcacccaagctgtcattttctgcaacacaaagagaaaggttgattggcttacggaaagaatgcgcagcaataacttcacagtatcagctatgcatggcgacatgcctcaaaaggaaagggatgccattatgggtgaattcaggtctggtgcaacccgtgttctaatcacgacagatgtgtgggctcgaggcctcgatgttcagcaggtctctcttgtcataaattatgatctcccaaataatcgtgaactttacatccatcgcattggtcgctctggacgttttggtcgcaagggtgtggccatcaattttgtcaaaaaggaagacatccgtatcctgagagatattgagcagtactacagcacacagattgatgaaatgccaatgaatgttgctgatctaatttgagtgcttgagtggcacaatcatgtttttgatcatctggtctggcaacaagtgagcttgtttgttgtgattttggttgacatgttttgccgagactgttgctgtgaacctaaaaagggttgcgagtctaacactagtgattggtttcgtttcctctttggcttgtggcatgatctgtatatattttagcgccagctcatgtaacactattattgcatttcttctctgaacgcgtgactttgttaactatattcatggcaacaaggaatttgatgttggtttctaaaaaaa

SEQ ID NO: 387961 - DNA, 791 bp, Oryza sativa
ccacgcgtccgctaaagtactaggaattccaacagccaacttacctgcagaaaacttctccgacgtactatcagagcatacatcaggggtatactttggctgggctggactttcaacgcgaggtatatttaagatggtcatgagcattggctggaacccttattttgataacacggagaagactattgaaccatggttgcttcacgattttggtgaagacttttacggagaggagctgcgccttgttattgttggttacatacgacccgaggccaactttccttcacttgagagcttgatagagaggattcacgaggatgcaaggatatcagataaggccctgaatttaccattatacgccaagtataaagactcgccgtacctaagaaattccttgaaggaggacaattctgctaacgggaaccagtcagtgatagattccaagtgattcaacgttgtgaagtgaaagacatgaagaattctctttcgcagcgttgttgatgcagaaagagcactactgttcttgtgcttgtactgctgcattatgttccatgaatacttggaacatgctcttgactacaatgagaataccagtaagggtctatgttcgtcagaaagttgagttagaagcagccaactactatcttctcaaatggtcacctactcctagaatggaatgcacaagatgtctgaaaatttgcacgtgtgttgtggctctgaccatgtgaagcttaggctgtctatctaacgttctgaattaacttttctaatatgcattgagattggtattt

SEQ ID NO: 387962 - DNA, 521 bp, Oryza sativa
ttcctcttaagaatggcgcgaatgctgggatggatgacgagatgctgcagctgtgggaagctgcccagaggagctgcaaaaaccaaacatccaaatcatcatcagctgcgcacgacatacaagcggttgaggaggtcgaagactgaggaccctccctctgagctagcaaggggaggagaccttggaatcgataagcttgaggtgccgacatcatctcgagagcctcatgagcaacggagcaacactgtactggagaagctctcttctgatgctcagaggttgcagagcatccaagcgagcatcaaggagctgcagcggaaaatggggagcccatcaaacgggaaatcgcccatgaactccgaatacaacaccgtcagcactcagctacttcgataccgaggatgtgtttggacagatcattacacaccaatgcaagcggtgagactatctcctataatagatgaccgacagaggtatcatagagaattcgcagtcaaagatgaactggggtgactgactaa

SEQ ID NO: 387963 - DNA, 870 bp, Oryza sativa
  unsure (1)..(870): unsure at all n locations
ccacgcgtccgcggacgcgtgggcggacgcgtgggcggacgcgtgggtttgaaaactgctaatctccttatggatgaaaatgggacagttaaggttgctgattttggtgttgcacgtgttaaagctcaatctggagtaatgactgctgaaacagggacatatcgttggatggctccagaggttatagaacacaagccctatgatcacaaggccgatgtttttagttttggaattttgatgtgggagctgctcacagggaagattccttatgagtacctgacaccattacaagcaagctgtaggtgtggttccagaagggattacggcctacaataccaaaaaatgctcatgcaaaactttctgagcttcttcagaaatgttggcaacaggagcctgctgaaagaccagatttctctgaaatattagaaactcttcagagaatagcagaggaggttggtgatgagcatgatggaaagcacaaggagaaaatactgggcggactattttcagctttgagggggcgtgggcactaaatggtgtgggaatacatgttttcattccatatggaagggcctgagaaaaagatcagcgtcagttccttggcaggtgcagcgccacattgagattagactgctgcagtcgacttaatgagcaattttcagatgcaagtccatcaaggtgttaactgttgtcatactatttttttggtgtacaacttccgggttccattacagctgtaacataggaagagttgttgtgaagtgtacattattgacctgattcttctactgacgagttgtaacttgtagttgaataagaagccagatttagggcgtgcattattctcccagatcctgtggcttagctnnn

SEQ ID NO: 387964 - DNA, 535 bp, Oryza sativa
cagaatatatgtcaggtgggagtgtttatgattacctgcataaacataaaggtgtattcaagctccctgctttacttggagttgtgatggatgtttcaaaaggcatgagctacttgcaccaaaacaatattattcatcgagatttgaaaactgctaatctccttatggatgaaaatgggacagttaaggttgctgattttggtgttgcacgtgttaaagctcaatctggagtaatgactgctgaaacagggacatatcgttggatggctccagaggttatagaacacaagccctatgatcacaaggccgatgtttttagttttggaactttgatgggggagctgctcacagggaagattccttatgagtacctgacaccattacaagcagctgtaggtgtggttcagaagggattacggcctacaataccaaaaaatgctcatgcaaaactttctgagctttttcagaaatgttggcaacaggagcctgctgaaagaccagatttctctgaaatattagaaactcttcaaagaat

SEQ ID NO: 387965 - DNA, 621 bp, Oryza sativa
ctgatccaaagactggtcgcccgagtccctacatgcctccaccctctccctggatgactcagaggccgctgggcgttgatgtgaatgtcgcttatgtggagaaccgtgaggacccagataggaccggacagcctccgcaactaactaaggattttctaatgatgtcctctgggaaacgcaagagggatgaatatcctggtcagctcccttctggttcttttgtgccacaacaagatggaagtgcagatcagatagttgaatttgttgtctcaaaggacaacgcacaacaactttggagttccattgtgaacaagcaaggaacagcaacaaaagaatcttccacaaaggaaacaataattgctccaacgattcctcaacgggatgggatggatgactataatgatccattttacttccaaggagttccaactgaggattacaatacccctggagaatcgtcggaataccgagctcccacaccggctgtcggaacaccaaacccgagaaatgatgtaggcgatgatgatgagcctccgcttaatgaagatgacgatgatgatgacgagttagatgaccttgagcaaggggaggatgaattcaacacactcccttcatgttctc

SEQ ID NO: 387966 - DNA, 522 bp, Oryza sativa
  unsure (1)..(522): unsure at all n locations
tgttctcttctccaaccaccctgctctctcctctcccccttcacagttcacacctgcgaccacgaggcggtggcggaggagacgaggcgcgccggggagatccgaggcactcgttgaccctgcgctccggcggccgattcgctgccggggacgccgtcttctccgtcaactccggcgaacggctgccgcgctccgatctgcacgtcgccgacgtcgctgagcttttgatctcgccttctcgagacacatctgatatcgctgttctttttatgagttcacaagacactcaacatgaagtttttagaatacacccccttcgacagtataaatctgttccttgataatcttgaccttggtgattgtacgataagaggaaaccttgaagccttctcatgcaagcacactggtaatgaccgtcgactttcaataagtctagaacatgagattcttgattgcctcagtaagtcttctgatagtgatcattcataccagttgngcattttnatgtcggtaagtcggaaa

SEQ ID NO: 387967 - DNA, 558 bp, Oryza sativa
ccacgcgtccgctctccaccagcagaaagccgcgggtgcccacctaacctcctccgccgcgggcatcccctcctcgccgcctccgccaacagccgcgaggcgagacgacgatgacgccgcctatggatcccccgccggctcgccccgggcgctcggatctgccgccggctggtctccgggtgagaaggcgcggctcggctcctacctctcccagcgacgcgcgatgacgacgacggcaccgacgcgccgacgacgacaacaccgcctgtgtgtgtgggggtggggggacggaggaggagaggcggcggctcgactctcccctctcccggcgacacgcaacgacgacgacgacgccgccaccgacgcttctgggggaggggggaacggaggaggagaagcggcagctcggctcccccttctcctggcgacgcgcaatgacgatgacaacgctgcctgtggggaagccagtggacggaggaggagaggcggcgacgactgtctcgaacggtgccgacgcgacgacgacgatgccgccggttgtgggggagaccggcggat

SEQ ID NO: 387968 - DNA, 711 bp, Oryza sativa
ccacgcgtccgcccgttcgtcctcctgtccggtccgagtccctctgacgacgcgactttccccacgccgggatcgagctccggggaggggagctgcgagctgaaacactttgtcatatcagtcaacagtagagaggagaccagatgcaggcatctagagctaggctctttaaggagtataaggaggtgcagcgagaaaagtcagctgatccagatatccagttaatctgcgatgattcaaacatattcaagtggactgctcttatcaagggcccttcggagacaccttttgaaggtggtgtatttcaacctggcattctctattcctgagcaataccctctccttcctccgcaagttcgcttcttgaccaaaattttccacccgaatgtgcatttcaagacaggtgagatttgcctggatatcttgaagaatgcgtggagcccagcatggacactacaatccgtttgtagagccataattgcattgatggcccatcctgaaccagacagtccacttaactgtgactcaggcaacctcctgcgctcaggcgacatcagaggctatcaattcatggcaagaatgtatactaggttggctgccatgccaaaaaaaggttaactccagggtgcaaaaggaaatatgcgccaagcgaaagcatggctgattcatgtgaattgctctggtaagtgtaactcttactgtcaccatgtg

SEQ ID NO: 387969 - DNA, 689 bp, Oryza sativa
ccacgcgtccgcccacgcgtccgcccacgcgttcgttttgatgacaagagggatgctgaggatgcactccgtgatttagatggcaagaatggatggagagttgagctctcacggaactcaagtagccgcggaggtcgtgatcgacatggtgggtctgagatgaagtgctatgagtgtggtgaaactgggcactttgctcgtgaatgtcgtttgcgtattggtcctggaggtctgggtagtggaaagcgtcgtagcaggagtcgcagccgcagtcgcagccctcaataccgcaagagcccgacctatggtagaagaagctacagtcctcgtgatcgctctccaaggcgccgcagtgtttcaccagttcgtgggcgcagctacagcaggtcaccacgtggccgaggtggttctccttatgctgatggaagagatggtggcaggtaccgccgtagcaggagctagaccctgatgcctgtgcttgaccgtctgctctttggcttgcatgccatgaatgctttaagactggcatcaactgattgacttcaattaaggtttactactttatctgccttgatatttcagcctcttatttctgacgttaaaaaacttatgggatggatgtaatatgcaactaagacatattacctttgtactatgtgctaaagagggatccctctgcttaacaaaaa

SEQ ID NO: 387970 - DNA, 730 bp, Oryza sativa
  unsure (1)..(730): unsure at all n locations
tcgtcaccaatcccgcgtcgacggctggatcccgctancaagnccggcgccttcatcaccggacactacccacctccgcgtcagtgccccgccctgctcatccgtcaacgacggccggggaagctacggctccaactccggcggcggcaacggctacttcaggttcccagcgagccgccgcctgcgtcgtcgacgtctgatccatccatccatctcctcatcctcctctcatgcatccaacaaatcatatcatccttaattaattctcctccttccatatataattgcttgcttaattgatcgatctacattctacaagcacagccctgatgaagaagctatataattaaaagctcagctcaactgatcgagtgaggatcggagtaatcttgcatatatgcctgccaccagtggttttatgtatttacagtacgaattaatttgacctttttcttacttaattttcatgcctgtgttttttttggtactacgtacagtgccatgcttgtggctagctgcatggttcaggtgtacagctacttgtagtaataattcgcatatagagaggggataattaagcaattgctacaatcttgtaattactactagaatatataataattgtacttatcttcacatgcatactacatagttgcaacattgtaatcaattaatgttctgttcatttttcaaaaaagagtgttcgtcttcaaaaaaaaaaaaaaaaaaa

SEQ ID NO: 387971 - DNA, 1011 bp, Oryza sativa
ttcttttcgccaacaactatacaaagaaattgaggtagcaagtgttgattccttccagggaagagaaaaagattacataatcctgtcttgtgttagaagcaatgagcaccagggtattgggtttcttaatgatccacgcaggttaaatgtcgcattaactcgtgctcggtacggtatagttattcttgggaaccctaaagttctaagcaagcagccactctggaatagtttattgacacattataaggagcatgagtgtttggtagaaggacctttgaacaacttaaagcagagtatggtgcaatttcaaaagccaaaaaagatctacaatgatcgacgacttttcctgggtggcggtcaaggtgttatgcaaggagctagttttggtgctgcaggcacaaacccagtggcagataagaaaagtggtggggggaagggcattcctttgttccatttggcccaccaaatggggctcataaacctggtgtgcacccatctggctatcctttacctcgtatgcctttccctccatttgctggggctcattctcaaccctatgctattccagcccggggttcattgcacggaccgattggagctgtcccacctgtgcctcaacctggaaacagaaactttggacctcgtggaaattactggtggccctattggtgggcaccttgctcaccaacagagttctcagcaagctatgggaggcatggggtcagcttttaactttcctggcctggagaatccgagcaggcagccttctggtggaggtccaatgtcccagactggattgatgacacagatgcctgtccaaggtctcagctaaacattccgcgaagggtttttcattggtgggatgtctcaagacttttttggagatgattttaagagctcaggatcttatgtggcgtacaacattgctggttttttccacttcagcttttaaggaagctatggggttgctacctttaaggccccaatctggattttctgggaattttttga

SEQ ID NO: 387972 - DNA, 572 bp, Oryza sativa
  unsure (1)..(572): unsure at all n locations
ccacgcgtccgaaggactcatggcgaacatctcgagcctcttaacggaaatgggaaaagatttgctaacgatcccgaaaaagaaagcgatgccctccaaaaggtcacctttgatcaacaatgtgatctgcttgcctgtgatggggagtctgtatgttcaaattgcgacagtacaccatactcgagtttaaccccaatagacagtgcttgtggcaaattgccagcagtttctgaagatgatagtgcatgccgagggctggaactcgaattccgttgtgggaatgaaacggacgtttcccaaaaagaagataaacaggtggaatcagaatataaagctgaaaatgacagctctgctcaaatgaatgagaatgatgttcccaaatcagggaaagggatgctaaagtctgttgctggaggaattacacttgtcggcgcagtgttcttcatagctcatctcagaaggagcaaggacagaagccttcgcagggttataagctccattctctgaaaaatcagttcagggcgactcangggcaatgaaagtagagaaaacaaagggcgggtgccgtgtat

SEQ ID NO: 387973 - DNA, 731 bp, Oryza sativa
  unsure (1)..(731): unsure at all n locations
ccacgcgtccgctaactccatcttccccggcggcggcgcaacagaggatatcagccatggtgaagtttctcaagcccgggaaggcggtgatcctgctgcaggggaggttcgcggggcggaaggcggtgatcgtgcgggtgttcgaggagggcacccgcgaccgcccctacggccactgcctcgtcgccggcctcgccaagtaccccaagaaggtgatccgcaaggactcggcgaagaagacggcgaagaagtcgcgcgtcaagtgcttcctcaagctcgtcaacttcacccacctcatgcccacccgctacaccctcgacgtcgacctcaaggaggtcgccgcggggcccgacgcgctcgccaccagggacaagaaggtcgccgcctgcaagtccgccaaggcgcgcctcgaggaccgcttcaagaccggcaagaacaggtggttcttcaccaagctccgcttctgagctctctcctgcggcggcggcggcggcgatgggatggtactggtgcacggccatctcatcctttttctctttttctaaagcttttcgctttctgagtagcagccaatgaatggttttggattttctaaattaatctcaatcaccctgatgtaatggtactactgcctgcttgtgtgggtgtggatgtttagtagtatggatctattaaagaagcatattgggagaaaaaaaaaaaaaaaaaaannnnnnnnnnnnnnnnnnnnn

SEQ ID NO: 387974 - DNA, 777 bp, Oryza sativa
ccacgcgtccggcggcgcatcagcagcagaggtgagctcggcggcggcggcggcggcggcgaccaaccacaccggcgaaggagaaggagatccgtaccaagccgccgcgatggtgaagttcctgaagccggggaaggcggtgatcctgctgcaggggcggtacgcggtgcggaaggcggtgatcgtgcgcgtgttcgaggagggcacccgtgaccgcccctacggccactgcctcgtcgccggcctcgccaagtacccgtagaaggtgatccgcaaggactcggcgaagaagacggcgaagaagtcgagggtcaagtgcttcctcaagctcgtcaacttcacccacatcatgcccacccgctacaccctcgacgtcgacctcaagaaggtcgccgcggggcccgatgcgctcgccaccagggtcaaaaaggttgccccctgccagtccgcccaagggggcccctaaggtcgttttcaaacccgcaaaaaaaaggtggtttttcaccaagccccgcttttaccatctatcccatgtagtggcaagtgtggaatgatgcatgtatgtgctggcccatgcaccccatttttcctttttataaccatatacccttcttaatataggtcattaattagattttgaccttgcataaattaagtccttccccatgtcataaaatgtttaatgtttaggccaagatttagccaaacttcaacactttgactatcaattaattgtatgttagaatctaatgagtttatgatattatgatcggtact

SEQ ID NO: 387975 - DNA, 494 bp, Oryza sativa
ttatggcatactggggatcctatactctgtgcttataactgcggtaatcacagatgcaattaaggatggtgtgggtcgtccacgcccagattttttctggcgctgtttcccagatggaaaggatgtttatgataatgtcactactggtgtcatatgccatggagagaagagtgtcatcaaagaaggtcacaagagctttccaagcgggcactcttcatggtctttcgctggtctaggcttccttgcatggtacttagctgggaagatcacagtttttgatcgtagaggtcatgttgcatagctatgcatagtattgctgcctcttcttactgctgcacttgtggctgtttctcgagtggatgactactggcatcactggcaggatgtatttgcaggctctctgataggtcttacagtcgcatcattttggtatctgcaattcttcccatatccttatgacgcagacgctttctggctatgctcccttcactagc

SEQ ID NO: 387976 - DNA, 461 bp, Oryza sativa
ccacgcgtccgcccacgcgtccggaaatggcgacttgctccgctgcttgcgctcgcccagccgtcgtcgtcttcgcgtcgccggccgccgcgcggcggcgcgccgcctcctccgtctacctccctggtcggcctctgcgcggcggcggcgtcgtgcgatgcagcgctgggcctgtaagcggtgggatgatctcgaagaaggtggcggagctgtgggcggcggcgaggagcgcgtcgccggtggcggtgatcgccgcggtggccggagcggcggtggtctacaaggtggggtccagtctcctcgcgccgcctcctccgccggcgaggccccgggaggagcccagcgaggaggccccgccgcctccggagccggtgcaggtgggggagatcacggcggaggagttgctgcagtacgacgggtccgaccccgagaagccgttgctcatggcgatcaaggggcag

SEQ ID NO: 387977 - DNA, 744 bp, Oryza sativa
cgattcccggtcgacccacgcgtccggtttatcgccgccgctccgaccacttcactagggttttgcacgcggcggcggcggcggcgagatgctgcggcggaacacgcggctccggcgggagtacctgtaccgcaagagcctcgaggggaaggagcggcagcactacgagaagaagcggcgcctccgggaggcgctcgacgaggggaagcccatccccaccgagctccgcaacgaggagctcgccctccgccgcgagatccacctcgaggacaaggactccgctgttccgaggagcctcatcgatgacgagtacgcgggcgcgggcgctccgcgagcccaagatcctactcaccacctctcgcaatcccagcgcgcccctcactcagtttgttcaaggagctcaaagttcgtcttccctaactcgcaaagaatgaaccgtggtggtcaggtgatatcggaaattgttgagtcttgccgttcgcatgatatcaccgaccttgttttggtgcatgaacatcgtggccagcccgatggtttaatcgtctgccatcttccatttgggccaactgcatattttgggttgctcaatgtggtgacacgccacgatattaaagataggaaggccatgggtaaaatgtcagaagcgtacccccatttaatactagataacttcacaaccaagactggtgaaaggactgctaatattgtcaagcatctctttccagtgccaaagccagattcaaa

SEQ ID NO: 387978 - DNA, 649 bp, Oryza sativa
  unsure (1)..(649): unsure at all n locations
nnnnnnnnnnnnnnnnnnnnnnnnnncgcacnatcgcattaatggaagagagaattgaaacaagttgcagcacgaccacaagacgacaatgctgccccaagacaaaaacttgctgcttataaataggcacatgcccactacactaccaccaccactactaccccccctcaaacaacagaacccccaccaccaaagcacatacggcaaagtagccagacaaacggaaactcaaagagaggagagagtgagttcctttgatcatacagttgtttttggccaatcatcgtccgaggagagatggggatgcagagcaacgacggcgccgtcatgttctcctccatcgcgctgctgcagcagaggttcagggagctggagaggattcaaggaggagcgggaggagaggctcatccagatgctccctccccgctccgaccgctcccacagtgggcgctgcggccgtcgtcgtagcaaggctgctccgagggaagttccggttaaatggttcttccatccggagctgtttatccatgaggctttggttaaatggtgntgnaactanttcgggaattgggcacatggngggattnaaacttcanccggggaccccncgggactgggcaaaagctttcgggantnanatccatggggt

SEQ ID NO: 387979 - DNA, 450 bp, Oryza sativa
ccacgcgtccgaacagaacccccaccaccaaagcacatacggcaaagtagccagacaaacggaaactcaaagagaggagagagtgagttcctttgatcatacagttgtttttggccaatcatcgtccgaggagagatggggatgcagagcaacgacggcgccgtcatgttctcctccatcgcgctgctgcagcagaggttcagggagctggagaggatcaaggaggagcgggaggagaggctcatccagatgctccctccccgctccgaccgctcccacagtggcgctgcggccgtcgtcgtagccacgcctgctccgagggaagtgccggtgaaatggttcttccatccggagctgttgtatccatgcaggcctctgcgtgacatggctgctgctaccttacttccggtcatgccggccaccatcgactgtgaattcacggacgcgtgg

SEQ ID NO: 387980 - DNA, 436 bp, Oryza sativa
ccacgcgtccgttcattgttccgtggaattacctctacaactgacacaagtcaggatgagaaagctgcaggtagcccctacgagttgtatgagaaactgagcatctcatatccctcactactgcaacctctgatacatgagcgtgacatgttccttgcatggtctctgaagaggagcaaagctgtaaacaagagcaaaactgtcgttgggatcattggaaagggacatatgaatggtgtggtgtatgcactgatttctgatcaaggagacttgagattccgtgatcttgttggtagagcatcatctgatacctgggcaagctcactcatcaaagggctggttagggacacaataatagggattgtactttgggggttgtatgaacagctgcatgctggcttttaaggttaaatgcagctctaacacaacatggcat

SEQ ID NO: 387981 - DNA, 411 bp, Oryza sativa
cggtcgacccacgcgtccgcccacgcgtccggtgcagagagcttagctagctgcgacgcacgcacggtttgtacaaggtacagtatagtatgacaccgaccgtcgcgaccaccaccccggccgccgcggcggcgacgacggcggcggcggccgaggtgaagccggcgaagcgctccgtcggcctcggcctccccgcgcttccgccattattgcccggcctcgcctcccacggccagccccgtgtcgcgtccttctgcaagaggctggcgaggaacgtggtggccatggcggcgggggaggcgccggcggcgcccgttcgccgccaacgccggagattacccgattcatcaacgcccttcaaacaagagtgggtcaggattggggccacgttctcggtgaccacccctggcg

SEQ ID NO: 387982 - DNA, 998 bp, Oryza sativa
  unsure (1)..(998): unsure at all n locations
ccacgcgtccgaacaaaacctccccacgccgcgagatctcgcagcaatggcggcgccgcgccaccaccacctcgccctcgccgtcgccctcgccctcctcgtcgtcaccgccgcggcggcggacgaggggggaccgcgggggaggcgggtgctggtgctcgtggacgacctggcggtgcggtcgtcgcactctgccttcttcgcgtcgctccaggggcgagggttcgatctcnacttncgcctggtcgacgaccccaagctctcacttcaccgctacggccagtacctctacgacggtcttgttctttcgccccctccaccccgcgttttggaggatcagtggaccaaaattcaattctggaattcatcgatgctggtcatgatatgatcctggcagcagactcttcggcctctgatctgatccgaggcattgcaacagagtgtggggttgattttgatgaggatccagaggcaatggttattgatcacattaattatgctgccactgatgctgaaggtgatcatactttgattgctggtgatgacctcatccagtcagatgtgatactggggtcaaagaaaattgaggcccctgtattatttcggggaattggacatgcggttaatccatctaacagcttggtcctgaaagtcttatccgcctctccgtcagcatactcagcaaacccaaagtctaagttggcttcccctccatctctcacagggtcggctatatcactggtttctgttatgcaggcaagaaacaatgctcgggtcttgatatctggatcactcgatctgtttagcaacaggttcctaaaatctggtgttcagaaggccggtagcaagataaggcatgagaaagctggaaatgaacaatttgtgacagaaacaagcaaatgggtcttccatgagaggggccatctaaaggcagtgaatgtcaagcataacaaggttggggagacaaatgagccttgcatgtaccgcatcaatgatga

SEQ ID NO: 387983 - DNA, 603 bp, Oryza sativa
  unsure (1)..(603): unsure at all n locations
ccacgcgtccgcttggccgtcgtcttctcctcccgaccccgccgccgccgacctctcttcttcgcgcctncttctaaccaccgncgncgaatccctctcgccggcggccacccggatctccccagccatgtacggcggcgatgaggtctcggncatcgtcatcgacgtggggtcctacagctgcaaggcggngtacgccggtgatgacacccccaaggccgtcttcccctcgggtgttggttcaattgagcaaacgggagaacctgatgaagcaaaggcagacaaggaggctgaagctgcatcagattctaagaatggagccaaacctatggatgtggacaaagccaagacaaagcgcaaattgtatgttggtcaagaattggagttcaggagggatcatatggaggtgatttcaccaatgaaagatggaacagttactgattgggatattgttgacaatatatggaatcatgctttcaggcagcggctattgatcaatcctgaggagcatcctatgttgatagctgaaccatctacaaacacaggacagcaaagagagaaagcagcagaacttatgtttgagaagtacaaagtgccggcact

SEQ ID NO: 387984 - DNA, 1265 bp, Oryza sativa
  unsure (1)..(1265): unsure at all n locations
gtcnggactggaggaagaagagatcgaacagcaatttgcgaattgctgatcgatcgcgtgacgatgagcagcagcagcaggccggtgtgcgtcaccggcggcagcggctacatcgcgacgtgcctcatcaagaagctcctgcagcgaggctgcgtcgtccatgcaaccctggagaaatctcggagatgagaagaagacggcgccgctgagagaggatccccggcgcggcggagcggctggtgctgttcgaggcggacatgtacgacgccgccaccttcgagcccgccatcgccggctgcgagttcgtcttcctcgtcgccaccccgctgcagcacgaccccaccagcaccaagtacaagaacaccgccgaagcggccgcggacgcgatgcgcatcatcctgcagcagtgcgagcgatcaaagacggtgcggcgcgtcatccacacggcctccgtcaccgccgcgtcaccgctcagggaggacggcgaggggtacaaggacttcatcaacgagtcatgctggtctcctcccgacctctcctgccgctatagcaacgtcatgatggatgcttatgtttcatccaagacactcacagagaagctactgctgaggtacaacgagtccgagagcagggcgttcgaggtggtcaccctgacatgcgcgctcatcggcggcgacaccgacaccacgcagctctaccactcgctaagcatcccgctgattcgtgtcgccgctcaccggccaggagctctaccacgggcggcctcaagtccctgcaagcgctgctgggtttctgtgccactggcgcacatagacgacatatgcgaggcacacatcttctgcatggagcagcaaccatccatcgccggccgattcctctgcgccgctgggtaccccaacatgcaggactatgtcgaccgtttcgctgtcaagtacccggagatcgcgataaagcttaaaggggtgattgggaaggatgtgagggtgaaaagcggatacaaacaagcttggggattttggggttcaagtacaagtttacggtggaggagacgttggacaccagcgtggaatgtgccaagaggctgggattactttgagcgtgccaagcagtataatttcttgtcctaatgtctgtatttgttccggcccttttactccaaccgtatctaagaaatgtaccctaaagctatcagaacattgttcatcgataatattacccccgtttcaggttnnnnnnnnnnnnnnnnnnnnnnnnnnnnnnnnnnn

SEQ ID NO: 387985 - DNA, 625 bp, Oryza sativa
  unsure (1)..(625): unsure at all n locations
ccacgcgtccggaaaccctaattaaccatttctcgctcatcacaacaccacctcacctcactccccaactaaaaaacaatggctcactaccaggaggtggactactgctcggaggaggtgaggtcggtgacccccaccggcggcttcctcggccgcggcggcgtgcagcagcagcacgtcgtcaaggagacgttccaggagatcgacaggtccggctccggccgccaccaccacaaccacaaccacggcaacgactacctgatggtgcgcgagaccaaggtggaggaggacttcaacacctgcaccggcgagttccgcgagcgcaagcagagcttcctgctcaagtccgactgatcgaacctgctgtgtgtacccgtgtacgtacgtacgtatatgtgtgcccgtacgtagtcgtggtggtcatgtggtggcttagctctacgtgtatatcgtgcgtgcgtgtgtacgtgcgtacacggagcttagctaattagcaccttcttctctgtgcgatcactacgaacggagagggggggtgtatgaaaaataaattcgtgacctgaatataataaagcttgtcctaattatcaccggtcaaaaannnnnnnnnnnnnnnnnnnnnnnn

SEQ ID NO: 387986 - DNA, 827 bp, Oryza sativa
gtttggagtctatgcatttagtaaacgggtgaacttgggtgccactagttcaggcagtggccgtggggactgtgtttacactactgttagccacttcaacatcatacactaccaatgtcatcaggaggctaaaagagctgatgctgcactgaagaatcctaaaaaggaatgggatggtgctaccctgagaaataatgagacactgtgtaattgtatctttcccttgagggggccatctgttcctcctgggcagtacacacgatgtctcgaccagtattgggaccaattgaattctctaggacgagcagatggaagtcgccttcgcttgttaacatatgacattgttctgatgttggccaggtttgcaacaggcgcttctttcagcactgactgcaaaggtgggggtagggagagcaactcgcggtttcttcctttcatgatccaaatggcttctcatcttgtagatggaagtgccaaccagcagcgtcatgtcatggccaaggctgttacctcgtacttgtcctcttcgccttcaactccagaatctcctgttcgactttcagctctatctggagctcgtggtggttcaggttcctcggaggagactgtacagttcatgatggtcaattctctgctgtctgagtcctatgagagttggctgcagcaccgccccgctttcctgcagaggggcatctaccatgcttacatgcaacacaagcatggacgatccaccctcaagctttctgccgacacgtcttcctctgcagccgatcagatgaaggttcatccgcgattcaacgcagcagaggctctttgcattgtcagcg

SEQ ID NO: 387987 - DNA, 906 bp, Oryza sativa
  unsure (1)..(906): unsure at all n locations
cgacgcgtccggggccgcggaggcagaggccctccccgcccccgcgtcgtcnacggcggcnganggagcatgggggcgcgcgtggccgtgctcgcattctgcgtcncctggatctggtcggcgtacatcacccagggcgtcctccaggaaaccctggggagcgggcggttctggccttatgctctgcggttcaaccacctcgcgttcctcaacttcgcgcagaacgtcgtctgcttcgtctggtccttcataatgatcaagctgtggtcgagtggtgggagctcctccgctggccgcgcgccgctgcggaagtactggggcgtcagcatcaccaacactgtcggcccggccatggggatcgaggcgctcaagttcatcagctacccagctcaggtcctggcaaaatcttctaagatgattccagtaatgctgatgggaactatactgtatggtgtcaagtacacatttccggagtacatttgcacctttcttgttgctgggggtgtatcatcctttgcgttgttgaagacaagctccaagactatcaagaagcttgctaaccctaatgcgcctctgggctacacattgtgcttcctcaacttagcttttgatggttacaccaattcgacccaagatttgatatagtctaggtatccaaagactaatccatgggatataatgcttggcatgaatctctgggggaccatatacaatgctgtgattatgtttgttgctccattactattcagtaattggccttacgccaacggttttgaggcagtgagattttgccaggagaacccagaggtggcatgggacattctcctgttctgcctgtgtggtgccgtgggtcagaatttcatcttcctaaccatcagccgatttggcttcttactaacactacca

SEQ ID NO: 387988 - DNA, 536 bp, Oryza sativa
tcgacccacgcgtccgcccacgcgttcgattcatgcttcgattctccatgctttcctctactgctcattggtaacattcggcaaatttgacagatgggtatattggtcatcttggtggacctgcaatgctgccgctgcgatgccaagatcaggaaggtcctgggctgccttgaagaggagtactgcatcgagaaggtggagtacgacgtgaagaacaacagggtgatcgtgcgcgggaagttcgacccggagaagctgtgcaagaagatctggtgcaaggccggcaagatcatcaaggagatcctcatcgtcgacgtctggccgccgtcgccgccgccgccgtgcaagccgccgccgtgcgagaagcctccggaggactgcaagcccaagccctgccattgctgcagctgcgagaagcccaagcccaagcccaagccctgccattgctgcagctgcgagaagcccaagcccaagcccaagccctgccactgcgagaagcccaagccctggcactgcgagaagcccagccatgcgag

SEQ ID NO: 387989 - DNA, 844 bp, Oryza sativa
aagatatgctagtgtccatgcccatttaggccgtactggtagcagaagggatgatctggaatcattagcatatacattaatatttcttctcagaggaaggttaccttggcaaggctaccagggtgagaacaagagttttcttgtttgcaagaagaaaatggctacctctccagaccttttgtgctgtttctgtccccctccttttaaacttttcctggagagcgtgacaaacatgagatttgatgaagaaccaaactacgcaaagcttatttccctttttgatgaattgattgagccccagcatttgaggcctattagaatcgatggtgctctaaaggctggacaaaaacgtggaaggttgcttgtaaatcttgaagaagatgaacaaccaaagaagaaagttcgacttggaagcccagcaaatcagtggatatcagtctataatgctaggagacccatgaaacaaagataccattacaatgtagcagatgccagacttcatcaacacatagagaagggaaatgatgatggattgttcattagctcagtggcatcttcagccaatctttgggcccttattatggacgcgggaactgggttcacatcccaagtttatgaactctcaccaatatttcttcataaggattggattatggagcaatgggagaataattactacatcagtgccatagcgggtgcaacaaatggaagttccttggtggtcatgtcaaaaggaactccttacactcaacagtcttacaaagttagtgaatcgtttcccttcaaatggatcaacaaggaatgggaagaagggtttcattgttacatcattaccccttcagga

SEQ ID NO: 387990 - DNA, 463 bp, Oryza sativa
ccacgcgtccggaaggaagagcagagagagcaaaccgcccgcccgtccgctcctcgtctcgccccgctccaagcgcgccgccatggccaccacctccttgtccctgcatggcgtcccatcccccaccgccaccaagctctcctcctcctttctcggcgcccccgcctccttcctccggccgacgccgccgccgctcgctgccccctcgcggagggcgctcgccgtcagggccatggcgccacccaagcccgggggcaagcccaagaaagtggtgggcctcataaagctggcgctggaggccgggaaggccacgccggcgccgccggtcggccccgcgcttggtgcccaagggtgtgaacatcatgtccttctgcaaggagtacaatgccaagacggccgagaaggccggctacatcatccctggtcgagatcaccgtgttcgatgataaaaggttcaccttta

SEQ ID NO: 387991 - DNA, 329 bp, Oryza sativa
ccacgcgtccgagcttatggggtcactgaagatggaaaggtagcaagagcagctggtgctggtcctgttttgggcgactggggtagtggatatggcattgctgcacaggccctgacagcagtcgtaaaagcatacgatggccgtggacctcatactaatcttacaagaagagatccttaggaagcttgagctttcttcaccagatgaattgattgggtggacgtatgcagatccatcttgggcccgtattgcagcacttgttcctgttgtggtatcttctgctgaagatggtgatgaagtagcaaacaaaatattgcatgattcagtgc

SEQ ID NO: 387992 - DNA, 744 bp, Oryza sativa
tctgcccccgcctctccactccactccaacccacccatgggcacctcctggctggtccccctccacctccccacgaggccgtccgccgtcaaggcctccgccgccgcgacggcggcggcggccccgacgccgcagtcgctggaggagtcgttcggacggaagggcctccggttcgccgccgacccggccaccggcgcgcccaccgccgagctcagcgtgcggaacggcagctcgctgcagctccggctcgccgacgggctggtcacctcgtaccggcccaaggtgtactggaaggacgacgggtgcagggaggtgctccacaccgtcgccggcgccggcgccggcggcgaggtcaagggcggcgtcgggctcgcgctcagcgaggtgtcctcctccggcgccgccgagtcgctcctcgtcggctccgagtggtccgtcgtggacgccgactccgactcctacgatgcagtgcaggttgagctggggtgcaccaaggggagcgggacgctggaggtgacgtacgtggtgacgctgtacccgctgagcatggcgacggcggtgatggtgaagaacaacggcaagaagccggtgtcgctgacgagcgcgatgctgagccacatcaagttcgacaagcggcggggcacggcggtggaggggctccggggatgcccctactgctcccacccgccgccggccgtcggcttcgcgctcctcaccccggcggaggccatgaagcgggaggac

SEQ ID NO: 387993 - DNA, 469 bp, Oryza sativa
ccccgcgtccgccctcgcgtacacgctcaggcatcacggcgagcatctggcccgaccagccgcttccacagccgctgcctcacgggctgctggccagggacgtgtatggtcatgactatcgggctcagctgcaggctaagccgcaccctatgactcccgctctgcctgtggctttactgctcaccttatgacctgggcttatctggaggcctctcaagataccgtatcaggtctggcatgacgtccgacggtcgattcagaggaggttaaggaagatgttatatataaagaggtacatgaaatggtgcccgatatgttgaccgatctgctgacctatctacttaccaagcctgcgttctagctaggggtgtatctaactcggagtatagccaatggtatggggaacttctttcacaactgtgatcatgagaggaatggatccagaaactgatacatgaactgacttctg

SEQ ID NO: 387994 - DNA, 906 bp, Oryza sativa
ccacgcgtccggcgtaaaagaagaaatctcccgtctcgttctcgttctcctccgctccttgcgccgccgccaagacgagcggagggccgggcggcgatctccatctggcaagcagagcagcggaggggaggaggggatcctgggaaggatattagtgattttctactgctgtttcgtcagaaggacaagaactgaagaattcagttagcaacagtatggtgttgccttcatcaaataccagggccacttcttccatggcttaccctgtttccctgagcagcctccaccaccaccccaacaaccaccatgctttttttcttccctcgaaaacaaaccatgataatactcataaacctattgaatcctctagaatttctagacggtctctcatcttcctccctgtcctcccttctcttctatacgcttcatcatcccccgcctgcgatgacgcaaacattccatccacctctgccattgataccaccatcacagatcggatcttcatggacttcagtgtctgccctagctactttcgctctgaccgcactttaggagctgagcttgctacatgtcctgattctgaacctcttggtcgtgtaatttttggtttgtatggtcgactcctccccctcactactgccaacttcaaagctgcttgcacttctgctgcataccggggaacacttgtccacaagctccttcagggccagttcttcgttgctggccgccaaggtcctcggcgtgacaggggcgaggtccaacctcccaccggacttgtgaggaatgctgagactattgaccctaaagcatttgaactaaagcatgcaaggcctggcaccctctcattgtgccttggacagaacgatgacgatgatgacatcaagctcaatcctaattatcacaatg

SEQ ID NO: 387995 - DNA, 824 bp, Oryza sativa
  unsure (1)..(824): unsure at all n locations
ccacgcgtccgcccacgcgtccgcggacgcgtgggctatcatattcttctcgttctgaggacattcaaaacatcgaatctcttattatggatctaccgacactacggattgccacagataactttgctgaaaacaacaaactaggtgaaggaggatttggtgaagtttacaagggatcctttcccggtggccaaaccatagctgtgaaaaggctctctcagagttctggacaaggcataggagagcttaaaaatgaactggttttaattgccaagctccagcacaagaatctcgtgaggctcgttggagtttgtttggaacaagaagagaagctacttgtctatgaatacatgcctaacaaaagtttagacacatttcttgttgaccctgagaagcgcatacaaatcgattgggcaaagaggttcatgataataaaaggaatcactggaggattgcaatatctgcatgaagattctcaattgaagataattcaccgtgatctaaaagcaagcaacgttctactggacgcaaatatgaaccctaagatttcagactttggcttggcaaggctttttggagatgatcagtcacaagaaacaactaaccgcgttgttggaacttatggatacatggcaccagaatacgctntacgtgggcaatattcaataaagtctgacgtatacaagcttcggtgtgttgctttttggagatcatcacaggaagaaaaaacagtgactcctacaactctgaacaagcttgtgatcttctgagcctcgtatgggaacattgggcaatgaaaactatcacggagatggtgacccata

SEQ ID NO: 387996 - DNA, 676 bp, Oryza sativa
  unsure (1)..(676): unsure at all n locations
acccncccgtnctccccgttaccgttgccgaacacgccgcngccnagcagagggntgacgcccgacgggttactgtgtgacggcggccggccgtgccggggaccgacgcaggggcagccaggtgccgcagaccagctcgtgctacatcccccgcaggcgcggtttcgcggcgagctgaccgccgccgtgcgtcggcttgtttggcttggagtgttgctttgcctggtgactttagtcccgcaagtagatggctgcgtcggtacactccctccgtccaaaaaaaaagcacaaacccgggttgccgtgtctaacgtttgaccgtccgtcttatttgaaaaaattatgaaaaaaattaaaaagacaagtcacgcataaaatattaatcatgttttatcatctaacaacaatgaaaatacgaattataaaaaaatttcatatgagacggacagtcaaagttggacacgaaaattcagggtttgcctttttttctgagacgaagggagtatacgtactagggacccgtcacctgctaagagggaaagacacgtactccacatacttttgtgaccaacttggtatcattgtgcatatgaatagtgacatgtcactagataatatttctacgaagttgcacataatcgaatgattaagctttcaggtaaaaaaaaaaaaaaaa

SEQ ID NO: 387997 - DNA, 612 bp, Oryza sativa
  unsure (1)..(612): unsure at all n locations
ccacgcgtccgcccacgcgtccgcccacgcgtccgcccacgcgtccgcttgtagattgctaatgcgttctactacaacccttctttgacacttgcaaccctacataaacttggggctgtgactgaaatttttaacatttggtttggtatgttagaacaagtcaaaaagagtggtgtacgagccaattttaagagagagcatgataagaaagtttgttgcttggggttgacctcacttattagccttccagcagatcatattccaggagaagccctgaatcgtattttcaaagcaacacttgatctgcttgttgcctacaaagagcaagtggcagaatctaagaaacaagatgatgctgatggtgattgatattggatgggtttgatgctgatgaagatgaagatgattgatgaggttgaatctgattaggagatgggacttgatggagaagatgctgatgaaagtaacagtcttnatcttcagaaattaactgctgaggccagaggctttcagccagctgatgagtatgatgactttgatgacaatttcagtgatgatgaagagctggtattaccaattgtatgagttgacccgcttattttgttgttgaac

SEQ ID NO: 387998 - DNA, 372 bp, Oryza sativa
  unsure (1)..(372): unsure at all n locations
tttgtntctccctgtccctctctcttnactctccaagcnttgctcctnagtgctcaactgctcacgctcttgttcaaccgggagaagatgccgttcaacgcatcggcagcggcgacggctcctccggccaagcacctggtcggcgttcggctcaacgcgatggcgtcaaggttgaggagctgatccgccgtcgacggcgacgggtgctcactctgtcgttctctctctcccatccggcgcgacgccaagggcggctactggccgccactcgactgatcagtaaccccgcggggacgtctcacagctcgcggtcgtacgcagccagtggactatcccacgacgaggcacgacttccctagacagttctcttgc

SEQ ID NO: 387999 - DNA, 1225 bp, Oryza sativa
  unsure (1)..(1225): unsure at all n locations
cggtttcgcggatcacctgtggtcctgtgcagccgtaccgtacgcctctgctttcctctcaccccaccgcgccaccgggagcggcccgcgagggaggaggcgctgccgccgcctctgctgatgctgatgatgctaggggcggcctcccagtggatcctggccgccgccgcggcggcggtcgtggcggcgcttgctgtggctggccgtgtcgacgctggagtgggcctggtggacgccgcggcggctggagcgcgccctccgggcgcagggcatccggggcaaccggtaccgcctcttcaccggcgacgtgccggagaacgtccggctcaaccgggaggcccggaagaagccgctgccgctcggctgccacgacatcatcccgcgcgtgctgccgatgttcagcaaagccgttgaggagcacgggaaaccatcattcacttggtttggcccaacgccaagagtgatgatttcagaccctgaatcaataagggaagttatgtctaataagtttggccactatggcaaaccaaagcctacccgtctcggaaagttgctagcctccggagttgtaagctatgaaggcgagaaatgggcaaagcaccggagaattctgaatcctgcctttcaccacgagaaaataaagcggatgctgccagttttttctaactgctgcacggaaatggttacaagatgggagaattcaatgtctattgaaggaatgtcagaggtagatgtttggcctgagttccaaaatcttacaggagatgtcatatcaaagacagcattcggtagcagctatgaggaaggaaggagaatttttcagctgcaagcagagtcagccgaacgcataatacaagcctttcggacaatttttataccaggatattggttcttaccaactaaaaacaacagaaggttgagagaaattgaaagagaggtcagcaaacttctacgaggaataattggaaagagagagcgggctattaaaaatggtgaaaccagtaatggtgacttgttgggcttattggtggagtcaaatatgagggagtcaaatgggaaagcagaactaggaatgactacggacgaaattattgaggaatgcaagctattttattttgcaggaatggagacaacatcagtattgctcacttggacattaattgtgctaagtatgcacccagagtggcaagagcgngcaagagaagnagtgctacaccactttgga

SEQ ID NO: 388000 - DNA, 656 bp, Oryza sativa
gtcgacccacgcgtccgattgaaagtttgtatgttattgacaggtgctcaatgaagctaaccttacaaatgctgtgcttgtacggtcagtccttacgcgtagcgatcttggtggagcaatcattgaaggtgcagacttcagtgatgctgttattgacctgacacagaaacaggctttgtgcaaatatgcaaatggaacaaaccctttaacaggggtcagcacacggaaaagccttggatgcggcaacagtcgccgaaatgcatatgggagcccttcctcccctcttttgagtgctccaccacccaaacttctggaccgtgatggtttctgcgatgaagcaactggtatgtgtgacgcaaaataaaagaagaattatccagcatactgcagaaattgagcactgaatgctgtatatacattggagactgaacaaaagacaaagcagatcggttcaggattcagagaaattgttctcgttttgcgaatgttgtagcattgcagagagatcaggtaaactaggactgtagacaagttatgtgtactgaacgactgatgccgtatatatatgtatatcaaagtgttgccgaattcattccttgcatatctactggttactgcttgcactagctaataaccaatggagtgcttctgtcagt

SEQ ID NO: 388001 - DNA, 423 bp, Oryza sativa
ccacgcgtccgcccacgcgtccgggccggcatcggcgtcggctacgcgctcatgatcgcgcccgtgtacaccgccgaggtggcgccgacgtcggcgcgcggcttcctcacctcgttcccggaggtgttcaacaacagcggcatcctcctcggctacgtctccaacttcgccttcgcgcgcctccccgtccacctgagctggcgcgccatgttcctcgtcggcgccgtgccgcccatcttcctcggcatcgccgtcctcgccatgccggagtcgccccggtggctcgtcatgcggggccgcatcgaggacgcgcgccgcgtgctcctcaagacctccgactcgcccgacgaggccgaggaccggctcctcgacatcaagaaagccgtcggcatccccgaggacgcgtccgatggcgaggacgtg

SEQ ID NO: 388002 - DNA, 473 bp, Oryza sativa
ccacgcgtccgcacagatcctgagaagcgtcgacagccagtaggaagaggagttgctcgcagcagcagctccagcctctcgagcctccacgtcacatcgccggcgccggctcatgtctctcctcacctcgcccacgccgttcggcggcgcggccgtccgccgccgcgcccctcccgcttccgccgccgcggcgacccggctcgacctcccgctggtgggcagccgggccgcgctgcacgtggcgcgcgcgcgcagaggcggcgtctcgtcccgcacgcagcggcgcctggaggagcgcggcaagaataagcgccggggaggcggtagcgtcacggcgcccgcgccgcccgacatggacgaggacgcctctcgccggggaaggggtggactgggaaggggagccgctggggttcgaggtgtcgacgacgccgatgcccgagctgccggacccggagaaagccgacttctgggag

SEQ ID NO: 388003 - DNA, 1247 bp, Oryza sativa
  unsure (1)..(1247): unsure at all n locations
cccacgcntccggctccctctccccccctctctctctctctctctctctctctctctctctctctctctctttgcagccgccgccgccgccgccgccgccgccgccgcgtccgcttcgactcccgccgccaggttctctctctccagcgcgcaggcaccatggccgaagccgaggttaaggacaacgaggtttacgaggaggatctcgtcgactacgaggaggaggtggagaacggcaccgacggtggcgccaacgccgccaacgcctccgccgatgtcgtcaagaaggggtacgtggggatccacagctcggggttcagagacttcctgctcaagccggagctgcttcgcgccatccaggactgcgggtttgagcacccttccgaagtgcaacacgaatgcatcccacaagccattcttggaatggatgtcatctgccaagcaaaatctgggatggggaagactgctgtttttgttctctcaagtcttcagcacattgatcctgttgctggtcaagttggtgcacttgtgctatgtcacacaagggagctagcttaccagatttgccatgaatttgagaggtttagcaagtaccttcctgaggtaaaagttgctgtcttctatggtggcgttcacataaaaaaacacaaggatctgttgaagaatgactgccctcatattgtggttggaacacctggaaggatacttgctctagctagagaaaaggatctttccttgaagaatgtgaggcatttcattcttgatgaatgtgacaagatgctcgattcgcttgatatgcgtagagatgtgcaggagatcttcaaaatgacaccccatgataagcaagtgatgatgttttcagcgacccttagcaaggggatccgcccagtttgcaagaaattcatgcaagatcctatggaaatttatgttgatgatgaggctaaactgacccttcacgggcttgttcagcactatataaaactaagtgaggcggagaagaaccggaaattgaatgatctcttagatgcactggacttcaatcaagttgtgatatttgttaaaagtgttagtagagctgcagaactgaacaagctgctttgtgaatgcaactttcctgcgatctccatacattctggaatgacacaggaggagaggcttacccggtacaagaacttcaaggaaggacacaagaggattcttgtggctactgatttagttggcaggggaattgatattggaacgtgtca

SEQ ID NO: 388004 - DNA, 538 bp, Oryza sativa
  unsure (1)..(538): unsure at all n locations
gtccgcttcctcgtcntccggagcctccccttcgcctcgccgccgccgtccccgctctctcccccgccacccttcaccgtcgccgccggcacccgctgatcgatcgatcgatcggtccatgacggctccacgtacgtacggcaaccagcaaagacagtacgctggctgctgaagtagtctcgccttcgaatcatgaattaacctgtcgcgcgtgtgcatagttcaactcgtgatgtttgtagcagcgtgctagattactagctagttgttgtgttcttgcagcttagtaattaattaatcatttgcttagcttctgatcctgaaaaagcttgcatgtagttgtagcccagcgactgagttacggtcacgggctcacggccagttgactcggagcgagaagatgtgtgtaatctgtgtgaggttttgaattacttgaagaaaatttggagatcttgtttgtttaaaaaaaaaaaaaaaaataaaagaattaaaatataaaataatataaaaataattagtttaataaaattaaaatggg

SEQ ID NO: 388005 - DNA, 731 bp, Oryza sativa
  unsure (1)..(731): unsure at all n locations
ccacgcgtccgatcgagtgtaccattcgacctgaacctccctgttgatgaagatgaaccccttgatgctgatgacgtcngtnntngtcatgaaaatttatatggtttgncngnnaaatccattgatgcccttttgcattcggttgatggatcaatcaactttaanccgtttgactttgataaacttgctgatgacatgctgcaggagttcagcaacatactcaggaaaaatctgggttctgagtgcatgttggagattgatgttggtgcaatggaacaaatacttgccgcagcatggaaatcagaggaggataggaaacctgtgccgacctggctggagcaggtttttgccaggagccttgacgagctgaagctcaagcgtaagcatgtgagtagctctacccttagactagtggcctgtgaggacacagtaccagcagtgaaaggagacggtttaggagttttgctcccgccaagaataattctagattgttgatgatattatctgtatagggatcgctgtaattatctgtagtccacaatagtatagcattatttgttggctaaataagctctagtctagctgatgcattgccttgggttctctaattagctactgccattactgtcatatcattttctacctcagggccttttccagatatatgggcatccgaatgtatatnggttgtaactactatggatggtcaatatntgattggtctatatata

SEQ ID NO: 388006 - DNA, 528 bp, Oryza sativa
tgtgggccagtcagccattggacaaaggattatgatgcacggaagtacttgaacgtgaaggttcgagcatgtactaaagagtcctgcgagttcaggggggcatacggtcaactgaggagacacgccagggagaaccatcctactgttagaccaactcaggtggatcctgaacggcagcgagactggcacagaatggagcagcagcgtgatcttggggacttgttcagcatgcttcgttcaggcttaagtgccagggaggacgggatcggagtcagtgaaggggaagaggatatcagcgagagggctctacatagcccatctataacaatggtcttcattgtgcgcactggcaggtcgatactccactacagggaagcattcccaggccaccacagaagaagaacaattcttctgcttggggaggcttttggtcgtgaatcctccccattagggggagcaagtggcagtggtgatggtgacaccacagctcgcgaaaatgatgaaggtgatgaacacgtcacgctatca

SEQ ID NO: 388007 - DNA, 750 bp, Oryza sativa
  unsure (1)..(750): unsure at all n locations
ccacgcgtccgcccacgcgtccgcggacgcgtgggcccggcgccacggcatccaagctgctcgtcgcgctatctatacatgacacgccccgtctccctccttgcttgacaccaattcaacgacctctcgcgactgatcgatcgatcgatcgatcattcgatcgccatgaggctctcggtctccgtcgccgcggtgctcgtcgttcttgcggcgctccggccgccgcgggtggcggtggcgcagaagtacgcggccatcttcaacttcggggactcgctggtggacgccggcaacctcgtcgtggatggcatcccggactacctcgccacggcgcggctgccgtacgggatgacgtacttcgggtaccccaccgggcgttgctccgacggccgcctcgtcgtcgacttcatcgcgcaggaggtggggttgccgctgctgccgccgtcgaaggcgaagaacgcgacgttccaccgcggcgccaacttcgccatcaccggcgcgacgtcgctggacacgccgtacttccaggggcgcgggctggggcacacggtgtggaactccggctctctgcacacccagatcaagtggttccaggacatgaaggcctccatctgcaagtcccctcaagagtgcagggacctgttccggcgatctctgttcatcgtgggggagttcggcggcaacgactacaactcgccgctgttcgcgttccggccactggaggaggtgcacacncttcgtccccgacgt

SEQ ID NO: 388008 - DNA, 865 bp, Oryza sativa
  unsure (1)..(865): unsure at all n locations
gggacggtcgtcttctcctcctcctacctagcttattgttgttggtagctagcgagctcactcctcactcactctctgcccttcctttcctaccatacctctcaattattcctttcctaccatacccctcaattattagtaagatcgattattagtcccagttagttgctagctacaaggaattgaagcaacaagttgtagcagattgagagagagttgggaagaattacacaagaaatttagagaaatagtactagctagctagcaagaatatagatatataatgtcgatcaagcactgcgagcaacacaaggattgcgagcggcagggcctgtaccggcgttgctgcgcggccatcttcggcatccttctcctcctcctcctcatcgtcctcatcgtctggctcatcctccgccccaccaagcctcgcttctacctcaacgacctcaccgtcgtctgcctcaacgtcaccaccggtggttcctacgccggcgccaccgcctcctccggctacttctccttcctcaccgtcaccatgcagaccaccctcgccgcccgcaacggcaacgagcgcgtgggcatctactacgaccgcgccgacgtgtacgccgagtacaagggcctccgcatcaccgtgccgacgtcgctgccgccggtgtaccagggccacccggacctcaccgtctggtcccctttcctctccggcaacaacgtccagctcccgccctacctcgccgtctccatcacccaggacgagaccgccggctacctgctcgtcaccatccgcgtcgacgngctggatccgctanaagggccggcgnctttcatcaccggacactaccacctgncgcgtcaggtgcgccgc

SEQ ID NO: 388009 - DNA, 364 bp, Oryza sativa
ccacgcgtccgcggacgcgtgggcgacggcggcaggaggagaggtggaggtggagcagctgccgggattcaggttccatccgacggaggaggagctgctggagttctacctgaagcaggtggtgcaggggaagaagctcaagttcgacatcatccccaccgtccacctctaccgccacgacccgcgcgagctccccggactcgcccgcatcggcgagcgcgagtggtacttcttcgtcccccgcgaccgcaagcaggccaccggcggcggcggcggcggtaggcccagccgcaccacggagcgcggcttctggaaggccaccggctccaaccgcgccatccgttgcgccgccgaccccaagcgc

SEQ ID NO: 388010 - DNA, 605 bp, Oryza sativa
ccacgcgtccgcaactactaccctcgctgcctgaggccggaggatgtgttgggcctgaagccacactccgacggctcggtgatcaccggcgtctccgtcgacgacaccgtcagtgggcttcaggtgctgaggcaaggcgtctggtacgatgtgcccgtcgtccccaatgctctgctcatcaacatgggggatggaatggagataatgagcaatgggttgttaaagagcccggtgcatagggtggtgacgaacgccgagagggagcgagtgtcggtggtgatgttctacgcgctggatccggagaaggagctggagccggcgccggagctggtggacgatgagaagaggccgaggcagtatgccaagatgaagatcaaggactacttaagtggcttctacgagacttttgcaagagggacacgagtcatcgacactgtcaagatgtcagaatgagattgttgtcgtaacgggggtggaacggtggaatatagctttctaataactagatgaaaccccgagcttcggtgggggcacatttgagaaccattggaaatattccttttaagatggaccattagattggattggttggaccttaaaaccaa

SEQ ID NO: 388011 - DNA, 871 bp, Oryza sativa
  unsure (1)..(871): unsure at all n locations
ccacgcgtccgcggctatatcttctttagggaatcttgtttccatcagtctggagattcaaaaaggaaagtgaatcctacacattaccgggagccaaggttttacactaaggtgtttaaagagtgtcaccctcttgatcaagatgggaattcctttgaactctctgtacttacttgcaagtgtgttggagcttacgtgaaaagcaagaaaaatcaaaaccagatatgttggctatggcaaaaggttgattcaacagaagatcgggggtttcaaagatttttggacaatgtgcagtacaaagccagtggaatattacgctatgaacgcatctttggagaaggctttgtgagcactggtggaattgaaactacaaaagaatttgtggacaggctggatctcaaacctggccagaacgttcttgatgttggatgtgngaattggggcggtgatttttatatggctgacaagtatccggttcatgttgttggtattgatctttcgataaacatggtttcttttgcacttgagcgtgctattgggcgtaagtgctcagttgagtttgaagtcgctgattgcaccaaaaagacatacccagacaacacgtttgacgtcatctacagtcgtgatactatccttcacatacaagataaaccctcactatttaaaagtttcttcaagtggctcaaacctgggggtaaggtcctaattagtgattactgcaagtgccctgggaaaccttcagaagagttcgcagcttacattaagcaaaggggttatgaccttcacgacgtcagggcttacggacagatgcttgagaatgctggtttccatgatgtcattgctgaagaccgcaccgatcagttcctcgatg

SEQ ID NO: 388012 - DNA, 655 bp, Oryza sativa
gtcggagagacaagtagagagcagcgtagtcgccgcacttagccatgctcgcctcgccggcgctcgccgccggccgcgccttcgcggcgaccgtgtccgggagcctcggcatccccattccggccatctccgcgccctcgccctcgcaggcgcggcggcgggcctctctcgtcgtcgttgcaaaggtcaaggtgtccactccccaggccgaccgcatcgcccgccatgtccgcctccgcaagaaggttagtggcaccacggagaggccaagactcagtgttttccgctcaaacaaacatttatatgctcaagtgatttgacgatacaaagtcatgcactctggtttcagcttccacaatgcacaagtctctttcaaaggacttggaatactcggcagggccaacagttgaagtggcacaaaagattggtgaagtgattgccaagtcttgcttggagaaaggaattaccaaagttgtttttgaccggggtggtttcctctaccatggtcgcattaaagctctggctgatgctgctagagagaatgggcttgatttctgaaacctccaatggtttgttcatatctccagaatcactggttactttctttttcaccacctgtcggacagagttttccttgtggtatttgatttgctct

SEQ ID NO: 388013 - DNA, 759 bp, Oryza sativa
  unsure (1)..(759): unsure at all n locations
gcttctncctacttcccacgccacccccaccctcgccgccgattccnattccnattgcnctcgcccatggggccgcgctctccgcgaccagctcaccgntctcctctcctccatgttctcccagggtttggtggacgagcagttccagcagctgcagatgctgcaggacgaggggggcacccgggcttcgtctccgaggtcgtcaccctcttctgcgacgacgccgacaggatcatcaacgagatcgccaccctgctggagcaacccgtcgtcaacttcgataaggtcgacgcctacgttcatcagctcaaaggcagcagcgccagttttggtgctcagaaagtgaagttcacttgcatgcagttccgtcagttctgtcaggacaaaagcagagatgggtgccttatggcattggctgttgtgagaaacgacttctatgatctgcgcaacaagtttcagactatgctttcagcttggagcagcaaatccaggcttatgatcccaagcagcaataattgaagcaaaagagtgtagctgcatgtgattctcacatgataaatgtatctttgaagatgtagaccatgttcaatgggcttctggcttagagtgtgttcgcgtgttcagaatcaaatcatttggtttgaggcttcatgcttccaactttgagctcataaccctttaattgttagggacaactgatcggctagtgtcgntgtacctgttanctgtctgtgtncggttgcttncaccctttggaaa

SEQ ID NO: 388014 - DNA, 494 bp, Oryza sativa
cagcgtctccgtgctgtagtatttttccttcttttagcttgcgaagcagatggttgtacagaattgttgtggcagtccaattttgcatccttgtagcatgcttttgagtcgtttacacctgattttcttccttttcaagttgaaaataccaggtgatatgtagtcctagctcaactttgtagaggatgacaggtgtaaatcgccttgatacgttactacggaattgcaacagaattcgatttgcatctttcacggtgctagaattaatctaccatatttttgtttgaaaaaaaaaaaaaaaaaaaaaaaaaaaaaaaaaaaaaaaaaaaaaaaaaaaaaaaaaaaaaaaaaataaaaaaaaagaaaaaaataataaaatttaaaaatatataaaataaatttttaaaaaaaaaaaaaaattgggggggggcctcttaaaggtaccaaattttacttccggttgtttcaaaaataattgttttttttatggggcc

SEQ ID NO: 388015 - DNA, 447 bp, Oryza sativa
ccacgcgtccgcccacgcgtccgcggacgcgtgggcaaaagtcctttggcattcctttaaatcaaattggcccgtatgtttgtgataaattatacaaaatacccatagttttatgaaatttactctaaaaaaaaactaaataccataaaaccattcatctgtctctagataccgttacaacccatgagctgatatagcatggcactagtatagtagaaaattagagcttccctttcaactgctacgagtcctttaaccatcactttacacttggcagttattgaacttacgcctggtataaacatggtggcgaagttcgcttgccactgaaacaatggcttgaattcaattgcctagccgtatgttcatctccccgatgtagaagcccctaaatgtctccaaagggtcaatccacagtatccattcaaagttcaccttcaaactttt

SEQ ID NO: 388016 - DNA, 784 bp, Oryza sativa
cgacccacgcgtccgtgcacagcgctatatccaccggcgagaggcggcggcgtttgcggcgttgtgcacagcctctcccgggagccgctccggggcttcatggcgccatggcctcctgcccacgagcgtatggcaaaggtgaatacatgtgagctgctcgttccctgtagaacacagtgcgttcaacagacacaactggctgaacggaagaagaattctgcactcccataaataaaactgacgcatacatggagcccatggcattgaacaagtcctggtgattggttctgcaagaagggagtatcctcaatgaattgggacaaatataatctcaagaacattggtccaaacaacagtgcaattacaatggtgtagaagtatttgacagcagtatatggagggtttctccagtaggacagactttgcttccataggcaagccaaacattgtgtgatgaaagtttgaaaagtattctgttggaaaggataggtcacttgacccatcagaaggtgagcttagctcctttatcatacttttattcctcctgtacagttcagaattcttgtatatttcactgaagttaaccccagttatctgttcctgtacagtactagtcacttccagcatccatgttgatggattgtagccatgttttattttgctgacaccttcaatagactcaaaatatctgatcaattcacacgagtgctgacctactggacctacataaatctcctcacctcctcgtttcatcaggaatagctcatcaaaagcggacgcgtgg

SEQ ID NO: 388017 - DNA, 872 bp, Oryza sativa
tgccatgtacctgttctctgtccttctatttggagccttggccacaagagaagagcttctaactgataggcttcttactgctacagtggcatggcctgctccagcagtgatttatattggtattattttgtctactttaggcgcagcactgcagagtttgacaggggctccaagattactggcagcaatagcaaatgatgacattcttccagttcttaattacttcaaggtttctgaaggggctgagcctcactcagccactttattcacagctttcatttgtatctgctgtgtggttattggcaacttggatttgattacccccaccatcacaatgtttttccttctgggctatgctggtgtgaacctgtcatgctttctccttgacctccttgatgctcctagttggcgtcctcgttggaaatttcaccattggagtttatcacttgttggtgcattgctttgtgttgtgatcatgtttttgatatcctggtcttttactgttgtctcccttgcccttgcaagcctcatctattactatgtgagcttaaaaggtaaggctggagactggggagatggatttaagagtgcatactttcaattggcactacgaagtctcagatcattaggagcaaaccaagtgcatcctaagaattggtaccccattcctctgatattctgccgtccttggggtaaacttccagaaaatgtaccttgtcatccaaagcttgcagattttgccaactgtatgaagaagaaggggcgtggtatgtcaattttcgtctcgattattgacggtgattatcatgaactggccgaggatgcaaagactgcttgtcgtcagctggacacttacattgagtacaaacgct

SEQ ID NO: 388018 - DNA, 1654 bp, Oryza sativa
cggacgcgcgaattcaaagcaaagccgccattactgctcctcttccattccactggggacgtacgagctccgcgcatcccttccattccattactgaccttggctgctgcggctgcagtgcagagggggtttggtggtgcggttgatttgagcaataaattctctaggggggagggaggtatcggtcatggctgccgctgctgcaaggaggggctcatcgctgctctctcgctggcctgctgtccaggccctccgccgccgcctcgcctgctgtcccctctgcgctccgcagggcagatgggacacaagaattgttgctgggaatccttcagaggttcagcactgcagcagtagcagaggagcccatatcacccccagtccaagtgaactacactcagctcctcattgatggaaaattcgttgattcagcatctggcaaaactttcccaactctggacccctcgtaccggggagctgattgcccatgtggctgaaggcgatgcggaggatattaaccgtgcggttcatgcggcccgcaaggctttcgatgaagggccatggccaaagatgactgcctatgagagatcccggattctgttgcggtttgctgacttgattgagaagcacaacgatgaaattgctgcattggagacatgggacaacggcaagccgtatgcgcaagctgccaacattgaagtgccaatggtggcacggctgatgcggtactatgctggttgggctgacaagatccatgggcttgtcgtgccggctgacggcccacaccatgtacaggtgctgcacgagcccattggtgtcgcaggtcagatcatcccatggaactttccgcttctgatgtttgcgtggaaagttggccctgctttggcttgtggaaacactgttgtgctcaagacggctgagcaaactcctctgtctgctctatttgcttctaagctgttgcatgaggctggactgcccagatggtgttgttaacgtggtatctggttttggacctactgctggtgctgctcttgctagtcacatggatgtcgataagattgcattcactggatcgaccgatactggaaaagtcgtccttgagttggctgcaaggagcaaccttaagtcagtgacactggagctaggaggcaagtctcctttcatcatcatggatgatgctgatgttgaccatgctgttgagcttgcgcattttgcactgttctttaaccagggacaatgttgctgtgctgggtctcgtacatttgtgcatgagcgtatctatgatgagttcgtggagaaggccaaggctcgtgctctcaagcgtgtggttggtgatccattcaagaatggtgttgaacagggccctcagattgatgacgagcaattcaacaagatcttgcgctacatcaagtatggtgttgacagtggagccaaccttgtgactggtggcgacagattaggtgacaaaggttactacatccagccaacaattttctcggatgtacaggataacatgaggattgctcaagaagagatatttggccctgtgcagtccatttctgaaggtcaatgttctgaacgaggtcatcaagagggcaaatgcaagccagtacgggctggctgctggggtatttaccaacaacctgaacacgggcaa

SEQ ID NO: 388019 - DNA, 607 bp, Oryza sativa
  unsure (1)..(607): unsure at all n locations
attcctgatgacatccgtcaagcattgctcgttattgttgaatgctgcntgaagcgtgattatttagcagcnntggaccantncnttcaagctggccattggcaatgcaccatgncctatttggtggncactatggttggtntcctcgagcgtttcggcccgagaaaaagatctacacaacacagtgtggcgcacattttgttcgattgagaccactcgcaagtaccttcggtcaatcaagaggcttttgaccctttgccagcgacgttatcctgctctgccctcaaaatcggtggagttcaacagcctggcaaatgggagtgacctgcaggcccttttgtcagaggagaaagatccaggaaaccctcctagcgaggataggcttcgactcatgccagcgtcaaaagagtgatgcttcaacgcacaagcttggatcacaaatagaatatttgtaatctgtggaatgtgtaaaccaaattttcctgctcttatttccatttttggactcttgcaagactctgagaatattgcctgctaatcaaattactgaagaaagcaatatactnnnnnnnnnnnnnnnnnnnnnnnnnnnnnnnnnnnnnnnnnn

SEQ ID NO: 388020 - DNA, 693 bp, Oryza sativa
cgcgccttcttcctcctcagctttgccgagacctggttgcctcaagccgtgttgcgtgctgcatgctctgaattgaagaactctcttgagcctgaccaggtatatcagaagtggagaagaagattggaagcatgagggaaatgggagagaagaggaggcgtggacaccttaaccctgctggttttgcaggagggttgcatgatcatgaggagaagaagaacgaggagcataagctagacatgagtggcatgtccatggatgccctcccacacctcaccatgtctcttggtcaagtcaccatcttggatctctctaacaacaatcttgagagcatcccggagtcaataatcgctcggctgctgaacgtggtggtgctggacgtgcggtccaaccagctgaaatcgctgcccaactccatcggctgcctctccaagctcaaggtcctcaacgtctccggcaacctgctcgagtccctccccaacaccatcgaggagtgccgtgcgctggaggagctgcacgccaacttcaacgagctgacgaagctgccggacacgctggggttcgagctgcacagcctccggaagctgtcggtgaactccaacaagctggcgcagctcccctcctcgacgtcgcacatgacggcgctcagggcgctggacgcccggctcaactgcctccgcgcgctccccgacg

SEQ ID NO: 388021 - DNA, 563 bp, Oryza sativa
tcgtttcagccgattcttacaattccgggatccacgggcccaaagacgacatccgcttgttgatcccatggttgtttcagagatccggcgatgcttgaatgagggaattgagttccaaggtgagctattgaattttcggaaggacggtgctccactgtacaacaggctaaggctcattccaatgcatggggatgatggttttgtgactcacgtcattggaatccagttgttctctgaagctaacattgatcttagcaatgtatcatatccagtgtataaacaacagtccaaccacagacccaacattcaagagatcaaccctgcttctcatgaacatattcctaagattcaaagttccgagtactgctgcatcctccagctctcagatgaagttctggcgcacaacatattgtctcgcttatcgccaagagaatgttgcatccatcggatcagtctgcactagaatgcatgagttgaccaagaatgatcacctgagaaagatggtatgtcaaaacgcgtggggaagagacctcactgtgaggctcgagatgagcaccaagatg

SEQ ID NO: 388022 - DNA, 475 bp, Oryza sativa
ccacgcgtccgcccacgcgtccgcgcacgcacgcaccacacacgtagcagcagagcaatggcggcggccatggcgctgcaggtggtggccggcggcggctgctgttgccagcggcccgttcttggagctggtcggcggcggttggcggcggcgcgtgcggtggcgtcggacgcggcggcggcgaaggtgagcgaggaggaggggaaggtgaggctgggtgggtcggaagtggcggtgagcaagctcggcatcggcgcctggtcgtggggggacaccacctactggaacgactccgagtgggacgacaggagactgcaggaggctaaagcagcatttgacacaagcatagataatgggatgaccttatttgatacagcagaagtttatggtacagcgctgatgggagcagtaaattctgaaagtttactcggaggtttcatcaaggaaaggcaggagaaagaacagattgatgttg

SEQ ID NO: 388023 - DNA, 528 bp, Oryza sativa
ccacgcgtccggtgcaatgcgtagagctcgcaatcgccaacccagcctaaccaggtgagttcagggtcttcaaccagttcaccgagcagttctcggtcaacgagctggcaaagctggttacggccgccggtgcaaagcttgggctggaggtgcagaccaagtcggtgcccaacccgcgggtggaagcggaggaacactactacaacgccaagcacaccaagctcatggagctcggcctggagccccacctgctgtcggactcgctcctcgactcgctgctcaacttcgccgtccagtacaaggacagggtcgacacggcgcagatcatgcccagcgtgtcgtggaagaagatgggggcgaagccgaagacggtgtccgtctaagaggaggctggttttgccatggcggggtataatgtcaaccgtgacattgacattataaatttggtgtgtagtaatgcaataattatgtgcgtttagtataatgcacgttgtaagtgggtgtggtttcggtgttagatttcttttt

SEQ ID NO: 388024 - DNA, 704 bp, Oryza sativa
cggtaccggttcgcgggttcgaggctacgacgtcacgcttaaagagacaccgacgttcgcacacgcgtccggtggccccaaatctgagttcttaattaatagttgtggagcaaggagcttgaaggttaaagcaaaaatggattctggtgatggccttacaagacttgctccacttatgtttgaaactccaagcggtcaacttctggtccagatactccaatcacaccctcacctacttcctgcaacagttgaccagcaacttgaaaaccttcaatcagagaaagatgctcaagagaaagaagcctcgaaagttccccaggacctcctttacaagagaatagcagaagtcaaagagaaggaaaggcagaacaccttggaagagatcatctactgttggattatttataagttcatggagaatgacatatcaatgacacctgcattagcaccattaggtggccctgtacgtgacatctcctcattgcctaaccaagaggataggttgcaaagcatacattccccggacgctcttgagatgatacaaaatcatctcaaccttataatgggtgaaaaggtagcagccccactagatacagttgttgaaatcagcaacttaaatctgggaaagctttatgcagcatccatcatgtatggctacttcctaaagagggtagatgagcgattccaactcgagaagaacatga

SEQ ID NO: 388025 - DNA, 511 bp, Oryza sativa
ccacgcgtccgatatttgctacgtcgtcagagaactcgtgcagccgccctcgcggccggagttgttggagatggcggaggtggcgccgccggcgccggcgccggagccgaccaaggacatcgccgaggagagggccgccgtgccggcgccggaggagtcgaaggccatgaccgtcgtcgatgatgctgagaaagctgcagcaacaggtggctcacacgaaagagacgctctcctgacgacggtcgccacggagaagaggatatcgctgatcaaggcgtgggaggagaacgaaaaggccaaggcctgacaacaaggcggccatgaaggtggccgacatcgcctcatgggagaactccaaggtggccgagatcgaggccgagattaagaagtaccaagagtacctggagaggaagaaggcggagcaggtggagaagttgatgaacggcgtggcgaaagtgcacagggcggcggaggagaagcgagcggcgacggatgcgcggcgaggggagga

SEQ ID NO: 388026 - DNA, 468 bp, Oryza sativa
cccacgcgtccgaaactctctctctctctctctctctctctgaatctctggatctctgaaaactctgaacattccaagaactcataagttacctgtgatctgtgaagcttgagctgaagctgtgacagtgtctcactgatcgttgatcactcagcttggctgctactgtgcattcactgcgtggttagctagctaactgagcacaagagctttagcaatggcgacgccggggcagcagctgccgccggggttcaggttccacccgacggacgaggagctggtggtgcagtacctccggcggagggcgctgtgccggccgctccccgccgccgtcatcccggacgtccactacgccgccgtgctcgacccctgggacctccccggcgcccgcgatggtgaggcctacttcttcagcttccggcagctcgcggcggctagcggcggctgcgggtggcggaagaggagggc

SEQ ID NO: 388027 - DNA, 550 bp, Oryza sativa
  unsure (1)..(550): unsure at all n locations
ccacgcgtccgcagcgcctcctgcgcttcaaaagctcagcaacaaattccctgggcttcatgtgtacacgggaacaattgattctgaagttgatgagagagggttcatagttccggggttgggagatgccggcgatagaagcttcgcgacttaactatgctaattatcgcagctgctgttctacctccacgagagggattggcgtaagctgaaatttccgaggattcgagcgcttttgacttgggagtcaggaacagtcgagttcacgttcacctgtagattgcctcgttcgagattctcccttcggaacttatcgttttgtaattatccattttgtgttgtcatgttgaatataggattggttcacgtccatccacgtttacaatttgttgggaatatgcatgtttaatgttttcaattatatcttacagatttcttgatactccatgggaaaaaatgttgacgatgccttttccaatcagagtaataaagcaatgtgcaaggcagtactgttggtgtgtcgnnnnnnnnnnnnnnnnnnnnnnnnnnn

SEQ ID NO: 388028 - DNA, 439 bp, Oryza sativa
gcggggcacgcgtccggcggctacctcctcctctctctccccctccagcccaccaggactggcgaggatgtggcactgtcgaggcgcatcgcggcaaccttccttctcatgacaatggcggacttcagcgaccagctcttcgactggcaggatcgcctcttcgacaacaccaatggccgcctcgagttcagtggcaatacctggacttcgctctggccaggcaccggcaagcccggcctctggactgcctccatatcccgcatgggcgcgctctacagcctcatcgttcgcgaggaagagatacacatagctcaacgaaagcatagcaacaatggccaagaagacgatcgtgacgaggacattgagctggtgatcccaccggtgttcaatggctgcacccaggtgctcaccgccgacgaccagaaggcggcacgggacc

SEQ ID NO: 388029 - DNA, 558 bp, Oryza sativa
ccacgcgtccgcggacgcgtgggctcgctcgctcgctcgctgacgtgtacgcttcgcggcggaggcggcggcggcggcttccgatggcggaggcggcgggggcggcggtggcgccggcgaagctgggtctgtactcgtactggcggagctcgtgctcgcaccgcgtccgcatcgccctcaacctcaaaggagtggagtacgagtacaaggcggtgaacctgctcaagggggagcactctgatccaggttaggtgctacgccacctgtctgtcaaactgctttcctccccctatctatacttgtgtacggttttgtgctgcgtctagagactgttcgtgcaattaccgccgcaaatttgtgcttggatgttgagaggtaagattctagcaggcgatcggcccgaaatccacaaggctaggctctgtgggggaagatgaataggaaggtgttcgatgaaatgcacaactgagaaaattgagatgaacatgagaggtttcggtgcagcatgtggaagcgcctcttttcgggattttcttgatgcaatataaagcaaagtga

SEQ ID NO: 388030 - DNA, 477 bp, Oryza sativa
ccacgcgtccgctttctgggaaccagcagcctgtaagagttgaaatcaccgaagctgcaatggaagtgggtgctgaaaaactttctgagctggtgaacgacgcctacaaggatgcacatcagaggagtgtccaggcaatgaaggagaggatggctgatctggcacagagcttaggaatgccagcaggccttggtgatggactcaagtgatagtgtggtacatgaatgcttttcaataaaaaaaaaagtgtatctcaattttgtatactagctgtattgagtccatcagtttaaaattcgtggcgagtactgttagctgtgtaagaactgtaatcgagaacatctgatcctgttttccttaatcattggcacaccataatgcattgacgcaagtgtgctgttttaaaaaaaaaaaaaaaaaaaaaaaaaaaaaaaaaattatttttattatattataaaatatatttttaaattatat

SEQ ID NO: 388031 - DNA, 631 bp, Oryza sativa
  unsure (1)..(631): unsure at all n locations
gccttcctgagtaatccacaacatgattgcactgagactccggaaaacattttgtgacgatcatgaagacttcgctctgcacctaggtaacagtgacgcgggtaagaactaagaagcaagctgtgagagaacagtcaaggaaaccgctcccggtggcagcatatgtgactaagttagtggttgactaatttcattgctagaggtagagcaggaggatgctggtgtattgatgctgccttagccagaaaatggggtagcagatgaaatctagcaattggcatacatgtcaatgtgtcatgttgctctgcatgacgttgtcctaatggactgtaacaatgggatgttgctgcaatcagaagcacatacgctcttattaacatgatttgctgttatgcaaatcttttttctgccggtnnaaaaaaaaaaaaaaaaaaaaaaaaaaaaaaaaaaaaaaaaaaaaaaaaaattaaaaattttaaaaataaaacaaagtttaanaactctaaaaaaaacaaaanacaaaatattcaatatactgacactaaaacaaactaaatttggggggggcgccttcaagagaaccaaagttaaactccgggggttggaaagttaaaatcttttttttagggcc

SEQ ID NO: 388032 - DNA, 473 bp, Oryza sativa
gctggctcttcagcactgtatctttttgcttatgccatcttctactttttcaacaagctggagatcacgaagcttgttcaggcattctctacttgggttacatgctgatcatctcgtatgctttcttcgtgctgactggtaccattggcttctatgcttgcttctggttcgtgaggaagatatatgcttctgtgaagatcgactgatgagacagctcgaaccatcatctgctacaaatgtgatacaatggtgtctcccaattaacatatataaatggaagtgggatgtgcgaccggattggatggtttttggtagaacatgtagtctggtaggaggtaagaattgcctgatgttcaagagagttcttgatactccctgtagcgtgacatgaattttgtaactctgaagatgtttgagtgcttcttgtaatattccatgtctctttatcttacggcttcacatatttctttttc

SEQ ID NO: 388033 - DNA, 840 bp, Oryza sativa
cgacccaggcgtccggccacgcgtccgggcggccagaagctctccttccatgtcgtttagcgccacgccatggaaaagctctgtgaatggatcttgaggcagcatgaaaatggcttgaggctgacagttgctgatatagcctcgcacatccagcacgagatccagtatggaggtgacaatgcatcagcctctccaagatcacagcatgcaagccaaagcactcaagctacagtgcctattcccaacacaatgagccagcagccatcaccaaacttatttgcgctaggaaatacaggattggtgcagtccaagaactcagcggtcttttcaaatgcactatctagccccgttcgccggagcctgcaaccattccacctggagcagggtggcgatgcggggtacttcgcaaacggcgttaaccgcgatcaaaactcgacggcttcgaacgattcatccatggacatgcattcagacagcccagctcatgactcttactgagttgtttgccccctctgtggagctggaagagcaacacttccagtggaacagaatgtgtgcctttgctaccacagctcatgtaggactattcaatttaacccccctcccctagcctccaatgatgctaagcttgtattctgttgctgccaatcaccagttactagtaccgattacattgctaagatattgtaacttgcatgtatttatgtccagagtaaaactgtactcggtttacctgtgcatactactacagttggtatgtggtgaaaatgtaggtggcaaagcaaaattgagaagaataaacagtattgtactgttgttccaaaaaaaaaaaaaaaaaaa

SEQ ID NO: 388034 - DNA, 703 bp, Oryza sativa
ccacgcgtccgcccacgcgtccgcccacgcgtccgcccacgcgtcctttccacgcgtccggcttcggagtgcatgcaatcctttaccgtgttctacaagacccgtcatcttctgcagaggctctgagaaccaaggaacttgcaattacaaatcttaccaactacctcactaaagagaaccgggctgaggagctgcgaaaccttctaacccagctcaggcctttttttctcgttgattcccaaggcaaagactgcaaaaattgtccgtggaatcatcgatgctgttgccaagataccaggaacatctgaacttcagatctcactctgcaaggagatggttgaatggacccgtgctgagaagcggacattcctcaggcagcgtgtggaggcaaggctagcagcccttctgttagagaatcaggagtacactgatgcgcttactctccttactggtcttatcaaggaagtcaggaggcttgatgacaagttgcttcttgtggacattgaccttctggagagtaaactccacttttctctgagaaacctgccaaaggccaaagcttcattgactgctgctagaacagcagcgaatgccatttatgttccaccagcacagcagggtactattgatctgcagagtggaatccttcatgctgaagaaaaggactacaagactgcatacagctacttttttgaagcatttg

SEQ ID NO: 388035 - DNA, 661 bp, Oryza sativa
  unsure (1)..(661): unsure at all n locations
ccacgcgtccgattcaagcgggccttctccgcgccatggccaaagacgctcagataccagggagatggacggccgttctggaggattgtggtggcagaggcaaccgaatgcaccaataatgattatttcgaagaagtatatgagtattacgctcatggagatgcatggcgtctgcctgctggggcttacgaaacactgcgtgatctaaaggatgctggagttaagctagctgttgtatctaacttcgacacacggttacgaaaattacttaaggaccttcatgtctcggatatgtttgatgccattgttgtatcatcggaggttggacatgaaaaacctgctccagagatcttcaagagagcattagatcaaattggcgtagaggccagcaaggcagtacatgttggagatgatgaaactgcagacaaggcaggtgctaatgccatagggcttgagtgctggctgtggggacaggatgtgaggacattttctgagatacaagaccggattctaacaagatttccacaatgacatcatagaaacctcaccgcaggtgatcttcacaggctttctttttttttctctccaaagcttcgttgtcatgaccaanangcgccaacttttgtaatgtnttaagtcaaatatcactagcattggattt

SEQ ID NO: 388036 - DNA, 1194 bp, Oryza sativa
  unsure (1)..(1194): unsure at all n locations
acagcttagctagtaacagtaggccactactagcatcactgcatttctagttaagtaacaacactagagagagtaaggagtagtgagaccatggggagggatcaggcagctgcagcagtgatgcatgagaaggtgaagctgttcataggagtgctggccctgcagttcctgcttgcaggattccacattgtgagcagggcagcactcaacatgggcatcagcaagattgtgttcatcgtctataggaacctcatctccctcgccttgctcgcgcccttcgcctacttcctcgagaagaaagatagaccaccactgaccttctctttgctggtggagttttttcttctagcactgtgtgggataactgcaaaccaaggtttctacctcctagggctgtatcacctttcaccaacttatggttctgcaatacagaacacagttcctgccatcacctttgccatggctgccgtcctcaggcttgagcaagtagacctaggcaagaggcatggggtggccaaggtggtgggcacggtggtgagcataggtggtgccacagtgataactctctacaagggcctaccactgttcaatcacaatctgaacatcaagtccctgtcttcctcgagcctcatcctcaactggactctgggctgcgtcttcatccttggccactgcctctcatggtctggatggatggttcttcacggtgccagttctgaagaggtacccagctaggctgtcagttctatcactgacctgcatctttgggctcctccagttcctggtcattgcagccttcactgaagaagacctgagcagatggaaggtgaactccggaagcgagctgttcacaatcctctacgctggtcttgtggcatctggcgtggcgtttgctctgcagatatggtgcatcnacagggganggccgctgttcaccgccgtgtccanccggtccanaacgtcgccgtcgccgtcatggccgccatcattctcggagatcagctatactcaggaaggatcatcggancattctgattgtgatcgggctgtncttcctgctgtggggccaagcgaaganaaaaaaaacaagaacaatctgcnggaacaatcntccgtgccgggaagaagaaganannacatcnngaagcatctgctccggcaanaaaanacatctcncaaaaanaaaaaaactnn

SEQ ID NO: 388037 - DNA, 507 bp, Oryza sativa
ccccgcctccgcaaatctctcgatctcccattcgagcgagatgaagctctccatccagtcattcgcccgcaagctctccctcccgtcgccgaagcggacgtggagcagcggcggcggaagcagtaagagggatggtggcatgtccaagaacgggagcggcgtgaagcgggccatctcccgcagcgaggcgtcgtcgttcgcgtcggcgtcgtcggagtcggagtcgtcctcggacgacgcgctgatggcgaggtcgacaccgaggtcggtgctccccgcggagatctcgcggcgggagctggaggccgtgctccggcggctcgggcacggggagcccgacgacgaggagctggacgccgtcgcggccatcgccgccgaggccgaggcgggcggcgggggaggacgagctgatggaggcgttcaaggtgttcgacgccgacggcgaacgggccgcattcaccgccgaggagctccgcggcgtcatggtcgccatcctcggcggcgacg

SEQ ID NO: 388038 - DNA, 540 bp, Oryza sativa
cattgggtgttccaccgctttgcgcctttgcctatcaatcgccttggcccccagagtagtacagcgtcgatctctgcagccgtgggtagcaacagcaagcgaaggcgagtgaaagaaactcgatcgatcatcagtggcggtgaaagaaacaaaccaggacgttcgaacgatacaggagagatgaagatggagcaggtttcgcagaggaaggcgccgctcctggttctagtaatcttgtgtggccttcttcttcttcttcccctggtttcatctgtgcctctgtccagaagcgtgtccttgaggaaccaccaagcatcagtctctgctctggaggcgcctgttcaggttgtggcggcggcggctgaagagcgagacctcgacgaagtggcggcgaggatggtgatcgaggtcaacgactaccctggcttcggcgccaacaaccgccatgatcctaaaagccctggaagagcatgacacgatctctgatctgatctgatctgcaaggcccttgtgatcgatacatataggaatattcagtat

SEQ ID NO: 388039 - DNA, 403 bp, Oryza sativa
ccacgcgtccggggcgcgcaagccatggtgagagcgggtgtggctctccatgcccttcacgccggcgtgggaagaggcgccgccgcctccctcagcccggccgcggtggtgatcttggccgtcgccgcaacggtggccgtggcagccgtcgccgcgttcggctgcgcggacggggccaagaggcagcggcggaagaacaggaacgacgtctactactacggccaggggtacccgccgccgcctcccgccggcgcgtacggctacccggcgcagccgccaccccgcggggtacgcgtacccggcggcgaacgccgggaggcctggccgcagcgggttcggcccatgagccgggctcgccgtctgcgccgccgcggggcttgccaccggggccattatcgccttg

SEQ ID NO: 388040 - DNA, 679 bp, Oryza sativa
tctgtcgccgccgcgagcgaaccgggaggagaaagtccaaaccctcgcgaaggcagagtcggggatagggatatcgccgaggtgggagaaggcgacgtcgccgacatgaagctgttcgtgaagaccctgaagggcaccaacttcgagatcgaggcgagccccgaggcgtcggtggctgaggtgaagagaatcattgagagtactcaggggcagaatgtgtacccggcggatcagcagatgctcatacaccaagggaaaattctcaaggatgatacaactttggaaggcaacaaagttgctgagaacagcttccttgttataatgctgtctaaggccaaagcatcatcaagtggagcttcaactgcttcaaaggcacctgtgagccagtctcaaccagcaactccagttgcctcagttgcaagaacaccacctccacaagcacctgttgttacacctgaaccggcacctccaagtgcacagcctccagttgcttctgccactccagctgctgctgccactccagctgctgctgtgaccgcatcaagtgatgcggatgtctacagtcaggctgcatcaaatcttgtttcaggtagcaacctagaacagacaatccaacaaattcttgacatgggtggttggcaccttggggaacggtgacatggttgtccgtgctttgcgt

SEQ ID NO: 388041 - DNA, 495 bp, Oryza sativa
ttcccggtcgaccacgcgtccggtgcttcttggggagagagaaggggagagagagagagagagagaatggcattgcagcaacgaccggggatgctcggcattggctgcagcaacgtcttggcacgagcaagggtgcagcaatgtctagcagcggcgtcccactccaatatgccatgtctacccgtcctcctgcatgtcaatggcagcaagaagcagggtagcagcttcctttcttctcagaggatcggcttaagtaggaggaggaggaggagggacctgagcggcgtcgttgtcgcggaagtgagcgccgccgccggtgtcacgccggcgtcgtcgtcgtcgtcgcctggcggcatcagcgtcagcgatgttctttggccctccgccggtgcattcctagcaatggccgtgctgggaaggatggatcagatgatggcgtacaagggagtatcattgacaattgcccctctcggagcagtctgcgatgtgcttttc

SEQ ID NO: 388042 - DNA, 435 bp, Oryza sativa
ccacgcgtccgcggacgcgtgggcctcagtggagctcacccttatcccccccagctccagaaccttctccgctctcctctctcgctcgctcgcttctcgcggttgtcgtcggcggtagcgagctcatggcgtcggtgcagctgtccgccggcccgcgggtgtcagtgtcaccggcggcggcgctggtggcgatgccttcggtcgccgccgccgcatcgagggggcgccgcgggtaccgggggctcgtcgtgagggccgccacggtcgtgtcgcccaagtatacttctatcaaacccttgggagatagggtgcttgtgaagatcaagacctctgatgataaaactgttggaggaatattacttccaacatcagttcagtcaaaaccgcaaggaggacaagttgtagcagttggagaaggggagaagcattgggcaa

SEQ ID NO: 388043 - DNA, 714 bp, Oryza sativa
  unsure (1)..(714): unsure at all n locations
ccacgcgtccgcaacaatctggaaccttccaattatgagacaccattagatgttcatgttgtagagaaaacggacatgacacccatgaatgctactgttacctctctgactagtaatatcaaagaactagctcatggagaagtccaaaaggattcacagcgatctgcaattgcatcatctgttacgagttcatatagcactgcacacccaactgaggacgcagactctagaaccctctatgttagcaatgttcattttggtgccaccaaggacgcgctatctcgccatttcaacaagtttggtgcggtgctcaaagtagttattgttactaatgcagcaacagggcagccaacaggatctgcttacgtagaatttttacataaagaatcagctgaacgtgctctttcattgaatggaacatcattcatggcacgcatcctcaaggttgtcaggcgaagttctcatgaagctgcacatttttatggttggcctggtggtgggcgaacatcaatgtatgccaggcatggtagaatggcatacccaaggggtggcctncctggtagcaccttcagagggcgtgcttccaatgatagcttggtgctagaagtttacaatgggaacgggagccttcagttacttgattcaaatacaggtgcaccgtggnacttccttctncttgacaggtgctttctcctgcccacataggggngatga

SEQ ID NO: 388044 - DNA, 1223 bp, Oryza sativa
  unsure (1)..(1223): unsure at all n locations
ccacgcgtccgcccacgcgtccgcccacgcgtccgcccacgcgtccgcccacgcgtccgcccacgcgccacacgggagaagacggcggcggggagcccgcggcggctagggttttgattgatttgtcgccggcgacgcgccgcccgccatggagagggagctgctggagacgttcgaggccgccaagaaggcggccgaccgcggcggccggggcggacgactccccggaggccgaccgctgcctcgacgcgatgcggcggctgcgcggtctccgcgtcaccaccgacgtcctcgtctccacgcaggttggaaaacgtcttcgttaccttactaagcaccctcactcagacatacaatccatggctacagatcttctggggtactggaaaaaggttgttatcgaagaaggaaagaaaaatggtaccacagaaaatgttggatcaaccaactcagccgccagagctgaaaaggctcagcccatgaaggttgataagagttctgcatcaggaagtgtgaagcctgagaaaagagaagtcaatgttaggggccagaagcctgagagcatcaaggttgagaagatcaccaataatgattccaaaaaccaacaagtcaaggtagagagggctccaaaggaagccactagaactcctgatacaaagaagccatcttctgttccaaatggccccccaaagctgacatctcttgtcaaatgcaatgatcccactagagataaaatccgggaactacttgcagatgccttctccagggttcatggagagactagcaaagatgacagggaggaagtgagaaacatcttagatgaagtggatgcacgagatccattcagagttgctgtgaccgttgaatctgcgttatttgagaggctgggacgttcaactggggctcacaaggcaaaatacaggtcaataatgttcaatcttagagctgacaacaacactgatttccgaagaagggttctccttggccaagtgaggcctgcagaggcttgttgacatatctccagaagagatggctagtgacgcgaggaagcttgagaattagcagatcaaggagaaggctttgctccattgtgagcgtcgaggagccccaaaggcgactactgatcagttcaagtgtggcaggtgtggcccgcggaagacgacttactaccagctgcagactcggagtnctgatgagccaatnacaacatttgtgacatgcgt

SEQ ID NO: 388045 - DNA, 417 bp, Oryza sativa
ccacccgtccgcccccccctccggcagcggggcgggggcggggcgcggcttggcgcgacgccgagtggtgcatcccgtgatttcgccgacgtcttcgccgcccgcggggcggggggcagcagcaggaggaggaggaggaggaggggggaggcatggggaacgcgagcgggcgggaggaggaccccgcggcggcggccggggagggggacgtcgaggactcgtcggtccggtcctcggagcgcggcttcccgccgtacggcggagggggcaaccacgtgcggcgcgcgtgctcggtgggcgtcgtctggggcggcggtggcgccggatcgccggccgggagccccggtcggtacctctcgccggggatgttcgtttcccaaacacctgtgccttcactccaaagagcaactgatgtaa

SEQ ID NO: 388046 - DNA, 658 bp, Oryza sativa
ccacgcgtccgaatcgattcgagtctcttttgatgtttaatctatgtgacaaacttcccggaggtgatgtaatacttgaaacactagctggttctatatcatcgagaagatcaactcaagttaaccaacctggcactagcagtggaaggcattcaatgtccccctttactgttctgtcgaatcttggagtggtatcaccaattaataaaggtgagagactctttgttggcgagatagttgttggggaaatgagtgccttgcagaaggtagttaatgagtcaatgaacaactataagaaggttgaattggcccaagccacagttgatggagtcaaagttgatggcctggatacaaacttggcaagtgatgaaggaattgctatctcccgtaagtgagctatggaggtttttggtgttgctggcatcttgggatgagccaattaagtccatggtattttgcttttcatcgtcttatatcattatcagtatttttaggaaattcttggctatcataacttgcatttgcacttgcactcatccacaaagtactgatgaggcttttcctagcttggaggagtgtgttcctataacatttcacccctgttggagattactcgtctttgatcaagaagtctggatagcacaagctaaaaccaccc

SEQ ID NO: 388047 - DNA, 1025 bp, Oryza sativa
  unsure (1)..(1025): unsure at all n locations
cggtccgcgcggggccgttttggtcggggttttagcgagcgcgtgggaggccggaggcgacgacgacgaccgcgccgccgtcggagaagaaggccgcggaagcaccagtaccagcacccgtatatgtcttctagccccttctccgatctggtggtagtcgtgctcctcgtctgcgccgtcgtcgccgcagccgtcctcctccccctcgtctgcgcccgccgatctatgcaccagaggctccacggctggaacaagtccacgtcgatgctcagggacgggttcggggtcaagtattccgggttcctccacataaggccgtgtggtttctgtcgaggagattgacggattcgatcgattcgtgttcgtctccgtcaaatttttgcacaagagaaaaaaaaagtttcccccttttagagtttttccccttcagttttgtcagttttggtgaggaattttagagttcttttccggcaagagttagaagaagagagaaatggccccttccaagcagcagcagatgctcctcaagaaggtgatggcgaagaagcccaagacgaagaggctatccgggtttggccttaaaccctctgctgctttctccaggccccatgtgccgtcggcggcggcctccctgcagccaagccgtcgcgtccgcgtcgtgttcgaggaccctgacgcgacggactccgactctgacgacgacgaggacgccggcgccgcctcaaagaagcgctactttgagctcttcattggcaagccagcttcgtcgacgaagcaggcctctccggcgtccaccgtcgctgcctacgccaacatcggcaaggttgggagcacctgctaccgtggtgtgcgcctccggaagtggggcaagtgggcggcggagatccgcaaccccttcaccggccctagggagtggcttggcacctttgacactagctgatgcggcctccgtcgnctaccagtctnnctcccgcaacttcgncgaagagaagcgccgncgtggtgtnggctgctcttgcctcacc

SEQ ID NO: 388048 - DNA, 681 bp, Oryza sativa
  unsure (1)..(681): unsure at all n locations
ccacgcgtccggctgagcaacgggaagtacaggagcgtgtggcaccgggcggtggtgaactccgacagggagaggatgtcggtggcgtcgttcctgtgcccgtgcaacagcgtggagctcggcccggccaagaagctcatcaccgacgactcgccggcggtgtaccggaactacacctacgacgagtactacaagaagttctggagcaggaaccttgaccaggagcactgcctcgagctgttcaggacttagctcatcgcaagctcactctacgagtcgacattaaaaccgtgaggcgaacactacacactgtgaccctgaccacctccgaattaagtttgagttctctcttggatgcctatttgctctctgttaattggacactaaattcctcagcggcctccattcctagcttcacttataaggaaaaagagagcacaaagagatttcgttaatagccatcatagggaagtgtggattgtgttgaaggtcctaatcagttggttttttgtccctggttttggatattaggagggtctcttagtatctttctttttgtggaacaactttcagtgtctgtaactctgtattcctttttttacttgcaaagggaatggcatcctttgtggttgtagaactccttttcnnnnnnnnnnnnnnnnnnnnnnnnnnnnnnnnnnn

SEQ ID NO: 388049 - DNA, 1386 bp, Oryza sativa
  unsure (1)..(1386): unsure at all n locations
tcgcnacgcactcacgtgcactgcacgccgcaacacaacgcgctcgcctcgcctcgccccgatcggtggtggtgctcgccgtcgccgggcggcgctagggtggccggagaggctccggagagtaggaggaggaggaggagccggagatgagggggtcgaggaggccggtggccgtggtgctgagctgggtgcggaggcagccgcccaaggtcaaggcgttcctcgccgtggtcgccgggatggccgcgctcgtcttcatccgcttcatcgtccacgaccacgacaacctcttcgtcgccgccgaggccgcccacgcgctcggcctcggagtcctcatctacaagctcaccaaggagaagacctgcgccggactctcactcaagtctcaggatttaacagcactatttctggctgttaggctgtactgcagttttgttatggagtatgacatccataccatacttgatacagctacactagcagctactctctttgtcatctacatgattcggttcaaactgagggtcaacttatatgctgggacaaggacaatttttgcattgtactacgtggtgttaccttgtgctggcctagctctcctggttcatccttcaacatcgcataacatcatcaacaggatctcctgggctttctgtgtttatttggaagctgtttcagtgctgccacagttgcgtttgatgcaaaacacaaagattgtggaaccatttacagctcattatgtgtttgcattgggtgttgcaaggtttcttagctgcgcacactgggtccttcaggttttggatacccgtggtcgcttgttgactgctctgggctatggtctctggccttcggtggtgcggctctctgaaatcgggcagacgttcatccttgctgatttctgctactactatgtgaagagtgtttttggtgggcaacttgtccttcgacttccgtctggagtggtgttaaaatgcagcaggatgcatcatgttatgggctttgtgcacgtttagtacattgtctgttaccatagccttgtttgtttgatattttttctcagcttcaaattgctcttgtgataattgtacctatctttgaccttgattatatttagtgtctagcttttttcttttatctttttattacttttatttggcggccttttcttttaggttccctttttttcctttcccgttcatgttaccttttcttttttttttttattgtcgttatccttttaatttttttttcacttttttcctcttttttctacatctctcccttttttttgttataaactcttctggctgtttttttcctctcttattttcttcttatctttctttttccctctttttttttcctagcctttgttttctctctttt

SEQ ID NO: 388050 - DNA, 564 bp, Oryza sativa
gcttctctctgaaatcgttcagacgtttcatccttgctgatttctgctactactatgtgaagagtgtttttggtgggcaacttgtccttcgacttccgtctggagtggtgtaaaaatgcagcaggatgcaacatgttatgggctttgtgcacgtttagtacatcgtcggataccagagccttgtttgcttgataatttttttcagttgcaaattgctcatgtgaaaaatgtacctaccagagaccgtgatgaaatctagaggctagtttttaactacttagcttttatcatacgatcagttgtcgcaggccccaatagagaggccaagatagttcccctaatttggatctcgttattgatcacctcctgctgttggtgtgcaaagtttgtttatctagcagaactctctagtcagcatctatgatgggccagaagcaaacccacgtgacatcagagaccatacaaaaactaggaaacagcaactactgttggcccatttgtgctagaggctgaatcagtcaagcaaattgcaagtgcattcgagcgttggaagaaacaacaaaa

SEQ ID NO: 388051 - DNA, 1179 bp, Oryza sativa
tctaattattgatcccagcgttaccatgatgactgtggaggaaaaaccagatgtgacttacaatgatgttggtggatgcaaggagcactttgagaagatgcgtgaggtggttgagcttgctatgctttacccagaaaagtttgtcaaacttggtatcgatcctcctaagggagtactgtgttatggccctcctggaactgggaaaacacttcttgctagggcagtggccaaccgcacgggtgcttgctttattcgagtcataggaagtgagctcgttcagaagtatgttggtgagggggcccgcatgggtcgggaactcttccaaatggcacgatcgaagaaggcttgcattgtcttctttgatgaagtcgatgccatcggtggtgctcgctttgacgatggtgttggtggtgacaatgaggtccagcgcactatgcttgagattgttaatcagcttgatggatttgatgccaggggaaacatcaaggtcctcatggccaccaacaggcccgataccttggaccctgcattactacgtccagggcgtctggacaggaaagttgagtttggcctgccagacctggagggccggacccagatcttcaagatccacactcgcaccatgaactgcgagcgggacatccggcttgagctgctcgctcgcctctgccccaactccactggggccgacatacggagtgtgtgcacggaggctggcatgtacgccatccgcgctcgcaggaagacggtgacagagaaggatttcttggacgcggtgagataaggtgatcaagggttaccaaaagttcagcgcaacgcccaagtatatggtgtacaactagagggcactgaccttgatttcccgtttcttcctgtgcccctcctttggaccttcagaaagattgagcctgtttgtttccctttcttactcaaaagaaacctgggctgttttctgcatcatatgacacgctgggataatcttatctttagaatattgaaagatcacaatgggaggatgcgatgtgccctacactaaactgccgctcttgtgctagactgacgttacgctctccctctcctttcatgtcttgtgtcggtatcgtatcttttgtgtcgtaattgcttgactggaaggggtcaaggtgatgccggacagcacgagcaattacgacacaaaag

SEQ ID NO: 388052 - DNA, 905 bp, Oryza sativa
  unsure (1)..(905): unsure at all n locations
ttcctcttcttcttcttgctgcttcttcttcttcttctgccacttggttgctatatacaccaagctcgatcacgaaactatcttagctgctgctgctgctgctgcgttggagaagaagagagtggcagggtgaggatggccggggtgcaggtgatgccggcggtgggggcggtggcgacggcggaagggagctgcagggcggcggggcagaggaggggccgcggcgtgagcagcttgttcgccggagactggaggcggcggcctcgccggngcggcgtgcacggccagggtcaggggcaggaggcagcagcggcagcagcagggccttcgccgtcgtctgcaacctcggtggcacctacgatgaaggtttcgaggacatccacgtgcaactggattaatgtgttcacctacaaagccgtcaagaccgtgctcacgcagctctacgaaatgaacccaccaagctaccgatggttatacaacttcgttgctgtaaacaagcctaccgatggcaaagtgttccttcgtgctcttggaaaggagaagcaggagcttgcagagcgagtgatgataactaggcttcacttgtacagcaaatggatcaagaaatgtgaccatgcgatgatgtacgaggaggatatctgacgagaaccttggcgttgaatgcgagagcggctcatggagacggtcatctggccaacagacgacaccaacactgagaagattggctgaaaaataatgcctgatctgtctgcctgacgnatacacttctttttgagttgctcaacttaattaaactttagctcgttaggtagggcattctaaattattcctgctcgatcgagtccgatgtatatgtatgnatattaagngtccaattaatgtcccagccagtttatgggtcaatt

SEQ ID NO: 388053 - DNA, 535 bp, Oryza sativa
ccacgcgtccgggcagaagaggcttgttttccaagtctgtactgctaaaatgaacttgagtgatgaggttgatttggaagattatgtttccagaccagataaaattagtgctgctgatattgctgctatctgtcaagaagctggtatgcatgctgtgcgcaaaaatcggtatgttatcctccccaaggacttcgagaagggttaccgaaccaatgtcaagaagcctgagactgactttgacttctacaaatgaggcaacatattgttgaactgcatgcttgttcccctccggagctatcattaacattaaagatgatttcctggatagtcgcctcagcgatatttagtttatgtacctagaggctcgtcagtgccccaatctgttttatcaggtctgtaatttcaatttgtgcttgtacttgctggaaaatagaaaggtttgcacggtcaatccttttgatgtgaaactggacgtattttcgctactattcctttgtgttggcggcaatgctttttggattgtcgtttgttggtt

SEQ ID NO: 388054 - DNA, 764 bp, Oryza sativa
  unsure (1)..(764): unsure at all n locations
cnacggggnctgngngtcgntntgaggaggtggaggcgcgcggcggcggggaggcgtacaactgccccttctgcggcgaggacttcgacttcgtgccttctgctgccacgtcgacgacgagcacgccgtcgaggccaagagcggggtatgtcccatctgtgctacaagggttggagtggacttgataggtcacttgacaatgcagcatggaagttactttaagatgcaacgcaggcgaagagtccgaaaaatatcttcagggtcccattctttgttgtctttgttgagaaaggacttaagatatggcagttggcagtnctttcttggtggatcatcctatgtatctaatcctcctgctggctgcaccagatccattttttgtcatctttaattttgtaagtttgcctgttgctgaaccatccaaagatttacattccgactcatctgacaataactttttgctaaataaattcccagatgacaagactgcagagagagctgaaccatctctgtcggagaaggatcagaaggagagggctcaaaggagtaaatttgtccgtgggcttgtgctctcgacgatatttgaggatgataacttgtaagggaggttatcaaccttaatatagcgacggcatggcatggtcaaggaacagaaaatacaggagaacaatctatgcaatgcagcaaccttgttcatgccgtcgctaatgctgcttccagccttcaaggccaactgggggccacccatcatgtttatgtattgc

SEQ ID NO: 388055 - DNA, 964 bp, Oryza sativa
  unsure (1)..(964): unsure at all n locations
ccacgcgtccgccgtggtcttgatataccgaatgttgatttgattatccattatgaattgcccaatgatccagagacttttgttcatcgttctggacgcactggccgagctgggaaagcaggaactgcaatcttgatgttcacaaacagccagagaaggacagttagatcacttgagcgtgatgttggatgcagatttgacttcataagtcctccagcaattgaggatgtgctggagtcctctgctgaacatgtcatagctactttaagaggtgtgcacacggagtcgattcagtacttcattccagcagctgaaagactgcaagaagaattaggacctaatgctcttgcttctgcattggcacatctgagtggattttctcagccaccctcttcacgttctcttatcagtcatgagcagggatgggtgactttgcaactaactagagatccaggatatggaagggggttcttttctcctagatctgttactggctttctgtctgatgtttcttcagctgctgctgatgaagttggcaaaattttccttacagcagatgagaaggttcaaggtgcagttttcgatttacctgaggagattgcgagggatttgcttagtatggaactgcccccaggaaacaccataaccaaagtgacaaagctacctgcattacaggatgatggtcctgctactgatagttatggccgattctcaaactcggaccggggtttcaggaacagacggtccaggggtggtggctcaagaggcgggcggggtggttgggactctgatggtgaagacagatttcgccgtggtggcaggagcttcagatctcgacaatgatagtttgggtcaagatgatgactttttggtggccgggagaagatcgaaccgttcgtcatcctttngtggccgcgggtcatcttacggcagtcgtagctcgtcatcctttggtggccgtcat

SEQ ID NO: 388056 - DNA, 719 bp, Oryza sativa
  unsure (1)..(719): unsure at all n locations
ccacgcgtccgaacatttcagctgcatggcgttcttaagaagaacctgaagactgtcatcagcactgttataaagaatatgggtgcgtcattaggtgcctgtggagatctcaacagaaatgtacttgcacctgcagcaccttatgtcaggaaggatattctttttgctcaagaaacagcagagaatatcgcagctcttcttacaccacaatctggggcttattgtgacctgtgggtggatggagaaaagataatgtcagccgaagaacctcctgaggtcacgaaagctcgcaatgacaacacatatggaacaaatttccccgattcccctgaaccaatatatggcacacagtatctgccaagaaagttcaagattgctgtcactgtcgctggagataactctgttgatattctgaccaatgacatcggtgttggtgttgtttcaaaaagtgcaggaaagccttgtggcttcaacatttatggtggtggnggcaatgnttttgcacaccggggggaggccacattccctcgattggctgatccactggggtatgtttntaaagaaggaatattggatgctataaaagcaattatcgtcacacagaggggaattttnnaaagggnttaccccccatttagcaacgccccagattggcaggaagagctctgggatcatgaccgacacagggatgataacattgtagagaataaaggcaacag

SEQ ID NO: 388057 - DNA, 824 bp, Oryza sativa
  unsure (1)..(824): unsure at all n locations
cgggccgacccacgcgtccgcccacgcgtccgcccacgcgtccgcccacgcgtccgagatcactcttatccatacggccgggaagacaatccagttcctctgctctcgaggtctcgcctgagtcctcatcctgccaagtgctagctatggttgaagtggacgatggatccaaacggcagatcggcgtggattagcagggcggggctgggcatcctcaccgtcaactccggcctcgccatctaccgctccaggggggacgcagccgcggtcgccttcgtcctcggctcgtacaccgccctgctcctcctcttctcctgcctctccgccttcgagcgcgcgccgcccgggtcccccgcgaggggccgcctcaagcgcgcggtgtgggcgctctcgacgctcgtcaccgccatgttcgcgtggaaggtcgcggcgctcatgccgccgcccgtggcggccgtcgtttgggccctcgccgtggcaacctcgctcggaggattcttggccttcttcatctacacctgaagtggtgaagccgatcgatcgctgtttctcggtcgcctgtgatgtatggatgtacatatagctagtaattagctatttagctattactagtttgtacatgcttcaagtgaactatactctgcctctgtacatatatatatagtactttagtaacataccggatgtacatgttttgtacgtatcagcgtatgaatatttctttctttttcagttttcactctttgttccagcgtcttgttacagttccaattgatctaaacgnggaacaagttnactttnnnnnnnnnnnnnnnnnnnnnnnn

SEQ ID NO: 388058 - DNA, 440 bp, Oryza sativa
  unsure (1)..(440): unsure at all n locations
ccacgcgtccgcgtttccaaccttcaggtggcggagctcatcgcgtgcatctccagcaacaggagaacggcctactgcaaggtggtcgaagcgatcgcagagaccaccgcgccattgctgcccacggaggatcagctcgccaacataccttcaaagcggcaacctccgcccgaacctgaggtagttcagcaggggagagacccctccaaaaccgatccagcaaagccaacgaccactctcaccctacacggcatttgtggacctgaagcctccaagctcgccatcgccgtgcccaccatcagcagcagctcctgctcctacttctacagataccgctgcggcaggttcatcgtcaacgttgaactccagcgccaccggcacccccatcagcgtggatcaaccgaagcagcagcagagggctctttcaccgtacactanan

SEQ ID NO: 388059 - DNA, 964 bp, Oryza sativa
  unsure (1)..(964): unsure at all n locations
ggattctgtagttctgtccctgtttgcgacgatcgtgaacaaatacaaaggtgaagtgcttgaagacgtgcctcgcatatttgaggctgttttccagtgcgcgcttgagatgatcactaaaaactttgaagattacccggagcatcgcctcaaatttttctctttgcttcgtgcgattggcacccattgcttccaagcattaattcagctttcaagtcagcaattgaaacttgtgattgactctatcaactgggcatttagacatacagagagaaacatcgcagagactggtctcagtctattgctggaaattttaaagaactttcaggcctcaggattccaaaatcaattctacaaaacttattttttgaatattgaacaagagatctttgcagttctgacagacacattccacaagcctggtttcaagcttcatgttttggtgctgcagcacttattttgtgtggttgatggtctgacggagcctctctgggatgcatcctcagtaccataccaatatactgacaacgctatgtttgtccgagattacacaataaaacttttaggttcatcatttcccaacatgacacctactgaggttacaaaatttgttgatgggcttcttagttcaaaacatggaccttccaagcttcaaaaaccatattagggatttcctggtgcaatcaaaggagttctcggctcaggataataagggatttgtatgctggaagaggctgctgcacaaagagagagggagcgtcaacgaatgcttgccattccagggcttattgccccaagcgaattacaaagatgagatggttgaatcataattctgtgattcagcctttgctaatccagttccaatttcttgctttggcctccnaanctctgggagccctcaacaccccaattgcccaagttcctccttccagggtggtgaaagaaggggcctgctggtaattta

SEQ ID NO: 388060 - DNA, 678 bp, Oryza sativa
  unsure (1)..(678): unsure at all n locations
cggacgtgctgcgtacgcgtgggcgtgagggcccccttcgctgaccccccaaaaccctagctcgagcgctcccttcttccccccacctctgcggcggcggcgggcggcgagatggcgaagtcgctgcggtcgaagcgggagaagcggctgcgcacgctgcggcgggagatcgcgcagccttctacgacaagaaggaggcggccaaactcgccgcgcaggccgccgcgctcgaggcgcccgcgctgccggtccgcgcgcctccgccgccgtccaaggattccggcggctcccgcgccgcctccagctcggcatcggccatggacgttgagatggcggatgaaggaaataacaagtccaagtccttcttgaagccaattggtagcattagcaagaagaaggtacaacttcacttgaagatcaagaaagataaaagaaaagctaggaagaaggggaggtttagtaaaaagtaggtgtcaaagcttactctgttatgagaaccatcaattttggttagtttgaacaatgcatgtaatggtaatctcttgtgttgttgtgcacctaagtgttaaccatccattctgggtggataccgtattgaaatcagcgaaagcagtgagccagtgacaccctattcaggagcttcatccgtattactgnnnnnnnnnnnnnnnnnnnnnn

SEQ ID NO: 388061 - DNA, 1064 bp, Oryza sativa
ggagcacaatggacggaagtcatatcatgggagcccagggctttcgtctatcacaatttcctgtcccgggaagagtgtgattacttgattggattggccaagcctcacatggtcaaatccacggttgttgatagcactactggtaaaagcaaggacagcagggtacgcacaagttcaaggcatgttttctccaaaaggggacgagacaaggttattcgggccattgaaaagaggatagcagactacacttttcattcctatggaacatggagagggactccaagttctgcactatgaagtcgggcagaagtacgagcctcactttgactattttcttgatgagtacaacaccaagaatggtggtcagagaatggctactcttctgatgtatctatctgatgttgaagaagggggtgagactattttccctgatgcaaatgtgaacagcagttcattaccatggtataatgaactttcagagtgtgccagaaagggccttgctgtcaaaccaaagatgggagatgcgcttcttttttggagcatgaaaccagatgccactctagaccctttaagtttgcatgggggttgtcctgtcatcaaaggaaacaaatggtcatcacccaagtggatgcatgtccgtgagtacaaagcttgagctttctgaagtcgtgattaccaaagatggaccctatataaagcattgactggggcactttccaggatggcagttatgtaggctttagagatccacaccggtggtattctttgctctctgagaatatatagtagaggcactaagcaagggggtttacttgtccataccgtgtttttggagatggtcttgttgaacctggcgccttttcttctttattttttctggcagactacaaaggaatgaatggtccattgttggggacatagggtgtggcgtttgatttagtttgttttgtggtgtattgctatctgctaatgttagtagcttaattatgtacactgttgagttaagttgtcattactatagagctctctcctatacatgaggggaggtgccaaaaaaaccaaca

SEQ ID NO: 388062 - DNA, 936 bp, Oryza sativa
ccacgcgtccgaacgcgccatggccgccgcggcgcccgcgctgccggcgttcgcctcgcttctcctcccctcatccagctcgcctccccgccgcatcccgtggccccgccctctgccttctcgccggggcgctctccgccccgtcaagctgctccccgccatctcagctgtggagaagggcaagggcgccgccgccgaagccaaggaggtggagctggaagggatgccgccggagtactacgacgaggaatggcaagctcgtcagcgggaaaagactaaggaatggaatgcatatcggaagaaagaggaagctgaggaagaaaggctaacaaatgaataccgtgaaataggcctgcgtttgaaagcttacccacaggaagaagttcgcaaagctcggattttggtttcaagttttataagagctggtgaagatattgaagaggaaattgagaaggctgctgaaagaggagagcttactgaacttgttcttatggtcatatggaatcgacttgatgttgctcgccgcgatgatgagagggatgccatcagaagccttgatctcttatacagaagggtagagacggaaattttaaggagtgaagcaactcctgctatgagattgctcaatgaccttctgaatcttcatgatggatctgatgatgacaagtggttaaagaaatgtaaaaaacatatgcttgaagtttttcccagagaagacccgttcaccatggtctttcctgctggtttcaacatggaggaacatcaaggacagatcaagctgccacctcaggatgatgatgttcttctaagagttgatttcatcaggaagttgatgagctcttgaaggaagttcaagctgcacatgaaaacaataaggtcccaactggtaatgaccccgaagctgttgcgaccaagttgaagtatcaagagaagctg

SEQ ID NO: 388063 - DNA, 560 bp, Oryza sativa
  unsure (1)..(560): unsure at all n locations
ccacgcgtccggtccctgataagactcagaaaggcgtatcaacagtcacacttggcgaacacactcaccaacgtctgtctgactacctagaaagctgtggaatcgtacttcgttaggncaatccccagacatcgtctcgtattgtacgatcgcgacctccattgcaattacttgcgggtgatgctattggtctcgatatcgcctacaatgctatccggctccctaacattgagaacagactgaacaaggagagcatgggtcttctcagcagattctggggctgaaaagaagggagggcgtagttcgacaggattatcttcctcttggattttgatacattagtttggtggtttgaattggtcttctcttttgccatgaactggaacatggcactctcgattggtggaatggctttgttgggcatccctttccccttaagaatgtcatactttttttttgttaggcaaaaaaatttgcgttttcaaagtacatcagttttgaatgtcacactaactcggttacatactgtatgaagagatgattagatcgcataatataaa

SEQ ID NO: 388064 - DNA, 1146 bp, Oryza sativa
  unsure (1)..(1146): unsure at all n locations
nnnntttttttttttttttttgatgtacgataagaacattcgtgtatccattggtcttcagttaatgccggacagacaagggcgaaggacagacatttggtatgcaacttcttgtccagcaatttaccacttccacaagaatatgaacgacatatatgcctaaatctcaaacctattccagtaataccgaataaatcgagttatgtagttctaaaataaggctgaaatatcacccgctgatgttgcctagccagaagagcatgggaaattgcacaaccgcgaggaaaagaagaaagtagtgattccggctggggtgtctctcatagctccttggtgcgcccagaagaaccctcttcatcgtcttgacaaggaaaactccggtgcagattgagaaccatggcagtacaaaataatatgacgggctccagaagacgcggacaagcattgcaagtgatgtaccagcaaatccatacccagcataggccacaatgtccagcaatggcgcttcaccacttccccagcgtgtacagtagaactctgatcaggcctaccttgcagaaaccagccaagtaatccttttgtgaactgtagagtgagtgcctctggggtaaacctcccaagaacaccccacgcgtatccggcaattacaacatacgtcccaaaagccatcagaggaatgtaaagatctggagcattgatatcttggaattggaggtttgtatgacaaccttccttcccaccggttcagttatccttgtccagtgcccccggtgcaggaaagggaacaagatcaccttcaacttgtttctcacatactgactgttgacttgaaagtagtactgaggattggacagatactgagtgatattgctttgcataaactcagagcttgaacctaaaaacttctcgccgtatgctcctaacccacttcggatgagtccaggtccagctccatataaagcactttcaaaaggattagcttgtgaagtagcaggtctgcctcccagtcctcccagatcattgttcatcgctgccatgctaactgcggcggcgcaccggcggcgtcgcggcgcccgctgggattcgtcggcggcagcagtagagggaggcagcgcgtcgcagcgnagcggactcgtgggnnnnnnn

SEQ ID NO: 388065 - DNA, 595 bp, Oryza sativa
  unsure (1)..(595): unsure at all n locations
aaggcgattaagttgggtaacgccaggnttttcccagtcacgacnttgtaaaacgacggccattgagcgcgcgtaatacgantcactntagggcgaattgggtaccgggccccccctcgaggtcgacccacgcntccgcgcggccgtcggggccaacagccaggcggcgcagtccatgctcaagcaggactaccgcgacggcctgacccgggaggaggccgtagccctcgccctcaaggtcctgagcaagaccatggattcgaccagcttgaccgccgagaagctggagctcgccgaggtgttcctgcagcccggcaccggggaagtgcagtaccaggtgtgctcccctgaggcgatggggaagctgctcgccaaggccggcctctcgcagccggcgcctgaggcttgatgtgctggtttgctgtgccttgtgatgcctgctgctcttagatggttttatcattattatgcttcttgttatctaaaccaaactatctgataatcatgtgttttaattttatgttggacatgcttgggcggtcgatgctttatctaatgacagtgaattcctttaaaaaaaaaaaaaaaannnnnn

SEQ ID NO: 388066 - DNA, 818 bp, Oryza sativa
  unsure (1)..(818): unsure at all n locations
ccacgcgtccgaccgagcatgacgacgagcgaagaggcaacatgatgcatcaccgctgctcgcagtgacgccggattgtacgccgtgtcgtacgatgatgcgatggggcgcaagctgctcattcaagctctttgccacaccgagcagggctgcacccaggtcggcggcctccggccattcggggctgcttactctgactacagtggtacaagcaccatggcttccagctctacatgagcgacccctccggcaactacagcggctggaaggccgccgccgtcggggccaacagccaggcggcgcagtccatgctcaagcaggactaccgcgacgggatgacacgggaggaggccgtcgccctcgccctcaaggtgcttagcaagaccatggattcgaccagcttgaccgccgagaagctggagctcgccgaggtgttcttgcagcccggcaccggggaggtgcagtaccaggtgtgctcgcctgaggcgatggggaagctgctcgccaaggccggcctctcgcagccggcgcctgaggcttgatctactgagatggtttgcttcttgttctcgcaattcggttggtgtttaatccatgtgatggtaaacagttgatgaatttagtataaattttcttttaagagttgccatcagctatggtttgaaatcaatccagattgttgtgtgttatcgtcctatttcttatcagcaagaacccttcttagtgattatatggttatattgagtatatttataaagcccaaatcccttggccnnnnnnnnnnnnnnnnnnnnnnnnnnnnnnnnnnnnnnnnnnnn

SEQ ID NO: 388067 - DNA, 486 bp, Oryza sativa
ccacgcgtccgcccacgcgtccgtgatgatatgtgattcgatgacttatttggaataatcctttgagtttcatctgttctattgatatctatactacatcagtttctgtccaaatgtttatttcaggtgaagaatcttacactggcatttgctgttcgagtagctgcgtgactcttatcagaactccggcatatcaattgatgaggcccaacttggtgagaatcttcctattttgggctatgcggtgataatctaaagatttcctttaatggttaatatgtaagcggcagactccttatctaacttctagtttacaatatctctatcaaagttgtggcaattgtaagtatggtctgtgaaaatgacccctcaaaggccaacccacttgtatggctggaaagttacaggaatttttatgctcatatgttcctatcagtcaacagtaacgtttcaatatattgggattctttattgcaaaaaaaaaaa

SEQ ID NO: 388068 - DNA, 507 bp, Oryza sativa
ccacgcgtccggaattattggcgagggtggttttggacgtgtttatgaaggtattcttgaggatggagaacgggttgctgtcaaaattcttaagagggacgaccagcatgttacacgggaatttatagctgagcttgagatgcttagccgattgcatcacagaaacctggttaagttgataggtatatgcacagaagaacatatccggtgtcttgtgtatgagcttgttccaaatggtagtgtggaatctcacttgcacggatcagataagggaactgctccacttgattgggatgctaggcttaaaattgcacttggtgctgcacgggctcttgcttatttgcatgaagattctagtccccgtgtcatactccgtgacttcatgtcaagtaacatcttattgggacatgtcttctcccccaaggtgtcagactttggcctagcaagaacagccataggtgaggggaatgagcatatttcaactcgtgttatgggaactttcgggta

SEQ ID NO: 388069 - DNA, 853 bp, Oryza sativa
tttgtctttcgtgagagcaaagctaaaggtaagggagctgatgaatactggcttatttggcgttatgaaggtgaggatacactattcgatctcatgcaaagcaaggagttcccttacaatgttgagactaagattctaggagatgttcaagacctgccaaagggaatagcaagagagaataagattattcaaacaggaatgagacaactcttatttgctcttgatggccctcattcgacagggattgttcacagagacgtaaaaccccaaaatgtgatattttcggaaggatctcgtacgttcaaaattattgatcttggagcagcagctgatttgcgagtgggcatcaactatattcctagtgagttccttttagatccaaggtatgctgcaccggagcaatatataatgagcactcaaacaccatctgctccctctgctccagttgcaactgctttatctccagtcctttggcagttgaaccttcctgacagatttgacatatatagcctgggccttatattcttacaaatggcatttccatcattgagaacggacagcagcctcatacaatttaaccgccaactgaagaggtgcaactatgacttaaaagcttggaggaatttggtagagccacgagctaccccggagctccggaggggctttgacatcttggatttagatggtggtattggatgggaacttctcacatcgatggtccggtacaaagcacggcaaaggactggtgctaaggctgcactggcgcatccatatttcaaccgcgaggggctccttggcctctctgtaatgcaaaacttgaggctgcaactgcttcgtgcaacccagaaggact

SEQ ID NO: 388070 - DNA, 516 bp, Oryza sativa
  unsure (1)..(516): unsure at all n locations
cttactcttgggggcggcggtcgcgcctgcgcggggggctctgaggacggcgctggcgttccacacggggcaggccgtggcgatcccgcatgacgtgattgcgccgccgaggaagcccgggccgatagccgtcggcgcgcagatcctgcgggcggagggcgcggcggggctcttctccggcgtgtcggccaccatgctgcgccagacgctctactccaccacccggatggggctctacgacatactgaagaagaagtggacccaggagaacggcggcgtgctgccgctccaccggaagatcgccgctgggctcatcgccggcggggtcggcgccgccgtggggggcccggccgacgtcgccatggtgcggatgcaggccgacgggcggctcccgctcgccgagcgccggaactaccgcagcgtcggggacgccatcggccggatggcgcgcgacgagggcgtccgcagcctgtggcgcgggtcgtnnntgacggtgaaccgctccatgatcgttac

SEQ ID NO: 388071 - DNA, 630 bp, Oryza sativa
ccacgcgtccgcccacgcgtccgtgatcctagcagcgacgatcttcaagaacagcccattcagtcaaaaatacacaaagatgtgaagaagatgaatgaagagacaaccatccttgatggggtgactgaggacaaacaacagacacatgataggcctgaaaagacgctcaaaaaccataagaagggtgagaagaaacggaatggccctggcagtggtaaaaaagaaacacacaacgaaaaagaagagcctacaagtgaaaaaaagcagcctgtgtctgctaaaattaaaaaaactgttcccaagagaacatcaggaaccaaagaaaagaagccagatactgaccaaggagggaagaggaaaaggaactggatggttaggcgagaatgggaagcttataagaagtcgaggagtaaaaaggtatgaaaagcacgggtgaaggaactctagctgtagacaaattattgcagcgaaatttgataaccccatggggggaagatgtttaaaaggagtaacaaaactctagccgtagacaaactgcagtgaaatttgataacctacatgccggggaagatgttcaagaagagacaaaacacagttttgccgtgggttatgttcgtggtgaaggaaaaa

SEQ ID NO: 388072 - DNA, 649 bp, Oryza sativa
ccacgcgtccgcggacgcgtgggggagtacgcacgcgtagcaaggtctctcttacactataaacaccaaggcgaagcagccgcatgagtcccacccacctctcctcccccggcaatcaaagacacaccccaagtactcgatcgcctgtgtagcttcttccctgatcgtgccatgggctcctacgttcaaggcgaggatgaggttcccgtgtacgaatctggagcagagatcgtccagaagctgcaggagaaatggaagtcgacggcggcgccgttcccggcgatgtactcgagcgtgctcggcggcatcatcctggacccggcgatgatgtccgtcccgctcgacgaccacatggtccaccgcggccacggcgtgttcgacaccgccatgatcctcgacggccacctctacgagctcgacccgcacctcgaccgcttcctccgctccgccgccaaggcccgcatcggcaccccgttcccgcgcgacacgctccgcagcatcctcgtccagatgacggcggcgtccaactgccggagggggtccatccgctactggctcagcgccggcggcggcgacttcctcctgtccttcggcggctgcgccgggccggcgttctacgccgtcgttaatccgaccgactactcccagt

SEQ ID NO: 388073 - DNA, 609 bp, Oryza sativa
  unsure (1)..(609): unsure at all n locations
ngagcgngnancngcgtgtccggccgtgcccctctgaatccatccttaaagactaaaccctccataagcctcctctctctctttcttccaggagacaggtgacaagggggatagatacacaacgatactccgcagcgcaggaggaggacacatccttgatttctgccatcggaggagctcctgcctcggagatacacgaagctgctacatcttcttccagctcaatcgtatcgacgcttgcatctcttttgctcagagtgatcgtcgtttttcacagcttgcaggaaaaaaagggcaagaaagactgagagcagcagaagaggaagatgatgatgaccgaggtcgccaatcacagcaaaaggaaccacaatgaaagctacttcaccgggaaagcagcagtcaccagcagctcggaggagtttgggagcatgacatccaagaagccgaggaacacaagcccgagagacgttcccgtctccccgaaggggaaggaggggatgaatgctgagagagtggttggactgcatcaagatatggtacactttgttatacctgtcaccgtttactgtgttggacgttgccttatcattatctattaagtttgtttca

SEQ ID NO: 388074 - DNA, 629 bp, Oryza sativa
  unsure (1)..(629): unsure at all n locations
tcaccagaatcgaagcttagggtgacacttctatgaagtgacttcccacagttgaaaaaagttagtggtccaggtnccgagagcacgatcccacaccttggaggtgcggagcttggtttccctgtacagcgtgcctgagccagagtttcttggtactctttgaccggcttaaacttcccagagtgatgagattatgctggaatcgtagctgttctccacatggcaaattgccatgagtacagagagaagctgacacagtttcaagagaaacgtatagatgtcccgtcatcttcctgaaatcctgagatgcctcagctcctttattagtcagctcctacttgacaggagctgacctgtttgagctttttcagggtataagagagctgactattctggtctaactgaatactgctattcttgtccaatggaaaactggagcttcatatgagatcatgctaggctcttagatgacgcggtatagatataatttgtgtgacagttttgcattcggttttgccttaataatgaaggatgggaaagttttgtattgtctggatgctacagataaataaagccttatctttcaataaaaaaaaaaaaaaannnnnnnnnnnnnnnnnnnnnnnnnn

SEQ ID NO: 388075 - DNA, 502 bp, Oryza sativa
ccacgcgtccgcgcccttctccttccaggtctcgccgccgccgacgccgacgcccaggagctcgccgtcctccgctagtcccaccgcctctcctctcgctctgcctcccccatcaggccagtagcgcccccatccctctctcgacctgctcctctcctctcgccatctcgccaaatccaacacaggtccacggcaacgccgcgcatctcggcagcgcacacatcggcggcgcatctcggcagcggcaagccggcgacgagctgcagcgcttcaaagcttgattacccaaatactacaacactgtgctgatttcagtaattggatccctcaaattgtgaaatgcttgccaaagggaggaaagttgctggaaggggcggagacatgtctgcacactatgcatttgggccgcaggaagatgatgcgattattaaacataagcttctgaccaggacaacaactaccaggggtgaaccaccacttaagaagcttcagaagaagttca

SEQ ID NO: 388076 - DNA, 336 bp, Oryza sativa
  unsure (1)..(336): unsure at all n locations
cacgcgtccgcaacacgccgccccctgctgctccaagcttatcctctccttctctctcctctctcctctctcctctcctctctctctctctctcgctgagattgatcgatctcgctcgctgtggcggctgctgctgggctctgatccgtttgattcggtggtgcgctcgccggaggaggaggaggaggatcttgatttgtgtgtttttttttggggcgcatgtccacggcggtggcgcgcggcgggatgatgccggcggggcacgggttcgggaaggggaaggcggcggcggtggaggaggaggaggatgaggtgaacgggttcttcgtggaggan

SEQ ID NO: 388077 - DNA, 516 bp, Oryza sativa
gaaaactctccattttccttgcctctgtgtctccccacccaatcccaacccaccacctctcctctcgccgccgccgccgccgccgccgcgcgccgttctatggcctacacctcctcctccctccacctccacaagcacctcctcctccccaagaccaacccctcctcctcctactcgcggcctccgcctccgtcgttcgtcgtcgcggcggccaagatcaacggcgtgaacggacactcctccaagaagtcccccaacggcaaggcgcagatcaacggcgacggcaagaagggggtcaacgggagcgggaggaagaaggcggcggcgcagcacatcaacgggaatgaccggatccatctgtcggtgagcacgggcggcgccgggggccaggatgggttcgggctcagggtggcgttccagggcgcgccgggcgcgtacagcgagttcgcggcgaagacggcgctccccgggtgcgacaccgtgccctgccgcgcgttcgccgacgcgctgggcggg

SEQ ID NO: 388078 - DNA, 606 bp, Oryza sativa
ctggaacattgtcaagataccgccgattgtgcaggagctcgccgccggcgtccatgagccgccgagccagtacatggtcggcgagaaagaccgccctgccatcgccggctccgacatgcctgagcccatccccgtcgtcgacctcagccggctgtctgcctccaatggtgaagacagcgccggcgagcttgccaagctacgctccgccttagaggactggggcctcttcctggtgcagggttatttggtactataatggaggggagcattctcagtgagaccgcccacgcgtccggaggattctacaagctcccactggaagagaagcagaagtactccaacctggtgaacggcaaggatttcaggatcgaagggtacggcaacgacatggtcgtgtcagagaaacagatcctgaactggtgcgaccggttctaccacatcgttgagcctgagtcccggatagcccatagcctctggccaacacagcccccttctttcagagatgttctgcatgagtacactatgaggtgcagggagatcaccagccttgtgctcgccagattggccaggctgctcggcctgcgagagggctacttcgtcgacatg

SEQ ID NO: 388079 - DNA, 1643 bp, Oryza sativa
aacttcccactggcaatcgttctctgacaacttccaattctaaaagcaagggacagtcaaggaatcagaacacatatcctcatctcatgggtctgcagacacctacttctccgttgggaccaccatcaatttactcggctagtggaatgtatggatacaatgggagttcatatgggtccggcctatggtatggatcacacctgtatggttctggattgtacgggggatggaatgcactgtcggatggcaaatacaatcccagaggaagaggtaatggatcctatggttatatccatggaaatcaggatgggtttaatgagctaagaagagggccaagaagtggtcttttcaataaccaacagggagttggagctactgttgcacctgtgaagggacaagagctttcagccagcgatagctcgctttctgtcatgaaggatcagtataaccgggctgattttgtggaaacatactcagatgctaaattcttcatcatcaaatcatacagtgaggatgatgttcacaagagcattaagtacaatgtttgggctagcacatccaatggtaataaaaagcttgatgctgcttatcaggaggctaaggaaaaatcaagtgattcttctgtgttccttcttttctctgtgaatgcaagtggtcagtttgttggtcttgctgagatggtgggccgtgttgattttaacaagacattggaacactggcaacaggacaagtggactggctgtttccctgtaaagtggcatattgtgaaggatgttccaaacagcttactgaaacacatcattcttgaaaacaatgagaacaaaccagtcacaaattgcagagatactcatgaggtgaaacttgagccagggcttcaagtgcttaagattttcaaggaccatgtctgcaagacgtcgttactggatgactttgatttctatgataatcgtgagaagatgatgcaagagaggaaggcaaagcatcaacaactgaagaaggtcgggggtgagatgctgcttaatgctggggacactgagaacagcttgttaactgtgaaatccaaattgcaggaaacagctgaggtagagattgatgtcttaaacaaagagcctcatggtaaagcaggacaagttgatgggaaagagaacggtgtgttggccgtttctgtaaatggtgttaccccagaagatgttcagttgacatacgagaagttggccagtttgagcgtctgttaagttttttctcatcatttcagccattgaggggtggtgtaaggtgaaggcctatataggttgggaaggcagcaatcaaggcaattcaagatccatttgagtttccttgtgagtttctccgttgcttttggttaggacttggaggtggtttcataggagagctagaagtttagctgattgtgtctggtgagatgtgcggatagcagtagaaggttttttggacttttggttttcaatgatggatcattggtttgcgcagttccttttcttttatattctgttctcttttgcgttgggcaggtgtagctttttttagtatgtttggtgtctgaacctgaaagcatgtcaagagtgtttaaacctgggaattcaattaagaaatttactcttttgttccaaaaaaaaaaacaa

SEQ ID NO: 388080 - DNA, 1318 bp, Oryza sativa
ctagttctagatcgcgggcggccgctcgcgatctagaactagatcgcgagaaggcccccagcgtcgcggagcgaaggatcaggattcactccgccctcgccgacctcgtcgccggccgccgcatcaccaccgacacctccccccatcgccgccgggagagttgggtggtggagcgagcgtggccgcgaggggacgcggaggggcggcggcggcggcgattgttcgcgggatgagcagcttcggcggcaccagctccgtcgcctccggtggtgggaagaggctcgagtacgggcggacgcatgtcgtgaggcccaagggcgcctacaaggccagtggcagtttttggtgggttcccatcaactgcatggtttgatccgcccgcgcgtccggaagacgctcctgatgatgttgaggggttggatgcctcagctgcacatgttgcaaacttattatcaactgagccagctgacatcaaacttggtgttggtggctttagcatgggcgcagctaccgccctttactctgcaacctgctatgctcatggaaaatacggaaatggcaatccatatcctgtgaacttaagtgtgtctgttggtctcagtggctggcttccttgtgccaggtctttgaagaacaaaattgaaagctcacaggaggctgcacaaaaggcttcatccatacctcttttgctttgtcatggaaaagctgatgatgtagttctctacaagcatggtgagaaatctgctgacgcactgaagacaactggattttcaaatgtggtgttcaagtcctacaacagacttggacactacactgttccggaggagatggatgaagtctgcaaatggctcaccgcgaacttgggggtcagcagctcatcgtcggcttgattgaagaatctgagctgtccgaataatacctgtggttgttccaaacaaaattgagaggtaaatggttgaatgaatagcgaagaacttggggcttgggtatacggccatggggtagcctggcgtgtcatcatgcggacatgcctcacggcatcttaactagaactcttataatttccacagtttgggtctttgttttgtttgtttcccttccctcttaaagcaggggacggcatcgtggtgtattatttgttttggttagcacggatgtttttgtttggtacgccgtgtgttcttccgattgggtcagttgtatgtttcctttatgagttatggagatgcattgggattttgggttcatcagctagtatgacaatgcatatatttctcatcacttgtcaatcaccccatatacgtgttcggttgtggtg

SEQ ID NO: 388081 - DNA, 605 bp, Oryza sativa
  unsure (1)..(605): unsure at all n locations
ttcaacaacaacacacagcaacaggcctaccatatcgcgagaaggcccccagcgtcgcggagccgaaggatcaggattcactccgccctcgccgacctcgtcgccggccgccgcatcaccaccgacacctccccccatcgccgccggcgagagttgggtggtggagcgagcgtggccgcgaggggacgcggaggggcggcggcggcggcgattgttcgcgggatgagcagcttcggcggcaccagctccgtcgcctccggtggtgggaagaggctcgagtacgggcggacgcatgtcgtgaggcccaagggcgcgcacaaggccaccatcgtctggctccacggcctcggggacaacggagccagctggtctcaactactggaaacccttccccttcccaatataaaatggatttgccccaccgcgcctacaaggccagtggcagtttttggtgggttcccatcaactgcatggtttgatgttgctgatctttcagaagacgctcctgatgatgttgaggggttggatgcctcagctgcacatgttgcaaacttattatcaactgagccagctgacatcaaacttggtgttggtggcttancaat

SEQ ID NO: 388082 - DNA, 1655 bp, Oryza sativa
ggaaaagaagacgagagaaaaaaccgagtgaaaaatcaaacccgcatatagagagagaggaacagcgaaagaccacgcgtgccatccctccacgcttgtagggtttccggatcggaggagagagccccccacgccgccgcagccatggttcgcggatcgctcgggaagctggcctcgcgcgccctctccgtcgccgggaaatggcagcaccagcagctccgccgcctcaacatccacgagtaccagggcgcggagctgatggggaagtacgggatcaacgtgcccaggggcgcggcggcgggatcggtggaggaggtcaaaaacaccttgaagaacgtcttccctagtgagaaagagatagttgttaagagtcaaatcctggctggtggccgtggattgggaacattcaaaagtggactgcagggtggtgttcatattgttaaggcagaggaagctgaaagcctcgcagcaaaaatgcttggccagattctggtaacaaaacaaactggtccacaggggaagattgtgagcaaggtctacttatgtgagaaactgtcacttgttaatgagatgtacttcgccatcacccttgacaggaatactgctggtccgctcattatagcgtgcagcaagggaggaaccagtattgaagatcttgcagagaagtaccctgatatgatcatcaaggttcctattgatgtattcaagggaatcacagatgatgatgcagctaaagttgttgatggtctggcaccaaagacagctgacagacagtcttccatagaacagattaagaagctctatgaactgttctgcaagtctgattgcacactgctcgagattaatcctcttgctgagacagctgacaacaagctggtcgctgctgatgcaaagttgaactttgatgacaatgctgcctttaggcagaaagagatatttgccatgcgtgacacaacacaggaagatcccagagaggtggctgctgccaaagctgacttgaactacattgggcttgatggagaaattggctgcatggtgaacggtgcaggattggcaatggctacaatggacatcattaagttgcatgggggtacgcctgccaattttcttgatgttggtggaagtgcatcagagggacaggttgtggaagcatttaagattttgacttccgatgatagagtgaaggctattctagtgaacatttttggtggtatcatgaaatgtgatgtgatagcaagtggaatagtgaatgcagcaaaacaggttgacctgaaggtgcctgttgttgttcggttggaaggcaccaatgttgaccaagggaagaggattctaaaggaaagtggaatgaccttaatcactgcagaggatcttgatgatgcggctgagaaagctgtaaaagcatctgtcaaataattaactattttgtagtataccaacatcaagtttattttttgctggcacaagatgagcggtgctcatgacatatttcaggggtctgaagttgggaaccccaaatccttttgaagtggaattattttggcttgatttcccctagaaacattttggtctactgttaataaacctctgtcggcaccaaactgagcaaccacttctttttgccaaagttaaagtggagtttatctgtttttgccttg

SEQ ID NO: 388083 - DNA, 567 bp, Oryza sativa
  unsure (1)..(567): unsure at all n locations
ccacgcgtacgccacgcgtccggtcgttccgccgccgccgccgtcgtccagggcgaagcttgcgtagagatagcggcgacgatgatggcggaggaggggacgcagcagctgccgtacgtgcgggagacggtgctgaagaagcggaaggtgaacgaggactgggcggtcaagaaccgggagcggaaggcggccaagaggcagcgccgccgcgacgacggcaagggcgccatcaagaggcccgaggacttcgtcagggagttccgcaacaaggagctcgacttcgtccggatgaagacccgcctcaaggtccgcaagctcccccccgccgagaccctcaacttccaagctcgtctttcgcgattcgcatccctggcacaatggacttgcatccacacatgaggaggattttgcgcaacttgcggctgacgaagttctnaccggcgtgttcctcaaggcacttacgtaatatgagaggttcttgttgtgagcgttataattatgggttccaatttaaaaatttaaggtttttttaaaaaggcctgggtcttnaaaagactttccctttaa

SEQ ID NO: 388084 - DNA, 1236 bp, Oryza sativa
  unsure (1)..(1236): unsure at all n locations
ccacgcgtccgcccacgcgtccggctgaatgtagcatttggcgaggacaattcatctgaagaagaagaccctgcttacagcgcttggatggcgaaatgtccttctgctttggcttccttcaagcaaattgtagccagtgcacaagggaagaagattgctgtgtttctagactatgacggcacactggcgcctattgtggatgatcctgacaaagcagtgatgtctcccgtgatgagagctgctgtgagaaatgttgcgaagtacttccccactgcaattgtcagcggaaggtcccgcaataaggtgtttgaatttgtaaaactgaaggagctttattatgctggaagccatggtatggacataatggcaccttcagcaaatcatgagcacagtgctgaaaagagcaaacaggccaatctcttccaacctgcacacgactttctgccaatgatcgatgaggttaccaagtccctcttgcaagttgtcagtggaattgaaggtgcaactgttgagaacaacaaattctgcgtttctgtacattatcgcaacggtgcagagaatgattggaaactggtcgcacggctcgtaaacgaagtgctggaggcttttcctcgtctcaaagtaaccaatggacgaatggttttagaggttcgtccggtgatcgactgggacaagggaaaggctgtggagtttctgctccagtcactcgggctaaatgactctgaaaatgtgatccccatctacattggagacgacagaactgacgaagacgctttcaaggtacttcgacagcgaaattgcggttatggaatactagtttcacaggttcccaaggaaactgaagccttctactcgctgagagatccatctgaagtgatggagttcctcaatttcttggtgagatggaagaagcactcagtgtgaaaaaaagaagacagtctgagcaggttttactaatactactccggcagaaataactgtagtttccgaggcgacaattttgaagcattggacgctgtagatagatgtaataactctctagatatgtggttccaattcattcttattgatcgatgttattgtattgttcatgttctccaccgctgagaaaaattaatcagtgatggttgatccggtctcttgccattgtaagttgtaagcaagagggccctcttcttagtatccatgctgatggacggaattaaaaccttcttttcgnggnnnnnnnnnnnnnnn

SEQ ID NO: 388085 - DNA, 576 bp, Oryza sativa
ccacgcgtccgcccacgcgtccggaaagattagcggcggtgcaagagaagaggagagagcgagacgtcgcctgcgatgacaccggcctcacccgccgccgacaccgtcatcgccgccgcagccgcagccgtagccaccgtccggagcgaggagggagagcgccacacggcgccgagcgccgccaccgtccccgcctacgccgtctgggagaaggagcggtaaggagagaggagtagccgtcgtcgtcgtcgtcgacatggaggtggaggcagccaggtgcgagtgctgcggcttcacggaggagtgcacgccgcggtacatcgcggcggtgcgggaggagtacatggggcggtgggtgtgcggcctctgcgcggaggccgtgggcgacgagatccgccgcgccggcgccgggaaggccaccatcaccacggcggaggcgctcgaccggcacgttgcgttcgcgcgctccgccgcgccgcgcgcggggggcgccgcggcggagggacgacctcgatcgccgccgtctcgaggctgctccgccgctgccttcgactcgccaccaggtccccgagccgc

SEQ ID NO: 388086 - DNA, 739 bp, Oryza sativa
ccacgcgtccgcccacgcgtccgcggcgacgacccgctgccgcgccttccgcacgagagctccgccgcgcacttcctccacttcggcatccgcctccacttcgacagcttatacaacctcaaggtggtgaaggagttgccgggagatgggagctcgtcgtcgtcggcggcggagttcgcgacgagccgcatcaacgcggcgtgggagctggcccggagcgcgtacctggggtactggaggagcgcctactgccgggaagggtggctgctgatggcggcgagggcggcggcggtggcgctgcctggcctgccgttccacagggtgcaggactacgtcaatgccgtcacgctcgccggctcgaacattcccaaggacatgtgacgatgtatcgagtttctgaatgcaatgctgcagagactgcagctgcaggcatcaaacttggatgagagattgcaactgcaatataatggcagatgacgactgcatcgagcaggctatgggacttgtcacttgggtaactgtaatgggacctacgtactggtagtaattaattacgggtgcaactgtatgttgtcgcgactaattctgcttctactgaataaacatgtagtgataagtgatatgcttgtgagttgtgacttgtaagcatttgatgtactgggacaagtactactagtataactatgagaagataaataattgaagttcttgttttcgtttctcactcaaaaaaaaaaaa

SEQ ID NO: 388087 - DNA, 541 bp, Oryza sativa
ccacgcgtccgtgagctaaaaatttctatccacacaagccgatcgaacgcagcttaaggagtgcgagttggttgtcacagtagcctatggagtaaatacatatcctacagttagaggatttactgcaattggtactggaggagatgattttgtccaggccatggtggttgcagttgaatcagtactggaagaacaaattccaaaggctcagatttcccataaagtgtcgtcgaaggggaaatatgtttctgcgaaaattgggcccattcctgtggtttccagcgagcaggtccaagcagtgtataatgccatgaagaaggacgaaaggatgaaattcttcttgtaaacattaacagtacagtattattcttgtaactctagcatattgccacacgattggccatctttataagcaaaagccaagaaatttcaccatttcttggccaaacattaaaaagatggattctcactttagttgaatagcttaaatgagaggccacatttgctatttactgggaatttgttctgttacctactgaag

SEQ ID NO: 388088 - DNA, 473 bp, Oryza sativa
ctctctcgcgctcgctctccaatgccgccaccaatggcgctctccatctcctccaccgccgcggcgaccgctctcctcccgactctcccgcccccgcgctcgcgcctgcgcgtcgcgccgcgcagggcggcggctcgggtggcgcgcgtggtgtcggccggatacgccgcggggttctacggcggggcggcggctgcggccggtggcgagaacgacgaggtgggggatgaggagggttcgtcctcggggttcggtgctgggctagggataggaggcggtgggcttgggatgtcggccgcggaggcggcgcttggcgctggaggagcgggagatgccgccgtgcccgcccgggcttcgccagtacgagaccatggtcgtgctccggcccgacatgtccgaggaggagcgccttgtcctcatacagcgttacgaggagctttctgttgcgggtggcgccatgtatgtgtgatgtt

SEQ ID NO: 388089 - DNA, 864 bp, Oryza sativa
gggggccaagagcggcgcccatttttagtcagccacggcgagggaagaggagccaatcttggccaagccaccctctccaagaatcctcgctgatctctctgcgtgaggcgctcaattcgatttcttggggggtcgattcggatttcttgggatgcagtgggcggcgctgagctcgccgccggcaccggcggcgccggcggcggtgtggatggggcggagggcaagaaccgcgaggttgccgtcgccggggccgcgccgggtggtgctggccgccgcggcgtcgtcgtcgtcgccgtcgccggatgcgaactcgagctcgaactcgaactcgccggggagtggtggcggcggcgaggaggtggaggaggagagggacaggacgcggcgcggatggagaaggcggcggccttcctgatgcggagccagaagtacgccatgctcaagcagcagctcgccgtggccgcccagttcgaggattacaaggaggcggcgaggctgagggattcgctcaagtcattcgaggaggaggagccagttcttcgtctccgccgatcgctcaagaaggcggttgaggaggagaggttcgaggatgctgctaagtacagagatgaactgaagattttggctccacacgccctcctaaaatgttctagtgatgctactaccctggggattagagttcaagtcaggagtgtttatattgaaagccggagccagcctttgaagggccagttcttctttgcctacagaatcagaatcacaaataattctcagcgccctgttcagcttctcagaagacattggattgtcactgatgcaaatggaaggacggagaacatttggggtgtaggtgtttgtggagag

SEQ ID NO: 388090 - DNA, 542 bp, Oryza sativa
gtcgtcccgtttcttctcttcttccatcttcgtcatcttcctcctcgactcctcgttatattagctctcgcagatcagatcggagacgaagaagatggcgtccaactacgtcgacaccaccggcgacgagggcaggttccacggccaccacagcaccaacaccacgccgacgggcgccgcggcgtcgtcgccgaggacgatgcgccggagcttctccaacgcctcctccggcagccacggcggcggcggcggcgccaagtgcgtgtgcgcgccggcgacgcacgccgggtcgttcaagtgccgcctccaccgcaccaactcccagggccacggccacggccacccgcacccctcccctcccacctccccggccgccggcggcgcctccgccgcgccccggccgtcctccgcctcctcccgcaccgtcgaggcccagtgacccctgacctccccggccgcaccaagaaaccaaccaaccaagaagaggaggagaatcagagtgggggaagagagagtaaaaaagagcatcgcgtatcatatca

SEQ ID NO: 388091 - DNA, 462 bp, Oryza sativa
ctttggcgttcaagatcattgagctcatctcgctgttccacgacggcttcttaacttcgtcgataagactctagtagaagatgttcttccaattctgcaagttgcttttcattcagagctgactccagtgcttgaaaaatgtattcggagaattgcaagatcaaatcttgataatgtatcgttggataaggaacttcctctcagaggttgctgttcagataaaagagattcgccaaaaatctcagccaaatgagggtgacaccgtcatttcagaccctgtacatgagaaaagggtcagaagaatccacagggcactggattctgatgatgttgagcttgtgaagttgcttcttaacgaatctgagatcaccttggatgatgccaatgcattgcactatgctgctgcttactgtgattcgaaagttgtttcggagttgttagacttgagacttgccaacttga

SEQ ID NO: 388092 - DNA, 338 bp, Oryza sativa
ccactcaccagaatgcaaggggccgtggcaaccagtctcttacatacaggaaagatggcggccgaggaacacggggtcgtggtgggcgtggtcagtcgtagagaatttaggtttgtctttgctcaagcgcggagactagtttttttcaccggacatactgaatcagggcggcatcatattcattttgtagcactatcagaattgcgagcgtacatgttactctgcttagacaaattcatgtggctaagcagcgcttattaaaatgttctcattgcccgtgcggattgccagatgacctatatttaaattgaactctagttgacaaagatgatataagc

SEQ ID NO: 388093 - DNA, 1607 bp, Oryza sativa
caactgcaaaaggcgccatttttttcccctctttccctcgtcttcttcctccaaatccttcgccccctcctataaatccacctcgcgcaaatccaaatccaaatccaagctcggagaagagacctacctacctacctacctactctaggcgggagagatggtggggaagagcggggtggcggaggagggcggacggcggcggcggcggcggtgaggaggtgggtggaggccggcggcgggaggctggtgatggacggcgggctggcgacggagctggaggccaacggcgccgacctgaacgacccgctctggagcgccaagtgcctcctctcctccccgcacctcgtccgcaagtccatttagactacctagaagcaggtgcaaatatcataatcacagcgtcataccaggctacaattcaaggctttgaatccaagggattttcaaaagaacaaagtgaagacttgctcgcaaagagtgttgagattgcacgtgaagcgcgtgacatgtttctgaaggaacattcagatcgtcccatacaacatcctatcctggttgcagcttccattgcaagttatggggcctatcttgctgacggctctgagtacagtggggattatggcgaagctggcacgttagaattcctgaaagattttcataagcgaaggctggaggttcttgcggaagcaggtcctgatttgatcgcctttgaaacaattcccaacaaattggaagctcaggcttacgttgaacttcttgacgaatgtaacatcagtatccctgcatggttctcatttaattcaaaagatggagttcacattgtgagtggagactcgttaattgaatgtgctactattgctaatgggtgttcgaaggttggtgcagttggaataaattgcacacctccaagatttatccatggcctgatactctccattcgaaaggtcacagataagccaattctgatatatcccaacagcggagaaagatatgatgctgagaaaaaggagtgggtggaatcaactggcgtgtcagacggtgattttgtttcctacgtaaacgaatggtgcaaagatggggctgtcctcattggcggctgctgcaggacaactccaaacaccatcaaggccataagtagatcacttaaccaacgccactcttcgctgcatttacctgtggcatagagttgcacgctccttcaggtgtgctactcatgctggtacctgaacctgatgaacatatcctggaggtccttactagcagcatgatgttctctgctgcaaatgagatggctctgcacttacacttgcgaataactgtgcgtttcgtctgagttcttaaagttgcccaatctggaggtacaacctaccaagaaggattagcaagcagaaaacagtgatagtgaactgttctactaagtaagtaacaagtgagtgaaaacaatctgcggcaaagttgatgaagcttgtaagctatcaagagttgttgtgcagacctgagcctgttataagagcctatgttgtgtactactactactgctgtcactactactaccctgtgaactcttgttttgctatacaagtctataacaataagttttgtttgtt

SEQ ID NO: 388094 - DNA, 704 bp, Oryza sativa
atcctacctacctacctactctaggcgggagagatggtgttgaagagcggcgtggcggaggacggcggagcgtaggcagctgcggtaatgaggaggtgtctctcggcctcttggcgtaggcgggtgactgactgcgtcctggcgagggagctgcatgacaacgtcgccgacctgaacgacccgctctggagcgccaagagcactactctcctccccgcacctcgaacgcaaggtgcatgtagactacctagaagcaggtgcagatatcataatcacagcgtcataccaggctacaatacaaggctttgaatccaagggattttcaaaagaacaaagtgaagacttgctcgcaaagagtgttgagattgcacgtgaagcgcgtgacatgtttctgaaggaacattcaggatcgtcccatacaacatcctatcctggttgcagcttccattggaagttatggggcctatcttgctgacggctctgagtacagtggggattatggcgaagctggcacgttagaattcctgaaagattttcataagcgaaggctggaggttcttgcggcagcaggtcctgatttgatcgcctttgaaacaattcccaacaaattggaagctcaggtatgttattcattactacttacgccagggatctcttgcctctcatttacaatgtgttcttacaaaataatctctattggttcg

SEQ ID NO: 388095 - DNA, 330 bp, Oryza sativa
  unsure (1)..(330): unsure at all n locations
gaagagacctacctacctacctacctactctaggcgggagagatggtggggaagagcggggtggcggaggagggcgganggcggcggcggcggcggtgaggaggtgggtggaggccggcggcgggaggctggtgatggacggcggggctggcgacggagctggaggccaacggcgccgacctgaacgacccgctctggagcgccaagtgcctcctctcctccccgcacctcgtccgcaaggtcagcccgcaatctggcgatcatctcgcctgtattcttactgctcgttacgattcctnctctagtctagcattcggtactttttctttt

SEQ ID NO: 388096 - DNA, 1515 bp, Oryza sativa
gtgttagtttatgctgggaagatgggaaatatatggggggactaatacttaaagctacactggacagaacacggagattaacggaggagtactctgaagcacttctttctatattccctgaaaaagtaatggttattgggaaagcccttggaataccagataacagtgtgagaacttacacagaggcagaaattcgtgctggcattgtttttcaggtatctaaactatgcacagtacttcagaaagcaattcgagaagtacttggatcaactggctgggatgttcttgttcctggaggggcccatggaactctgatgcgggtggaaagaattcttcctggatcattaccttcatctgtcaaagaacctgtggttctaattgtagataaggctgatggagatgaagaggtcaaagctgctggggataatatagttggtgttattcttcttcaggaactacctcacctttcacatcttggtgttagagctcgtcaagagaatgttgtatttgtaacttgtgaatatgatgacacagttacagatgtgtatttgcttgagggaaaatatatcagattagaagcatcatccatcaatgtcaatctctcaatagtttcagaaaaaaatgacaatgctgtctctacagaaccaaatagtacagggaatccatttcaacagaaactccaaaatgaattctctctaccatcggatatcgagatgccactgcaaatgtctaagcaaaaaagcaaatcaggagtgaatggtagttttgctgctcttgagctttcagaagcttcaggggaatcagctggggcaaaaagctgctgcatgcagaactctttctgttcttgcttcattggctaataaagtctatagtgatcaaggagttccagcagcctttagagtcccttctggtgctgtgataccatttggatcaatggaggatgcgctcaagaaaagtggatcactggaatcccttaacaagccttctagaaaagattgaaacagcccaagtcgaaaatggtgaagttgatagcctggcgttggagctacaagcaataatttcacatctttccccaccggaggagactattatatttctcaaaagaatcttcccacaggatgtccggttgattgttagatctagtgctaatgtggaggatttggctggtatgtcagctgctggtctctatgattcaattcccaatgtcagtctcatggacccatgtgcctttggagctgcggttgggaaggtttgggcttctttatacacaaggagagccatcctaagccgtcgagccgctggtgtttatcagagagacgcgacaatggctgttcttgtccaagaaatactgcagccagatctctccttcgtgcttcatactgtttgccccgctgaccatgaccccaaggtttgtccaggctgaggtcgcccctgggctgggtgaaacgcttgctttaggaactcgtggcaccccgtggaggctgtcatgtaacaaattcgatggaaaagttgtca

SEQ ID NO: 388097 - DNA, 676 bp, Oryza sativa
ccgcttccccccttccccgctcccccgccgacggcagcacctccacctgcgccactgccggatcgacgggagccgacgatcgtcctcctccgccaaacaccaacctcgccgcacagagccgcgtccccatcccatcagtcgtcaggccacctgcgtgttccccttccccgtcgcccgggcctctccatcggtgatctcctgccttctcaccctgaaacgcccccgtggattccctgcagcccatcgtatcctaaaaccctacaaccactgacccacatcgtctgtcgccgatcagcgtcgccgtttgttcacaaggagagcggcaaaggaggtcgggactcggtgtagagcgacgagcccagcgaagtaggccgatagctatccgccatagcagtgatgaaggccggctggtggagcgcccctgtcagcgcagctttgcacgggatctcgcgcggccagacataggaatcgcacaaccttctcaatcccgacgctgtgccccgatcgtcgccgctcgccgttggaaccgtcaccacgacagtcgggaaggaaccagaggtgcatcgttttcagtaccagcgctctgttcctgcatttttcattcccggtaagttgcaattaatcaagacaattcccagaggttaggtgccaatcccacaagatgttagagttgaaa

SEQ ID NO: 388098 - DNA, 637 bp, Oryza sativa
tggcatccaacatttcgggggggggccttttcaaatctttagccgatttttcccaagccttcagagcatactcctttggagaaatcatctccctaaaaggatctttttgcacgcgcttcgccgccaatatgttccgagtggttccctaagcactcatctctggcatttgggcacctgcttaggctccttgagagaggccctctggattatcagagagtggtgcttctgatgcttaaatcactgttgcagcaaaccccagtggatccatctcagatacctcaagtgtacaatgttgcgtcacagctcgtggagagcgcactatgtgcagaggcattgaatgtgttggaggcgctcctacggagctgcagcggtgtaactggtggtcaaggcgatgatattggattcggcgagaatggtcacgggatgggggagaaggttcaccaaagcatgcttcttcctcaatcatcattcaaggctaggagtggacctcttcaatatgctgctgccggttcagggtttgggactctaatggggcaaggcggtggcagcgctgcagatactggagtggccacccgagatgtggcgctgcagaatacccggttgctgcttgggcgtgtccttgatacatgcgctcttg

SEQ ID NO: 388099 - DNA, 599 bp, Oryza sativa
tcaataagtcttcaaagctagatacaatgttgctagtagttactcgaagcatgaccggatacaagttggtatatctgcattggaaaatgccctgacagcaggttatgaagactcaaggagaattcgcaccgacccggatctagaaaacttgaggaaaactgaggaattcaacgtcctgctgaacaagtacgacgaatcgttcatcaatgagaatgctatcaacgccatcaaatccttgtttggattcaacaagaaatgagcactgaactggtcatggtggtaggagatattgcatcttttctccagctgcagttgaacacttctgaagctttgctaggctatatagcacttggcaaacacggttcaatttttctccctgccattagttcacacttcacacaccagtagttttagctattcttggtgagattctgcagaacggtttcagtcttccctctcactgccaccagtcgatggagatacactttgtaaattcaagcaaccaaatgttaaggaaatatattgtgattgtgctttaaaaaaaaaaaaaaaaatatattttatatttttttaatttttttttatattttatattttat

SEQ ID NO: 388100 - DNA, 1291 bp, Oryza sativa
ccacgcgtccggcaggctatattcagacaaactagccagtagcataccgagatgactttgaatttagtttgaaatttgttgacagatttgtagggcattagcttacatccataatagcatcggagtttgccacagagatatcaagccacagaatcttctggtaaacccacatacccatcaactcaagctatgtgactttgggagtgcaaaagttcggttctcccttgaccagaacatatcgtacatttgctcccgatactatagggctccggagctcatatttggtgccaccgaatacactacagctattgacatctggtctgctggatgtgttcttgctgaacttatgttagggcagcctctgtttcctggtgaaagtggtgtagaccaacttgtggaaatcatcaaggtccttggaacacctacaagggaggaaattaaatgcatgaatccaaactataccgagttcaagtttccacagattaaagcacacccatggcacaaggtattccataaaaggttggcctccagaagctgttgatcttgtctctaggctgctccagtactcacccaacctaagatgcactgctgtggaagcacttgttcacccattctttgatgagcttcgagaccctaatgctcgccttccgaatggccgctttttgcctcctctcttcaacttcaagcctcatgaactgaaaggaatcccatcagatattatggcgaaattgatcccagaacatgtgaagaagcaatgctcctatgcaggagtatgagacagcttccgcacgacccccctggaaatttccatgacaagtgcccatttcctcccccctggacgacgatggatcgtcagcatatgcgtgcatgatggttggtgaagatgtgaagttacgttgttgttgtatgaccaccttgttgaccagtgtagttgagtagcagtatgttgcgatggcgaaactttgacatgtaaccggtgcacccacaccatccctcccctactaaccctcacccacctgagaattgagaattcccatagctgatgatctgtaatatgttctagagcagtttaagaatgtatttattatggtgtagttgatccatatgttgggatcctcctcgtcgattttcttggttctttgtgccctagactgctacctggtttttagactgttctgaaaatgctgctagtaccttctatctactgtacttgtttgctccttggtgctattgctccagcctcagctataagaatgctctggcatataaacgtatggacaagttcgtcgat

SEQ ID NO: 388101 - DNA, 899 bp, Oryza sativa
agaggatttttttttccttcggcttatgtagtattgcgctgcgtcccgacaagcaaaagcaagaggaggaggccgcggctagcgagcgagcgagagagaggggagaagaagaggtgggacagccgggagatccatccctgtggagaggagggagggaggaaggaggcgttggaggaggagaggttgaccgatagatccattgcggagttgagtgttgatgcaaagctgattcgccatcgtttagctttttataagagatgggttcagtaggggttgcgccgtctgggttaaagaacagcagtagcaccagcatgggtgctgagaagttgcctgatcagatgcatgatctgaagataagggacgataaggaagttgaagcgactattattaacggcaagggaacagaaaccggccacataattgtcacaactactggtggcagaaatggtcagccgaaacagacagttagctacatggctgagcgtattgtagggcaaggttcatttgggattgtcttccaggcaaaatgtctggagacaggtgagacagttgctatcaagaaggttcttcaggataagcgctacaagaaccgtgagcttcagaccatgcgccttcttgaccacccaaatgttgtagctctgaagcactgtttcttctctacaactgagaaggatgaactgtatctaatactgggttcttgagtatgtgcctgaaactgttcatcgtgttgtgaagcattacaacaagatgaaccagcgtatgccacttatctatgtgaagctgtatatgtaccagatttgtagggcattagcttacatccataatagcatcggagtttgccacagagatatcaagccacagaatcttctggtaaacccacatacccatcaactcaagct

SEQ ID NO: 388102 - DNA, 757 bp, Oryza sativa
ccacgcgtccgacgagaccgaggaggcgccagctcgactccgcgcgagccgaggcctcgaaccctaacccccattcgatttccggcgagatgcccacccgcgtctgagccttgctcgtcggcggcgaggtggggtggggcggggggcgggggcggcgagggatggaggcgaggcgggtctccgcgaaccctcggccgtcctgcgtgcggagggtgcttgcgcggaagcggcggaggcccgaggcgacggcgaacagcgcgcggaagctgcagcggcgggagatctccgcgctgccgtgccgcgcgttctccgcgagcaccacgcgggagcggttccgcaacatccagctccaggaagagtttgatactcatgatcccaaggagatgggttcactactaccttacttgatgaaaaggtctgagattattgagatagttggagccagtgatatcatctttgctttatcacagtcaggagtatgtgctgcattcagcagagtctcaaaccagcggttttgctttctggatggaagaccagatgaagtcattcgcagtttgttttacaacaagaacaatgactcactcattactgtatcagtttatggttctgaaaacttcagtgccttaagatgcaggacaactcgaatagagtatatacgacggtggaagccagatgctggtttccctcttttcgagacagagtccttgaaaagggccaggttttgtggaacttgatgatgttaacgggaaggtgctga

SEQ ID NO: 388103 - DNA, 1044 bp, Oryza sativa
  unsure (1)..(1044): unsure at all n locations
gaatgatactgatgtccataatacttttgttgggggacacaattcctttggctgggcaccaaatgactattctcttgattgtaatgttggcgtagaggaggcttcggtaactcctgctctttcagtctgccggaatagtaatgaaatgcatggaagtttggttgataacccactggctttggtccgcgatgatccatccttgcaaatttttcttccaagtcaaccttcctctgttcctcttcaggaagaacttagcgagcgtgctaatgcaccaaatggggttcagtctgatgattggatatcccttacactcgcagcgggtggaggtggtaacgaagagcctgcacctgctgatgtcaattcacagccacaaattccatcaacagagacagggatcgaaccattgaccgatgctgcttctgcatttctgagcacaaacattgaaagacgtagcggagctgatttaaatccaagaaggatagaaaatatattttctcatcctcgccagcctcggtctgttaggcctcgactctgtttatcaatagatactgattctgagtagtttggacatcataacggggtaactgagtttgcattagtttggcaaagctgccatccagaaatcatgatttatactgaggtggggttatcggtcgtctggttgatgtaaagaaaaacaccagcattgatgctttgttgcctcaatggtttacaagctttcaagtgttctatttgatccaggagggatctgcatagaggacatctgatgggttggtatagaaaattttctaactggggtatcgaggcttaatgtggcgcctggagcagttttgtacattttttttgttttgacttttactggatataaggaatagaggtggggtcatccctggaccctggatgcaagacaaatacatgtgaatgttttgggtgtaccatcattgtatttagggtttgggggtactaatttagttgtttattaacctggtatttgatggagaataaattattcctggaagtggcggccaaanaaaaaaaatagaa

SEQ ID NO: 388104 - DNA, 586 bp, Oryza sativa
ccacgcgtccgcccacgcgtccgattcatctaggtatgaacatccacttctcgtcgagaaaagagagaagggtgactgggtgcttccaataactgtttatgcacctccattgcgtaggcaagcaattcatggaagaaatgatagatctgtcttagttgggaaccttttcaactcttgaagatgtgcatacaaggttctgctgtgcttttcaaaacccctaccagttttgcttccgatgagcttcgacgagtattctctgtagttcactttgcacagctggccagttccatacctctaaaatacatgggagatccggaacacataaagcgagaacaaacttgtgttagatcaagtgtgcaaatcacagagttcgtcacctgagaacaggcagctgtgccttgatgtaacatcggcactgcttgattaccttgatgtactataggcattcctttgatagagggacagaactcttggcgtgcttgagtcgctgttataccccctagcattcagtatgtgagtgcgtgagacatctgccatgtagtcacttctggaggcgtacccattaattgtagcaaatttgggtcct

SEQ ID NO: 388105 - DNA, 942 bp, Oryza sativa
gactggaggaaggcaagaacacgtattttcttcaggttcatagctactcctgcaggtgaaatggcaagcctgcagaatttgatctgctccgtttccaagcagttggttgctccaaattgtgctgttaccagcaagctgaatgcgtctcctctgtcagtcgtcaacgctagctcgagtgaagcatcctcggatgaaaagaatgtgacaaggaggagattagctctgcttgggtgctggagcattagccactggtctgctaaagagcagctctgcatatgctgaagaagtgccaaagaattacaagtcttatgtggattcaaaagatggatattcatacctgtatccagctgattggagggatttcgacttcctggggcatgattcagcgttcaaagatcgtaatggtagcgctgcagtgcgtgcgtgtgggcttcattcctactacaaaaacagatttccgtgaccttggtccaatggatgaggcgatcttcaatttggtgaacaatgtttatgctgctccaaatcaaataccaactgtctatgacatgcaagagcgcaccgtggatggcaagaactactggacatttgagtacgatcttgaggccccgggctacggcgtgtccgcatttgcgacggttgccattggaaacggtcggtactacacactgatcgtgacggcgaacgagcggcgatggagtaggctgaggaacaggctcaaaagtcgtcgccgactccttcaagctgtccgacctcaccgcgtgatgggaggcagttcaattgcagaaatatcttttattttattgctccgtagtcatgtagatacatacatacatacatacagacgctgaactaccactagaaaaggtgctggatcgaacaccctggctcagcttccaggaaaaagatgcataattaccttatagacttgcaaattgccgctag

SEQ ID NO: 388106 - DNA, 1568 bp, Oryza sativa
  unsure (1)..(1568): unsure at all n locations
tcgtccacgcgtccgcccacgcgtccgcaatcatcagatccggctccgcctcctcctcctccacctcctcccaccccctcgccgatccagatccatcgccggggaggcgccagccatggccggcggcgggggcgccggcggcatgtcggagtcggtgctccgcaaggtgctcctctcctactgctacgtcggcgtctggatcttcctctccttcgccgtcatcgtctacaacaagtacatcctcgaccccaagatgtacaactggcccttcccgatctccctcaccatggtccacatggccttctgctcctccctcgccgtcgccctcgtccgcctcctccgcgtcgtcgagccgccctcgtcgcccgccatgaccccgcagctctacacctcctccgttgttcccatcggcgcgctctacgccatgtcgctgtggttctccaactcggcctacatctacctctccgtgtccttcatccagatgctcaaggcgctcatgcccgtcgccgtgtactccatcggggtgctcttcaagaaggagaccttcaggtgctcctccatgctcaacatgctctccatctcgttcggcgtcgcatcgcggcatacnaggnccttcgatgttcggggtgtcgcgctgcagctcgccgcggtggcttcgaggccaggtccgtgctcatccagatcctgctcacctccaagggcatctcgctcaacccaatcacctctctgtactacgtcgcgccgtgctgcctcggcttcctgctcgtgccgtgggtgttcgtcgagctgcccaggctgcccgccgtcggcacgttccgcccggacttcttcgtgttcgggaccaactcgctctgcgccttcgcgctgaatctggcggtgttcttgctcgtcggcaagacctccgcgctcaccatgaacgtcgccggggtggtcaaggactggctgctgatcgccttctcgtggtccgtgatccgggacacggtcacgccgatcaacctgttcggctacgggatcgccttcttgggggtggcatactacaaccacgtcaagctgcaggcgctcaaggcgaaggaggcgcagaagaagatcagccaggctgatgaggaggctggctcgctgttgcaggagcgcgatgggcacagtgatcgcaagagcgataaccaggcatagagccaccaccagatctgatcctggcacacacaaattgggtatctggtgcaaagtgcaaaagactgtagtttggttggtctacggttgctttcaaggaggtggacaccagtttgttctttcacttatttaactttagttggatctggagggcaaatcaagggaatttattggtttaggaaaatacttgcacttgcacctactttctggaggactagagtaaactttcatgttaccctgttatttattcagctatttttgttccagagaaagacagcctcgttgcctctctcgctcattgcctaaaatttatttgttctactagtagcctaggtactaaaaatgtacttctacatattggtattttggtggttatcttctatatataatgagcttactgt

SEQ ID NO: 388107 - DNA, 706 bp, Oryza sativa
ccggaatgaccgacgcgaccgacgcgtcgtccgacgcgtccgcatatttccaggactggcggctgctcgccttctcgtggtccgtgatcccgggacacggtcacgccgatcgacctggtgcggctacgggatcgccttcttgggggtggcatactaccaaccacgtcaagctgcaggcgctcaaggcgaaaggaggcgcagaagaagatcagccaggctgatgaggaggctggctcgctgttgcaggagcgcgatgggcacagtgatcgcaagagcgataaccaggcatagagccaccaccagatctgatcctggcacacacaaattggttggttctaaatccggctgtgttatctcttttggttgcactctcaatgtgtttgttctttaccttgatccgttgtaggagagcaataaattatggagtaaaatgtgatcttttacatttaatagatggaaaaatgtgcgatcttttatagtttacacacctgtatttttttatttattactgagatgctacatatgtttactggagtactagagaagtgtaaacatatactatctgaaatgctttgttgcaacagcctttgtagtctatataatcactatatccacttagttgcaactaagaaagcttgggccctatgtaatgttgcgtgaggcattgctaaagtactcttgaatgttgttcaaaaaaaaaaaaaaa

SEQ ID NO: 388108 - DNA, 557 bp, Oryza sativa
ccacgcgtccgaccaaactcatgctatgagtggaaatggagctatgacttttgatttagaatatgcccgttggttggaggaacaaaacaagcagataaatgagctgaggactgcagtaaatgctcatgcaagtgacagcgacctccgtctcattgtagatgggataatggcgcattacgatgagatattcaggctgaagggtgttgccgcaaaggctgatgtgtttcatatactttcaggcatgtggaaaacacctgctgaaaggtgcttcttgtggcttgggggttttcgttcctctgagcttctaaagcttcttgtgaatcagctcgagccattaactgagcagcagttgttgggactatcgaacctccaacagtcctctcagcaggctgaagatgctctatcacagggaatgggagcgttgcaacaatccttggcagatacgttggccgggtcccttggtccatcaggatcttcagggaacgtggcaaactacatgggtcaaatggctatggccatgggcaaacttgggacccttgagaatttcttcgtcaggc

SEQ ID NO: 388109 - DNA, 857 bp, Oryza sativa
ccacgcgtccgcccacgcgtccgaaaaaagcttctattgagggttcaagttataagacagaaaaacaagttggttctgtatatgatgaagaggcttgtaagatgacaacgacagagagatcagtgggtagaagggaaggactgagacgatctgcttgtacacccatgaaggcatatttagatccatcggaggatagaacatcacttttcagtgatacaagtgcaagtgaaggtgcaaatgaagtaaatagaacaccagagaattcaaatcagcatgaagatgattcaaccatagatggaactttggcttctcatgcagaaataagggttatggttagggatatactgttcagtgacattattgcgcaagcagcatgctgctgagatggcatatgtagatgaagtgatcaatggcatttgctgcgctagtgaattgaacataactggtgatcctactcctgttgcaaagggtggacgaggcatcaaacgaggtggtagtagggcagaggcggagtcaagtaacattacacagagatctagaaaagggagaatagatcaagcaagtagcaatggaaagaaaagagctaaggacacctcagaaaccatgaatcatgacaacagtcccaactctttgagagggcctttcgatagtactagcagggatgcagccatggaggaactggggcaagttagcgcgcgtcaaatcaggatcatgcagagtcttgctttgattgctccgtcaggatccccgtttgcaaaaatggactggttgcatcaaccagtttataattctgagttaattcgaatatcctcgaaaggtattcgacagatattcgaaagctatcattactaatgaac

SEQ ID NO: 388110 - DNA, 462 bp, Oryza sativa
ccacgcgtccggtaaatctgcacaagaaaaagattcaagaacagtttagatttcagaaaaagaagtgatcgatcgattgattgattcttgcacatgagcatggcgagcagtggcggctactactcctactacaacggccaccagccggcgccgtactactacggctacgcgcagccggcgagggtcgccggcggcggcggcgtcggcgggtcgcagcggccgtcggcgcacgcgctcctcctcgtcgcgacgctgctgctcgtcgccgtgaccacgctgtactcacggtgcgaggaggcggtggagagcctgctcgaccagctccgcgtgctactcatcctctccccgatgctgctcatcgtcgccgtgcaggtatgggccgtgagcgccgccgccgccgccgacgaccgtcgtggctccggcggaggcctgatgttcctactcacacagctgatgggcatg

SEQ ID NO: 388111 - DNA, 569 bp, Oryza sativa
  unsure (1)..(569): unsure at all n locations
tcntctgcacttcacctctcctctcatggagttcgcctagttgtgtgctctgctcctccttgaagaagccttcagatctgtggttcctagcctttctcagcttcctcaacacagccgtccagatggcgtccctgacacccgaagctgaagctcccggaggaggagccctgctcgccgccggcgacgacgtcgccgccgcgaatctgctcgccgccgccgtagccaccgagggtcctgtatttgatatgcctgacttcaagatgggtgggaagaagagtgatgatgctgctcccactgatgccggggatgaagatggtggtgatgatgacggggacgaggatggtgactttggggaaggcgaagaggacgtttcagaaggtgagggatatgataatccaaaaggcatcgataacaacaagaaaagaggtgagcctgaggaaaatggtgaggaggatgaggaagagcctgaaggccaggagggtggtggaggtgatgaccacgatgacgatgatgatgacaatgaggatgacgacgacgatgatgatggtggtgaagatgatgatggagta

SEQ ID NO: 388112 - DNA, 526 bp, Oryza sativa
ccacgcgtccgcccacgcgtccgcccacgcgtccgctgttcgcctgttcgtcctcctctcttcctccacttcatctcggtggaccttttttttttgctgcgagaaacgtagatccagcttgtttcgatgtcgaaatgcacagcaaatattgggcatgaaacctacaggatcttcatcgtcgataacggaggcaagaactacctcgccgtggacacgtccggcaacgtcgtccttgtggaagatccggagagaacgcaaccctccagcaactcctatggccgacagctgatatggtacaaggtcgtcgacgaggccaccggcggcggcggcagcacaactaaccagaacttcgtcctgaaaaacaacagcaagcccctcgtcgtcaagagtagtcgtggcgacgggcggcagcggctggatgttgttcttggccagggaagagatgttggagaacgctggacgttggaggagatacacaagggcgtatgctacatcaagaatgggagctactccaaccacatcttca

SEQ ID NO: 388113 - DNA, 620 bp, Oryza sativa
  unsure (1)..(620): unsure at all n locations
ccacgcgtccgagctccagcaactcagatttcgatcaagcatggcctccctgagattgaaatatattgctatttgcttgtcctgatttttcttattgaccagaagaaatacgacgatgctaaagcatgtgcaaatgcaagcattgctcgtctgaaaaacttgaacaggagaactgttgatgttctggcatctagactgtacttctattactcatatgtgcatgaactcaccaacagccttgctgaaatccgtgggaatctgctagccttacacagaatggcaactcttcaccgcgatgaacttggccaggaaactttgctcaacctgcttcttcgcaattacctccattataatttgtatgatcaagcagagaaacttaggtcaaaagctcctcgttttgaagcccactccaatcaacaattctgtcgatacctgttctacttgggtaaaatcaggncaattcagttggagtacactgatgctaaggaaagccttctgcaagctgctcggaaggcacccattacagctcgnggctttcgtattcagtgcaacaaatgggctattatagtgagactacttctcggagagattccagagaggactgtgttcatgcagaaggg

SEQ ID NO: 388114 - DNA, 497 bp, Oryza sativa
  unsure (1)..(497): unsure at all n locations
ccacgcgtccggcgagctggatttgatattcaatttccacaaggcctactacatacttgatgaaatggggatggctggtgagcttcaagaatctagcaagaaaaatgttgcaagactaattgctgcacaggattcattggtagaggcagctaaagaggaagctagctctataagcaacatcattgcccaggctacaaaataaaattctactccagtctgatgtttgctctcttttgttgtgttatattggtaaatgcaatgtactagtccatttggtctgttcagttttctaagatacgtctttcaaggtgccaggattaagaatgaacatgatgttactacactgtatccgctatttcgaaccgaagtcggattttcttagagaaatattgtccatgagagttgatcatggtgcgtgctattgccttttatttcttttttcnnnnnnnnnnnnnnnnnnnnnnnnnnnnnnnnnnnnnnnnnnnnnnnnnnnnnnn

SEQ ID NO: 388115 - DNA, 635 bp, Oryza sativa
ccacgcgtccgcccacgcgtccgcggacgcgtgggcgcgccaccgccaccgccaccgccaccctcgccgcggcgccgcctccactccactccaccgccgccgcctatataacccacctccacctcgcttccccggcctcgactccactgctccaccaccatgcaggcgcacgcccacacgctcgggctccgcatcgccccgccgccgcctggcgccggcgcggcgccgcgctcgcccgcgccggcgcgcagtccgtgtcgccgcggcggcgtcggcgccgcggcgggagacggacccgaggaagcgggtggtgatcacggggatggggctggtgtccgtgttcgggaacgaggtggacgccttctacgagcggctgctcgccggggagagcggggtcggcgccatcgaccgcttcgacgccggcggcttccccacgaggttcgccggccagatacgcgggttctcctcggaggggtacatcgacggcaagaacgaccggaggctcgacgactgcctccgctactgcatcgtcagcggcaagaaggcgctcgagaacgccggcctcggaagggctccgatggccacaccaagcttgacaaagtccgggctggtgttcttgtgggaactggcatggg

SEQ ID NO: 388116 - DNA, 583 bp, Oryza sativa
cccacgcgtccgcccacgcgtccgcccacgaacaactgcagaagtagagggtgttctaacacaaagcggaacttctcccgattacaaggttggcaacagaataacagacatcagccaaaaaatggttgaagaactaaaggagtctgtgaaagaagagcaggctgagaaaaaggaggaggcagccaaggagaagccagatgaaccacaagagatcgtactgaaagtcgacatgcactgcgaaggatgtgcaaagaaggtcgagaaatccctcttgagatttgaaggagtcgaaaacgtcaaggctgacagtcgatcgaagacggttgtggtgaaaagcagggccgcagatccctcaaaggtctgcgagagggttcagaggaagacaaagagaagagttgagctgattttccctcttcctccacctccagaagaggagaagaaagaggaggctgcagcaccacctccagaagaaaagaaagaggagccaccgaagacaataactgtcatcttgaaggtccagatgcactgcgacgcttgtgcgcagattctgcaaaagcgtataaacaggacaaaaggtgtagaa

SEQ ID NO: 388117 - DNA, 639 bp, Oryza sativa
ccacgcgtccgctttgggtgttagtgtcttaattagtgtgtgagccccatcctaaaattgtcactattcagcagtaataattattattaggactattagaaaaagaagacatcaactaatcatcagcctcttcgatctccttaatttgtttctctctgtaactagatgatcaattaaccgatttcatgcatgcagagctggagcacattggctgacatagtgaaggcagagctcaaggactaccccaaactgaagctcacgcaggggaggatggtgttcgagatccggcccaccatcaagtgggacaagggcaaggccctcgagttcctcctcgagtcgctagggttcgccgactgcaccaacgtgctgccggtgtacatcggcgacgaccggaccgacgaggacgcgttcaaggtgctccgcaagagaggccagggcatcggcatcctcgtgtccaagtaccccaaggacaccaacgcctcctactccctgcaggagccagcccgggtggtggagttcttgctgcggctggtggagtgggagcgcctctcccgtgctcgccccaagtggtgatttcgccgacggcttcaacccacatttcccgacagctatctctctctctctctctgctactgctct

SEQ ID NO: 388118 - DNA, 907 bp, Oryza sativa
  unsure (1)..(907): unsure at all n locations
ccacgcgtccggaacactcttgatagagcctaaaccacaagaacccacaaaacaccagtacgattgggatgttgcaaccacattctctttcctacagaaatatggtctaacaggagaattcaagataaatgttgaatgcaaccacgctactctatctggacatagctgccaccatgagcttgagactgcaagaattaatggtctgcttgggaatattgatgccaacactggtgatccccagatcggttgggacaccgatcagttccttacagatatttcagaggctactttggttatgtcaagtgtggttaagaatggtgggcttgcacctggtggattcaactttgatgccaaattgaggagggagagtactgatgttgaggacatgtttctggctcatatatcgggaatggacaccctagcccgcggccttcggaatgttgtcaagctgatcgaggatggttccctggatgagcttgttcgcaagcgctaccagagttttgatagtgagatcggtgccttgattgaggctgggaaaggagacttcgagacactagagaagaaggttctggagtggggtgaacccattgttccatctggcaagcaggaactggctgagattctgttccaagctgctctatagatggtgccgtggtgctgttcatagttctaggaataaagcctagcacgcctttggaaacggaatgtgcattctatcattgtctactacgagcaataatctagttatagtttagttattagccttccatgcaatgaaccttttgtacactacagccatgggaacttaaaataatgatgagttgtgcctttctaaactgaaattaaaagagtccggtacctttatgaaaaaaaaaagttggttnnnnnnnnnnnnnnnnnnnnnnnn

SEQ ID NO: 388119 - DNA, 744 bp, Oryza sativa
  unsure (1)..(744): unsure at all n locations
cttatatcaaatgctgagctttcttctgctgatagtcgcaggatggtatctggtcccaacgggtataattctgcttcaactgcaagagaggaacctggctcgagaattcctgatcgctctggaagaatagcaccaaatacacagtttgctggaccatcgaacaggcctgccagccaagagggccgttcagggaataaattatactctgaggatgatttaagagagaaatctatttccgccatccgggaatattacagtgcaaaagatgagaaagaggttgctttgtgtattgaggagttgaatgctccaagtttctatccctctgtcgtatcactgtgggtaaatgattcttttgagaggaaagatatggaaagagagttgttgacaaagcttttcgttagtctttgcaacagtcgaaataatttattgagcaagtctcatctcactgcaggacttgcgactgtccttggttcattggaagatgctctaagtgatgctccaagagctgcagagtatcttggacggcttcttgcaaggtttgtggtagaaagcatattgtccttgcaggaggtgggtacattgattgaaaaagggggagagggaccgggagagcttgtacatcatggcattggagctgatgtccttgntgcagttctagagtcgatcaaagtagaaaagggggattcattcttgaatgaggccaaggcaagctccaacctcaagttggagatttagaccacacat

SEQ ID NO: 388120 - DNA, 519 bp, Oryza sativa
  unsure (1)..(519): unsure at all n locations
caaaaagaagcgtcgcattcttgcttcgccagaggaagaagagaagagagaaggggaggaggaagaaatggctgccgtccaagcagcaatctccacctgctgctcttcgtcttgcctgtcccggccgccaccgccgttcgcgaggaggcggcgcttcaaggtcacggccatggctccccagaagaaggtgaacaggtacgacgagaagtggtcgaagcagtggttcggggcggggatattcgcggaggggagcgaggaggtggaggtggacgtgttcaagaagctggagaggcggaaggtgctgagcacggtggagaaggccgggctgctgtccagggcggaggagctcggcgtcacgctctcctcgctcgaggagctcggcctcctctccaaggccgaggacctcggcctcctcagcctcgtcgaggccgccgccgccgccttccccgacggcctcgtctccgtctcgctcccgctcctcgtcgcccgcatcggcggcgtcgtnctcgttcccgacga

SEQ ID NO: 388121 - DNA, 573 bp, Oryza sativa
ccacgcgtccgattttgttggtaagatgtcgaagaaatttcctgggttttctctgattacggtgaaagtgaaggacaatcaggttctcaaaggttggattccagatgaaaataacctccgcccaataacaccaaaagatgatcttgccccagatctccctatgcttcgaccaagtcaagttcgaaagaggccatctactgtttacagacaagcttctggtcctattccagtccccttggaggatgttacatttgcaaagcctctacagatgaggaggcctgtagagaaatccttcactaagcacacggtcccttccgttccaagacctcacatgggttctggggttgttgcagcagtacctatctcagtttcacccagtaatgctgaatcaaggattttctccgagcagggtactgaacatgtgaatccacaaccgttatctgctgtggtacctattaaatcaggtcaacctgtattggcatcatgcaaggaagtcgctggagggaaaacttgcaatgagattcaaacagtctctgaatcttcaaagcacactggagagtcatcagatcacaa

SEQ ID NO: 388122 - DNA, 1086 bp, Oryza sativa
ccacgcgtccgaaagggaacaatatctgccagctttgttcctgttctatgtggttcggcctttaaaaacaagggtgtccaaccactgcttgatgctgttgttgattacttgccatcaccacttgacctaccaccaatgaagggcactgatccagaggaccctgaactgatccttgaaagaaagcctagtgatgatgagccattttctgggttagctttcaagatcatgactgacccatttgtgggatcattgacatttgttcgcatatactctgggaagctggttgctggttcatatgttctcaatgcaaacaaagataagaaggaaagaatcggaaggcttctagagatgcatgcgaacagtaaggaagatataacagttgctgtggcaggtgacatagtagctcttgctggtctcaaagatacaattactggtgaaactcttagtgacccagataagcctgttgtgcttgaacgcatggaatttcctgatcctgtcattaaagttgctattgaaccaaagaccaaagctgatgctgacaaaatggcaaccggactaatcaagcttgctcaagaagacccatcattccacttctctagagatgaggagaccaaccagactgttattgaaggaatgggagaattgcaccttgacatcattgttgacagattaaagagagaattcagggttgaagcaaatgttggagctccgcaagtcaactaccgtgaaagtatttccaagatttcagaagtacaatacgttcacaagaaacagtctggtggatctgggcaatttgcggacattattgtgcgattcgagcctttggaggctggaagtgggtatgaattcaagagtgaaataaagggaggggcagttccaaaagaatatgtaccaggcgtgatgaagggaattgaggaaagcttgcccaatggtgtccttgctggttaccctgttgtggacctccgagcggtgccggttgatggctcataccatgatgttgattcaagtgtcctggcattccaaattgcagccagaggtgcattccgtgaaggattgaggaaggctggtccaagactcctggaacct

SEQ ID NO: 388123 - DNA, 1060 bp, Oryza sativa
  unsure (1)..(1060): unsure at all n locations
ccacgcgtccgcccacgcgtccgatccatccgttcctccgatcagttccaacttccaacctccgatcccaacgagaaaaccaatactgacacctctgcctcgcaacgcggcgcgcggccgtgctgcgatcgatcgaccggccggagtccggcatgcaaatgggagctgcctggcgcgggcggcggcggcggtgatgggcgcggcgagctctaggctggagaaggcgctgggcgagcagttccccgagggcgagcgctacttcggcctcgagaacttcggcaacacctgctactgcaacagcgtcctgcaggcactttacttttgtgttcctttccgtgagcaattactggagtactatgcaaataataaaagcaccggagatgtcgaagacaatatgttaacgtgcttagctgacctgttctctcagatcagcaaccagaagaagaaaacaggtgttatcgctcctaagcgtttcatacaacgactgaagaaacagaatgagatttttcgcagctatatgcaccaggatgcacatgagttcttaaattttctgttgaatgagcttgttgatattctggaaaaggagtctaatgctgcgaaggactcccctcaatcatcatctcctgaaaaggttccaaacgggccagttcaacctttagccaatggtgttagaaaagaaccaccggttaccttggtgcataagaattttcagggcatactgaccaatgagaccagatgcttaagatgcgagacagtaacagcaagggatgaaacattttttgatctgagtgttgatattgagcagaatagttctatcacaagctgcttgaaaaacttctgctccacggagactttaaatgctgaggacaaattcttctgtgacaaatgctgcagcttgcaagaagcacagaagagaatgnagatcaagaaggctccacacatattagttatccacctaaagcgcttcaagtacatagagcagcttggtcggtataagaagctttcataccgggttgtattnccatggagctgaagctcagtacatctgatgatgtagata

SEQ ID NO: 388124 - DNA, 1621 bp, Oryza sativa
  unsure (1)..(1621): unsure at all n locations
cattgtcaaccctcatctccccccctcctctccaccgacctcgatctcgcccctccccccacgcgcgcgatctcgcccagatctcgctgagccgccgccgccgccgcagcagcagcggccatggagaacctgatctcgctcgtcaacaagctgcagcgggcctgcaccgccctcggcgaccacggcgaggagagcgccctccccaccctctgggactcgctgccggccatcgccgtcgtcggaggccagagttcgggtaaatcctcggtgctggagagcgttgttgggaaggatttcctaccaagaggctcaggcattgtcacccgtcgtcccttggtgctgcagcttcataggatcgacggagacagagaatatgcagagttcatgcaccttcccaggaagagattcactgatttcgctcttgtgaggaaggagatagctgatgaaactgacagagaaactggtcgttcaaagcaaatatcatcggtccctattcatttaagcatatattctccaaatgttgtgaacctgactcttatcgatcttcctgggcttactaaagttgctgttgagggtcagcctgacagtattgttcaggacattgaaaacatggttcgctcgttcatagaaaagcccaattgtatcattctggctgtttctccagccaatcaggatcttgcaacttctgatgcaattaagatttcacgggaagttgaccccaaaggtgaaaggacgtttggtgtgcgttacaaaaattgatctaatggacaagggcaccgatgctgttgatatattggaaggcagatcataccggctccaacaacaatggattggtgtcgtcaatcgatctcagcaggatatcaacaagaatgtggacatgattgctgctaggcgcagagagcgtgaatatttttcaactacgccagaatacaagcaccttgctcataggatgggatcagaacatttagcaaagagtctctcgaagcatttggagactgttattaagtcaagaatcccagggctccaatctctcattacaaagacaattgccgaactggagacagaacttaatcgacttgggaagcccattgctacagatgctggaggaaagctgtacacgatcatggaaatatgccgcatgtttgatggtatctacaaagaacatctggatggagtgcgtcctggtggtgagaaaatctatcatgtctttgacaatcagtttcctgtagccattaaacggttgcagtttgacaaacaactggcaatggaaaatgtgaaaaagctcataacggaggctgatggataccaacctcatttaatagctccagagcaaggatatcgacggctcatagagtcttgtcttgttagtatcagaggtcctgctgagggcagctgtggatgcggtccatgcgatactcaagggaattagtgcacaaggccatcaatgaaacacatgagctgaagcagttccccactcttcgtgtggaagtaggcaatgcggcttttgagtcattggacagaatgagggatgaaagcaagaaaaacacattaaaagcttgttgatatgggaatgcagctacttaaaccgtagatttcttcagggaaacntccccaggatgtt

SEQ ID NO: 388125 - DNA, 632 bp, Oryza sativa
gatcgacccacgcgtccggccagacgagctgttagtgaacattgcagctgccgttggtacccacgtgaataagttcttgagttttcttcacgatgtgtcttgtgaaagaaacctgaagtactttgtgctggcaatcgctgaactgtgggctgcgactggtattgggggctgttgcaatttcttaactgtcatttacattggatgcgttagcgctcacacgctgcccgtgctctacgagaagtctgaagatcaagttgatgatttcctatacaatattcttggcctcctgcgtgaccagtctcagaaacttgatcaaggtgtcttgagcaagataccgaaagggaacatggagttcaagaagagcgcgtagattgtctgcgttttaagaactgacatcatagattagctgggttttcatcagtggaatgaatcaagaatttgtaccatgctcagttgcgtattgcagacattggttgtcagttgtcatctgagagctgtgtgctttcctgaatggggcgctcatttgctgcaatctgaattaatatttcaactgctctgccctgcatttcttctgttatgtagtgttattcaagtggctcaattaatttccttcttttcactaaaaaaaaaaa

SEQ ID NO: 388126 - DNA, 1024 bp, Oryza sativa
  unsure (1)..(1024): unsure at all n locations
ccacgcgtccgcctgttcttaacctggttgcatctgttcatggagcacgagatatagtaccaccagagatcaaagcaatttttggcagacaatatgtcattagaactagtgtgtcacgtggctcattgcaaagaaatcgggtatcctaccaggtggattcccttatgctaccccacccagatccaagccatgcaatttgtctacccagccatgatacttgcatgggctcttctggacatggctcaacatcagctaatgcagttgaaccacatgccatcgttttgtcttctactcaatctatgccaccttctacgccgttggggccgccccacgcgaccgacacaagggacagccatggtgatcagcatgaggcaacaccacctactccacaggctagcaatatattttatactcacatcaattatatgcatatgtctttgtcagaccttcctaaccattaatactttatcaggtcatagctatagcacatctagataaaaaacgtaaatcttctatggctgatgagnatcttngccatggcgggttagtgccaatggnaaatttcatgttttnctttgatttcttctctttttcctcatgactcaaacaacttccatttgtagctcatctcctgatggacatngatcgtcgcaagccttctgttgtgcacacactgttcgtaggcaagctnccaccngngctgccaaaatgacttgaggctccccatgtgctatcccccggtgcgncgtggcccnttttncacctggnntgggaanngggnntnacttnntntcccnnncttgacngcaangtataanancttttggncantncntttttnaggggcnncantggcatgggncatgtnttttnncgnangcnttngnccctcgnntaggttanctgtanggtantacccannggtngcnctgtatgattgtcnactnttgngtnancntncggnacncntctnnnngnncngctgnnntcaggcnttntnnccgttaannnacanggggggnna

SEQ ID NO: 388127 - DNA, 751 bp, Oryza sativa
  unsure (1)..(751): unsure at all n locations
aggcgactctcttcgtaaccagggtccgttgcttaataagccatcatctattaacaagccatcatctattaactccaggcttcttcctcatggaagtggagcactaattggtaagagtgctcttttgggcagtggtggtccaccatctcgcccttccagccttatggctagtntcactcatacaccagctcaaactgcaccatcaccaaaacctgtaagtgcagctccagctgttgtgcctgtcacagacaaagcagccggttcttcccatgagatgccagctgcagttcagaagaagacggtatcccttcttgaagagtattttggcatacgtattctggatgaagcacaacaatgtatcgaggagcttcagtgtcctgagtactactctgagattgtgaaagaagctatcaatcttgctttggataagggtcccaacttcattgatcctcttgttaggctgctggagcatctgcacgccaagaaaattttcaagactgaggacctgaaaactggatgcttactgtatgcagccctgctggaagatattggtattgaccttcctctagctccagccttgtttggtgaagttgttgcacgactgagtttgtcgtgtggcttgagctttgaagttgttgaggagattctaaaagcagtggaggatacatacttccgcaaaggaatttttgatgctgtcatgaaaaccatgggcggaaactcttcaggtcaggctatattgagctcgcatgct

SEQ ID NO: 388128 - DNA, 561 bp, Oryza sativa
ccacgcgtccgctaacattgaccttcgaagatttcaggagatgcatgaggaatccatggactgtgggtgggggatttcttgcgccggatttggattcaaccctatcctgggattggctattgccttgaccttgaagtatctgctccttttgcaactgggcttattttagtggcatggtgccctggtgggcaagccatcaaatgttgctacttatttatccaagggaaatgtcgcactttcagttcttatgacaacttgttcgactattggtgcctttgtgatgacaccactccttactaaactcctagctggtcaacctggttcctgtgcgatcctgcaggattggccatcaggacctttcaggttgttttactgccaactattgtcggagtcttggcgcatgagtattttcctaagtttactgagcgcattatatccataacaccattgattggggttctcctcaccactttgctttgtgctagtcctatcggacaagtctcaagagtgttgaaagctcaaggggtcaacttataattcccgttgctctgcttgatgttg

SEQ ID NO: 388129 - DNA, 626 bp, Oryza sativa
ttgcgcatctgcatccaaaaccaaacccaaactcgtcttctccaccggagcagagcagcggcggcggcaatggacgccctcctcgtggagaaggtcctcctgggcctgttcgtggcggcggtgctggccctagtggtggccaagctcaccgggaagaggctccgcctcccgcccggccccgccggcgcgcccatcgtcggcaactggctccaggtcggcgacgacctcaaccaccgcaacctgatggcgctggcgcggcggttcggcgacatcctcctcctccgcatgggcgtccgcaacctggtggtggtgtccagcccggacctcgccaaggaggtgctccacacccagggcgtcgagttcggctcccgcacccgcaacgtggtgttcgacatcttcaccgggaaggggcaggacatggtgttcaccgtgtacggcgaccactggcgcaagatgcggcggatcatgacggtgcccttcttcaccaacaaggtggtggcccagaaccgcgcgggttgggaggaggaggcgaggctggtggtggaggcgtccgccgcgaccccgccgcggcgaccttcggcgtggtgatccggcgaaggttgcagctgatgatgtacaacgacatg

SEQ ID NO: 388130 - DNA, 459 bp, Oryza sativa
ccacgcgtccgcccacgcgtccgcggacgcgtgggcgacgccatccactccgacaaggcccgtggcctcctcgagatgtaccgcatcggcgagctcatcgtcaccggcagcgactactcgccgcagagcagcagtgctgacctcacgtccatcgttgagagccctacggcagcggcggcgcccgccgtgccggtgtcgaccgtcgcgctgtccaacccgcgggagaaggtgaaatgccggctcatggacaagaagagcctgtcctacaacgtgcgcctgttccggttcgcgctgccgtcgccggaccagaagctcgggctaccggtcggcaagcacgtgtacgtgtgcgcgtcgatcggcggcaagctctgcatgcgcgcgtacacgccgacgagctccgtcgacgaggtcggctacatcgagctcctgatcaagatatactttaagggcgaggacccc

SEQ ID NO: 388131 - DNA, 545 bp, Oryza sativa
cggacggtgggaaacccggcgccgacgacgacgccacaatgatggccggccggcgaagcgcccacgtcgacgccgccgtcatcgccgccgccgccctcctcctcctcgccgcgacggcggcggagggcgccgtgtccagctgggagtccaactccgacgaggactaccacatcttcgtggacaaccgcatgtcggacaacatgcacctgagctgctacgccgtgcagggcggcggccggagcgagttctaccacagcttccgcgccgaccccgggagggaggtgcagctgccgtacctgcagccggcgcccaacgcccgcctcgtctgcaagtgggcgtgcgcggggaactacctgaagggcgtcaccctcttcagctcgtcgtggcgggaggccacctccggcgagtgccgccgccgcggcggcggcttgcaacatggtgttcgacgggcacgagatgttcgtcgacggccgcttcgggcggcggcgggaggaggctgcttcggcgaactgccgcagcaacgagtgccagaagatgtgctggtt

SEQ ID NO: 388132 - DNA, 690 bp, Oryza sativa
  unsure (1)..(690): unsure at all n locations
ccacgcgtccgccaccaccaccctgcgcagcgttctcctgtaccctcaccgacgcgacaccaccccgcccccccttatccacggaggcggcctcctcctccgcccagcgccgccgctcttggtccgccggacgcgcgggtcacctcccacggaggggaaaggcctcaatttaggctgttcaactattccttgagatgttggcacatagtctagcaatcaatccttcaagggctgctcgatgtccggttacttcgagggcgtcgagtgcacccttgggacttgtctcttcgttggccttcagcaggggacgtaaggaaagtgttaaacttttcatcaatgtggatagatacacaaagtatagtactcctttctgttatgcaccgcgaaacaccagaatcacaccgcttgctactgcatcatttggtgacacagctgactcgtcaactcccatctttcctagaatccatgtgaaggatccctatcagcgacttggaatcagcagggaagcatctgaagaagaaattcgagctgccaggaattttctgataaacatgtatgcagggcataagccaagtgttgatgcagttgagtctgcccatgacagaatcatcatgcagagtttctctgatagaaaaaaaccaaaagtggatctcnnnnnnnnnnnnnnnnnnnnnnnnnnnnnnnnnnnnn

SEQ ID NO: 388133 - DNA, 466 bp, Oryza sativa
caaaaaaaatgtcaatccaagctaatcccctcatcaaaaccctagccttgtcgcctcgtcggcggatggcgccgccggcgccggcgacggcgcggcgcccgatggcggccgtccgctgctccgcggcgaagaggagctacaacgtcacgctcctccccggtgacggcatcggcccggaggtggtcgccgtcgccaaggacgtcctctccctcgccggcgctctcgaaggcgtcgagttccgcttccaggagaagctgatgggcggcgcggcggtggatgcgtacggcgtgccgctcccggaggagacgctcgcggcggcgcaggcgtcggacgccgtcctcctcggcgccataggagggtataagtgggataacaatgagaagcacctcaagccagagactgggttgctccagatacgcgctgggcttggcgtctttgctaatctgaggccagctgcagtggtgcc

SEQ ID NO: 388134 - DNA, 631 bp, Oryza sativa
  unsure (1)..(631): unsure at all n locations
tcggggtgcagagcatggccggcagcggcacggcatctcgaagccaccgccggcgaagaaggggaaggcggcggcgaggaagtacaagccgccgcaatgccctggcgccgtgagggtggtgtacatagccagccccatgaagctgacggcgagccccgaggagttccgcgccgtcgtgcaggagctcaccggncgccactccaacatcgccgaccgtcactacgttgactccaccattgatctcccgccgccgccgccgccgcctccagcatactgtgccagttatgctgcgtcggccacggcggcggcgcctcccgtcgcagctgtaccaccgccggtgctgactccgccgttgccgccgcaaacatttcagtcgtatgatcacggcggacaagggcaccgctggtagacaacactattactcctaattagtagatgaataataatgtatatatatggaggttaaattatattattatctaggaaatcaattgaattcactcatagtgaaataattaagttttgtctagttgaaactgcagggctgtaaaattattgtatatgaaggtttgcaaattattatattagtattattttttcggcaaaataaaatatttatatatattaaaaa

SEQ ID NO: 388135 - DNA, 769 bp, Oryza sativa
agatgggtgaatttgtgagggaaccttctcctggttctgatgttcttactggtggtgctgatgacaatactgaacagtcactcagggaagaccgtggtgcttaccgtcgtactaacggggagcagcacattgggatgcttaggcaaactcatgatagttatggatttgaaaggtcacacagaggttcagctgagaaattgttgtcagagagtaggttttctcagagagaacctatgcctttgactgcagacagttcagatttgcggcaaaggctattgaagcaaagaaggctcaataatcccagatcagggcaggtctctgatagacataatgtctatcctgaggatgaacgccatgaccgtcatcgtcagcgtggtgaagagcaagcttccaatgacggcgtctcaagctctcgattgcgtggtagaataagacttccagcggaaacaacgtttgacagacttggcttacagcctgagaaagagagagacagagggcctcgagctagattgtcaccaccaagtcaaacagaccttagagggaagcttcatgataggctaaaggctaaaccaaatgaggatgtatctggtaatgtacaaagttctttgtcaaaagcaaatgaagatgctgaatcgttgaactttgctgggccaaagagccttgcagagctgaaagcaaaaaaggttgcaggcagtttaatgaagagtagtcgttctttaacagggccagttcgaatgacatccgaaatagttaccatcaaagactcttc

SEQ ID NO: 388136 - DNA, 1083 bp, Oryza sativa
  unsure (1)..(1083): unsure at all n locations
ccacgcgtccgcccacgcgtccgctctcctcgtctcgtctcttctctctccatttttctcgaagcgagagtgcgttgcgttgcgagcgggaagcgaaaactcgaaaccatggccacggccggcgacgagcagcagcagcaggcggcggcggcgcagacggcggaggtgacggaggcggcggcgaaggaggtggtgtccgtggagatgccggcgccggaggggtggacgaagaagtttactccccagagaggggggagatttgagattgtttttgtttcaccaactggagaagagattaagaacaagagacagctgagccagtatctgaaggcacaccctggaggccctgcatcctcagagtttgattggggaactggtgatactccaaggcgctctgctcgcattagcgagaaagttaaggctttcgatagcccagaaggggagaagatcccgaaacgttctaggaactcatctggcagaaagggcaagcaggagaaaaaggaggccaccgaaaatgaagaagcgaaagacgctgaagctgacaaggaggcccctagcgaagatgctccaaaggagactgatgtagagacaaagcctgctgaagaggcgaaggaggcccctagcgaagatgctccaaaagacaccgatgtggagatgaaaactgctgaagatgccagcaagaccgcagacgccgacactcctgctccagcaccagccggaaccgagaaggaagatgcaaaaccggctgaatctgaggctgctcctccagcaccatcggaaggaggagagaagaaagaggatgcaaagccagctgaacctgaagcagcagctgctccaccaagcaacccaactgagccttccgcacccaaagctgctgctgctgctccagtagagaactccgcggacaaaggccctcaccaggacagccagccgtcttcgtcgtcgtcccgcaaggagtcatcnctgtcaacaacggcagtgcggctggtgctctccgtggagtgacctgagatgaagatgaaccccaacgatcatattctctcccttgtcgtgatgtacgcctttagaatattcgattgcatg

SEQ ID NO: 388137 - DNA, 654 bp, Oryza sativa
gatcaaatcgcgcacttcccctgttgaggagggaggcgatttcgcccgtctctccgcgtcggctccggcgccgacccactcccctcctccgccgccatccatctattcgcgccgcaccgcccgctcaactcttccttcgcgcaggcggcggcggtggcgcaggcggcgtcttcctccacctgatccacctccacttcctccggaccgcaccgccctcgcgtccggaagaagtgcaggtacggtgcaggtgcagatccaattgcgagctcacctgctctgccctgcccactaccaagtagtagcctcctcctcctcccctttctccccaacatcccatcccaaatcaaaggctactagactagtgttgggggagatccaagagatggcgcggagcccctgcgacctccgcatcctcctcgtcgccgccgctgcagccttcatctacatccaagtccgccttttttctactcagtcccactacgccgaccgcctcgcacaagcagaaaaatccgaaaaccaatgcaccagtcaactccgctccttgatcgatcaagtcagctctcagcaggagaagattgtcgcgttggaagagatgaagatacgccaagacgaaaaacgtgtacaccttaaagatttaatccaagatctcgaaaa

SEQ ID NO: 388138 - DNA, 693 bp, Oryza sativa
ccacgcgtccgcggacgcgtgggcggacgcgtgggcggacgcgtgggtgctgagctagttagcgcactttgttggaaacctgatggaagatacttggtgtccgcctcttgtaatagcccatcattcacaatttgggacgtttctcaagggttgggaatgcctataagacgtggattaagtagtatatcattagtgcagtggtcacctagtggagattaccttttaactgctaagcttgatggaacttttcacttatgggaaacaaatacatggacgtcagaaccatggtcttcatctaatggatatgtatctggagcaaattgggatccagaaggccgtattgtgttattgtccttttctaactcaacaacactgggctcaattcacttctcatcaaaaccaccatctttagatgcccatctcctaccagtcgaacatcctgaaatttcctctctgattgtcagccgaggcatagataaattagcatgggattcttcaggagagcgcttggcattatcgttcaaagatggcaatgaaatgtatcatggccttggtgctggctatgatgtgaggagatctccacttggctcagtttcactagttggattcattagaggacctggagatggagcaaagccacttgcatttgccttccatagcaaagttaagcaaggaccattgcttttttggtgg

SEQ ID NO: 388139 - DNA, 748 bp, Oryza sativa
ggtaattcggttgaattcatcctttctaacattggatatctgcggaatcttaaaatcctcacacttgacagaaataagatctctgtcttacctgaagaattgggttctctatcaaatcttcaacaactctctatttctcagaattctttatcacgcctgcctaagagtgtaggagatttgcgcaatatgttgctactcaatgtatctgacaacaaactaattgcacttcctgaatcaattggaggttgcagttccctggaagaattgcaggcacttggaaattcaattgaagaccggccttcatcaatctgtaaccttgtttgcctcaaatccctatcattgcacgggaataagattcgtcagcttccccaaaacctactgaaagactgcaaggctcttcagaacatatcgttgcatgacaatccaatctcgatggaccagtttcaacaaatggatggccttacggaatgtgaggcacgccgtaggaaaaaatttgacaaacagattgattcaaatgtcatgatgagttccacagcactggatgaaggcattgatttgaactagtttttcagaaattttatttagtttataattaccccattagtcaaaagaccaactgtaaatctagtgtacatattagtttttccgatactctgatttggtaaaaagacaaaaaaatgtataacacacactaatgaatgaactgtgtaatttttgcaaatattcaatgaattaggtgtacatcacc

SEQ ID NO: 388140 - DNA, 522 bp, Oryza sativa
ccacgcgtccggcgacgagctcgctctttcctcttccgccctagcgccggcggcgcggctccagcggagctcggcggcgtgctccggcgaccaaggaggccacggaatactgagaggatcagtggaagtgagggccggacctccttagggcggagtcgaaatttcgtagcagttgagaatcttcgcaggtactggagggcggccatggaggagctggagttgcctctccccacggagaagctcgccgcggatccgggcagggagggaggaaagcgaggtgtggctgtgctcgtggccaccgggagcttcaatcctcccacctacatgcacctgcgcatgtttgaactggcaaaggatgaattgcagcagcgagggtattctgtcttgggtggttacatgtctccggtgaacgatgcttacaagaagaaggtaatgtgtggcatcaccactgttctccttgtggtgtagaggccggattcttaatccattatctaaaaaatatcaccactgttctcttgattg

SEQ ID NO: 388141 - DNA, 518 bp, Oryza sativa
cccacgcgtccgctgaatttaactaaattgtcttcagctccgtgcagctgctcgtcctgctcagctcaggagatggtggtgatggggcagctggggaggttcatggacgggatcaagtcgaagcttcgcggcggcggagggaggaagacagggaggaagaaggaggcggcggcgatgatgacgtacgacaagatggacaagacggagagcatgagggtggagatcaggagcaggcaggcgcagaagctcatcgccaagaacctcgtcgccgccgactccatcggccgccgcaacaagcgcttcttcctcgccttctgatttctgattcatcagttcatcaccatcgagaatccaattaagcaaacaaaatatatatttatgttgttatattgatcatcgccaacatcgaaacattcaagcgacagtatttactatgttgttatagatgcggagaatcccatcaaaacagttactgaaattttgctgttcgtcagggttcccgaaaaaaaaaaaaaaaa

SEQ ID NO: 388142 - DNA, 562 bp, Oryza sativa
ccacgcgtccgggagacgttccaacacagggtgacaaatgtagtgttcatggggatgggtgagcctatgttgaacctgaaatcagttttagaggcacatcgatgcttgaacaaggaactaaaaattgggcaaaggatgataacaatctccacagtaggtgttcccagcactataaaaaagttagcatctcacaagcttcagtcaacacttgcagtcagcctgcacgccccaaatcagaaactacgggaaacaattgttccaagtgcaaagtcatatcccttggaggcactaatggatgactgcaagaattacttcctcgaaactggacgaagggtatccttcgagtacactctgctagctgggattaatgacgcaaaggagcatgctgaagaacttgcagagctactgcatacatgttggcggtggttatcatgtgaacctaattccttataatccgattcaaggttctgaatacaagaggccctacagaaaagtggttcaagcgtttgttgatgcgctagaagctcggaaagataaccgtagcgttcgacaaacccgtggg

SEQ ID NO: 388143 - DNA, 448 bp, Oryza sativa
  unsure (1)..(448): unsure at all n locations
ggaagggtggaggaggaggggataagcgaggttgaaggagacgcacatccatcccggcggagaggatgctgctgctgcgcgccgccagggcgtcgccggcgatggccgccgtcgtcaggtgcaaacccaccaggctgaccccaatcgcgggcctctcctcctcgtcgggtgggggcaggaggaagaaggccgggcggcggggcgaggccaagcccccacccccacccccgccgcagctgcggggcggcgagacgaagaagaagaagaagccagacgcccaggacggcggcggaggcggcgcaagggttgcagaggcatgaggtcgagaggaggaagaagccgccgccgccgccgccgccgccgaagcaggagaaggcgaagcgcgnggtgcggtggaagtgcgcggccgtgtgcggtgcgtgctgcatgctggacaagggtcccgact

SEQ ID NO: 388144 - DNA, 454 bp, Oryza sativa
  unsure (1)..(454): unsure at all n locations
ccacgcgtccgcgcgtgcaccatctacatcggcgggatcgacacggagtggaagacgaagccgtacgcgcggtaccacgaccccgtcgccatggccgtcgtccgcgagttcaccctcaagccggtcaccgagtcgtcgccggcgtgcaccaggagccactcggtcccggccttcgtcttctccaacggcggcttctccggcaacctgtgccacgactacaccgacgggctcgtgccgctgttcctcagcacccaccagttcaagggccaggtgcagtccttgctcagtgggctcacgccatggtgggtgaacaagctcaacctcttcttcaggcagctcaccaagtacgacatcctcgacatcgacaacgacaaggacgtgcactgcttcccccggatcgtggttggcgcaactttcacaaggacatgggcgtggacccaagcggtngctgggg

SEQ ID NO: 388145 - DNA, 488 bp, Oryza sativa
ccacgcgtccgctctccttccttcctccttggcgctcatccaccatccatcctcctccaagagccaccaaacggcagcaggatggccgctgtgatgaaagctctcgccgtcgcctcgccgatctcggcacgagcacagccccgacgatgccccgcaggttcgtcaggcggccctagccaaagcctgcattcatcgttcggcggcgtctccctgcagtgccggcgcacgaagccggcgtccctccaccggagtcggccgtcgatgcaggtggtgatgatggcggcgaggccggcgatccagttcatccagggcaccgacgagcagacgtatccccgacgtgcggctgaccatagtcccgggacggcaccaacggcgtggccatcttcaccttcgaccagcccgtcgtggtcgactcgtcggcagagctcggcgacatcaccggcttctacatgatcgacgacgagggcgtgctccagtcggtgacgtca

SEQ ID NO: 388146 - DNA, 1396 bp, Oryza sativa
  unsure (1)..(1396): unsure at all n locations
acaaacgccttgagtttattnatgcggatgctgcagaggctcgtncagcatcaatnctggcgggtctnagtttcactcctgaaatgcaacgtaaacgcacaaaacagttttctggtggatggcgcatganaattgctctagcacgtnctctcttcattnagccngatttgttgctacttgatgagccaacaaatcatcttgatctccatgctgtgttatggttagaaacatatctcctgaaatggccaaagacattcattgttgtatcacatgctagggagtttcttaatacggtcgtcaccgacattcttcatctgcatggacaaaagctacatgcttacaaaggtgattatgacacattcgagaggacaagggaggagcaccttaagaaccagcagaaagcttttgaaacaaatgagaaggccagatcccacatgcaggcattcattgacaagttccgttacaatgcaaagagagcatcacttgttcaatcaagaatcaaggcattggagcgaatggagcatgttgatgcggtcgtcagtgatccagactataaattcgaatttccaacaccagatgaccgccctggaccaccaatcatcagcttcagtgacgcatcttttggttatcctggaggccccacgcgtccgaaaaacttgaattttggtattgacctggacagccgcatagcaatggttggtccaaatggtattggcaaatccactatacttaaactaatatctggagatcttcagccaacttcagggacagtgttccgctctcccaaggttcgcatggctgtattcaatcaacaccatgttgatgggcttgatttaacagtgaacccccttttgtacatgatgagatgctaccctggtgtacctgaacagaaactgagggcacacttgggttctttcggtgttacaggaaatcttgccctccaaccaatgtacactttatcaggtggtcagaaaagtagggttgcctttgcaaagatcaccttcaagaagccacacattattcttctcgatgagccttctaaccatcttgatctggatgctgtggaggcgctgatccagggtttactcgttttccagggaggagtgctaatggtgagtcacgacgagcacctgataacggggagcgtggatgagctttgggtggtgtcggaaggcagggtgtcgcctttcgcaggcacgttcaaggactacaagaagatgctcaagtcttaatctagagccagtgatgatatatatacagagacagcgagtctacaaagaaagacaccaccatatatatctgtatcgtgcagcaccgatgtaacatttaccggcctgaggccaaatcatcatttatgtttatttcatgtggatttactgagaaaaaaaaaaaaaaa

SEQ ID NO: 388147 - DNA, 621 bp, Oryza sativa
  unsure (1)..(621): unsure at all n locations
tnngggnttttncttcaagccntttnngttggntaccnccnggtttttcccagtcacgacgttgtaaaacgacggcccttgagcgcgcgtaatacgactcactttagggcgaattgggtaccggcccccccctcgaggtcgacccacgcgtccggttacaggaaatcttgccctccaaccaatgtacactttatcaggtggtcagaaaagtagggttgcctttgcaaagatcnccttcaagaagccacacattattcttctcgatgagccttctaaccatcttgatctggatgctgtggaggcgctgatcccagggtttactcgttttccagggaggagtgctaatggtgagtcacgacgagcncctgataacggggagcgtggatgagctttgggtggtgtcggaaggcagggtgtcgcctttcgcaggcacgttcaaggactacaagaagatgctcaagtcttaatctagagccagtgatgatatatatacagagacagcgagtctacaaagaaagacaccaacatatatatctgtatcgtgcagcaccgatgtaacatttaaccggcctgaggccaaatcatnntttntgtttnnnnnnnnnnnnnnnnnnnnnnnnn

SEQ ID NO: 388148 - DNA, 765 bp, Oryza sativa
ccacgcgtccgcccacgcgtccgcccacgcgtccggagcaagaagaagaggaggcagatgagaaatagggattctgccatgaaatcgagggagaggaagaagatgtatgttaaggacctagagactaagagcaagtatctagaggccgagtgtcgtcgcctcagctacgcgcttcagtgctgcgcagctgagaacatggcgctgcgccagagcttgttgaaggataggcctgtcggtgccgccacagccatgcaggagtctgccgtactcacggaaaccctgccgctggtttccctgctttggctcgtgagcatcgtgtgcctactccccggtgcccggtctacccaaccgaaacccggtggctcgaagcagcgccggaagagatctcgcgacggtaaccggaaagaagacaagcagtgaacaacagctagaagaaacattactactccatgggaggcgttgcaagggctcgagggcgaggatcaagctagataccggaccgttccgtttagcagcagctgcttgctaggctgccgcttccttgcaaagttgtttccagtctgtattgtagctagcaaatcaaattggcgtgtctatcgcctgtcgtgctgccgcttatccatggactatctttttctttttttggttccttccccccttgtttttataatatcctcctatgcataatgcattatccaggtagttttgaaatctggctttgttgaaaaaccaatatgatgctgatcatgttataaaaatatttgg

SEQ ID NO: 388149 - DNA, 556 bp, Oryza sativa
ccacgcgtccgcttcgggacttggacttcagtttatcacctttgctagcagcacaatcaatgacaaaatataactcagctgcaccaactactactggaccagcaatctccatgcaagagactctgaagccaggagttttctccaacgctcaatctacccaaaatcttccaagtactagtatagcaacggggcctcctctccctcagcaattagtccacccttactctcagcctactgtaccactggcgccttttgcgaatatgattggttatccgtatttggcacagaactaccctgctgcttacctaccatcagctgccttccagcaagcatactcgagtaatggaccattccatcagtctgctgctgctgctgtaccaggagctatgaagtacaatatgaatgtgccgcaattcaagaacaacctatcggctacaagcttacaacagcaaccttcttcagtgatctctggttatggaggatttggaagctctagtaatcttcctggaaatttcactcttaatcagaatgcttgctctgcatcaacaaatcttgg

SEQ ID NO: 388150 - DNA, 633 bp, Oryza sativa
ccctcgtttcctcttcttgacaagagtagaacaacaacaacatcatcatcatctatcacacacactatcagggcaggtgatcgaatagctaggaagcaagcaagcagagagtagtagatcgagtgatcggaggatggggtcgcggtacgaggtggaggtgacggtgtcgtcggcgcgggacctcaagaacgtcaactggcgcaacggcgacctcaagccctacgccgtgctctgggtcgacgacggcgccaagtgctccacccgcgtcgacctcgacaacgccgacaaccccaactgggacgacaagctcaccctccctctccccccctcctcccgcctcgacgacgccctcctctacctcgacgtcgtccacgccaacgccgccgagggcgtcaagccgctcgtcggctccgcccgcctcccgctccgcgacgtcctcgacgacgccggcgtaggcgcccgcgtctcccgctccctccgcctcaagcgcccctccggccgcccccatggacgcctcgaagtccgcgtcgccgtccgcgagcccaagcgctactacgacccctcgccggcgtaccctgctccctaccaccagcagtcgtcccgtgacccctacgcctacggtaacactacaac

SEQ ID NO: 388151 - DNA, 599 bp, Oryza sativa
gtctagtgttccacccgcgtcgacctcgacaacgccgacaaccccaactgggacgacaagctcaccctccctctccccccctcctcccgcctcgacgacgccctcctctacctcgacgtcgtccacgccaacgccgccgagggcgtcaagccgctcgtcggctccgcccgcctcccgctccgcgacgtcctcgacgacgccggcgtaggcgcccgcgtctcccgctccctccgcctcaagcgcccctccggccgcccccagggacgcctcgacctccgcctcgccgtccgcgagtccgcgcgctactacgacccctcgccctacccggctccctacggccaacccgccggaacacgcgacccctatggcgccccgcctccggcctacagctccggctcaggcgggcagtacccgtacggtggtggctacggctcaggcgggtacgcggcgccgccggcagggtacccgagcgcctacggggcgccgtcacagccagcgtacggcggcgcgcctcctgtggcggcgtacggtgcagcaggtggggcgccggtggttgtggaggagtcgtagcagtagagcaagttggtgatgtgggacag

SEQ ID NO: 388152 - DNA, 668 bp, Oryza sativa
  unsure (1)..(668): unsure at all n locations
gtccggttctagatcgcgagtcggcgcgcgctttatttactctttctactctgtctctctgaaccctagccccacccgcctcaacccctgctcgcctgagccccagcagcagcagcaggaggccggcgaccccctcgctgctctccctccggcgcacccatgccgcgccgccgccgctccgtgccgccgccgctgaccccaaggttgttaatggggaagatttcccccctatgaaggacctacttcgtctatacaagaaagcttttctagatggaaatgatgaggctcttggtggaattgagagtgctatcattgccattgagaaagaaaggagtaactcagctgctcagtatgaaagtattgcaaccgaaattacttcagggaaggacaagttcctccgtataaatgctgatctggagaatttccggaagcagactgaaaaggagcgtgctaggtttacctcaaatatacaggtggatgttggtcagagtctattgactctggttgatagttttgagaaggtgaatcaagagatcaccccggagactgataaagagcagccgattagcacaagctatcaaggcatatacaagcagttagtagggcattgagaagttaggtgaggagtntggaacagttgcaagccatttgtcctcggtaagtagata

SEQ ID NO: 388153 - DNA, 1051 bp, Oryza sativa
gtctcgagagattcaggaacagaaaccgccgagagagttcgtagcagtcaacgcgcgaggcagggccgagaagaaaccgccggcgacgcacgcgcgatggacgctcggcggaggcggttgtccccggcggtggccgtggcggcggctcttcttttcttccccatgttcttcgggagccatacgccggcggcggcggcggcgtacggagaggcttcaggcgacgccggcgtgacggcgctgcagaagcacgcggcgttcttcgacaaggacggcgacggcatcgtctccctctccgagacatacgacgggttacgagcactcggactcgggtctggcctctccagcttgagcgccgccttcatcaatggcgtcctttccccaaagaccagacctgacaatggaacagcaccacgcttatctatctacatagagaacatctacaaggggattcatggaagcgattcaagcgcctatgattctgaaggaaggttcgttgctgaaaagtttgaggagatattcgccaagcacgccaagaccgtgcctgatgctctgacatcggacgagatagacgagctgcttcaagcgaaccgcaagcccggtgactacactggatgggtcgcagcatcgtcagagtggaagattctgtacaagatcggcaaggacaaggacggccttcttcgcaaggaggccgtgcgagaagtctacgatggaagcctgtttaccaagctggcggcggcaaggataaacgacgaaaaccaagcatgattggtgacagctgatgggatcatctccattgattctcctgattaagcatctcaaatcatgtgccactgtgatatgagaacgattgagatgatgtctgaacacaaaaagatagtcatgcaagatagaagtatgaacaagtgtggacagaatctgcagatggggatggatcgtttagttctgtccttttttgttggtttcttggggatattgaatgtttatattattatacctgcaaatggttggcagtgcaaggctgcaagcaatggcacgctatttataaacaaaa

SEQ ID NO: 388154 - DNA, 1454 bp, Oryza sativa
  unsure (1)..(1454): unsure at all n locations
aattcggcacgagcgacttctccagcagctacctgctcggggagggcggcttcggcgccgtncacaagngcttcgtcgacgccggcatgcgccccggcctcctgccccagcccgtcgccgtcaagcagctcgacatcgccggcctccagggccaccgggagtggctggcggaggtgatcttcttggggcagttccggcacccgcacctggtgaagctgctgggctactgctgcgaggacgaggagcgcctcctcgtctacgagttcatgccgcgcggcagcctcgagaaccacctcttcaagaggatatcggcgacggtgccgtggggcacgcgtctgaagatcgccatcggcgccgccaagggcctcgccttcctccacggcgcctccacccccgtcatctaccgcgacttcaaggcctccaacatcctcctcgactcggagttcacggccgaactgtcggacttcgggctggcgaagatggggccggagggttcggagactcacgtgacgacgcgggtgatgggcacgcacgggtacgcggcgccggagtacgtgatgacggggcacctcaacatcaagagcgacgtgtacagctacggcgtcgtgctcctggagctcctgacgggggcggcgcgccatggagcatgtcagggggaaggagcctccacgccgaccaggtggtcaagatcgtcgactgggcccgcccctacctcggcagcagccgccgcctccgctgcatcatggacccgcgcctcgccggccactactccgtcaaggccgcccgcgccgtcgcccacctcgccgtccagtgcaccagcccgcagccgcgcgaccgcccgcgcatggccgccgtcgtcgacgccctcgagcgcctgcagggcttcaaggacatggccgtcaccgtcggcctctggcccaccaacgcccccgtcgccggcaggaacgccatctccgccaagatccgcgccgaggtcagaggcgccggctccggcggcggcgcggcctcgcggcggcggagcgcctccgccaagctgccctgatcgcccgcgtgcgttcgtgggcgcgccacgtcatccgcgagtacgtatttgtatacgtgtacgtgtgtgtatatactttagctgctgtataagatggcacggccgatgtattgtacgtggtgatcatcgagcttgattgatttttttttagccatatggattatggattattgcggaattaatactgatctgtatcaccatatgtacgtacttagtaggagtatttagttttaggtgccatgatgctggtagatcatgcatgcatgtatgatgaattgtactttcatccaccgattgctgattgcaagttcgtgcatcagtaatcggtcatttcgatattatctttttttttccttgaaaaaaaaaaaaaaaaaannnnnnnnnnnnnnnnnnnnnnnnnnnnnnnnnnnnn

SEQ ID NO: 388155 - DNA, 658 bp, Oryza sativa
ccacgcgtccgtgcagctgatgaaagttgtcgtagtttgcttgatgctcagaaaataatggatggaaatcttgctcatgttattaacatcaagctagcaaagctagggattcttggagcccttgaagtaattgatgctgcaagaaaagcccgcattgcgctgatgataggcggtatggttgagactaggatcgctatgggctttgctggtcatcttgcagctggtcttggttgtttcagttttgttgacctggacacacctcttttactgtctgaagatccagtgttcggtggctatgaagtttctggacctgtatacaagtttacaaatgctcgaggcccatggtggtttccttcacttagacaacaacggcttgaaataaggaatgccctagccctttgggagcttcacagacaacggtgacacgttcaatgaacaattaattgttcattatttaccttcaacaataatcaattggagttgaaaccaaaggagcagttgtaaacttgtaatcctatatgaccttgaagaggctaattattgttgccagtccagttaggcctgaaatatttgatcagtctgtagatggataaaataatgaggcattttcagctggcctcgttcttctgttcgataaataaattactaaatatggtat

SEQ ID NO: 388156 - DNA, 478 bp, Oryza sativa
ttggtttatcaaggctgtttgggctcctccccctcccgtccgcaagattatgcaaggtcttcttgatcagtatacggtggccgggaattctaaggcccttgatttggtggtcgggatggccaattacttcagtgaccgtgtgaagaatgtcatacagaaatacagtattgagaggcattgggcttcactcaatgaggagagtggtgggatgaatgatgtgctctatcagctctacacgataacgaatgatcagaagcatctgactctggcccatctttttggataagccaatgtttccttgggttgcttgcagttcaggccgacagtatttcaggcttccattccaatacacacattccagttgttattggtgcacagatgagatatgaagttactggtgatcttctttacaagcaaattgcaacgtttttcatggataccatcaattcttctcatagctatgctactgggggcacat

SEQ ID NO: 388157 - DNA, 397 bp, Oryza sativa
ggtacctgtgctaaatggcgaaaacctgtcaataaggattttggttgatcactccatagttgagggcttcgctcaaggagggaggacatgcattacctcgcgtgtgtatcccaccaaagccatctacgagtcggccaaaatctttcttttcaacaatgccacaaatgttagagtcactgccaaatcgctaaagatttgggagctgaactctgcttacatccgtccatatgtagactagatcatttttaatgtaatgggaatgaatgatttgtctacatttgttagttatgtttttataggctaatttatcttttttgcttccttctttatgtcaaactacaactatgacatattactagcaactgaaataaaacataatcaatcatattgttttgcc

SEQ ID NO: 388158 - DNA, 536 bp, Oryza sativa
gagaggccttccgctcgaagaaatcgaagccgcgcttcccctctccgcctccgcctccgatctgctgcggcggcgcgatccggcagccggcgacctccctccgcctccttcccgaccctttcgtagctttctcaatcccctccccccctcctcgcggcgcgcgcacggccggctgagaaggtttccgagggggccgacctccttctagccatgtacaacaattatggaaattctcctggaatgcagatgcctcctatagggcagatgcctcctgccgcaggcagatgccctcggcaaatcctcagcctggccaatttggcaatccattttatggtgcgagctcaggtctaattaaaactgggttaggagcatatggagagaagttccttggttccagttcggaattcatgcaaagcaatattaacagatacttctccaacccgcagtactatttccatgtgaatgatcagtatgtcaggaacaagctgaaagttatacttgttcccgtccttcacaaggggcattggactaggata

SEQ ID NO: 388159 - DNA, 532 bp, Oryza sativa
caggcacgacgccacgcgtccgggaagcgactagcgagcgagataattatcatcgtccactctatccgcctccagcttgccccgcctcggtcctcggaggtgtaggagcgaccgaccatggggagcgcgggggcgctgctctcgcactcgcctccggggctcggcggattccctcctcgccaccatcaccaccaccgtctctccgtcctccgttgcgtaccgctcctcccctccccggcgcccgagcccctcagctgtcgccacggccggcaccttcgctgcgccgccgtcgacgggggagccggccgggagacggagcgtccctcgccgcccgcacctcagagggaggagtcgccgtcgggcagcctcggcgcagccctcgaggacccatctcctcaacctgtccaaaatggatcttttggaggtatcacagaggatgaagaacagagtagcctgtacaattttctttatccgagcaaagagctactttctgatgataaggagatgagtatatttgatcatctagaggaac

SEQ ID NO: 388160 - DNA, 634 bp, Oryza sativa
caacggcgtcgaccatgtgttcaaccttgccgctgatatgggtggtatggggttcattcagtccaaccactctgtgatcatgtacaacaacaccatgatcagtttcaacatgctcgaggctgcacgtatcaatggtgtgaagaggttcttctatgcctcaagtgcatgcatttaccctgaattcaagcagcttgaaactaacgttagcctgaaggaatctgatgcctggcctgctgagcctcaagatgcctatggtttggagaagcttgcaactgaggagctctgcaagcactacaccaaggactttggcattgagtgccgtgttggccgcttccacaacatatatggcccctttggaacatggaaaggtggccgtgagaaggcaccagctgcattctgcaggaaggctcagacttccactgacaggtttgaagatgtggggtgatggcctccagacccggtccttcacattcatagatgagtgtgttgagggtgttcttgaggttgacaaagtcggacttccgtgagccaagtgaaacattggaagcgatgaaatcggtaagcattgaacgcgattggcttgaaatcaattcctcaagcttcgaggatagggagcttcccaatccaccacatt

SEQ ID NO: 388161 - DNA, 474 bp, Oryza sativa
ctccgctcgctcgctcgctcatcgtcgtcgtcttcctcggggcctctgtcgtcctttagaagaggcgtgcggcgtaccacggggaattcaactgaggtgagaaatgggggcaaaggactccaagccctcatacagctattcttcttcatatgatcatgggaattcatcatcgggatataactcgagataccctgcataccctgcaaatgcatcttccagtctgaacacaagggatgctccttctatggagaaccatgtgctgccccaaacgcatgcccggttgcagaggaagtactccaggattggtgatgactaccgctctctgaatcaagtgactggagctttggcacacgcagggcttgaatcatcaaatcttattgtaggcattgattttacaaagagcaatgaatggacaggtaaactttccttcaatcgccgatgtctgcatgatattggaaacactccaaatccata

SEQ ID NO: 388162 - DNA, 552 bp, Oryza sativa
ccacgcgtccgggaggccggctggaacggcgcacggcggccgagcgacgaggaggctggctggagcgggcgacggcgtggcggcgctgggggggcgggggtggacggagcggccgcccccgcgcccggcgtagaacacctcctgctcgaacgccgggtcgccgtcggcgaggaggcggtggacgagcaccagcatcttgagcgtgacgcccaggcagcgtgacagcgacccgacgcaggcgcgggagtggagcgtgagcgcaatcacctcccggacgtggtgctcatcggcggggaagccatggacggtgtgggagaggtcacgcttgacctcttgacacatggatactctcgtttaattatctcgttattacaaacatggttaattacaacttccaaataaagatcaaagcagacatattatgttaaacttgtgcctgcaaaagctgttttattcagttaggatagtactttccttttatgcacgttatgtgttttagccttttaggctagctaatattattacttgtagtactagaacacatgcaggaaa

SEQ ID NO: 388163 - DNA, 466 bp, Oryza sativa
ccacgcgtccggctccaagtaccccacgagaattgcaggagaaatcaagtccttctcaactgatggctgggtagcaccaaaattagctaagagaatggacaagttcatgctatatttgataactgctgggaaaaaagcattggaaaacggtggaatcaccgaagaagtcatgaatgagttggacaaatcgagatgtggagttcttgttggttctgctatgggtggcatgaagatttttagtgatgcaattgaagcattgagggtatcctacaagaagatgaacccattctgtgtaccttttgcgactacaaacatgggttctgcaatacttgcgatggatctgggctggatgggcccaaactattctatctctactgcttgcgccaccagtaatttctgcatactaaatgcagctaatcatatcagaagaggggaaactgatgtgatgctttgtggtggtctgatg

SEQ ID NO: 388164 - DNA, 415 bp, Oryza sativa
gctcgatcgctagccctactcgctagctagatcggcggccatggtgaacggctacttgttccgggagtacatcggcgcgcagttcaccggcgtgcgcttctccgacgtgcccgtcaacccgggcctcagctgccacttcatcctcgccttcgccatcgactacttcatggcgacgcagtcctccaagccggcgccagccaacggcgtgttcgccccgtactgggacacggccaacctgtccccggccgccggcgccgcggccaaggcggcgcaccccaacctcagcgtcatcctcgccctcggcggcgacaccgtccagaacaccggcgtcaacgccacgttcgcgccgacgtcgtccggcgacgcgtgggtgcgcaccgccgccgactccgtctccggcctcatcgacgcctac

SEQ ID NO: 388165 - DNA, 464 bp, Oryza sativa
  unsure (1)..(464): unsure at all n locations
nctacttcctccatatccatcgatcgatctcgccatcgtcctcgagcgagcgggcggctgcggcgagctcgatccgatccccgccggcggagatggggagcttggcaggcggcggcggaggcggcaaggtggggctgccggcgttggacgtcgcgctcgcgttcccgcaggccacgacggcgtcccagttcccacccgccgtatcggattactaccagtttgatgatttgcttactgatgaagagaagacacttaggaagaaagtccgtggtattatggagagagaaattgcaccccattatgacagagtactgggagaaagcagaatttcccttccatgccattcccaaacttgcaactcttggctttggcaggagggaccaccaaaaaagtggcacgggtggatgccagctgctccacatttattttagtacattcctctttggcaatgagcacaattgcac

SEQ ID NO: 388166 - DNA, 838 bp, Oryza sativa
cttcttacatcagtgatcatctctaccatcatctcgttcgtcagcaaagctcatggcatcagtgttattggcgatctccccaagggattgaaccctccttcagcgaatatgctgaccttcagtggctcctacgtaggactggccttaaacacaggaattatgactggcatactatctctcactgaagggatagcactaggcaggacatttgcatccatcaacaactaccaggctgatggaaacaaggagatgatggccattggtgtcatgaacatggctggctcatgtgcctcctgctatgtcaccacaggatcgttctcgaggtcggcggtgaactacagcgcggggtgcaagacggcggtgtccaacatcgtgatggcgtccgcggtgctggtgacgctgctgttcctgatgccgctgttccactacacccccaacgtgatcctctcggcgagcatcatcaccgccgtgatcggcctcatcgacgtccggggcgccgccaggctgtggaaaggtcgacaagctcgacttcctcgcctggcatggccgccttcctcggcgtcctcctcgtctccgtccagatgggcctcgccatcgccgtcggcatctccctcttcaagatcctgctgcaggtcacccgcccaaacatggtggtcaaggggcgtcgtccccggcacggcgagctaccggagcatggcgcaatacagggagggcatgcgtgtgccgtccttcctcgtcgtcggaggcgagtccgccatctacttgggcaactgcatgtacctcggcgagaggatcatgaggtttctccgggaggaagacgagcgggccgtcaagtgca

SEQ ID NO: 388167 - DNA, 1296 bp, Oryza sativa
cggacgcgtgggagcatgttgaatatgaccagagacctgatatctttaggggtactgttcgttatgctagtgtgcatgcccacttgggaagaactggatgcaggagagatgaccttgaatcccttgcatacacacttattttccttctccgtggccgcctgccttggcaaggattccagggagagaataaaggttttcttgtttgcaagaaaaagatggcaacctctccagaatctttatgtggcattggtccaccaccatttcgtcaatttgttgagtatgttgtgaacttgaagttcgacgaagagccaaactatgcaaagtgcattgctctttttgatggcattgttggtccaaatccagatggaagaccattaaacaccgatggtgcccagaagcttgtatatcaggttggtcagaaagagaggccgcctcacagcggctgaagatgaggagcaacctaagaaaaagattagaatgggaatgccagcgacccagtggattagtgtgtacaatgcccgtcggccaatgaaacagagataccactacaatgtagcagatgatagattagcaccacatattcaaaaaggaaatgaagatggtttgtttataagttcagtttcatcctgttcagatctgtgggctttaattatggatgctggcactggttttaccgcccaagtacatgaactctcccattactttcttcacaaggaatggataatggagcagtgggagagaaattactatattacttctttggctggttcaaataatggaagctcggtggtgatcatgtcaacaggaacgccatatgcacagcattcctacaaagtaagtgattcatttcccttcaaatggatgaacgaaaagtggaaggaggggttctatgtcactgccttggccacagcaggaagccgatgggctgtggttatgtcccggaacgctggtttcacacatcaggtagtagaacttgatttcttatatccgagtgaaggaatccatcaacgctgggttagtggttatcgcataactgcaacagcagccacatgtgaccaggtggctttgatcttgagcatacctagaagaaagcctaacgatgaaacacaggagacactgagaacatctgcttttcctggccagcatgtaaaggaaaaatgggcaaaaaatctttatttaggctccatatgctatggaagatcagtgtcgtgaagtgcattttcccgagctggtcctttgtaagattaagatctaataatatgaacaaccggttttgtgacaaaaaaaaaaaaaaaa

SEQ ID NO: 388168 - DNA, 663 bp, Oryza sativa
  unsure (1)..(663): unsure at all n locations
gacgctgnanccatcagagagctggtcgtgctggaagaacgcaacctgggaagtgtttcaggttatatacagagaagagttttaacgatgatttacagccacagacatacccagaaattcttaggtcaaatctggcgaatacggttcttaccttgaagaagcttggaattgatgatttagtgcattttgactttatggatcctcctgcaccagaaactttgatgagggccttggaagttttgaactacttaggggcacttgatgatgatggaaacctcacgcctttaggtgaaacaatgagtgaatttcctctagatccccagatgtcaaagatgcttgtcatcagtccaaaatacaactgttcaaatgagatcctttcaatatctgccatgctgtcagtacccaattgctttctccggcctagggaggcacagaaggctgctgatgaagcgaaggctcgatttggccacattgacggggaccacctgacacttctgaatgtataccatgcatacaagcagaacaatgaagatccccagtggtgttatgagaacttcatcaatgccagagctctaaagtcagctgataatgtcagacaacagcttgttcgcatgatgaccagatttaacctcaagatgtgcagcacagacttcaatagtcggg

SEQ ID NO: 388169 - DNA, 648 bp, Oryza sativa
gcgtggcgccgccgccgactccgcctccgactcgggctccggcgatccccatgcaggacgcgaggcgccgtctccgactccggcgacccccatccatcacgcgaccgccgcttcgtcggcatgctcccaccgcatccatcctgaagaagatcatcgtcaaaacatgtcgctcatttcgaagctgcggtcgatcactgtggatgtcaccggcactctgcttgcctacacagggcagcttggtgacttactactgtatggcagctaaggctgctgggaagccatgtcctgactaccagcgaatgcatgagggcttcaagcttgcatacaccgagatggcaaggcaatacccatgctttggatttgcagcgaagatgccgaatatcgactggtggaggatgtgcgtcaaggattcttttgttaaggctggttatgagtatgacgaggagacatttgagaagattttcaaacggatttactcttcttttggctcgtctgctccgtactcggtattccctgatgcgcagcccttcatgaggtggcttcgcgggaaggggctcacggttggaattgtcagcaacgcaagaataccgtacaaagacgtcatcttgcctgctctaggactgaaccagggctccgagtgggactttt

SEQ ID NO: 388170 - DNA, 839 bp, Oryza sativa
  unsure (1)..(839): unsure at all n locations
ccacgcgtccgcccacgcgtgcgcccacgcgttcgcttgatcattgctttcgacgcgaaatcatgaacggcgatatcaaaatgtatgataatgggggcagctgtgtcaactgtctactacaacctcaagctgaagcacccaactttggatatgcctgttattgactatgatctagccctgcttatccagccgatgctcatgctagggatcagcatcggtgttcttttcaatgtcatattccctgattggctcatcacagttctattgatcatccttttcctaggcactgcaactaaagcttctctgaagggtgttgagacgtgggaacaaagagacactactcaaaagggaggcagcaaagcggttggagcaaatagctgaagaaccggagtatagtccgctgcccacagggccgaatgccacagctgagtcaaaagccccatcagatgaagcagcatctctatggcaaaatgtttactggaaggagtttggacttcttgcctttgtttggatagcattccttgtgcttcaggtcactaagaattacatgcctacttgctccacgtggtactgggttttgaactttctccagatcccggtgtcagttggggtgaccatgtacgaaggattgggcttgatgcaggggaggagggtcatatcatcaaaaggagatgaacaaaccaatctaaaatttcaccagccttctggtgtactgcttttttggaatnatggctggtgttgttggcggcttgcttggtcttggtggcggcttcatcatggggcctctgttcttggagcttggaatccctccacaggtctcaagtgccacagccaccttt

SEQ ID NO: 388171 - DNA, 750 bp, Oryza sativa
  unsure (1)..(750): unsure at all n locations
tgttcaccatcctgatatcaatgctacctcaacagcttcatccagtactgcaggtgatccatctgaagagcaaaagcctgacattttgaacagcgattttgatagccattggtgtaatttacaatatggacggtcatgccaaaacccgcgccccatgaatcctgtgttatacccctttgcagtgccaccaatgtatttgcagggccatgttccatgggatgggcctggcagaccagcttcaacaaatgttaactggacccagatggtcccccccagccaacgaatctatcctatgatgcctctacaaccttcttctgaaagaattactggtggtccacagcaccacacggaggatgcgcccagataccgtggtggcacaggaacttacttgccaaatcctaaggttccatttaaggaccgacactcaggctcaagaaaccacagaggaaattataacacctgacaagggtgaccataatgataaagaaggaaattggataaattcaaaacaacgaaatcctggccgcagctatggacgtagccactcagagaggtctggcatacgatcggatagacaagcagcagatgaaaaccagtatgataggcagcggcgatcttatagaaatgattcatacaggcatgagacaggcgcccaatcttctggatcaacaaactatatacgcagaccagggaacatgacacnatgggatccatcaccatctgcttcaaatggtatcggtgccctttctg

SEQ ID NO: 388172 - DNA, 716 bp, Oryza sativa
  unsure (1)..(716): unsure at all n locations
cgctccatcaccaagcacaattaccttgtccttgatgtggaggacatcccccgcgtcatacaggaagccttcttcctcgcgtcctcgggccgtcctggcccggctgctggtcgacatccccaaggacatccagcagcagatggccgtgccggtctgggacacctcgatgaatctaccagggtacatcgcacgcctgcccaagccacccgcgacagaattgcttgagcaggtcttgcgtctggttggcgagtcacggcgcccgattctctatgtcggtggtggctgctctgcatctggtgacgaattgcgctggtttgttgagctgactggtatcccagttacaaccactctgatggggcctcggcaatttccccagtgacgacccgttgtccctgcgcatgcttgggatgcatggcacggtgtacgcaaattatgccgtggataaggctggacctgttgcttgcgtttggtgtgcggtttgatgatcgtgtgacagggaaaattgaggcttttgcaagcagggccaagattgtggcacattgacattgatccagcagagattgggaaagaacaagcaaccacatgtgtcaatttgcgcagaatgttaagcttgcttttacaaggggctttgaatgctctgctacaacagagcacaacaaagacaaagttctgatttagtgcatggnacaaatgagttggaccagcagangagggag

SEQ ID NO: 388173 - DNA, 646 bp, Oryza sativa
cggacgcgtgggcaagtgtggcaaccggaaagtgacattctaatgaatgacactgctaatggcaaccctgaagaagcagctgcctgcagtctactatccaaaaatgactgctatctaatttctgcatctggtggcaaagtttcgttgttcaacatgttaaatttcaagaccatgactactttcatagcacctccaccctctgcaactttcctcgcattccacccgcatgacaataacatcatagctattggaacggatgactcttcgattctactctacaatatccgtgttgacgaggttaaatgggtgctcaagggccatcagaaaaagataactggactggtattctcgctatcaatgaatgtgcttgtatcttcagctatgtgtttggagtatggaagattgggcgaagaagaaatccagatatatccaacctccatctaatcattctggagctttagttggtgatataatggtgcagtttcactatgaccaaaagcgccttttagtagttcatgagagccaattggcgatctacgatgaggagctagaatgcttgtgctcatggttccccaaggatccactctctgctccagtttcgagtgcagtatactcatcggatggcttaatgatctacgctggaatc

SEQ ID NO: 388174 - DNA, 893 bp, Oryza sativa
  unsure (1)..(893): unsure at all n locations
tccggatcgagggcggcaagatcattcgcgtggaggcttaccccatccccgagcacccccggcccgacagggtggcggggagggtgacgctggtgggggacgcggcggggtacgtgacaaagtgctccggcgaggggatctacttcgcggcgaagagcgggcggatgtgcgcggaggcgatcgtggccgggtcggcgaacgggacgcggatggtggaggagagcgacctgcgcaggtacctggccgagttcgaccgcctctactggccgacgtacaaggtgctcgacgtgctccagaaggtgttctaccgctccaacgccgcccgcgaggcgttcgtcgagatgtgcgccgacgactacgtccagaggatgaccttcgacagctacctctacaagcgcgtcgtgccgggcaacccgctcgacgacatcaagctcgccgtcaacaccatcggcagcctcgtccgcgccaccgccctccgccgcgagatggagaaggtcaccttgtgagcctgagctgccatgaccacgaccgcgatcgaacactttgcttcattttcttgaggcattagaaactgcaatttgcggtggatcagtgtgcatgtatagtacagattcgcggctgatcaaacagattttgaacaagcgtaagtagagatggataagagagagaggctgtgtaccgatcgaccctgtccgattttcttgtacaacacaaggtgatgttcagacttgggggcagtttggttggattactgaagcacaccaatcttcggtgtgaactcaatgtactactatataagctccatgtttctgcatggttcatgtttcctgacgaatggtgaatgacatgaaatggtttactttnnnnnnnnnnnnnnnnnnnnnnnnnnnnnn

SEQ ID NO: 388175 - DNA, 551 bp, Oryza sativa
ttcctctccttcccaagtcttcccacccaggcgcagaagtggctccggcggccggaaagtcaccggcgattcggcggcgccggcggcggcggacccctttctccacccctgccgtgctccctcccgtctcctccatcagctgacttaactacactccgtaggagattttcagatcgagattgccggccatggcgtcgggccttgtcgtcgccgccaccgaccccctccgcgccttcctcgcctccgccgccgcctcccacgacctccccgctgacctccgcgacctcgcctcctccctcgccgcccgctccgccgtcccctaccgctccctccgcgacatctggtgcgccgcctcccccggcgcccgcccgcccctccgccgcctcctccacggcgccgacttcctgctctccagccccaagccacgcgacaagagcgatgagctgaaggcgaggctggacaagctcagggagatgcaggagaggaaggagtacgccgaactcgtcagggatgtcgcgccgccggcgaaggaggacagccccgagctcttc

SEQ ID NO: 388176 - DNA, 808 bp, Oryza sativa
  unsure (1)..(808): unsure at all n locations
ccacgcgtccgaaattacacccccgaaagatttcttctctcacaatccagtcctcgaactcgaacccagccatggcgaccaagcagagcctcctcctcctcctcgccctcctcgccgccgccgcggccgtcgcctccgccgtcaccgacgtcgagtactgcaataagggcaagaagtacccggtgaaggtgagcggcgtggagatcgtgcccgatccggtcgcccgcggcgagcccgcaaccttcaagatctccgcttccactgataaaactatcggtaaagggaagctggttattgatgtgaaatacttcttcttctatgtccactcggaaactcgtgagctctgtgatgtgacttcctgcccggcaagtggtgacttcttggtagctcatcagcaaaccctgccatcatacactccaccaggctcttacaccatcaccatgaagatgctgggtgataacgatgaggagctgagctgcatctcgttcgggttcagcatcggtttcgctgcatcagaagccaccatctgaatgcatccagaggcagaattcagaaatatcacaccatggatgtaattacaaaagcacctatgtatcttagatcatagaactcaaatacaatgcgcatctgccaacacattgtgttcaactaagacgttttatccagagttgaacatacaataaaaacatcactcactagtgtacctaactccgtttagctgttgaaatgtgttgcattgcatgttgaattgagcctggatgcatcttgatcttgagnnnnnnnnnnnnnnnnnnnnnnnnnnnnnnnn

SEQ ID NO: 388177 - DNA, 535 bp, Oryza sativa
tcgttccatcttcgccaccatcgcgctgcccaacaactccacgacgcagaacaccgtgtggcaggccgggccagggagcaccgggaacgtcggccagcacgcgacgtccggccccaacgtgcagagcatgctgaggctcgacttcagctccggccagagcaccggtaccgcctccaactccaggctgcaccgccgtaacatccatggcatcctgaacgcggtgagctggggcatcctgatcccgatgggcgccatgatcgcgcgctacctccgcgtgttcgaggccgccgacccggcatggttctacctccacatcacctgccagctctccggctacatcctcggcgtcgccggctgggccctcggcctcaagctcggcagcgagttcaagggcatcacctacagcgcccaccgcaacatcggcttcgccatcttctgcctcgccacgctccaggtgttcgcgctgctgctgaggcccgacaagaagaacaagtacaggttctactggaacatctaccaccactccgtcggctac

SEQ ID NO: 388178 - DNA, 858 bp, Oryza sativa
ttctcactctcgaatccttcgtacagttgttcagcatgcttgctcgcggtatccgtctcttgtaccatgcagtaatgcatggactgctttgtccagaaaaatacaagcagcaaaacaagcagaagcaatccaaaaaggtacatccaaaaaaaaggtctttgtgatctttggtggtgacacttctgagcggcaagtctctcttatgagtggcacaaatgtctggcttaatttgcaaggctttgatgatcttgacgtgacaccttgtttgcttacatctggaaatggttattcttccttccacaaccaaaatatgaatggaatttcacgtgatgtatggacattgccatattcgttagtgctacgacataccattgaagaagttaatgccgcgtgtattgaggcaattgatccagaacggatggaattaacatcccgtttacgtgaccaagtaatgaatgaacttggacagtcattaagcaaatatgattggtttgcgggctttgacattgccgataagcaacctatcaaatactctcttcaacaatggatcaatcatgttaaggaagctcaagccgtagtgtttatagcagtgcatggtggtattggagaagatggtactattcaatcgctgttgggatctgcaggagttccttacacagggcctggacaaatagcttctaggacatgcatggacaaagttgcaacttcacttgccgttagccatctggctagctatggagttcacaccataccaaaggatctgagagcaacagaagagatactaaagtcgtctcctgacgatatctggaatgacctgaaagcaaaactacaaactgaaacgtttgggaactgcctgtg

SEQ ID NO: 388179 - DNA, 380 bp, Oryza sativa
ccacgcgtccggacacaagcaggccattggcaaaatggagttcttgacaccttgagcacccaaaacattatccctgggtcccctatagctgtgaaccattccaaggtcctcaatgcagtgcaggaggcgagaagagctgcagagagggcctatgacgtcccaagagtcgacgataaggtgaacagggccgttgcttcagcaaattaagcagccaatgcagccaggggtggctgctgtgaaggctgcacaaaaagcgcatgccaaataatggcaatgactctaccgttgtcagtagatgtgagaaggaaagccaacataaggttggcacgaagctgcttcgcgatgtcatcgcgttgttaccaattcgcccgacacaacct

SEQ ID NO: 388180 - DNA, 660 bp, Oryza sativa
tgtaatgaaccctaagattcaaagttagcaggggtggtgtgggctatttcataggctgtgatcgacatccgaaatgcaagtacattgctcgcacgctatcagacgatgacaatgaaactgaagcatctgatgaaactcaaaggactttcacacctaggttacttggagcgctacctgattctgatgaaaaggtgtttatgaaacaaggttcttatggccactacgaccaggttggagaggatagaaagggagtatcaccgaatagagctcctctctctgaggagaaagatattgactccatcactctgaaagatgcaatcgagctattgcagcatcccaaaattctgggaaaacaccctgatgatgatcttcctgtacttatcacacattctaaagctggatttagtatcagacacaggagaactcttgcttccttgccaaagagtgctgacccaaagaagattaccctcgagcgtgcactgaagctcttgactggtaaaaacgtgagaatgtttggtcgtcctaagggaaaaacgaagaaagaggcagaaccccttgaatggcattaactgagcacctgttcccaaaaccaaactacaacttgcacactgcgggcaaacacaattgtttctgatcagagccgaggatcccggggtgtga

SEQ ID NO: 388181 - DNA, 1392 bp, Oryza sativa
  unsure (1)..(1392): unsure at all n locations
ctcgaccgcagcgacaacgcgcacacggtgaagcgccggctgcagctcgcgctcaacgtgcccaccggcgagacctcgctcaccttcggcgaccgcgtcctggagaatgacctctccttcatccgcccggactcgccgctgctgctcacccgcaacagcatcaaccggagctgctccacgccctgcctctgcccggtgtccaaggacttcgagcacaaggatcgcagcggcctggtcgagatgctcggctgctcgatcagctgcgcccgcgtgaagcgcctcgtcgacgacgtggtcaccgccatcaggagcggcgtggatccggtccccattggcagtgggcttggtggctcctactacttcaggaacatctccggcgacagggttgccatcgtgaagccgacggatgaggagccttttgcacccaacaacccgaaggggttcgtcgggagagcgcttgggcagccgggactgaagaaatctgtcagggtgggagagacagggttcagggaggtggcggcgtacctgttggatcatgataacttcgcaaatgttcctccgacggcgttggtgaagatcacacactcaattttccatatcaattgtccggtgaacggcggcagtccagctcatgatcagaagcagcaggtttccagcaagatcgcttcgtttcagcagttcatcgcgcatgacttcgatgccagtgatcatggcacgtcgagcttcccggttgctgctgttcataggatcgggcatactggatatcagaattttcaacactggacaggcatgctggtaatgtgctggtgaggaagcttgatggtggcaccggtcgctttggttgtcagacggaattgtttccaattgatcatggcctgtgcttgccagagaatttggaggacccttatttcgagtggatccactgggctcagtcatcaatcccattctctgaagaggagctcgagtacattaagaatcttgatccaatgagggatgtggcaatgctgcgtagggagcttcctataatccgcgaggcctgccttcgtgtcctggtgctgtgcacaatcttccttaaggaggctgctgcttctggtctttgcttggcagagataggtgagatgatgaccagggagttcagagggttggaggaggaaccgagcaagctggaggttgtctgcatggaagctaggagaaaattagctgagtggggaccatactcacctgtcatcgaacaaggggaggacatggatttccaattctcactggacatgttaggagagtacaatgatgtgattaggtcaccaagattcaatggcttaggngcaaaggggaatggtttcagaaaccctctttcaaagcttttggagagcatcgttgaggncaatgttgttg

SEQ ID NO: 388182 - DNA, 677 bp, Oryza sativa
  unsure (1)..(677): unsure at all n locations
ggacgtggtcnaacaacagncagnggagcggagttgatggtggtggtgtccgtcgcacgcctccccccaatcctcgtgagccctatccgattccgcaccaccgctactcgccgccgtctcctcccctcctccgcgctccgcctcacccgcccgctctcctcctcctgctccgcgtcgccgctcgccgtcgtagcctccatggagacgccgccggagaactaccgcaccaacgtcggcatctgcctcgccgacccctccctcaccaagattttcaccgcgtccaggatcgacatcgccaacacatggcagatgcctcagggtggtattgatgcgggagaggatccgagggaagctgctttcagagaattgagggaggaaacgggtgttacatctgcagaaatggtggctgaggtccccgtttggttaacgtatgatttccctgttgatgtgaaagaaaagctgaatgctaggtggggaggaacgaactggaaaggacaggctcagaaatggtttctatttagatttactggggaaggaagatgaggttaaccttaatggtgacggatcttaagaggccggagtttttgttgaattggacattggatgacaacctcagcaagttatttnaaaaggcagttgaattcaaaaaaccagtatttttaaggcagccttgaaca

SEQ ID NO: 388183 - DNA, 385 bp, Oryza sativa
cgaccaaggcgtccgcccacgcgtccgaagaaccaaaggctgctgaagaagatttggctttgaaggaaatgactggtcctactgctagggaagaagaagaactgagagaagcaaaacagcacgataaggaaaagctctgtaattttagtcgagcactggctgtactggcatccgcatcgtctgttagcaaggagcgtcaagagttcctcagccttgtcaacaaagagattgaactgtataactctatgcttgaaaaggagggtacagaaggtgaagaggaagctaagaaagcttacatggctgctagagaagagtcggacaaggctgctgaggttgatgaagaagaaaaggtctcatcgcccctgattgagaaggttgatgctat

SEQ ID NO: 388184 - DNA, 829 bp, Oryza sativa
ggctggaagtatattttgcagctgcactaccatataacagctgttattgctcttggcatgtgcgagatggctttctggtactttgagtatgctaacttcaattcgactggaaacagacctatggctataaccttgtgggcagttacatttactgctgtgaagaagaccatatctcgccttcttttattagtggtttctatgggatatggtgttgttagacccacattaggtggggttacatctaaagtaggtgctcttggtgtcgtctattttattgcttcggaaggtcttgaacttgttgaaaatcttggaaacatcaatgacttctctgggaaaacaaggttatttctggtgttacctgttgccatacttgatgctaccttcattatctggatattttcatcgctctcgagaactttggagaagctccagctgcggagaagtatggcaaaacttgaattgtatcggaagtttacaaattctctagctttgtcagttcttatctctattgcttggattggctatgagctatacttcaatgcaactgatccattgagtgagctatggcgaagggcttggatcatccctgcgttttggaatgttctctcctatgtcctccttgccatcatatgcatcctttggtctccgtctcgcaatccaacagggtttgcgtattcggaggatacagctgacgaggctgatgaggaaggtctctctcttgtaggcagtgctgtgaaaggaactggagacatagtgaacatgcatgtgtttccagaggataaacgtgcatgacaagttgtcattttttagtgcagctgtactcctggct

SEQ ID NO: 388185 - DNA, 678 bp, Oryza sativa
  unsure (1)..(678): unsure at all n locations
atgccggcgtctcatctcgtcaaggaattgctcgagcatccggaggacgagttgtgnaaggccatggtgaaccgctgggagcgcaacacggaaaccatgggcgtcctggtgaactcgttcgaatcgttggagagccgggcggctcaggcgctcagggacgacccgctctgcgtcccaggcaaggtgctgcctccgatctactgcgtcgggcctttggtcggcggcggcgcggaggaggcggccgagaggcacgagtgcctcgtctggctcgacgctcagccggagcacagcgtcgtgttcctctgcttcgggagcaagggcgtgttctccgcggagcagctcaaggagatcgccgtcggcttggagaactccaggcaacggttcatgtgggtcgtgcgcacgccgccgacaaccaccgaaggcttgaagaagtacttcgagcaacgcgcggcgccggacctcgacgcgctcttcccggatgggttcgtggagcgtaccaaggaccgtggcttcatcgtcacgacgtgggcgccgcaggtggacgtgctccgccaccgggcgaccgtcgcgttcgtgacgcactgggggtggaactcggcgctggaaggcaatacggccggggtgcctgtgctgtgctggccgcagtacgcggagcagaagatgaacaaggtgttcatg

SEQ ID NO: 388186 - DNA, 713 bp, Oryza sativa
  unsure (1)..(713): unsure at all n locations
gggaatggagggtctccgagctgcagcagcaatttgaggggaagactgtgttgctcggtgtggatgacatggatatcttcaagggtatcaacttgaagcttcttgccttcgagaatatgttgaggacacatcccaagtggcaggggcgggcagtgttggtgcaaattgctaatccggcccgtggaaagggtaaggatcttgaagccatccaggctgagattcatgagagctgcaagaggattaatggagagtttggccagtcaggatacagccctgttgtcttcattgaccgtgatgtgtcaagtgtggagaagattgcctactacacaatagcagaatgtgtggtggtgactgctgtgagggatgggatgaacttgacaccatatgaatatattgtctgtagggcaggggtctgactccacatcagaagtgaatggaccaaagaagagcatgctgctggtatcagaattcattgggtgctcaccatctctgagtggtgctatcccggttaacccatggaatatagaggcacccgcagaggcactgaatgaggccatatcaattgtcggaacaggagaaacacctaaggcatgagaaacattaccgttatgtcagcacccacgatgttgcttattggtcgaaaagtntcatccaagatttggagagggcttgcaaggaccacttcaggaggacatgttggggcatcgggttgg

SEQ ID NO: 388187 - DNA, 595 bp, Oryza sativa
  unsure (1)..(595): unsure at all n locations
ccacgcgtccgaggtgccatcgaatccaatagtataaatggaaccattgctgtaaataatataacaaaacagcatatgacaaatccttatacatatcagccatttgtaggaagcaacaatggatcatttgaaagacctgtccctggtgggaatcatcaaatggcaccattaatgagtgctcaacctgatagactgacccgcaaacaacttgcaaatctccctttccctaaagaagaaacattagctagacactctatattgggacctaatgggcttcatgggcaatggactgggcctgttactgcaatcaaggttcagtatccaagcaatcttgatataataaaaagcgatgtgtctagtttatttccatctgtcttgaaccaagatggtcagaatggtcccagtacaatatccacagatagcactcaaattgagaatgatgatatgaaatctgttctgtcccttgatgatggtcggatggtctaagctggcagagggaatgcgcctctgtacccttctgttagtctggaagaggaattatccaattgagtatcaaacagccttcacctccncagtcttggcagattagagcgca

SEQ ID NO: 388188 - DNA, 604 bp, Oryza sativa
ggcatgccagttcagacttggagattactacgatgatccagaagttttaagctaccctagaaaggatggagggtggtggtgcttctccatttggctgctggctggctgctattgcaaaacttggtgctcaagctacagctgcacttggtactgtgaaatcaaatgctattcaagcgttcaacaaggtttttccattgatagaacagttagacaggtcagccatggaaaatactaaagatggccctgggggatatcttgaaaattttgaccaggaaaatgcacctgctcatgattcgagaaatgccgccttgaagattatctctgctggcgcactgtttgcactgttggcagtaattggggccaaatatttgcctcgtaagaggcccctttctgctattaggagtgagcatggatctgtggcagttgctaatagtgtcgactctactgatgatcctgcactagatgaagatccagtacatattcctagaatggatgcgaagctggcagaagatattgttcgcaagtggcagagtatcaaatctaaggccttgggaccagaacattcggttgcatcattgcaagaggttcttgatggcaacatgct

SEQ ID NO: 388189 - DNA, 622 bp, Oryza sativa
  unsure (1)..(622): unsure at all n locations
ggcagcagcagcagctagggtttagagagcatccgggaatcccatggccccaccctgcgactccgacgactcggccccgatccccgccggcgccatctccaagctcctcatcgtcatagcgatgcagacggaggcgctcccgctcgtcaacaagttccacctcgtcgaggcggaggaatccatatttcctaaaggtgccccatggattagataccatggcaactacaaaggccttcacgttgaccttgtatggcctggaaaagatcctgttctcggagttgactgtgttggcacggtatcagcagcacttgtgacttatgcttctattcagtcattgaagccagatctgatcatcaatgctggcactgctggtgggtttaaggccaaaggagcagacattggagatgtctacttagcatccgatgttgcattccacgataggagaatacctatccctgtcttcgacatgtatggaattggaacacgaaaaacatttgctacccctaatatattgaaggactcaatttgaaggttgggagntctaactggngatctctagatatgntcccatgcgggtcacaatatgacaatgatgctacagcaaggtatgnggggcccggtg

SEQ ID NO: 388190 - DNA, 1110 bp, Oryza sativa
ggctttgagttctcttgtcaccactctgcaagagaaaaaggatccagatcatcctgctgaaaaagatcattctgatgcattgtcccagatttctgaaattaacactgcattggatgcattatggttggagctgagtaattgcataagcaaaatagagagctcttcagaatacgcatcgaatctaagtcctgcttctgcaaatgcagccacattaacaacaggtgtagcacctccattgcctgccggaactcagaacatattaccgtacatagaatcatttttcgtgacatgtgagaagttacgccctgggcaacctgatgctattcaagaagcttcaacatctgacatggaggatgcatcaacttctagtggtgggcagaaatcatctggaagccatgcaaatcttgatgagaagcacaatgcgtttgttaaattctcagagaaacacagaagattgttgaacgcatttatccgccaaaaccctgggctattggagaagtcattctctctgatgttgaaaatccctcgcttgattgaatttgacaacaagcgtgcatatttccggtctaaaattaagcatcagcatgatcatcatcatagccctgttagaatttctgtgcgccgggcatatattttggaggattcatataaccagcttaggatgcgttcaccacaggatttgaagggtagactgactgttcatttccaaggtgaagaaggcattgatgctggtggactaacaagggaatggtatcagctgctatcacgagtgatttttgataagggtgcccttctattcacaactgttgggaaatgacttgacatttcaaccaaaccctaactcggtgtatcagactgaacacctctcatatttcaaatttgttgggcgagtggttggtaaagctctatttgatggccaacttttggatgtccattttacaagatctttctacaagcacatactaggtgtcaaggttacataccatgacattgaagctattgatcctgcatactataaaaatttgaaatggatgcttgagaatgacataagcgatgttctggacctctccttcagcatggatgcagatgaagagaagcggatattgtatg

SEQ ID NO: 388191 - DNA, 444 bp, Oryza sativa
ccacgcgtccgcttctccccctactccaaaaacttcacaaaatcaccccaaaaaagatccattctcggagcacaaaagaatcttttgcaaatttgtatcaaacaaaaatggcagttcttggtctatccactgccttctctcctcccagaggttcttgtatagctgtgaggatcaggcatggcgctaggtcagcaaggagcaacctgtccctgaggaggaggagcgccggcggcggcgccattggcgtccgtgccgaggtgagcttcgtcgacggcgacgaggcgaagcggctggtggcggaggaggggtacacggtgctggacatccgggaccggacgcagcgcgagagggcgcacatcaagaactcagcgcatgtgcccctcttcgtcgagaacgacgacggcgacattggaactattataaagcgcacggtacacagcaact

SEQ ID NO: 388192 - DNA, 654 bp, Oryza sativa
  unsure (1)..(654): unsure at all n locations
ccgcctctatgtaagactgcaacgcagccggtgtggcagccggcgagagagccacggttggagcaaagcgaggcggcagacgggcaaccgaggcaggtgggcggggagggaaccgacgacttcttcccctcccacacgcatcccgtcatctcccctgctcccctcttgcgcggatcctccaccgatgactggatcccgtcctctctctggtcgctagcggcgtccgcggccttccccaccgtgagcggccacggcggctccctccactacttccgatgggtggatccggcggtggcggcggcggcagcggtggcggcggcggcagcggtggcggcggccaagagcggatccgacggcagtcggtggtggtggcgtcggtgacgggccgccgcctctcttctgccttcggtgggcggtggtggcgtcgggtcggatcccgcggcagcggtggcggcggcgagtggatccggaggcggtggcggcggctgagggcgatccaacggcagtcggcgacggccgctggtggatacggcggcggccgagggcagatccggtcgccttttttttcgcccgagtttgtttctttttcatggaatcggacattgggatcaagttcatgagctctactcggattnnnnnnnnnnnnnnnnnnnn

SEQ ID NO: 388193 - DNA, 427 bp, Oryza sativa
  unsure (1)..(427): unsure at all n locations
ccacgcgtccgcccacgcgtccgctcaactccacttgctgttgttgattctcctcctcctcctcatctcatctcccgaaatactaatccagctcgatcgtgtgggaaagagatcacagaaggtacttggctagctcactccatcaatcgatcgatcggtacagtttagcaacagttaagcttcacctttttgtattagctagtggcagtcgctactacgtccacgtccttttgtgttacggattggttcgcgagcgagataactggtgagtagtagtagcttttccactgacctggacctgtacattcggcgcataatttgccgggaagcttagcgtgttngttctaagtcctagtaagttgggggggangccatggggggtgcacacgaagtccgatgaacctggtaatgggggangccggcctcg

SEQ ID NO: 388194 - DNA, 511 bp, Oryza sativa
aaaactctgcagtcgctgtggccaagcagatgagccgaagatggctgccaccaccttcagctcctctccctccaaggttactactgccaaactaggaggaggcgtcaccagatcttcctcgccatacacgcagctcaccttctgctcgaggcatcacttccagaaggcggcgacgacagcggcggccttccaccacaagcctcccccggccgagctgtcccttctgctctcgccggcgaggagcaagcatgcaagaacgtgcccggccgccgacaacgaccgcgcggcgcccgcggcacaggaagcaacaaacacgcctccgccgccggccgcgcccagcgccaacggcagcccgccccaggagccgccgaagcgggcgccactgacggcgcgggagcggctgcgcgcggcgcgcgtgctgggcaagtacgcggagcctgtgggctcgtctccgcagggcaaggcctcggcggcgtcagctgcggctggggcggcagggaagaagccggag

SEQ ID NO: 388195 - DNA, 409 bp, Oryza sativa
ccacgcgtccggggattttgaggaatggaagaggttgcacatgaaagatttccttgcgatgacccacgggttcatggatggcctcgaacagcctgaatccaagtccagggttgaaacctaccaatcattcatgcaggaaatccaacagcctgggacgaccacgacgacgacccaggttgagatttgaaggactacattgcaatattcgccaatagccgatatatatagtgaaatggcagttcgctgtattagcatgttagtatgaaataacccatctcctcgagagtgtaatctttatactttatagcatcatccattaataatacatgtaagaataaagtttctactgtgaaaaaaaaaaaaataaaaataaataataaatataataatttttttttataaaatatta

SEQ ID NO: 388196 - DNA, 650 bp, Oryza sativa
tgtgaagaagaagagagaggatcccaaccccaccacctctcctcctcctcctctctctctctccgatctgcctcgccgccgccgcggctgctcttctcctctcgcctcgcctcgtgcgcgcggcgagttcgacctcctcctcctcctctccgagcccccgcctcccctggctgcgggcggggggtttcgagggggtggacgcggcctccgtgtcggcttcggctcggatcgaattcaaagaagaggttggaaaccttggtggtgtagttagtgccaccgcccctgtctggagtggcatgtagttttcgcaaggctttgtttatgattttgtcgatggcgaggagatgaaggcatcgcaggtgtggcaacggggcagcaaggacatgacagccatgccccctccgcgccaacgaggcgccgccaagaagcccatgtggataatcgtgctgctgtcgctggtgtgcgtcgcgctcatcggggcctacgcgtaccctccgcgccgctactccgcgtgctacttcttcgcttcgagcgtctgcactcctttcaaggattggctccctactgtgacccgacgggagcgaacagacgaaaagatcgtctcgtctgttgttatgagggatctccttgcaatgcccatgcctgtctcg

SEQ ID NO: 388197 - DNA, 765 bp, Oryza sativa
  unsure (1)..(765): unsure at all n locations
ccacgcgtccgcatatcacttgtggaagagaaggtggctgccatggaacaaggaaaaataacaaaactctttcccagctatttgttatatgaatttcctagcttagttggtggaagagtatggaaagcggaacaggatctactgttgctgaaagcattaataaagcatgggtatgcaaggtggcaatatatatcagatgacagagataatgggatttttgaggctgcacgacaagagctgaggcttcctactgctaatgaactgattagttctcactcaaacaatgagacaaacggaaatctggaaagcacacaagaaggccagtcgaacccaacgagcatgatccattacagggatacacagagaaagatagttgagtttattagaaagagataccatcttttggagagatgtttgaatcttgaatacgctgtgattaaaacaaaaacccctgttcctgatgatctcgctgaacaagattttcctggtggtcatagaccggccgttccagactacagtgaaatgctgagagaattgcctgtccttgaacctatttccaaagaagtggcgcctgaaggcacaactgatcagtcacatgtttcccatctttacaacaagatgtgctttgtccttgaagacagtgctgttcctgcactcaactcgcatttcggtgacaaggcagcttcctccggnnnagccaatagcctccataagtttgaagctgtatgccaagacgttagtcgcattctgggatcccatgaaaat

SEQ ID NO: 388198 - DNA, 794 bp, Oryza sativa
  unsure (1)..(794): unsure at all n locations
cccacgcgtccgcaacttttatgcctccgccgccggcggcaacgtttcttgctttccatcctcaagataacaacattatagcaattggaatggatgactcaaccatccaaatctacaatgttcgaattgatgaggtcaaaagcaaacttcgagggcactctaagaaaattactggacttgctttttcaaatgtattaaatgtgttagtctcttctggagctgatgcgcagatatgtgtgtggagcacagatgggtgggataaattaaagagcagaatgttacagataccatcaagtcgtccatcatctataatcttagacacacgtgttcagttccatcaggatcaattgcacgttcttgttgtgcatgagacccagattgccatatatgaaactacaaaattagaacccctgaagcaggggcctgtccgtgagaactcttctccaataacgcatgccatgttctcctgcgatagtcaattgatttatgcaagctttctggatgccactgtctgcatatttaatgcatcgagtctgagactccaatgtcggaatttcttccagcatcctatctttcctcagaatatcagctcaaatgtttatcctgtcgttgtggcggcacatccttcggaagcttttcttgtttgctctaggcctgactgcatggtggtgtttatgtatttggaacccnttgggaatctgacagaaaatgggggcaaatccttccaaccagcagagaatggatccaccagcgctttgtccncacctccctantgngagcntcaagttctgatc

SEQ ID NO: 388199 - DNA, 695 bp, Oryza sativa
  unsure (1)..(695): unsure at all n locations
tttgtcgtctccctccgccgctttcttcccctttagggaccctcccaaaattcaaacgcgaccaagccgccggcgaggtgaacgaaacccaaccatggcaggcggcggaggtggcgaggggaaggtggcgtgcgcggcgtggatccggcgccgggaggagaaggagaaggcgacgcgcgtcttcgcggcgtacgggcgggcggggtcgccgccggccgtggaggtgctcgggttcgactccaaggagtgctccctctccgaacccctggcgagggcggagctcggggaggagccgggcgacgcgccgcgtggcatcacggtgcaccccagcggcgacgagctcgtctgcgccacggccaaggggtgcaggctattcaagctgatttttgaagagttcactgttcgacttatttcaagagacgctccaccacttgaatccgttggaccgcagaagtgtcttgcttttagcactgatggatctaaatttgccattggtggtgaggatgggcatctcagaatatttcattggccgagcatgaatgtgctcttagatgaacccaaggctcataagtccttccgggacatggatatcagcttagattcagaatttttaagtttccacatccactgatgggtctgcaanaatattggaagataaatganggggtaccattgggcatttgactcgatttgcg

SEQ ID NO: 388200 - DNA, 812 bp, Oryza sativa
ccacgcgtccgcgaagaatacattgacaccatgatcctctgtccatataacaagatttcttacagcgacatagttcacaaagatgtaaccaaggctgttgcacaaatgtctacttctctgcctgctgcagaaaaaaaaggctgcgagaaaaaaaggcacttaaaggatgggatccaacattcataaagagaaattttttcccctactggagatcagtattaggggcccagctgtctgtatccaatggagcagcagatgagaagtcaatgcttcatcgtccacagttccgtaattcagtagtgagtaacgagtcttcgagtctgaaccataatattagtttcttgggaagaattcagcaactgagtggtactcatgaatcgagaaggtacagtactgctgcattcagaatgctcacgaaggtgctaaagacatgagcaaaaaggtgcctagtggcatgttgctgttgataaccataggtctgcaaagtattatgctgcgcacgtcttttgcggacaccttaagaaggttgcgaatatacatgtgaccaccaaaaccttgttcaaagtgatgctaagtactttaaattatgatgaaatgcaacatgccgtgtgttgtattcggcttgaaccctcgacccgcgagatgtggacatgcgtgccagcatgttgtacttgtaccaggttcaacgttagcttgaacactgaacaagttaaatgtgttgcaaaatgccatttttctttatcaacattttaaagaagcaatgctcctatgacaagaatttttaaacaaattttctcaaaatcaaagggggg

SEQ ID NO: 388201 - DNA, 604 bp, Oryza sativa
ccacgcgtccggcggcgtactcacattgtcattgacacggtcacaccggttgatgagaagaaggaaaaggaggagaaggaaaagaaggagaaagaggagaaggagaagaaagagaaagaggagaaggagaagaagaagaaggaagaagagcaaaacaatcccaagattgtttgtacgccgtactatgtgcacatggtggacgagcccaggccatcatgctgccagatgtagctatattgtatgaaatcactatgagtgtgttgtggagaattttggaagatttattatcagccatttgctgcaaattgatacatgtatagttaatgagttcaaaaaaaaaaaaaaaaaaaaaaaaaaaaaaaaaaaaaaaaaaaaaaaaaaaaaaaggaggaaaattataagaagacaaggggcgggaaacggggatatgtaatatattacttttttttatagtccacccaaagtcaattaacttgccggcgtttaaaaaaaaatatggttgggaaaaccttagtggtcccccatttaattctcttggcagcagccaccttttttccgagggggcaaaatcccaaagggccccgcaccaatcgccttcccaaac

SEQ ID NO: 388202 - DNA, 833 bp, Oryza sativa
ccacgcgtccgccctgatattttcaacattcttctccaaatttttgaagatgggcatctgtcggactcacagggccgcagagtgtccttcaagaacacattgattgtcatgacatcaaatattggttctacatcaatttcaaagggaagacgaagcatgggtttcatgacagaagatactgaatcaagctcatatgttgcaatgaaatctctagtaatggaagagttgaaggcatttttccgtccagaattgctcaacagaatcgatgagatggttgtattccgtcccttagagaaaactcagatgctagcaattcttgatatcatcctacaagaagtgaagggtaggctgttagcccttggaataggccccgaggtgtccgatgcaatgaaggacctgatttgcgaagaaggctatgacaagagctacggtgcgcggccactgaggagagccgtcacccacctgattgaggatgtgatcagcgaagcaattctatttggcgaatacaagcctggggacacgatactgatggatattgatgccggggggaaactttgcatgagccacctgaatgagaaggttgtccagttgtctgatccgacacggacattctgaagttctgcatactgcttagtacattagagatctaatttttcattctttcgagattactaattctttttttaggtagacacggaatatatttcattatgtacataacagttaagggattcgttcgggcatataaatgtcttaaaacttgtacccaactgtatattgttgttcaattgatcaaatatattattttgaaaccaaaaaaaaaaaaaaaaaaa

SEQ ID NO: 388203 - DNA, 499 bp, Oryza sativa
gcatcccctatcactgtcatgtttggcatgtgttctatcttcctcttcagggcggcaatcctgcagagacggctaatggttgtttctgacctacacaaatcatcgacaaaagcacaagagatggttgatgaagatgagccactgaatccttaaggattgataggatcatacaaacagatcgaatataagcatgtggcatactgcaattcatttctaccgagctgctgaataagattggacgttgcagaaaagagcagttgtttttgtttgtaactttatttctgcaatgtcgattgaccattggctggtagtagttcacatctgtggagcaaatgtagtaggcacgagaggcaatacatagttcagcaagcattgagctatagccgagatataggctattcatgttgtcatttgttatttgttattgttattcaccagcatgacattgtatgaaattaaatgctacggatatcctaatcgaagttatattttacacgag

SEQ ID NO: 388204 - DNA, 662 bp, Oryza sativa
ccacgcgtccgccgacttggcacgtcgttgccggtgctcgtcgcttcctcgccctgtgccgccgaggccatcctgcgcacgcatgacgacgtgttcgcgtcgcggccacgcaccgttctagcggatatcatcttctacggctcgcgcgacattggcttcgcaccgtatggcgaggattggcggcaggcaaggaagcttgtgaacacgcacctgctgagtgtcaacaaggtgcagtcgctatggcttgcccgtgaggaggaggtgaaaattgtgatggagaagataagcaaagcggcattcgcacgtgaagcagtggatataggccagattctttgctcattcacaaacgatctcgcatgccgtgttgtgtcaaggaagttagtcggggatgacaggcagaaaaagctcctccaagagttggttaataagacaataaagctgctttctatcttcaacgtggaggagtacttttcaattttagctcggattggcgtgattgggaaggtgatgtgcgcaagagctgagaggttgaaaaagaagtgggacatgctgctgaaaaagctgatcgccgaccatgagagcaagtgcgattcatacttagtatgtgcccgtatcagagatgactttgtggccattcgactgagtggtactatggagcctgg

SEQ ID NO: 388205 - DNA, 476 bp, Oryza sativa
atctcgcgaataatcgagagagagagagagagagagagagagaggcgacgagacggcgattgctcggttctcccgcgggcggcggcgagccggcgagggcttctccggtggggggcggcgagctatcctagcgcccgccttgggagcgctctcgcggatctcctttggagctttgatagcatagcaaggtcatggcagaggttgcagatttaactggggatggaggtgttcttaagacggtggtcagaaaagcaaaggatgatgctatagctccaactgatagtcttcccttggttgatgttcattatgaaggcacactcgctgaaaatggtgaagttttcgacaccactcatgaagacaactctattttctcatttgaaattgggcaaggagctgtcattaaagcatgggatatagctttaagaactatgaaaggtggtgaagttgcaaaaataacatgcaagccagaatacgca

SEQ ID NO: 388206 - DNA, 663 bp, Oryza sativa
ccacgcgtccggtggcctcctgcgagcgagccgcgacgactacgacgacctcgcgagtccgcaagaacgccgcggcgactgacctgctctgctcggctgctcgccattgattttctctgtctgctcggctgctcgcttgcttgcgctgtccagtttagctctgtctagctaggtagactgcggccatggcggcggcggtggcgtcgtcttgctgcgcctcgaccagcgctcgcccactggttcgccgcgccgggagcaggaacgggaagctgtggtgggcgggtggtgtcaggaaggcgcggctgctgtccatctccgccacggccgcggcgccgtcgggcgtggactacgcggcgggcaccggcgccgccgtcgacgacgacgccgtggctgcgctcaaagtcaagcttctgagcgcggtgtccgggctgaaccgcggcctcgcggcgagccaggaggatcttgaccgcgccgacgcggcggcgcgggagctcgaggcggcggcgggcggcggccccgtcgacctggagagggacgtggacaagctgcaggggcggtggaggctggtgtacagcagcgcgttctcgtcgcggacgctcggcggcagctcgcccggcccgcccaccggccgtcttctccccatcacccttgggcaggtgtttc

SEQ ID NO: 388207 - DNA, 469 bp, Oryza sativa
ccacgcgtccgcccacgcgtccgtgctaaggcaattattcgttccatgctgtcacaccttgttaacttgttctctttggggaaatgtttgaggatgggaacagaccttctgagaaggaggaaaattcttttaaaaggatctgatgtcaagttctttcaacttgaagtgattgcatatgaggaggatgaagcaataaataatgtgctgcaggttgttgagttggttaaaagttgttttgttggggaaatgataccggctgatctgcaaggtgatctacatgatttagaggaaaatcctttgaagagacttgaatcagtgatagacagcagctcattaatgtcagctaaagagaagaaaggattattggtcaatttgcacactgaatataaaaccaatattagtccagctattaacgaagatgatcgtgatagtttatttaagcacatcccgtatttggactgctggatga

SEQ ID NO: 388208 - DNA, 538 bp, Oryza sativa
tatcttggatcccccagggagttacagagaagggagcttgctgtgtctgagaaaataactggacttgagaaaaagttacattacttgaatgttgaagagaataatctcagggagaagctacgcagattggaatctgagaagagtaatatagaggaagagatcgatcgtcttgagccagtaaaggaggagttggagacccgtattggtaaaaaggaacgggaagtgagagttcttgagaaaaaaataaatgagattgtgggccgtatttacaaagattttagcatgtctgttgcggtgaagtaacatccgtgaatatgatagagaggcaacttaaagatgctcaagcactacaggagaggaagctaagcctgagtaatcaaatgtcaaaattgaaataccagctggaatatgaacaaaaacgagatatgcaggcaccaattattaaattaaaggagacacgtgaatctctagagaaggaacttaagagtttacaggagagagagtctgaagctagggcggaagctgaacaaatttcaaa

SEQ ID NO: 388209 - DNA, 653 bp, Oryza sativa
aaatggcttgagtgctatcagaaatggctggaatgagtataagcagcaaacagttctacctgcaagtgtagctaccgtgtttctaaatttcaatgtagcacttgctcctggtgctataatgactgcgctattgatgcatcgtggtattagtccgtcgattgttggtgcttttagtggattgtgttctatcatgggccttgttgcgacattcatctcctcaagcttggtggaaagagttggaattctaaaggcaggagcagctggattgatagttcaagcttcactcttgtcggtcgctctcgtagtgtattggactggttctatttcacagaggacacctctacttatcttcctggctgctatcgcattatctcggttggggcacatgtcatatgatgttgtgggtacacagattctccaaacaggtgttcctgcatcaaaagcaaatcttattggtggaatggaggtctcaatatcaagccttgcagaactagtcatgcttggtatggccatcatcgcaaacgacgtttctcaattcggtttcttggcaatcctatccgtgtcatcggttgctggtgcggcaatgatgttctgccagtggttgggaaatcctacagatgagcagagggaactgttcatgtttgatccccatt

SEQ ID NO: 388210 - DNA, 687 bp, Oryza sativa
ccgccatcgactacttcgtctacaatgccaacagcagcagcagcagcaaccaccacccctccttgacgcggctgcccgtctcctactggaggaggagagacacccttcgcccgcgcatcatgagcagggaaggcacatgtattctgtcctgcagcaacaattctccttcgttcgttgtggctgagctcgagagaagatcatgccaatcttccgaaaccaacatctacctctttgcttctggctccgatgccgggagagtcttcaggaatgtgccgatccgccatggcgacggcctcgctcacctgtgctggtggacaactgatgcagtgttgtcgtaccacaatcgctacatgatctgggtggactacttggtagcagggatgatcgtcgccaaagtggcacatccaggaagggttgacccaccggagcctgttctatggtacgtgccgcttcctgtcgatccagttgatgggaacccttatgacattgaccgtgggcgaggatgccctcaagcctcccgtagtgtgtgtgccacccaccatggcatcaagttcgtcaatgttaaccaacatggcggcggcagcagcagcagcagcagcagcagcagaagcttcagcatcaccctgtggtcgtggcgcgaggaggatcaaacatggggagaagatgcaacattggatgctgaccaac

SEQ ID NO: 388211 - DNA, 877 bp, Oryza sativa
cctcttctcctcctcggctgcggccacggcgacgacgacgacgacgaattcgagcgaggcgatcggcgatggaggcggtggcgatctgatccgctcttcccgtctcggcctcgcgctcctctccctccctcgcggtgtctcgggtaggaaatggcgatcatggtggatcctccaaatgggatgggtaaccaagggaagtattactactcgatgtggcaaactttgtttgagatagacactaagtatgtgccaatcaagcccatcgggcgaggagcttatgggattgtttgttcatccataaatcgtgagaccaacgagaaagtagcaataaagaagatacacaatgtttttgacaaccgtgttgatgcactaaggactttgcgggagctgaaacttctccggcatctccgccatgagaatgttattgctttgaaggatataatgatgccagtacacaggaggagttttaaagatgtgtacttagtttatgaactcatggatactgacctgcatcagataatcaggtcacctcagggtctttccattgatcactgctcaatattttctttttcagttgcttcgaggactgaaatatctccattcagcagagatactccacagagacctgaaacctggaaatctactggttaatgcaaactgtgatctcaagatatgtgattttggtcttgcacgcacaaacagtagtaaaggtcagtttatgactgagtatgttgtcacccgctggtatagagctcctgagttgctcctttgctgtgacaactatggcacttccaatgatgtttgggtctgtggttgcatcttcgctgagctacttggtcggaaaactatttttccaggaactgagtgccctaatcag

SEQ ID NO: 388212 - DNA, 531 bp, Oryza sativa
ccacgcgtccgcccacgcgtccgcccacgcgtccgcccacgcgtccgcaacagtatagctgagattggtcatctgacatccttatctccctctccctccaagtgcctaacccaactcttcccgagcctttttctgatcattggacaaatggccgtctcttcagccgttctcgttgggctactcgtcgtgagttgcgccgcggcggccgcagccacgaggtacaccgtcggcgacggcgagggctggacgaccggcgtcaactacaacaactgggccaacggcaagtttttcagacagggagacgaactcgtgttcaactaccaggcgagggcgcacacggtgaccgtggtgagccagaccaacttcgacagctgcaacggcaacagcccgctgagcaacgacaacgggggatcgaccaccatcaggctctcctacccgggcatgcactacttcatctgcaccatccccggccactgcagcagcggcatgaagctcgccgtgaacgtcaacggtgacccgtcgtactctgcc

SEQ ID NO: 388213 - DNA, 563 bp, Oryza sativa
ccaggatgaaaaagttgcatcgggcaaccagtcggaggagcaggtagctaggcatcagcataaagcttcagattttgatgcatcaactactcaaatccacttgaaaggtggtgcagcagagttcactgctaacgttgggaatcagactgacacgcatacttctgctggtggtggtttgggttcactcttacctcgcataccaaaggagccttcccttctagatgagagatcccttctggcttgcattgtacgtgcagttcctgctggacctgatggccgaatcaagattagcacaactctaccaaataggcttggcaaaatgttggctcctcttcattggcatgactataagaagcactatgggaagctagatgattttgttggctagccatccagagctctttgtgattgaaggagacttcattcaccttcgggaaggagcacagcagatcatttcagctactacagctgccgccaaaattgccgctgttgcatcttcggctccttactcattgttaccttcagttgctgtcactcccgtggcacaaagcactaggcaaaag

SEQ ID NO: 388214 - DNA, 788 bp, Oryza sativa
cgaattccggtcgccacgcgtgtgggggaggtctatgaaattagactgtgcccgacataatagagaagctgattcacctattacaattttcaaagaacagcgaaatgagagccatctcagggcaggtgtcccctgaagcagtggcggaattacgcttgcaagcctataatgaaattactaaaaatatcgttaatgataatatcttctctcaatacatgcataagattctaccaactgggaatcacctctggaccttcaagaaacagtttgcaatccaagtggctctgtcctgtttcatgtcgtacatgttgcagattggtggtagggctcctaacaaaatattatttgctaaaaatactggcaagatcttccagaatgatttccatccagcttatgatccaaatggaatgattgagttcaatgagctagttccctttaggctgacacgcaatatgcaagctttcttctcaaatttcggtgttgaaggtctcattgtgtctgccatgtgttctgctgcccagtctgtggtttcaccaaaacaaagccagcatatatggcaccatttggctatgtttttccgtgatgaactgttatcttggtcatggaggaggccacttggcattccttctgttccagttgctgctggaatgattaacccgttggatttccagcaaaaggtgataaacaatgtggagcatgtcattacccgtatcaaattaatatcaccacattatcttgctgatgaggaggagaattcatctgagccacctcagttggtccaaagaggc

SEQ ID NO: 388215 - DNA, 451 bp, Oryza sativa
  unsure (1)..(451): unsure at all n locations
ccacgcgtccgcccacgcgtncgcagaaaaaaactacagtggagaaacaactgtcaaattcaaaggctaaaaaggttgccaaaaaagatttagataaaagtaaagagcggagtggatcagaagaagataattcaaattcatcagctgaagaagataataagaaaaaacgacaagtagctccagcttacgggaaacgggtggaacggctgaagtcaataatcaaatcttgtggaatgagtatcgcacctactgtgtatcggaaggcaaagatggctcctgagagcaagcgtgaagcctgtttgataaaggagttggaggatatacttgaaaaaggaggattgtcaacaaacccctctgaaaaagaaattaaagcagtcaagaaaagaaaggaaagagcaaatggactcgaggcatagatatgagcaacatatcacagttctcgtcgagagta

SEQ ID NO: 388216 - DNA, 635 bp, Oryza sativa
ccacgcgtccgatgtatgacagggcgatctccttttggaaagaacagttgaggttaggttggccaccatatgagatgacaagcaccttgcttgttgatcttgtttgcaagaattgtggccctcagaaggccttggaagtcttggatgaactttcgttggaaggatgtcaaccagatgtcgtcacctataatgctctcatcagtgcatcatgcaaggctggcaggctgaatgatgcaaagttcatcttaactcgtcttgctgctgaagggcttgaaccaaatggtacaacctactgcatcttactccatgccctctgcaacatgagaaggtgggatgaagtatgcgatttgcttgaagacatgaaccaggtgaatcgtgatcctgatgttacaacctacaatatttttatcaattacttttgtaagtatgggcatctggatcaggcaattgatgtgttggagaggatggttatcaacaattgttctcctgatattgtgacctgcaacacactcctgaatgccatctccaaaaagggtatggttgaggaagctcttgggattgctcgctgcatcagagaaaacggatacaagttggttctcatcacatacaataccctcatagatgctttagcaaag

SEQ ID NO: 388217 - DNA, 976 bp, Oryza sativa
acaaggagagagagaagaggagagaagaggccattcttctcttctccaccacctactctctctctctctctctctcatctcctgccttctctctaggatcgccgccatccaccacatcccacgctttttactgccgcacacataagagcacaggaggaggaggaagaagaagagtagagagagaaagatagagagaggagcaggagaagcattcgttcatccaggagagagagaggcttcaagttcttggtctcctgctctgccatgtccatggatgaagggtatggccctacctgggacagcgacgacgagtacgacaacttcatacgcaagatgaacccgccaaggatcgagatcgataatgattcatgcaacgacgccacgattgtcagggtagacagtgcaaatgagtatgggattctccttgaagtaatccaagttctgattgatctgaatcttgtgataagtaaggcgtacataacctcagatggtggatgggtcatggatgtctttaatataactgacaaagaagggcagaagcttaaagataaggctactattgcgcgaattgaagactacatttgtaagtctttgggtgcagattcaagatacataccttctcgccggagatcagtagatgtcgctgcttcgagtgatcacaatgtcattgagctgacagggactgaccggccaggcctcctctctgaagtcagtgcagttcttgcaagcctcaagtgcaacgttgtcagcgccgagatctggacccataacaccagggctgccgccgtgatgcgagtcaccgatgagggcaccggatcggccgtcacggacgccgacaggctcgagaggatcagggataggctgtcctaccttctccggggaggcaacctctcgcgcggcgcggcccatggcggtgtcgacggggacctgcagcacgcacaccgagaggaggctgcaccagatgatgctggatgat

SEQ ID NO: 388218 - DNA, 350 bp, Oryza sativa
ccacgcgtccgctcacacatccgagctcatcgacatctgtctcaactatgacagtttactgcatcaatggccgccgccaccatggcgctatcctccccggtgatggcccgcgcggcgccgtcaacatgctccggactcttcggagaggcacggatcaccatgcgcaagaccgccgcgaagcccaagccggccgcgtcctctaggagcccgcggtacggcgccaaccgcgtactttacctagggccgatctccggcgagacgacgagctacataaccggcgagtttccgggcgactacagacgggacaccagaacgctctactgcgagccaaagactttcggcaagaaacg

SEQ ID NO: 388219 - DNA, 240 bp, Oryza sativa
ccacgcatgcgccacgcgtacggacggaaccggcagcaagacggatgtgccagaggtcgtgacggcaacccaggacgcgtggtccaaagttgaggacatagtacgccgttacagtgatatgcgtcgcctcgctggtatggctatggactgacataggcgccatcaaggtcatctacaggctatcacttttgcacggcgtgctagagctcgttggaatcaggtatacagggagggttacat

SEQ ID NO: 388220 - DNA, 355 bp, Oryza sativa
gtaccgttcccgaataccgggatcgccccacgcgttcgatagagcaaagaatgagagagctcggtgagctgcacaaatggccctctccgtgatggcctcaagtgccaccaccgtatgtccgttgcaggggcttaagtccactgccggtatgcccgcgtcccgacggtccggcagctccagctcatgcaacggcagcactggcaggaggatcaggtgcatgcaagtgtgtcctaccgaggacatctaaaagtgcgagaccctctgctacatgtcaccgatcaccgtggaggaccgtctgaagcatatcgagtacctgctacggtccaagtgggttacctggctaacgacaaacacg

SEQ ID NO: 388221 - DNA, 417 bp, Oryza sativa
tcccgtgcacgtacccacgtacgtacgaagcacgtatctctattttccacatacgcgccctgggagcggcacctgtggtacttctcccattgctactgccaccgaggaggttgccgctgcggctgctgccgccgacaaggcgccaacgacgccttcgacacccctgatacaggaggcgaacgaagctctgaaggcaccgaagccaaaagaggcgccgaaggctaaggaaggggaagagaaaaaagcgaaaggtgacaaagagaaagaaaacgccaataaggagaggcaccccagggcgactacatcccagatcggcgaggccacaccacccgccctactcggagacgatcaaggaggatatcatggcgctgcaagggaacagtacagggggatccagcacatacgcgatctccaagt

SEQ ID NO: 388222 - DNA, 618 bp, Oryza sativa
  unsure (1)..(618): unsure at all n locations
ccacgcgtccgggctatcgaagagttcaagaaaggtaaagttgaatacagagttgacaagacaggggatttgttcacattccctttgggaaggttgattttcctggaagaagaccttattgcaaacttcatggctgttgttcgctctgtcgaaaggaacaaaccatctgggtgcaaaggggatatactggaaaacggcatacttatgctcatcaatggggccttcaatcaagttaaacatcaaagaaatgcttgactatggctcagaatcatcagactaaatgccacgaaaagcaccagttaagaaatctggtgtttgctaccaccttcacaaaattaaccatccacccttagcgataaatgaaccgggaaacatggtgggggaaggcaagggaggtgcttaggtacagtttttttttcagtctcacctgcatccatccagcagttacacgatgcccaagtcgacgaaggggtgatattgttggccatttgtacttacgagcaaattatttacggacttatagatgtgttttctgagatgtttgttgtaatgatcaatattttgtccatagtcatccttgagcttacgacnnnnnnnnnnnnnnnnnnnnnnnnnnnn

SEQ ID NO: 388223 - DNA, 621 bp, Oryza sativa
  unsure (1)..(621): unsure at all n locations
gacattcctaggtggatgactgttgatattacaatttgacagaggcaagaccgcttcagcagtaattgatctccagcgtctagagattcttgctggaagctacttctgtgctgctggagcacttgttggtgtcataaaccctgggaggatgacccttgtttggtacccttttggttatctggggtctagtgaaagaagcgctctttgggaaaccggtgaacagtgatccaacacaatcagttcatgtttatccgaccattttaattgcactgatttgtgcattcttgtcaataacttacaatgtaaagaagacagtaagaaatagtcagtctgtttcaatcactaagcctctgcaaagttctgccaagtcgaaactgaagtagacacttcattgtctatttgccccttcatccttgtagttcatttccacaaatttattgttgaagactggcccaaaggataacactactggggttcttgtgtacccactttgaatactgtaaccttcagttttcacctttgtatcaaagacttatatctataacgtttatggcaagcatattcactttaatttccctcgtatttatttnnnnnnnnnnnnnnnnnnnnnnnnnnnnnnnn

SEQ ID NO: 388224 - DNA, 821 bp, Oryza sativa
  unsure (1)..(821): unsure at all n locations
anncaggnttttccccagttcacgacgttgtaaaaacgacggccagtgancgcgccttaataccgactcactatagggcnaattgggtaccgggccccccctcgaggtcgnacccancgtcccgcggacgcgtggcggaggagtactcatacaaaaatggggcagatcttcagctgcatcaaccgccgtttccatcgtggatgctattaggtcccttgtaaatcctaccccagaaggcgattggttctctactggggtttatacgactggaaatccttatggcatagcagaggacatcgtgttcagtatgccatgcaggtcaaagggtgatggtgactacgaactagttaaagatgtggcaatggacgatttcctctgggaacggataaaaaagagtgaagctgaattgctcgccgagaaaagatgcgttgcccatcttactggagagggcaatgcattttgtgatcttcccggagacaccatgcttccaggagaaatgtagaatcattgttgcggtaaccctggcttgtgttatttcacaggggttttcgacggaaacacacacacacaaactactagtagctgagagaaacaactgcttgcagattacttgcagcagttatttatacgtatgtataataagtatttatttaataaggatgccacagaaatttcaactatgttgccgagtttgtacactataatacaatcaaccaaatgcaatgcggctgatcgtatagcatatacttctggattttcccagttttgcaaaggnnnnnnnnnnnnnnnnnnnnnnnnnnnnnnnnnnnnnnnnnnnnnnn

SEQ ID NO: 388225 - DNA, 533 bp, Oryza sativa
  unsure (1)..(533): unsure at all n locations
attttatgacaaagtatcaaatatgactatttgggggaaccactcaacaactcaggttcctgattttttgaatgctaaaattaacgggagaccagtgaaagaagtcattaaagacacaaagtggttagaagatgaattcaccaaaacagttcaaaagcgtggaggagtactcatacaaaaatggggcagatcttcagctgcatcaaccgccgtttccatcgtggatgctattaggtcccttgtaaatcctaccccagaaggcgattggttctctactggggtttatacgactggaaatccttatggcatagcagaggacatcgtgttcagtatgccatgcaggtcaaagggtgatggtgactacgaactagttaaagatgtggcaatggacgatttcctctgggaacggataaaaaagagtgaagctgaattgctcgccgagaaaagatgcgttgcccatcttactggagagggcaatgcattnttggatcttcccggagacaccatgctttcaggagaaatgtagaatcatt

SEQ ID NO: 388226 - DNA, 720 bp, Oryza sativa
  unsure (1)..(720): unsure at all n locations
ccacgcgtccgcccacgcgtccggtttgctgatcgggtatttgatttgtttgacacgaagcacaatgggattcttggattcgaagaatttgcacgggctctttctgtgtttcatcccaatgctccaattgatgacaaaattgattttgctttcaaactttatgatctcaaacaacaaggtttcattgagaagcaagaggtgaagcaaatggttgtcgccacacttgctgaatcaggaatgaacctttcagatgagattatagaaggcaattattgacaagacatttgaggaagcagatacaaagcatgatgggaaaattgacaaggaggagtggcgcaaccttgtgttgaggcatccatctttattaaggaatatgacactcccatatctcagggatataactacaacatttccaagttttgtattcaactcccaggttgaggacgcatgaggtcaagcttcagaccatattctagggtccagttcgttttatttcattttgttgatatctttctcgtgcttggaacaaacttttatgattntccgcttcaagatgtgaatccgtagcaaggatgaagtttttaccattttttatgtatatacttgaagatggccttcaactcttcatgtgtagacttgtaggatgaaccgtttctcgtgatgtagaaatgttcttcaatcctaagataaacggttgcctctaaaaaaaaaaaaaaaaaa

SEQ ID NO: 388227 - DNA, 578 bp, Oryza sativa
aaagatgaaagccatgccccctgcgggccccgatcccgagttcgagccacgcggccgtttcgctttatcacaagataggagtatccgccgttctcagtttgataagttcaacgtaatcataacgtcatatgatcttatacgcacggatattgattctcttgagaatgtcttttggaactattgtgtgctggatgaggggcacataatcaagaactcaagatctaaaataacatctgctgtgaaacaattgaaagcacaacaccgtcttatcctcagcggtactccaattcagaataatgtattggagctctggtctctatttgactttcttatgcctggatttcttgggacagaaaaacagttccaagctacatatggaaaaccattgctagcagcaaaagatccaaaatgttcagcaaaggatgctgaagctggcattcttgctatggaggcactgcataaacaggtcatgccgtttctacttagaagaacaaggatgaagttttatctgatcttcctgagaagatatccaggatagatattgccatctcagtctattgcagctcagactttatgac

SEQ ID NO: 388228 - DNA, 716 bp, Oryza sativa
  unsure (1)..(716): unsure at all n locations
cccagtcacgacgtgaaacgacgccagtgtcccgcgtaatacgactcactatagggcgaattgggtaccggcccccccctcgaggtcgacccacgggtccgcccaccgtccgcccacgcgtccgcgcgtggtaggaccaacaccaaaaatcgctctctttcttttttgtctcttttgtttgtcaactacatccgtggttgacatttttgcttcaatctcaggtcgttgcaagtattggtataataatattgggcaccataagcgctgctcttggaacatattcgtcggtactcagaattgtggagaactactaattacgaaacctagctcgcgtgcagtgcagttcccagcaggtgaggccacaggcatgtcatatctattactcaccccgcttacggttacggcgctcaaaaatggtcaaatatcgtgtgtttatcagaattttgctagaattaccgagttcactgtaattattcgacccaaccatgtaatgcatgtacctgcatagctgcttgcttctcagttccttgaagtggaatatcttcatcacttgcttataccgtgtttctgtcaatcactgttgttaggtctatccagcatgttacttaaaccgcctttagcaattatatgtactcaattaattatagatcgagattgctggatattgagtgttgcaacttgcaacccttgtttccaagcanaaaaaaataaaaaaa

SEQ ID NO: 388229 - DNA, 374 bp, Oryza sativa
ccacgcgtccgatcaaagtgtctcaggaacctgagagtccgccctcggagaagtctggtcaccaatctcaataagttctttgccttgcaaatttagttagtataagtcttccgtggaatcaaaagctgcttagtttggcctgccctgggttgttgctgaggaaagcagcagagtggtaagaaaaataagcaggccatttttttttgtgttgttgtagcatgtatattttgacttccccttgagaattgtctttagttctttgcttgagaatatctgtagctgtctgttgttccatcccatagatatgaaactgcctttttggtaattacaattttgtggaaattccggttccccaaaaaaaaaaaaccccaaaa

SEQ ID NO: 388230 - DNA, 730 bp, Oryza sativa
ccacgcgtccgcccacgcgtccgttcatcacttccaaaaaagaaaaaaaaaactcgttttcttttcttctcttctcttctcttgttgcggcgaagggggagaggaaggtcgaggtcgacgagatgggcggcggcaatgggcagaagtcgaagatggcgagggagaggaacatggagaagaacaagggcgccaaggggagccagcttgaggccaacaagaaggccatgaacatccagtgcaagatatgcatgcagactttcatctgcaccacctctgagaccaagtgcaaagagcatgctgaggcgaagcatccgaagagcgacctcaccgcgtgcttccctcacctcaagaaataatggcggtggcatctctctgctcaatcagaagagaaaaagagaagctgccataatccactagtatcatcttgtatgcaatgactggttgccctatgtatgggtctaaactttggtcagctgctgctgcttctttggttgtgtgcctcatctaaatatgtaatgctctatcaacctcttgtgcaacgatattaatcttgtgtggatttgctgcctgtgttcagtcaatatgttatgttgcaacatcactcttcactaatttccggtgtctcctgtggtaaaaaaaaaaaaataattaaatatttaaaattttaataaaataaacattttactcgtattattataaatattctcaaaatatcaaatataaaattaaa

SEQ ID NO: 388231 - DNA, 547 bp, Oryza sativa
  unsure (1)..(547): unsure at all n locations
ggccggaccggccggaccgacccagcgcgcattttctttaagcaaaaaaacactcggaggcccaggagcgaatcgcttctcctgctgcggcgaagggggagaggaaggccgaggtcgccgagatgggcggcggcaatgggcagaagtcgaagatggcgagggagaggaacatggagaggaacaagggcgccaaggggagccagcttgaggccaacaagaaggccatgaacatccagtgcaagatatgcatgcagactttcatctgccaccacctctgagaccaagtgcaaagagcatgctgaggcgaagcatccgaagagcgacctcaccgcgtgcttccctcacctcaaggaaataatggcggtggcatctctctgctcaatcagagaaaaaagaaagtgcataatcnctagatcatcttgatgccaatnctggttgcctatgatgggctaactttggcactgctctcttctttggttgtgtnctcactaatatgaatctctatcacctctttcacgatattatcttgtgtgnattctgctggtca

SEQ ID NO: 388232 - DNA, 507 bp, Oryza sativa
  unsure (1)..(507): unsure at all n locations
ccacgcgtccgcccacgcgtccgccacgcgtccgcgcaaaacagagcagaccaagagcaaggagacgacgacgacgacgacgatgcaatccctcctctcctcctcggtgctcgccaacccatgcaccaccggctccccgctcttcccgccgaccgctgctaagctcgccgccgctgcctcggtcccggtggccgcggcggcgaggagtggcgccattgctgccgtgtcgaggagatcggccagtggcggccggtgcgtggtggcggctgcgtcgtcgtcgtccccggcggtgaccacggcggaggccggcgaggtgcccgcgacgatgaacgcgtgggcgtacgacgattacggggacggcagcgtgctcaagctcaacgacgccgcggcggtgccggacatcgccgacgaccaggtgctggtgcgcgtcgccgncgccgcgctcaaccccgtcgacgccaagcgccgcgccggcaagttcaaggccaccgactcccctcttccgac

SEQ ID NO: 388233 - DNA, 950 bp, Oryza sativa
ccccaatcttgcccttcctcctcctccgatcgatccaggccccgcccctccccgcccctcgccgcgcgcgcgaaggagagagagagagagagggagagagggagggagatcgcctcgccgccgcggcgtgggatccggaggtggtgtagcgaggatgtcgtctgattcgtcgtcgtgggcgcgcgcgctcgtgcagaccgcgccctacaccttctccgccatcggcatagccgtctccatcggcgtctccgtcctcggcgccgcctgggggatcttcatcacggggagcagcctcatcggggccgccatcaaggcccccaggatcacctccaagaacctcatcagtgtcatcttctgtgaggctgttgcaatttatggtgttatcgtggcaatcatcctccaaactaagcttgaaagtgtaccaactgctctagtgcatcatccagagtctctccgggctggctatgcaatctttgcgtctggtcttattgttggctttgctaatcttgtttgcggggtttgtgtgggaataattggaagcagctgtgcattgtctgatgctcagaattcatcactctttgtaaagatcttggtgattgagatcttcggcagcgccttgggtctgtttggagtgattgtgggcataatcatgtcatctcaagcaacatggcctgcaaaagcctagttctattcatatggcaatctgtaaattatttcggggggacctatcagaagaatatctggtcccagttgtttttatttctttttttttgtttgtgcatttttggcaaatcacgtatattgatgcttgatgcatctgacggtagagatactggtcctactgtaaagactacataactgctgcgtatcttgtaggtgctattgcttttgcagagtgtggtctgcgtattgaataaaaccattgaactcaggaataaaatacttcaaac

SEQ ID NO: 388234 - DNA, 940 bp, Oryza sativa
  unsure (1)..(940): unsure at all n locations
acttgagttagatgctaccccaattgnccctgctctaaagagtttctttgatgatgctctgaactcgacaggaagtgagctaaacttcaaaaccatagttgatggcttacgcgctgttctctaccagtacccatttaatgtaccggcatactacgcattgatactgcgatcgctcactgtactggaaggtttagcactctatgctgatcccaattttaaggtgctcgctgcctcgtacccttactttgcgaaaaggctactcactgatcccaatccatatctcagagatgctttaattgagctactattcaaggatggaaaattcagatggaataggcttgaaaatcttcttgttcaagggagccaagatagagagtttgcagcaaaagatgctttgcaaccagttctaaagcttctacttggtcctgatggggaggaattgcgagtcctagttgtgaaagaagcggttcgtgtcacagaagccatcacttttggaacgctgattgattcgtataatgcagctccagaatttcttaaaccattaatatccagtggtaatccagccggaccgttcaagataagcgacactgaaagggaacaaatgattgagctgcgggacagggttttcagaatatggggccttctgagatcctcggatggctttgacccaaccatcttgcaaccaattgtgcaggtgctacaagagccagaggcccgcgttcttggctcccgggttgcaggaggtgttacgcagcgcctcgcggcccccctgttgcagcagctgctgagaactccacctgctccaggatctccttagcagataagacatgtaaattcacacggtactttccacaggaaagagaaaaggaaatgtaattcggaaatcaagtataaagttgatttcttcattcatgccggatnnnnnnnnnnnnnnnnnnnn

SEQ ID NO: 388235 - DNA, 795 bp, Oryza sativa
  unsure (1)..(795): unsure at all n locations
ccgagttccaggcacgacccacgcgtacgcatgaagtgctcgagcaaagaaggagagagcttggtgagctgcagagatggccctctacgagatggcgtataccgccaccagtttgaaagtacccgtgttattgggaataggcaatttctaaaggctagagatctctttgattcagcttctgaagaaatacagggcaaaattgactataggcacacttatttagatttctcaaaacttgaagttaaagtttctacaagtgcaggcggtcagcagaccgtgaaaacatgcccagcagcaatgggctttgcttttgctgctggaaccacagatggccctggagcttttgatttcagacaaggagatgtcaagggaaaccctttctggaagttagtaaggaacttgttaaagacaccagggaaggaccaagttgaatgtcattctccaaaaccaatattgctagacactggtgaaatgaaggaaccatatgattgggcgcctgcgatacttccagttcaaatgattagaattggtcagctggttatcttgtgtgttcctggagaattcacaacaatggctggcaggcgtctacgtgatgctgtgaaaactgttcttacaagtggaaacagtgaaattgtaaaaatattatgttgtctttgcgggctacaaacagtactctagtcatacaacttntgagataccaatcaagattgagagctcacgtgatgtccacactgtgctatatcagattcaaactgtatgcatatgaacaaagtcacaattcactctgttgtgcag

SEQ ID NO: 388236 - DNA, 608 bp, Oryza sativa
ccacgcgtccggtcgccgcgggcggtggcgatcaagaaggcgctcgtcttctacgccgggaagccgcccaagggcgtcaagaccaactggatcatgcacgagtaccgcctcgccgacgtcgaccgctccgccgccgcccgcaggctctccaagtcctcccacaacgccctcaggttggatgattgggtgttgtgccgaatctacaacaagaagggagtgatcgagaggtacgacacggtggacgccggcgaggacgtgaagccggcggcggcggcggcggcggcgaagggtggtcgcatcggcggcggcggcggcgcggcggcgatgaaggtggagctctccgactatgggttctacgaccaggagccggagtcggagatgctgtgcttcgaccggtcggggtcggcggaccgcgactcgatgccgcggctgcacaccgactccagcgggtcggagcacgtgctgtcgccggcgccgtcgccggacgacttccccggcggcggcggcggcgaccacgactacgccgagagccagcccagcggcggacgcagagggaggcccggagtagaccgggccgtcgacggcgacgacggcagcgccagcgacag

SEQ ID NO: 388237 - DNA, 1166 bp, Oryza sativa
ggtaccgaatcccaatttcgacccacacgtaccgctcacgcttcctgccacgcgtccggcaaaaggagcgcatgagggctttggaggagatactctatgcacttgttgtccagaagtttgttgaagctggtgtggctttggttccagctctttcccactctatcagttcttctggaagagttgatcagtgggcagaatctgtggaagggaaacttgagaagatgcattcacaggaggcatatgaaatgatcgagaaccacctcgctctcatcctggggcagcggcaagctgatgccactgttgcggccataagtaaactccgagttggtcaggtgtatgctgcttctgtgatgtatggttacttccttaagagagtcgatcagagatttcagctcgagaagtcatatgaagaccctcccttggggatcagaagaggaagacaagctcaaccaagttatgacaacggactcaaggccctcaccccagacttctacttcacatccagagatggcatcatggacttcccctaacttcagtgcaggcggacctagccaatctgttaagccatgccgtcttagatcgtatgtcatgtcatttgattcagagaccctacaaagttacgcaacaatcaggtccaaggaggcatttggcatcatcgagaagcacactgaggcactatttcggtaaaccagagattgtaatcacacctgaaggcacagtcgattcttccaaggatgaacatgtcaggataagtttcgcagggttgagaaggctgatcttagaggctgttacttttggatccttcctttgggatgttgagagctttgtggacaccaggtaccattttgtggccaactagttgatcctacaaagtttcatcccagatagtggagattagtgtgtatatttggtccgaagtgtatgggtttcaatgaagactctttgcaaaacgaatttctcctggctctatgcagatcgcagagatctatgatttttacacagttttcgggcatatagcttcaatgtaaaatggatatttttttagcctaatgtgcagctgttagttcctggtaacacttgggcttgcttgggccttgggtgatgtataatgttttatgacttgatgtcctggaaattgaatgaggaatcctagctagctctagttc

SEQ ID NO: 388238 - DNA, 636 bp, Oryza sativa
  unsure (1)..(636): unsure at all n locations
ccacgcgatcgatcggcgtgtagaggtgatcggaggcgagcgcaccggagcacaccaccgaggcggcggcggcggcggcgagggagggagaggaagatggggaagacgccggtgcggatgaaggcggtggtgtacgcgctgtcgccgttccagcagaaggtgatgccggggctgtggaaggacatcaccaccaagatccaccacaaggtctccgagaactggatctccgccacgctcctcctcgcccccatcgtcggcacctacgagtacgcaatgtactacaaggagcaggagaagctatcccacagatactaaatgtgaagcatgcagagattgccacaacttttggaatttttatgatctaaaattatccaagaatgatataacatttttggttcagttatagttgtccatgtactgttttccatcgttccatgcatctccagtatgtatgacttgcaaacttatttttgcggcttgctacatatggtggcattccctgtcactgaagcaattgtttaataaagcaaattaactgtttaaaaaaaaaaaaaaacggggggccgcancgggtggaggtccaagttttngtcctttagggggggtaattgcgggttgggaatatggccaagtgtt

SEQ ID NO: 388239 - DNA, 404 bp, Oryza sativa
  unsure (1)..(404): unsure at all n locations
ccacgcgtccgcggacgcgtgggtccacaccacacagcccccctttcccctcccctccacagccgtcgaaaccctagccccaaggttcccccacgcctcgcgctcgccgtcgccatgggcaagaagcggaagctcgattccaaatcccccgccgccgctaggtccgcagccgccagggccgcagcagccgcagccgccgccgccgccgccgccgccgtcgccgagccctcctcccagcccgaagccctagccgaggacccggccccctcgtcgcagcccctgggcctatccagcgagggcgcgggggagagggatgatgtcccgtgaggctggcggtggcgaggaagaggagggtggaggaggtcgaggtggaannaaaagaagtttggcgacnaggacgagga

SEQ ID NO: 388240 - DNA, 731 bp, Oryza sativa
  unsure (1)..(731): unsure at all n locations
tggnatgcagcaatgttgcgccgtttggagaaacgtattctggttcccttcccagagcaagaagctagacatgccatgtttgaagagctcttgccatctgttcctggcacaatgaatatcccatatgatgttcttgtggagaaaactgaaggatattcaggctctgatatacgccttgtgtgcaaggaggcggcaatgcaaccccttagaaggttaatgtcggttcttgaaggaaggcaagaagaagtgcctgaggatgagttgcctgaagttggtccagtaacgacagaagacattgagcttgcactaaggaatacacggccatctgctcatcttcatgtacatagatacgaaaaattcaatcaagactatggcagtcatgtcctcagctaaaggtgagttgcaaaagcaaaggttatttgcacaacatagattgctgaatttcctccttgaagcttgaactgttccctagtattgtggaaatcctcctgacggaatcttgccgataagacttttcatttgcacctagtatggttgatagaatgctgaattaccgctgatgtatttacaactaatgagcattctctttacacaatatttgttcctgtaccatgtatattatcatttgtttgacgaataataagctatttgggtaatccttgccctttcggaatatgagagaaacattgtacatttgtactgggtnccnccnnnnnnnnnnnnnnnnnnnn

SEQ ID NO: 388241 - DNA, 814 bp, Oryza sativa
  unsure (1)..(814): unsure at all n locations
ccacgcgtccggaccgcctcccctcgccgggccagccgcctggtccctcgcgcggacgccagcgcagaagcgggagaaccggagcccgccgctgaggctgaggctgaggctgttgctgcctcgactgacgctgaggtggaggagggtgaggcggaggcggctgtcgcggtggcggaggaagagcaggaggaagaagatgagcctccgccgccgagcaagcccccggttaagttcggggagatcattgggattctgaacaaacagttcattgaggaggctgaaaaggtgaagactttaccagatcttaggcctggtgacatcattgagcttagaatgcaacggcccaacaagaggagattgtcgctctttaagggcataattatagcaaaacacaaatctggtgttcacaccacaatccgtgtcagaaggattattgctggtgtcggagttgagattaccttccctatatattcaccccaggatcaaggaaattaaagtaatcaggcacaagaaagtgagaagagcaaagttatattatttgaagcacaagcttccccgcttttcaactttcaagtaaaaattagatatgctggcagaagagcttctctcactagcattgttactttctctagcaaatgcttttttatttttttgttcaaacctatgcttttcactgtaatcactaaatttcaaatgtgtaatatctacaccttttctgtttggcatatatttttgtctttctgtggaaatgtactttcttcgctttgtataaagttcctactagcattttgttnnnnnnnnnnnnnnnnnnnnn

SEQ ID NO: 388242 - DNA, 490 bp, Oryza sativa
aaaagaaggaaatattaggtcattgctttctacactacaatatgttctatggcctgagagtggatggaaaccagtcccccttgttgatataattgaaggagcagctgttaagaaggcctatcagaaggcattgttatgccttcatccagataagttgcaacaacgaggagctgctatgcatcagaagtatatagcagaaaaggtttttgacattctacaggaggcatggaaagaattcaatacagttacttttggatagtattccttagatcctatcgttggtttggctctatcattcagatatggtgcctgttgttgtccactttaatgtacggatggtaatgcccaggatcacattggatatggacatggccatgggaggccatgatatgcatttttttttgaggtattgcagtcctcttgcagtctggtgaattgcactgtatgaatttgcttgcctaaatgtaagtacttagaaaaatagcagttc

SEQ ID NO: 388243 - DNA, 1108 bp, Oryza sativa
ccacgcgtccgctcggccctcccggcgttgccgcccacacgcagcacgcgccggcgactcggtgctgcccagatggatctcccagggcggtagatttcatttgggagctgaactcatcaaatctgcacatgccaacagcagcagggaatcggttctgaaagcagttgggcatcatcccactgccatactctactgctctctcaaggcttcttcaccctctatttttctttttctgattaagatacagattttacctagatttttatcaattcgtgtttttaaactgttgaactgtatatttcgaacgaaaaaaatttatatagaagctttaattataagataaatctatttttcaattttaaaataattaaaccttaattagtgagatgttaatgattttctcgttttacctgtccgaacttaatcttttatcttaaactcgaatggggccagtactcaatactgttatgcatggaggattgtttgttatctcaatttatttcagggacttttgaatcttttgtgcagcttgactgaaattttgttgacacaaattcaccttaaagttgacagtgttgcacaccattaaccatttgatttttcatgtaggtgatgccagtgttcacgtttgcaaaccgaagacggaggcggcgccaggcacaagatggcggaggaggtgaacaaatctatgatcatcaggaaaatcaatcaaatttatgttacctaatctatccaacaagtgaacaaattggaggcagctaagactacataagaaattgaaaagcacggccatactcttttgactaagtttcgaagtcaggcttgcaaggatagactaaagctcttatatcagtctttcttctcttagcaaattctcattgctagatctcagatcatcttgcaaacctcttatatcatttatatcattttccatatgcaaatctgtggttcatctctaaattgtaatgactgggtaagctctctggtcctcccatgtccttgacaataacagtaatatccttcaacttttcaacttatcttcattctcacaggtaagtcttgtaattcatcttctatttgtgctagcccttgatgttaagtctgcatt

SEQ ID NO: 388244 - DNA, 683 bp, Oryza sativa
  unsure (1)..(683): unsure at all n locations
ccacgcgtccggaaatcttggtatatttgccatggagcgggaatggtgtgctgtgaccaaactgctgttagatttcttatttactggactcgctgatatcgggtcccagtctccaaaagagggggtgttgtcagaaaatctgcttcatgctgccgtgcggatgaaatctgccccaaaggttagggttctgctgggatacaagcccaatgaaagccctcagagaactgcagagacattcctattctgacctgatgctctaggcccttcccaatttacccccctccatatagcagctgccacacatgatgcagaggatgtattggatgcacttactaatgatcctggactggttgggatcaacacgtggagaaacgcgcgagacggcgcaggcttcaccccagaagactacgctcgccagaggggcaacgatgcttacctgaatatggtcgagaagaagatcaataagcatcttggcaaaggccatgttgtcctcggcgtccctagcagcatacaccctgtaataaccgatggtgtgaagcctggtgaagtcagcctggagatcggcatgaccgtgccgncgccagcaccgagctgcaacgcctgcagccgtcaggccctgatgtaccccaactcgacggcgaggacctttctgtacaggccagcgatgctgaccgtgatgggca

SEQ ID NO: 388245 - DNA, 546 bp, Oryza sativa
  unsure (1)..(546): unsure at all n locations
ctttcacggtcaagtgcaaatagtatgtcagatttccaagagattgaagaggaagaaataaataaaggcgatcagcatccagtcctgtcagaaatctttgattcacattttgttagtttcctcagtaagcttgagactgatattagggacaatataatggatatatttagtcgaacaaagaccgcaactgcaattatacctgctgagttggagcagaagaatggggaagttgatggagaatacatcaagcggctaaagtcatttgtagagaaacaatgcaatgaaatgcaggacttgctaggtcggaatgcaatgctggcagaagagttagtgagaactggtggtggcaactccgctgattccttacagaaaccaagcagtggccgagaaagggtccaaatcgaatccctcagacaagaactcgaaggagcaacccgacgcatagaggcactcagaagctgaacatacccagatcgaggccgagctagcaaccaacggaacctcgcagcgaactggaatctgntctcaagagcttttcagatggtt

SEQ ID NO: 388246 - DNA, 748 bp, Oryza sativa
  unsure (1)..(748): unsure at all n locations
gaaaaatctccgcacgcaacgccaatccttccttccccttcttctcgcgagagagagagagagagagagagagagagagagagtagttcagttcccattctcgcctgctttcctcactcgcgatcgcgactccccccctcctcgtcgccggaagatggagcctgatcagagtggtgctgagcagacttctccacgtgggaatgattgggaagttgtccaacttactgcatcaacatatgcatctgcacctggaccaagaatgtctgagccttctgatgaggctgaagtcaagggatatgacacaaaaggggatgattcagctgcagcactgttgatgtctggtcatttctcggtttcaccgagtgaggttgagagtctccttaggggcactgacggcaaagagcaccagaaggagctttctggccaagatgcagtttctgccgaaggtgatgacgaaaaattccaggacacctgtgagcataaactgaaggatgaccttcactggattccatcctttgacaaagggaaaaacctttccctggttgacatggagtttgataaagcattccaagggatgggtttggttggtgaggaaccacttgggttntcatcatctcgttacaatccaattgatgntaacaatgagaagaaaactgaggagccaactgtgcaaaatgtgaaccgtgtcattgattcatccaaggttgttgcatctagtgaacaaaacaaacctgatgattctgaattt

SEQ ID NO: 388247 - DNA, 457 bp, Oryza sativa
ggcaggaggagggagacacctcgaggaaaccacagcacccaaagaacaagaaaggcgataccccttctcccaccaccaccgtttccgtccatctccatcctcaccgccggcgacgctcacctccgacgaccgatcggcgacctgcttcagccatggcaatggctttacaagatggcgacggaggggatgaacgtgaaggaggagtgccagaggtggttcatggagatgaagtggaagaaggtgcaccggttcgtggtgtacaagatcgacgagcggtcgcgcgccgtgctggtggacaaggtgggcggccccggcgaagggtacgaggagctcgtcgccgcgctgcccaccgacgactgccgctacgccgctcttcgacttcgacttcgtcaccgtcgacaactgccagaagagcaagatctttttcttcgcctggtcacccaccgatctaggataa

SEQ ID NO: 388248 - DNA, 514 bp, Oryza sativa
ccacgcgtccgggacagcttgatctgatctgtgcgaccaagggaacattggattggattcagaaactcaagtgggatggtctgaagaacttcacaaactcacgcagagtgccgctctactgcagtggtggtgaagcagctggcacccaagccttcctcaaatcttacaagaatctcaaattctactggatactgggagctggccacatggtaccaatagacaacccttgccctgcattgaagatgcttggtgacattacacaatctcctgctcagtagaaaagaggaggatgccactacatgctgacaccaactgaagattctttttctccttaatttctactttcacctttttacacagaaaagaaaaaggatatcatagcattgatgagataagaaaagatagcagagtgatataaatagagagaaagagatctgtttcactttatattatagtactggtgcagctggtttttcggtgacagggtactatatacaatcaaatttattgcaac

SEQ ID NO: 388249 - DNA, 515 bp, Oryza sativa
gctgcgtgcgtatcatctaggtgatcgaatttatcctgctgaattgccaattagatatgctggatattccacctgcttccggaaagaagctggttcacatggaagggacacggctggtatcttcagagtccaccaattcgaaaagattgagcaattctgtgttacaagtccaaatgacaatgaatcctgggagatgcatgaagaaatgataaaaaattcagaagatttctacaaggagattggcctaccgtaccaacttgtctccattgtgtctggtgctcttaatgatgctgcagctaagaagtatgatttagaagcatggttccctgcatcaaaaacctatagggaattagtgtcctgctcaaattgcacagattttcaagcaaggagacttggtataggttatggccagaaaaagaatgatgagcaatccaaagcaatctgttcatatgttgaactcaacattgactggcactgttaggaccctgtgctgtattttggagaactttccgagg

SEQ ID NO: 388250 - DNA, 674 bp, Oryza sativa
  unsure (1)..(674): unsure at all n locations
ggganattaaangggangttgccngntaaccnagttgattaccntataaaggacaaaggggttcnccgggngngccgttaagaataggatccccgggtgcnggattggcaggggggngggaaattgaaggagcttggattgcccgggttcagcaagacggtggcgacggccctgcaggcgaacgcgcggcggcgggaaggtgtctcctgctcgggatgggcacaacgagatgacggtgccgctgacgtcggcggcgatcagggaggtggacgtggtggggatattccggtacaaggacacgtggccgctctgcatcgagttcctccgcagcggcaagatcgacgtgaagccgctcatcacccaccgattcgggttctcgcaggaggacgtggaggaggcgttcgaggtcagcgcccgtggccgcgacgccatcaaggtcatgttcaacctctagatcgatccatccatcgatcgatcgacagcaaaatatgtgacgggtttggaacgtatgtcgatcggacaaaaaaatgtgtgcttgctttgctggttgccgtgtctgtctgtctctacatgaataaaaggcggcaacgttctgtcctcaaaaactaagaaaaaaaaactcgagggggggcccggtacccaattcgccctatagtgagtcgtattacaattnc

SEQ ID NO: 388251 - DNA, 685 bp, Oryza sativa
  unsure (1)..(685): unsure at all n locations
gttgggccccgggttnattngaanggaaaaacccttttcgcgccaaaaccttggccaaacccccggggggtttcgcgcgccggagaattnggggggaggggaacgatccgggggcgtgggggggatttgaagngagctgggatgcccgggttcagcaagacgggggggacggcctccagggaacgcgcggcggcgggaagtttnctttgtcgggatggggcaacaacgagatgacggtgccgctgacttcggcggcgatcagggaggtggacgtggtggggatattccggtacaaggacacgtggccgctctgcatcgagttcctccgcagcggcaagatcgacgtgaagccgctcatcacccaccgattcgggttctcgcaggaggacgtggaggaggcgttcgaggtcagcgcccgtggccgcgacgccatcaaggtcatgttcaacctctagatcgatccatccatcgatcgatcgacagcaaaatatgtgaccggtttggaacgtatgtcgatcggacaaaaaaatgtgtgcttgctttgctggttgccgtgtctgtctgtctctacatgaataaaaggcggcaacgttctgtcctcaaaaaaaaaaaaaaaaaaactcgagggggggcccggtacccaattcgccctatagtgagtcgtattacaattcnnnnnnncntc

SEQ ID NO: 388252 - DNA, 866 bp, Oryza sativa
ttcgttgctccaacctttgcgaggacatgaagttcttcgccacccctcccgtccacggatccctcgccaaccagatcgtgcaccctggtgatctgtgcttcaagctgccggagaacgtgagcctggaggaaggcgccatgtgcgagccgctgagcgtgggcgtgcacgcgtgccgccgcgccgacgtcgggccggagacggcggtgctgatcatgggcgcggggccgatcggcctggtcaccctgctggcggcgcgcgcgttcggcgcgacgcgcgtccgcccccgcgtccgggacgaacaccgcctctccgtggcccgatccctcggcgccgacgccgccgtgagggtgtcggcgcgcgcggaggacgtcggcgaggaggtggaacggatcagggcggcgatgggcggggacatcgacgtgagcctggactgcgccgggttcagcaagacggtggcgacggcgctggaggccacgcgcggcggcgggaaggtgtgcctcgtccggtatggggcacaccgagatgacggcgccgctgacctcggcggcgatcagggaggtggacgtggcggggatattccggtacaaggacacgtggccgctctgcatcgagctcctccgcagcggccagatcgacgtgacgccgctcatcacccaccgattcgggttctcgcaggaggacgtggaggaggcgttcgaggtcagcgcccgtggtcgcgacgccatcaaggtcatgttcaacctgtagatcgatccatccatcgatcgatcgacagcagaatatgtgacgggtttggaacgtatgtcgatcgtacaacacaatgtgagcttgctctgctggttgccgtgtctgcctgtccttacatg

SEQ ID NO: 388253 - DNA, 763 bp, Oryza sativa
ccacgcgtccgctacaaggatcccattactgaatttctggaatgcttgtttgttaactatgattttgatggcgcacaacagaaactcatagagtgtgagcaggtcatattgaatgatcctttccttggaaagcgcattgaggaagggaattttgtcactgttcctttgagagatgaattccttgaaaatgctcgtctgtttatctttgaaacttactgccgtattcatcggtgcattgatattggcatgctttctcagaagctgaacatgagctacgatgaggcagaattgtggattatgaacttagttaggaattcaaagctcgacgccaagattgattcagtgtctggaactcttatcatgacgaccaatcatgttaacatccatgagcaggttatcgaaagcttaaagaatcttaacatgcggactttcctgctagcaaagaacattgtggagccggctcaagcagcacaacaggcagctcggtgagattgacagagaagaccacagttttgaggcgcccggaattatttaagtagagacaatcctctaaacttttggagttttgttgtttagcattgactccgttatcagtacctaagatcatctaggaggtggtttctcgttcgctacagcatatgccgacgttttctttctattttgtacttggaatcctgtggctgaagttaatcctttcgttggtactacaatcaagtattacctgattgttatggtgtttcgtgttgaaaaaaaaaaaaaaaaa

SEQ ID NO: 388254 - DNA, 658 bp, Oryza sativa
  unsure (1)..(658): unsure at all n locations
aattccttgaaaatgctcgtctgtttatctttgaaacttactgccgtattcatcggtccattgatattggcatgctctctcagaaactgaacatgcgctatgatgaaggggagttgtggataatgaacttagttagaaattcaaagctcgatgccaagattgattcagtgtctggaactcttatcatgacgaccaatcatgttaacatccacgagcagtttatcgaaagcttgaagaatcttaacatgcggacttccatgctagcaaagaacattgtggagccagctcaagcaatgcaacaggcaactcggtgatattgacagagaacatcaattttgaggcgcccagaactcgtgaagttagacaaactattaaacttttagcaccgacgtcgcgttattagtacttgcgattcctctataaagaaaaaggattcaacaactagtgtacagaaatatttctaattacgtatcaaagctactaatacagcaatatcccggggcaaaaggaaacccaggaggtgtgttctcgttcgctgcagcatatgctgaagtttttgttattttgtacttggaatcctgtggctgaactgctgaagttaatcctttcttttgtnnnnnnnnnnnnnnnnnnnnnnnnnnnnnnnnnnnnnnnnnnn

SEQ ID NO: 388255 - DNA, 407 bp, Oryza sativa
gcgcccctcggctagatttgaataaggagaatataccaccttcatatgctgtccaacagaaatcaaagaaaccaacttcatctgaacccagtctacaaaacagaaaaagacagtttcatacaccactccatgaagggctggaggctggattagatacaaaagctatcttgaaaagtggtatgaaagttggcctaatatctccaaaaagtggaaaaatggttgctctaggtaccattcagaagaccgacaaaaacgctatttctgttgatggccaggcactaaatgattgtgttgacatccttgttaacattgtattcaatcagcacaccataatacctcgtgcatatggaatgatcaagcaagttaggaagtgctcaagctcgatgcattccatggccacgtgacaa

SEQ ID NO: 388256 - DNA, 610 bp, Oryza sativa
ccacgcgtccgccacgcgtccggaggctctctctctagctactacctcaccatggccgtctcctcttctacctctacctgctccagcttctctctcctcctcctcctcctgctcctcgccgcggcgccatggcggtcaggcgaggcggcggcggcggcggcgagagctctcaacttcacaaggcaggatttccccggggagttcgtcttcggcgccggcacgtcggcataccagtatgagggggctaccgatgaagatggaaggagcccaagcatctgggacactttcactcatgcagggaagatgccggacaagagcaccggcgacatgggcgccggcggctaccacaaatacaaggaggacgtcaagttaatgagtgatactagcctggaggcataccggttctccatttcttggtctaggcttattccaagaggaagaggacccgtcaatccgaagggactcgagtactacaatagcctgatagatgagctagtcgaacgggggatcgagatacatgtgactgtctaccacctggattgccctcaaattcttgaagatgagtaccatggctggctcaaccaagggtcattgacgatttcacggtgta

SEQ ID NO: 388257 - DNA, 521 bp, Oryza sativa
cgatgaggctcacgacgaaatcgaaaagccgctgcttagactgaacacaccacacacgagcacgagcacggagaagtcgagagagagagaagagagatggtcctccccgtcctcgcgcccctcgccggcgccaccgccgtcgccttcctcctcttcaagttcgccaccgtcgatggggatttcacgctggtctcgcgcggggcgccgcggcgggagaaggtggacgggaaggttgtgtggatcactggagccagccgcgggataggggaagttcttgcaatgcaatttgctagtttaggagcaaagctgatactatctgctcggaacaaggaggagcttgaagagagtgaaacataacatcatcaacaagcatccaaattagcagagttgaagtattacccatggatttatcatcgggtgaagagtctctgaaagagcatgtacatgaagcagagtcactcttctccatgcaggcgttgactatatgatccataatgcagcatttgagcgttcaaaaagga

SEQ ID NO: 388258 - DNA, 766 bp, Oryza sativa
tattctcttgtgctctgaccaggcggaggccaggggtatgggggccgtgctctggagcagaaccttcgcctctccactctcctcctcaggaaagcagcatccaccacaaaacaacaagtgcacctgttcctcacctcccacccgagataaattcagtcgactcactactaggaccaccattttccaagtctctaactattccaggagcacttcaatggaaagatttcaactttctgcccgattccaccagcctgtggttgactcttctacaaactacctcaccaggtggttttacaatgcaaacctcaagaggcggcggattgaatgctttctcacttcggatccaataaacactggttggctaaaaccaagaagatgggacaacttcactagtttggacactgcttgtgtccagccagactacaaaattccggtcagaacacgcgccgactgtaaagccgagcagtatgagataacgggatcaccgttgagcccttctgatgttcccgccgaggcagttctcattggagatacaaatgagatttctccctggtggcagcagttccctaagcgatggacagtcgttctcttgtgcttcttttccttccttctgtgcaacatggaccgtgttaatatgagtattgcgatccttccaatgtcatcagaattcggctggagtccagcaactgtaggcctaatccagtcctccttcttttggggttaccttcttactcagatcccttggaggatatgggccgacaggttt

SEQ ID NO: 388259 - DNA, 671 bp, Oryza sativa
aaaaaatatcagcgtgattgctgtatgccccaagggaatgggtccatccgttcggaggttatacgtacaaggcaaagaaattaatggtgctggtatcaactctagttttgctgttcaccaggatgttgatggaagggcaactgatgttgctctaggatggtcagttgcgctgggatctcccttcacatttgctactaccttagaacaggagtacaagagcgatatctttggggagcgaggcattcttcttggagctgttcatggcatcgtggaggctctgtttaggagatacacagagcaaggaatggatgaagaaatggcatacaaaaacaccgtagagggcatcactggaattatctcgaaaactatctcaaagaagggaatgcttgaagtgtacaactccttgacagaggaggggaagaaggaattcaacaaggcctacagtgcatcattctatccttgcatggacatactctatgagtgctacgaagatgttgcctctggaagtgaaatcccggagtgttgtgttggctggacggagattttacgagaaggaaggccttcctgctttccctatgggcaacatcgaccaaactcgtatgtggaaggttggtgaaaaggtgcggtcaacccgaccagaaaacgatctttggccccctgcatcccttcac

SEQ ID NO: 388260 - DNA, 954 bp, Oryza sativa
  unsure (1)..(954): unsure at all n locations
attcccggtcgaccacgcgtccgtatagctaaccccccaagagacatcgagagcgagatcgccatggccgccgccgccgccaagaacggccgcattgccgtcgccgcgctcctcctggcggcgctggccctgtccgcgcagctcgcgccggccgcggcgtgctcctactgcccgacgccgaagccccctccgccgccgccgccggcgccgtccggcgtcccgtgcccgccgccgccgtacacccccaccccggcgaccccgaccgggaaggggcccggggaacacgctgaagctgctggcgtgcgtggacgcgctgaacgggctggtgcacgcggtggtcggcgccaaggccagcgacacctgctgcccgctgctgtccggcgtcgccgacctcgacgccgcgctctgcctctgcaccgccatcaaggccaaggcgctcggcgtcacctgcgtcctccccgttgccatctccgtgctcgtcaacgagtgcggcaagcacgtcccctccagcttccagtgcccatcataaatcacctcaattatgtatgatcactaattaattaataatcacctactgcatctgatctctgcatgcatgcatggattaattaattaagctatcaaattacatattacctgcataattaataagtatagtttatcacctggctatgctatatacatataaatatatatagtgacatatgtagcatatatacatgagctctgacttgtgtcatggagatgtggaggcatgcatggagccttggattgtgcatttaattgatgtataataatatttgtgtaacatatattttgctgtgtcatgcatatatgcatgtggagttgtggtatttgggttgggagtggtttgggagatttattatgaaataaaagagtgtgtgatatgtatgctatgnnnnnnnnnnnnnnnnnnnnnnnnnnnnnnnnnnn

SEQ ID NO: 388261 - DNA, 590 bp, Oryza sativa
ccacgcgtccgcccacgcgtccgcccacgcgtccgagggcgggggtttccccgagcacctcgtcgtcatggtcaatggcctcgtcgggagcgcggatgactggaaattcgcggcggagcagttcgtgaggcggatgccggaaaaagtgatcgtgcaccgaagccagtgcaattcggctacacaaacatttgacggagttgacctgatgggtgaaaggttggcaaatgaggttttatcagttgtagaacaaagaagaggtgtgaagaagatctcatttgtggcacactctctaggtggccttgttgctagatatgctatagggaggctttatgaaccaaataacaaaactaaatcttcttcggagaagagcagagatgaaggtgagcgcttggagggtttcattgctggcttagaacctatgaattttataaccttgccctcgccgcatcttggttcaagtggaaataaacagattcttccaccagctccctttcttatgtggcctgcctttcctggaaagaagagcttcggaaacggcacatttgcttgttgggagaacaggaaagcatttatgccttacagacaatgga

SEQ ID NO: 388262 - DNA, 343 bp, Oryza sativa
  unsure (1)..(343): unsure at all n locations
caggcggccggtcatgcttggctgcttcgagttctcaattctcgcagtcacagtcgcggagtcggtagcatcggggcgaggacttggaggcgacaatggcgtgctctctcctgccgccgctcgctcccgtttcccctccgcctcgtctcctcctcccctcctcccgctcggctctgctccctcgcggtcctagggttgcgccccgagtccccgtttccccaccgcgcgcgccgacggacaccgctgtgggggcgncggaggcgctccgtggcgcgctcgcgacgncttcctggcgtgcctccgacgtggaggtcgtccgncgtgagcaacctcgcatcttcgt

SEQ ID NO: 388263 - DNA, 1215 bp, Oryza sativa
  unsure (1)..(1215): unsure at all n locations
tcccgacccacgcgtccgcccacgcgtgcgcaccaggcaccaaggcaccaaccaaccgcgcgtcgaagcttctgggccacgccgccacaaaagccgaagcggaaaggaaaagcctccctcgatgcctcctctcctcgcctccacctcctccacgtcccctctcctcctcgcctctcgcctccgcggaggcggcggctgcggctgcggcggcgcccctctcctccaccggacgcgccgcggcttcctcgcgccgagcaccaccaccacccagacgacgaggacgagtttcgcggcgatgagctggctcgggaagctggggctgggcgggctggggggaagcccgcgggcgtcggcggcgtcggcggcgctggcgcagggccccgatgaggaccgcccggcggccgggaacgagttcgcgcagttcggcgccgggtgcttctggggcgtggagctcgcgttccagcgcgtccccggcgtgactcgcaccgaggtgggatacagccaggggaacctccacgacccgacctacgaggacgtctgcaccggcgccacctaccacaacgaggtcgtccgcgtccactacgacgtctccgcctgcaagttcgacgacctcctcgacgtcttctgggcgcgccacgatcccaccacgcccaaccgccagggtaatgatgttgggacccaatacaggtcaggtatctactactacacccctgagcaggagaaggcggcaagagaatctctggagaagcagcagaagcttctgaatcggacgattgtcactgaaattcttcctgcaaagaggttctacagggcagaggagtaccaccagcaataccttgcgaaaggcggtcgcttcgggttcaggcagtctgcggagaagggttgcaacgaccccatccgttgctacgggtgaagggcaagtttgaaccagaacgccacacaagaacagtgcttgaataaggataaataatagccagacaaaaattatgcagcataatactattttgttacctttgtttgtatcaatccatcgattgtaagagatgagctgaacctggaccatgatacttgccgctgattatgtacaaaccaccttagaaaacttgatatagtattatccttttcgatgcgggaagaaaaccactttttctgattgaattcattcaaatggcaatagccagtagcacttcaggnnnnnnnnnnnnnnnnnnnnnn

SEQ ID NO: 388264 - DNA, 540 bp, Oryza sativa
  unsure (1)..(540): unsure at all n locations
ccacgcgtccgcggacgcgtgggcggacgcgtgggcggacgcgtgggcggacgcgtgggcggcgacggcgggcggcgggcgcgcgctacctcctccgcatccctctcgctcctaccttacccctcgccgccactccccctcctcctcctcctctccctggcggcgccacccgcttctctaatgccgtcttctcctcctccccccttccctccgtcctcgatgacgacggatgacggcgaccaccgtggccaagagtagcgaggaggtgcccccggcgagagggcttcctctgtatcttcacccgccgtttccacatggcccagagcgcaaaggagagggggccgggctagggtgcggaggcagggcggcgcacgacgatagggacattgtcttctctcctatactacgtcttatcttgtcagtcgtanggtcttgttcttgatccgagttttttggttcgaaggattttgnattttctttttantttggggttcccgatgtgggtnttgggtcgggggtgctttaatcgatgggacccgc

SEQ ID NO: 388265 - DNA, 532 bp, Oryza sativa
  unsure (1)..(532): unsure at all n locations
ccacgcgtccggtaattaggttctcaaagctatctgttgttggcctcaacgcaatatcaggaggatgcaaggaattggaggttcttgacttgtatggctgcgcaaatttgacactcaggggtatacaacaggctacttctaatatgaagaacctgaaggaactagagaatcccaacttttacatccccaggccctcctcccacatgggtaggtatgggcactggcagttatacgatgaaaggtttcagacaaatgtattccagatataaaaacagcctcaagttcaacgatcacctcaggtgtttgttctctgacatatggcttgtatttattagtactgtgaatgttgtatttgtgttgtgttgtggaaaaataatgacaataataccctgtatagggctgctttactcatcttttccatgtacccataagaaaattggcatgcttcagtaataatttgtaaggtcacctacaatgattcttcaaaatttcttagtatcaaatttcttaaatcaaatannnnnnnnnnnnn

SEQ ID NO: 388266 - DNA, 561 bp, Oryza sativa
ccacgcgtccgcattatcctgtcgggatttggcgagagatgcggagatgagagtgacggaaaaggcgacgagagcggcgatgatctcggcggcgtttgctcgcgcgcgctcgacggaaaaggtgattcaatttgccagttatcaaaaaaaatgtacttcattcaatatatattgacgtgctttgcacgtgaaaaatcaccttttttggagtgcggtggcggctggggatgacctcggctctatcagggggcagcgctggactgcggcggatgtggaagacctcggctccgtcggggtctgcgcttgactgcagcggcggcggatggggaagacctcggctccggcggtcacagcggtggactgcggtgccagcggcggtggaagggcaccactagtacagatccttctatctgtgacgggctctaatatgcttagaaatagcgggccgtcacaaggaagtcatctcaatcgggccgaaaagtgcccgattgagatatggtcgcacagacatgttagatgggcataaaacttaagcccatcacggatgacacctatcagtga

SEQ ID NO: 388267 - DNA, 954 bp, Oryza sativa
  unsure (1)..(954): unsure at all n locations
ttacttgtatctgatagtgtgcgtacatatggagcaatcctggtgtcttgcggccccaaattcagatctgaggagggatcgaggaattggagtaaatataggagcttaggaaccgaccgcccagggatcttgcagcggaatcgtccatggcggcggcgcttcgatttgcggcgaggaaggtcagcggtcgcgcccttcaacaggcgacggctttcgtaccgccgtcgccggcggttagagaggaacaacggcggttgttgccgaggcttatccccggcgccggcggccggatgccgctcctccgctcattcagctccgccggagctgctccaaacaataaaaagcatgatcatttgcctcaatcaaaacatatcgtggatgtggagctggagctgtctcgtatccctgcgagcattaggccacaagtcaagacctggtatgaccggcattttcctcacgcagaacctactgtgaacggggagtctggtatcagcaacaaagaacctgctagccttagggcacaagtcgaggagaagaaaatcgagctgttccatctgctatcgcagctggaatatagtggtgagaactccaacctggaggacgaaaggatactcaggcagcttccgccataccgtgaacttaagcacctagttaatggttacggaataaagctagtcgtgaaacggattgcaatagcttctgttctgagcgccattttcataacggcgatggtgaagatgtgaatccacaaagtttggtagctggaagcaggatgacgctgcaattatcaattcgtataagtctttctagggactcaagtgctagtgttgattcattttgctgtacgctaatttgcctgctactgtgtgagactgaagttttcaaatactgagtggtaactttttaaattctgagttgaaagtttcaattnnnnnnnnnnnnnnnnnnnnnnnn

SEQ ID NO: 388268 - DNA, 686 bp, Oryza sativa
  unsure (1)..(686): unsure at all n locations
ccacgcgtccgctcgaaaagaaaaaaaggggagaaaagaaaaaaaaggcaaccacctgaagcgtccgttgggtccaggaattacgtcgagcacgacgcggcgcccagctgtaccgtctgaccagtaggccccacctccccgccgtcgacatgcacccgccggccgccgccggaggagaccacgccacggcggcgccggcccccgcgaccggcgcagccgagcaacagcgtcggactacgcgcactacccgaggctctcgccggaggacgtggccccgcccccccctccgtcctaccacgctgccgcctcctccgcgccgccctactcgggcaacccctacgtctcctcaaccgccggcggcgtcgcgcccgcctccaagaatacaatggatacggtgaaggatgttctcggcaagaatggggaagaggttttgagaggcgggtcgcaagacggagacccttcaccggcaacttctggcaacacttgaaaactggaccaagcattacagatgcagcaatgggcagggtttcccagatcaccaaagtcatagcagaaggtggatatgataaaatcttccatcaaacatttgatgtcctccctgacgagaaactgaagaaaccatatgcatgtnatctgtcaacctctgctggtcctgtcatgggtgtgctatacctgtccaataaaaa

SEQ ID NO: 388269 - DNA, 815 bp, Oryza sativa
  unsure (1)..(815): unsure at all n locations
ccacgcgtccggccaatgccaatgaagcgagggcattctgcgagctaagctcaacaggtccgcccatgtcagcggcaagatacttaagccattctgttcctctagtatccgtgacagatggtgtgcacggttcatacattggagtgaaaggggaagcgatatacatccctccaccaccatgtgtacctatagatacatgtggggctggtgatgcatacgcttcagggattctatatggcattcttcggggctcttcggatttgaagagcattggcctgctcgcttcgcgagtagctgctattgtcgttgcgcagcaaggtacacgcttacgggttcaggacgccgacagattggccgaatcattcacacttcacctagataacctggagttttgttcagatattgaaacagaccatgtttcaaacttctgatcgttttagctgaaagtcgtaggacttccatttgtatatagcatctgtttacttttaggcctagctagctcattgttcagtacagctgagctacccaagcttgtcagtcccttccagaccgttgttacaatttcattccttaaatttggttccagaaaaggatgctacatacttcatggatttcatattgaactgaagatattactcctagataaggcagtggcaatagttcatgtgctttcattggttcttgtgtacactcaagatacatgacatattttttatagataatgagagacatgacatataatcttggtctgtttaggaatgtggtccactgnaaatcgcattggaaatgaaggngaaaattgttgttaggtgcca

SEQ ID NO: 388270 - DNA, 530 bp, Oryza sativa
ccacgcgtccgctacacaccatcacgagaacctcctcgtggcggcgagctctcgcgactcgactctcgcgtcgcgcgcgcgcacggcgccatcaatcgattctcacatccatccatctgcctatctatctctcgcaattctggcggcgcgctgcgcgcatagggggggatcgaatttgatctagtggtgatggaggcggcggcggcgatggaggcggggcggaagctggcggcgcggcacccgcacgggcggagcaggacggcgcacaacatgtcgtcgtcgtcgctgcggaagaagtcggacgccgcgctggtgcggaaggtccccgtggcgccgctccgcccgctgctcgccaacctccaggaggtctttctcgccaccaagctcgccgtcctcttccccgccgtcccgctcgccatcgccgcccagtgctttcgcttcgaccaggtgtgggctgttcgctcttagtttactgggcctcatccctctcgccgagagagtaagtttccttacagagcaaattgtactct

SEQ ID NO: 388271 - DNA, 585 bp, Oryza sativa
ccacgcgtccggcgagccgcgcgccacctacggcagcctgctcaccaccatgaggagcatcatgcgcgacggcggcgtcacctgcaacctgcagggccccatcggcgcccccatccgcaaggtcgccaacttcagcggcatccaggagcctaacctgtcttgctctgagatgttcgacatctaccgcaagccgttcgtcctgtaaaaccgctaggcccgacaccatggacaatagcattattattattattattgtaccgaaataaactgcgaatcgatcgaatatcgaatcggtcggctaattaattaactagtattgggttaaatagtttgtgtcatcgtgtgagaaaatcgtcatgtatctcagcttagtctggctcacacagacaaggtcctggagctctagaagaagactatacttggttttcatccatggattataccttccttgagcctgctagctgtagctcactgttgtaataaggctgttgtgtgaattgtgtctaatgtctacttggagtaatgaacaaatgtttctgctgcttgttctccccaaaaaaaaaaaaaaaaagggcggcgctcgcg

SEQ ID NO: 388272 - DNA, 482 bp, Oryza sativa
gccaactcgctcgacccctccaagcacgtcttccacgtcgtcaccgaccgaatgaaccttggcgccatgcaggtgataattcgcctaatggacttaaaaggcgcgcactatgaggtcaaagcatttgaagactacaagtttcttaactcctcatatgttcctgtgcttcggcaactggagtcagcaaacctccagaagttctattttgagaacaagcttgagaatgctacaaaagatgctagtaatatgaagtttaggaaccccaagtatctctcgatgctcaatcacttgcggttctatttgccggagatgtacccaaagctgcaccggatacttttcttggatgatgatgttgtggtacagcgggatcttacaggattgtggaagattgacatggatgggaaggtgaatggagcagtgggaacatgctttggatccgtttcatcggtattggcagtatatgaacttctcgcacccactta

SEQ ID NO: 388273 - DNA, 1254 bp, Oryza sativa
ccacgcgtccgcccacgcgtccgagcgcatatgctacttgaatataagtcctgatgaagtgattaggagtttgttttataataaaaacaatgaatcccttatcaccgtttcagtttatgaatcagatcgtttcagctcgctcaagtgcagaacaactccaatagagtacattacaagaggccaattgaatgatgggtttcctttatttgaaacggaatcactgaaataccctggatctgttgagtctgatgatggtaatggcaaagtactgactttttcagcccacgatagcacttacaaagtttttgatctgaagaactacaactttctgtattctatatgtgataagaacatccaggaaatcaaaataagtcctggaatcatgctcgtaatttatcagaagtcagctaatcatgttccattaaagatactctcaattgaggatggaaccccactgaaaaccttcacccagttgcttcatcggagcagaaaggttgacttcatcgagcagtttaatgaaaaacttcttgtgaaacaagacaaggaaaacctacagattattgatgttagaaactccaacttgattgaggtcaacaaaaccgaattcatgactccttcggcattcatcttcctctacgaaaataatctattcctgacattctgcaataggacagttgcagcatggaatttccgtggagagctagttacttcatttgatgatcatgagttgtggcattctaactgcaataccaataatatatacatcactgccgaccaggacttgattatctcatactgcaaagcttcaaaggaggtcagagatagtgccggctacgagggcaatagctccccccacgggatcaatcaacatgagcaacatcttcacgggaaagtgcgtcgccaagatctcccccctcgaccctactctcacaattgctcctcgaaaaagaggtgacagcagcagatctaccattcggagcactgtttctgatgctcttgaggacatcaccgcactattctacgacgaggaccgcaacgaaatctacactggaaacagcaaaggcctggtgcatgtctggtcaaattagtttcacctcccctcatcatcaaccttgtagataccttctgtacctgtgtttctttttactgctccataacaaatgtaacgatcatccggtctgatatagtggaactgtgtgctccctgacattatacgattcgttagaataatctgagtgtagattttcttgatgt

SEQ ID NO: 388274 - DNA, 770 bp, Oryza sativa
  unsure (1)..(770): unsure at all n locations
ccacgcgtccgcaagcgccagatacctccttacttctctcttggaattcgaagccttgctgtcttggaaggcattgcaatcagcttcaatcccaactacaaagtcttgggcagttcatacccatggattgcaagaaaagttctcacagacagctcaccaaagctccgatcaactttgcagacgcttctttataaggatggcactttccagattgaccgtttggagtctttgctaactgagtcgcttcgagcaagaacagagcagtccctgaccagggatcaacaagaggaaactgatagttccaaatttgcaattaaacaagtcttgtcatttactcttactgaacagggtgccttcgtgaaggatttacttcttcaggagattgctaagggattagatgcacttggagctgctacattgagttctgcaacatctgctgcagcctccagattgccggttgctggtccatccccatcaccctcactagacaatgaggatgccactaacttgagaaatttacatcgccttctcctacttttgtccaaggtccctcagaaggaggattcatctccaattccaggatacaatagcactgaggagaacgaaggtgatagtacagatgagatttctcttgtgttatatgaaatgagatctctaccagagttgttgccagtactttctgtcattcctgagcttncaccagagtcccaacagcagtttctccttctgccagcagatttaactaatcgtcttctgtctcgcgctggtgc

SEQ ID NO: 388275 - DNA, 1212 bp, Oryza sativa
  unsure (1)..(1212): unsure at all n locations
ttcctccgactactgggccggctcaccaaccgccgcgtagaggagttcatccacgcatggacactatctgcagcacaccttcgcgatcccgatatttcagctctgctggcgtcacaactgagggaatcccacatccttgacatgcctggcccgaaatctggactcatttgggaccgactgcaaaactggctcaaaactgcaaggaacctgtgctcatctgatgaatccaggaaattccggctgggctgcctgccgaacgagattgctgcattggagaaagaattttcaggggattaccacgggattggtttttgccacaacgatcttcagtatggcaacatcatgattgatgaagacaccaacatgttgactatcatcgattatgaatatgccagcttcaatccagttgcgtatgacatcgctaatcatttctgcgagatggcagcagactatcattcagagaagccacatagactggactacagtaaatatccagacactgatgagcagaagcgttttgtgaagacgtacctaagcaattctgtaagtgaagaacctgatgcggaagaggtggagaaccttctccaaagcattgagaaatacacgctcgccagtcatctagtttggggcctctggggaataatatcggatcatgtcaatgatattgacttcgactacaaggagtatgcaaggcagagattcgagcagtattggcagaagaagcaagcacttttaacttcatgaattgcctgaaggcgtcaggtcgtacctgaaggcctgtgctgcacataacttgtgcgatgttactgacacataactccctgtgaaaagaagaaagatgaagatgataatgaagaagaaaccctttcgggatcaggagttctcatcccgaaatttccgtaaggttcagcttcaggaggaagctgtgggctttggttgctttgtttatagtctgaaaggcagcgaagaaaaagcccctggttgcgtgtttgtttgctcgacaaactagaggccgcttgtggggctagtagtgccgtcgtgtttcatgtgtatgtatacctaaatatatgttacataatggatcttgctttcgtcgactcgagagtcgagacagtgcctccatttagtccatattgtactatgcttacatgactgccctgttgaagaaatagcctatacagctgcactgttnnnnnnnnnnnnnnnnnnnnn

SEQ ID NO: 388276 - DNA, 800 bp, Oryza sativa
  unsure (1)..(800): unsure at all n locations
gctggagctccaccgcggtggcggccgctctagaactagtggatcccccgggctgcaggaattcggcacgagggaaggcaactcctgatcccgaaattatgaaatatattgaaaaatctaggagtatggctggagtaacaccagacactgagttgatgaagctaagtgagaaggacatagttgagatggtcttcttcccagtcataaatgaggcttgccgtgttcttgatgagggaattgcagtcaaggcttctgaccttgacattgcctcaatctttggcatgggattcccaccgtataggggaggaatcatgttctgggcagattccattggtgcaaagtgcatccatgacaagttggaggtgtgggcgaaggggtattagcgacatcttcaagcctttgttcctacctttgcagaaagagcagcaaatgggggttcctctgaggtgcacccacctaagcaaagtaaaggcccgcctattaggtggacaatccttgttttcctttaaacttgcggggactattcacgnttntttgncncaaccgcnantngggnanttnnttgcctttngggnttncccccccnnntatnatttgngtnngnntntttangggtttngtaanctntttnncccntccnagtntttnnccnttnntttnnanggtnttttagnncntncantntttaanattgtttttccccantgnttntcnngnttnnctggncntntaccaaccgggntttttttaaanttaanccntgtgggccnnncctnttnncntnntgnngtttanccttt

SEQ ID NO: 388277 - DNA, 530 bp, Oryza sativa
tcgttcttgatgagggaattgcagtcaaggcttctgaccttgacattgcctcaatctttggcatgggattcccaccgtataggggaggaatcatgttctgggcagattccattggtgcaaagtacatccatgacaagttggaggtgtgggcgaagcggtatagcgacatcttcaagccttgttcctaccttgcagaaagagcagcaaatggggttcctctgagtgcaccagctaagcaagtcaaggcccgactatagatgaacatcctgctttcctatcaactgcggaaactatgcagaataatagaacacacgccaatggggcatttatggtctgtagaatagcccatccaataataattagaataggattcttgaagagttatgtgtaatctgtatgacgcctctccaagttcttgaaccattactgcgacagtgttttgagttcagacattctttaaaatgtttcatgtgccaatggttataagcagattgaaaaggcatacataaacccagcgggtgttaattcac

SEQ ID NO: 388278 - DNA, 441 bp, Oryza sativa
gtcaggggtcgttgccccatcaccaccaaatgatatgactgtgaagcaagttgctgacaaattagcaaattttgttgccaaaaatgggagacagtttgagaatgtcacgcgtcaaaggaatcctggagatacgccattcatgtttctgctggataagaactgttcagactacaaatactatgagtttcggcttgctgaagaagaaatgttacttgctcagtcaaaggaggcccaggcatcaaaacatgctagctcaagcactccaagctccagagcaccaagtgccccacagagaagctcatttgaacaaaagacttattatcatacacctgcttcagcttttgttggggcatatgaaggtagttctttccaaggaaatttatcttgctatggtgagcctttcaatgatccagcaacattgatggaattctacatgaagaa

SEQ ID NO: 388279 - DNA, 413 bp, Oryza sativa
  unsure (1)..(413): unsure at all n locations
attcccggtcgacccacgcgtccggcagggggggacgtgccgcgacggatcgaggcgatgcggcaggcggtcggcttgtgcaaggcccatcaacttcggccggccgcgctgctgtccccgcggccgttgctccggcgagcgtccccctgcctccctgcagcgggagcgggtggggagctcaggagggccagcgccgcgtcgcggtttggtggtcaggaggagatgccaagaagaggagcagcacctacagcaggaggaggaagagcggaacattggcggtggtggtgatggggagcaagagcagagaacatttctcagcttggaggaggccgggctggtggagatgtccggcctcagcacacacgagcnattcctcttgccgccttacccatattcgtcgttgaatctttttt

SEQ ID NO: 388280 - DNA, 865 bp, Oryza sativa
  unsure (1)..(865): unsure at all n locations
ccacgcgtccgcccacgcgtccgcccacgcgtccggttcacaaagccggtgaagctcttgagggatacattcaaactcattcacaggtgcgccatgacgaaattgttgaacatgtttcatcaattctaaaaagcaatggcattgctcattctggggaaagcattgacactggaaaacttgaatgctaccaacatggtggggggatgtcgattggcaagtcagattcacaaagagtgggctatggggaaactattgaagcggacaagtcatcttctgatataggcgaagttagtaaaatgatcctgggaaagcaaccacctaaaggatcagccatacgcgaagtgagagatatgttcttcccatactggaaatcggtgttgtctcgacggttgcagctaaagatagttccatcctgtcaactaagcaggaaggacttgctaagtgctgaagcgagcacgaaggggaccaagagtatggaccacccgtgtaacccaatcaaatcaatgggaaatcttggttcgatgggctggcccccattgtcaagtgagtccagaaggatgctttatactgttgcttcaatgtcccggaaggtgtttaagcgcacttgactacagaaaatctttggcggtatgcttgttgaaacactttttttttctataataagcctctagaatgtattttggtcatagatgagaaggggagaaaacagcatatcctgacttctttcactagcaaatactgagttactagtaggatttaggaccctcacatgatcaaacaacaaacatactaaacattgttacaggtttcaaaacatataatgaagccacatgtataaaccaaaaaccnnnnnnnnnnnnnnnnn

SEQ ID NO: 388281 - DNA, 850 bp, Oryza sativa
ttccaacatggtggggggatgtcgattggcaagtcagattcacaaagaggtgtgtttcattttggttgatcctattccttattaaaataaactagaaaggaaaatagctgtgaaactttattacgtgtccacccattacaaagtcatttgctgtggtgaacgcacaactttggaacattgcagaaagcttatgacttgcatccagcgcaaaagggggtgcaaccagactctgtacaccaacctcggaactatgctttccatttgataagctgtctcatgaccaatttcattgctgattacagtgggctatggggaaactattgaagcggacaagtcatcttctgatatacgcgaagttagtaaaatgatcctgggaaagcaaccacctaaaggatcagccatacgcgaagtgagagatatgttcttcccatactggaaaacggtgttgtctcgacggttgcagctaaagatagttccatcctgtcaactaagcagaaaggacttgctaagtgctgaagcgagcacgaaggggaccaagagtattgaccacccgtgtaacccaatcaaatcaatgggaaatcttggttcgatgggctggcccccattgtcaagtgagtccagaaggatgctttatactgttgcttcaatgtcccggaaggtgtttaagcgcacttgactacagaaaatctttggcggtctcggaaagatcaatgaaactttgagccatcagacggttgtatcctattgggctagaaactgtgtttcatggttgttatggtccatactttttaatttgaaaaccttgattgcagtgtaatattcagatttaaaatatgatggaacgtcattt

SEQ ID NO: 388282 - DNA, 883 bp, Oryza sativa
ccacgcgtccgtgcagttaaaccagagggctatgattctattccaaaggagattcctgatccaaaagacaaaaagcctgacacgtgggatgatgatgatgatggcatatggaagcctagaatgataccaaatccagcatacaagggaccatggaagcgcaagaaaatcaagaatcctaactacaagggtaaatggaagatcccatggattgataatccagagtttgaggatgatccagacctatatgtgctgaaacccttgaaatatattggaattgaggtttggcaggtaaaggctggttcggtttttgacaacatcctcatttgtgacgatccggaatatgcaagaaaagctgctgaggaaacatggggtgcaaacagggaggccgaaaaagaggcttttgaagaagctgagaaggagaggaaagctagagaggataaggaagctgaacgagcaagggaggaaggagagcgacggatgagaaagaggggtgatcggcaccgtggcagggattacaaggacagatacaaaagacgtcatagggatcactgggatgatgactaccatgatgagctttgaaatcacggaaaagtgctttcttcctaggagaagctggaatttgcatggtcattgcttataattgttaccaataaatgatctgggaggccagaatagccgcaagtgttccttgctgcgtgtgctgaaaatttgaatatccggattggaatgaaatgaacaaaagcctgaagatcattccttttggacagcagggcatacgattctacttaccagcaacacgttgtttttagttgtgaattggtgaaatgttgacgttgtaacgttgcgacttgcgaatataatgtgcccggggtgatgttctgcc

SEQ ID NO: 388283 - DNA, 966 bp, Oryza sativa
  unsure (1)..(966): unsure at all n locations
gccacnccctattgcaagtgttgggggtggggcacggcgccgatccattgatgaccaaccactagtccttccttcatcaatggatcggcgccgtgccccaccccctattggcaagtgttgggactttggctaaacagaaggcacctgtgggaaatgatgcttctttttctaaagagcccgtgatatctgcctcgaattttttgggacgatctagtggatcttcaaggaggcctgctgtttcaagtagccgagatgtgatgcctattgatacttctgaaccatctcgaactcgtgccactgatgcaagccctggggcatttcggagaacctctggtccccagaaaagctcaccagtcaattcggcagaaccaaagcattcatcttctgcccgacactcatctaacgttaagaattacgagtctgccctcaaaggtattgaaggtcttaatttttgacggggatgagagggttcagtactagcaatgaaggaacatctacatgtgctctgtaaaaatcataatctgtagatgagcacagcatctcctgttgagttttgtatcacaggatatgttaggaggatgtgaagtgcttttgccagatgatggtcctctggacacggtaaataagcggtcagcctgaggtgcctgaaatttagctcttataattaatgtgacggttctgtaaatgtctttattattcgtttgctggggcctctctagttcattggtcagctgtatccccatttctattccttccagtaccatgtccagatactatgtctcggtatagccaagtgcccaagtgcaactggtcaaacttgtatttggaaactggtgaactcgaaaatgtagaatgtttcatcagatcattgaaataaaaaaaatattattattaaattataaataattaaaataatatttatattataatataatttattattaataaaaaaatttaatttttatt

SEQ ID NO: 388284 - DNA, 567 bp, Oryza sativa
agcgagcagagggagagaggaggggtgggagcgggggcggcgcggcggcggcggtggatggcgatggcgggcggcggggggctcaaccggtcgtcgtcgagggggcagctgccgccgcaggagcttctcgacgatctctgcagccgcttcgtgctcaacgtgcccaaggaggatttggagtcgttcgagcggatcctgttcttgctggagcaggcgcactggttctacgaggacaactccgtcgagcacaacccctccctcaagtcgctctccttcaaggacttcactacgctcatgttcaatagctgtgctgcgctcaggccataccgcgcgcaccttgatgacatttacaaggatttcactcactataagttccgtgtccctgtctgcggcgccatcatcctcgatgacacctacgagaagtgcttgcttgtgaagggatggaagtctagcgccagctggagttttcctcgtggaaagaggagtaaagatgaagaagatcatacatgtgctgttagagaagttctagaggaaactgggtgtgatgtttcgaagcttttaaaattg

SEQ ID NO: 388285 - DNA, 1488 bp, Oryza sativa
  unsure (1)..(1488): unsure at all n locations
tgcacttgctcaactatcattttctgaaacaccctctgcacccaattcatcagcttttccagcttcggtcatgcccacttcagttccaaatgatggagggtcatccatgatggggcagtcacattcttcattttttggtgcaccccctggagtctcaggtcaccaggcctcaacaggaatgtctatccatggatcttcagttcaacaaactggtctagctgctccggcagctggacttccgttccaggtctctgcgaattcccgagcaactagtggcattcaagaagcagcacctaatactgacagtagatccattggccggaaagaacttccagcggatatctttacttcgttatatccaccaggacctcaaacaatagggggttggcagagaacaccccaatttggaatgggatatgccatgccatatcagactgcaatgggaatgcaagcatatcctcagatggcatttgctcaacctgcatatcaacaacctgtatatccgcaacagcaacatgcatacccccaacctgcgaaagatcaaatccttttgatcttgggaatgagccagctccagttcaagctcacacgcagcagcccctacctggaccactgggagcattctgctggcatgactcccccaggtttacttggtacctcgagttttggagtccttccacagcaacctcagcagctgtaccagtcacctgcacctccaaatcattacatgatgcagcaagttccaaacatgtctgagcagttacctaataccatgcttccaatgcaacaaggaggtttgggttccctcaacatgggctttgatcaacaagctgctcccaggtacccccagccaagcaccccaccttcctatggctctgttgggggaaatccttttgggtaaggtcattatacaatcgacgtgcgatattatctgctcttttggagttccttgtgcatcatcggacaaagggtttgcagtgcccagcgggatcaggacccatactagccctcgagagaatttgttaattcatactcctggttgtgtatttaccccctgtagttggttgtacaactcgtttccacaaggacaatggtcgagcgtaactgcgtctgagcataagctccccccttcggagttcttgatgcccattccaatagtgtttgtatatttgtgtttgatgcggttgcaacatgtatatttgggaaggatgaggcctcggggcctcgaatggttttttgactttcttttcggattctccatggaccatgtgcaaatcatgtattcttattggcccaggttgtttatttacccccagtgcagttggctattaaaatttatgtggatggtaatnccggattatggttgatatgtataattgtgtaaggtccntttttggaatgttgtatgatnctcaggacaaaacgaaacttctaagttgttttnnnnnnnnnnnnnnnnnnnnnnnnnnnnnnnnnnnnnnnnnnnnn

SEQ ID NO: 388286 - DNA, 890 bp, Oryza sativa
  unsure (1)..(890): unsure at all n locations
gtttgctgttcgtctgaggccatattacattatcgcgatggttgagattgacaatggccatggtaacacattcagtgctttccttcaaatattggacaatggaagggttactgactcgcaaggcacgaaagtgagcttcaccaacagtatcattatcatgacatccaatgtttgatcacagctcataccttaaacttggttggcacaaggtgggtcaactgattcagcctatgagaatataaagaagagggtgatggatgctgcaagatctgttttccggccggagttcatgaatcggattgatgagtacattgtcttcaagccacttgagagggaacagatcaacagcattgtcaaattacagcttgcaagagtacaaaaaagaattgccgatcgcaagatcaaactcgaagtcgtcgcctggagcagtcgaattcctgggaagccttggttacgatccgaattacggtgccaggccagtgaagcgagtgattcaacagtatgtggagaacgagctggcgaagggtatcctgagaggtgatttcaaggacgaggacagcatcctggtagacacccaggtcaccgtgccatctaatggtcagctccctcagcaaaagctcgttttccacaaaatgagtgaagaatccgcaccagctgctgctgaagacgagaaaactttttgccggctgtttgattgggccgaaccttttagcagatgaggaataaaatgtagatagaggattagcaaacttgagtggatagcatagtatacagacacaatttcccttgctagttcaacattacataagcacaaagtctgtgctgagaaatgttattttgtctctaatatttccagcgaaatgtcttcaaaaaaaaaaaaaaaaaaacnn

SEQ ID NO: 388287 - DNA, 853 bp, Oryza sativa
  unsure (1)..(853): unsure at all n locations
cagctgctgctatctttcaaaaaaaatcagctgctgctcttgtttgctgcaagttgcatcatctgtgaccatacaaaaaagaaaagcaaaaaaaaagaaacggcgggaaattgccagagtattttaccagctgagcagaaattaccgcgcagtggtcgtcgccctcgttgtttactttgcttaatttgcttgccctcatcctcatggctgcggcggcggcggctgcttctgctccccgcctcctcctgccgccggccgcctccaccttcccacaccagcacgagcacgtccgccgcaactggcaccggccccgccgccaggtcatctctgcccgcgccggcgcctccgtcgccgcccggggccttgatgcagacgacttccgccatccgctggacaagcagaacacactgctgctgagagcagttccagggcttaatgatatgggcaaggctttgctaggaccagtttctgagcaagttatggtacttcagaacattggatcgtctgtgctagtctctgaaaaccagctttcagatcttcatcagatcttgaccgaggcagcaaaactattgaacacagacgctcctgacttgtacattcggcagaaccctgttcctaatgcttacaccttagcgatcagtggcaaaaagccattcatagttgttcatacaagccttgtggagctgctcactagaaaagaactgcagcgctgtgttggctcatgaactgggacacctcaagtgtgaccatggccgtgtggcttacatttggccaacatactgacaatggggggcatacnctgtncctgggatttggcatggttncngggtttctggaagagcagctctacagg

SEQ ID NO: 388288 - DNA, 720 bp, Oryza sativa
  unsure (1)..(720): unsure at all n locations
aatgcatctgccatggaattcctgattctcgtgaacttcaggatggagacataattaatatcgacgtcactgtctacctgaatggctatcatggggnacacctcaaagactttcctatgtggagaagtggatgaagccagtaaacgacttgtgaaggttactgaagagtgcatgctcagggctatatcagcttgcaaacatggtaccagcttgaagaaaattggcagaagaataagcgagcatgctgagaggcacggatttggtgttgtggatcgttttgttgggcatggagttgggagaatatttccgcctcgaccaatgatatatcaccagcgtaataatatgccaggtcaaatggttgaaggccagacattcacaatagaaccggccctatccatgggaagcattgattgcgacatgtgggacgacggctggacggccgtcacgacggacggcagcctagccgcgcagttcgagcacacgatactgattaccaagacaggagcagaaatcctcacgaaatgctagtaagatcggtgcccagcattagccactggagtagcagtgatctctgtgtttgtaggacgagtatggtggaaaggatggtcgattgttttgctgtataaagtactccctctgtattttaattttgattttaatgtattatgccgttgactttttaaccaacgtttgaccacttgtctaaaaaaaaaaaaaaaa

SEQ ID NO: 388289 - DNA, 629 bp, Oryza sativa
aacgaacaacgaacccctccttcctcgccttcctcgagttgagctctcgctccgccgccggccgccgcctcgagctgggaggcggccatgggcgccgccggcctcccggcaccgggatgcctgcagaaatttggacatatcgttgatgccgaaagatttgtattaaacatgtccaaccgtggaatccataaggcactcagttttcagtgctttgcttctgatgggcgtggctttggagctggttctactaatagacggaaaattaaaagcaagaagaggcaaaaggatgttgcacaggaaccaagcaaggtaatatctggaggttccaagaacagggaccaatgggcactggacttagggactcgaagggaaagtaaatatgctaaaactgtcatggataagcaatttctagaaaaagtggaagctgttcgaagatctgcacttgagaaaaagaaagctgatgagaacaaaaattatcaagctattgattatgatgccccaattgaatcagataagagtacaattggttttggtacgagggttggaattggcatagctgtcatggtctttggattagtcttcgcttttggggatttccttccatatggaagtgttagccccagcaaaag

SEQ ID NO: 388290 - DNA, 712 bp, Oryza sativa
tttcctttattataatgagtatgttatgcggaacctggccagggggtacaccagaaaggatcttggtgtcagttacgttaaggaaaaaagactgagagttaacatgggattaaaaaacctgcgtgacaaagtgaagcagcaccaagaaaaagtaggggagaagtggaatacagtggcgaaactccaggaagagtgggtggaaaatgcagatcgatgggttgctggttttctggagaagtttgaagaaggctgccactcaatgggaactgccatcaaagagcggatccaagagaggctcaaggcgcaatccagggatttcagccttctacagtatgatggcgaggatgttgacgaggatgaggacgacgacgaatatgtcagagaataatgccaccactgtgaatatacgtcaagtataatatatgtacatgcgctgcatgtagcagatcttcaatccttgggcatgtcatgcacccctctctcttcaggaatggtgaacttgtgccccccaggttagattttggtgctgtgttgtagcaatagcaggtgttttgtttaggctaagacgcaaagtaagcctgtaaaatcccctagtcgatggcctgaatggttatctggaagatacagatatgttcaattatatttttgtttagcacacaagaacactatatttcaattgactatctactatatttcaaaaaaaaaaaaaaaa

SEQ ID NO: 388291 - DNA, 358 bp, Oryza sativa
aaatactagtagacaagatatagatcaaataaaaaattagtagattgtgtttcacgtatatgctttagaatccaaaacgaaaagaaaaaagagaacatgttgattatagaaaaattaggaggaacctagaattagagtcttatgggcaaggacactattgctgatttactaacctctataagaaacgcggacatgaataaaaaaggaactgttcgggtagtatctacaaatattaccgaaaacattgttaaaatacttctacgagagggttttattgaaagtgttcggaaacatcaggaaagtaacagatatttcttggttttaactttgcgacatcaaaagagaaagactagaaagg

SEQ ID NO: 388292 - DNA, 1121 bp, Oryza sativa
ccacgcgtccgcaagttacaagactttcgatattaaccttcctgctgagatggtgaaatgcgtggaggtttttaaggagttttaccaaacaagaacaaaacacagaaagcttacctggatatattccttgggaacctgcaatatcaatgcaaagtttgaggcaaaaactattgagctcattgtcacaacatatcaggctgcgttgctgctgctattcaacggatctgacaggcttacttattctgagattgtaacacagctaaacttatcagatgatgatgtagtgcgtttgctccattctctctcctgtgcaaaatacaagattcttaacaaggaaccagctaatagatctatttctcccaacgatgtttttgagttcaattcaaaattcactgacaggatgagaagaattaagatacccctacctcctgttgatgaaaagaaaaaggttgtcgaagatgttgacaaggacaggcggtatgcaattgatgcatcgattgtgccgccttatgaagagtcgcaaagttatgggcccatccagcagctagttgcggaatgtgtggagcagctcagccgcatgtttcaagcctgacttcaaagcccatccaagaagcgaatcgaggacctcatcacaagggattacctggaacgcgagaaggacaacgctaatgtgtacagatacctggcttgattggtggttgatgctaagtcaagaaacagctaagctttgctgactcgcgagtttcgctgcagcggtgtcatgatgcttcatcaacgatttcgtggtcatgcggtgtttttttgggcatttctatgttacgatgtaccgcggtcttccctggctgcagcactggctggtctggtctcattttgtacatgcgtcatcggataggagaatgatgataatctcaaagataaaacggtagcagggcatatcggctggataagtgaggcacttggtcactgttaagcgcaggtgctaaccatgccgttattatgcatatcatcagtatgcttttatgtatgtccttggcactcctgagttaacctggatgctaaatgggtatttatttgctctatgaaatagtagtattaagtgaatcttaaaaaaaaaaaaaaaa

SEQ ID NO: 388293 - DNA, 488 bp, Oryza sativa
  unsure (1)..(488): unsure at all n locations
ccacgcgtgcggaacaacatttttcttgtacccgattgggcttgtcatcattctctctccactgatgatactcatagggttcaatccaacaagatagtttttgagcttgtacttccgttaaggtcgataactagaacagtaagagaagactggtgacaaaactaatggcagattgggtacacactttttactctagcttcttaaatctttgtgtgaatttgaggagagtgaggctcacgaaaaggtcgatttgttcttgagatatattactgccagcgtgggccacgggcacaggccttttggttggagcccattttggtgtcaacttgttcataatatgtattgtttccattgattaaagagtcaaggaccagtgtacaattttagtgggaaccggaacttaagccgattgtatcgaaggggcaccaacattgtaatccacntncgtaagaatcatgagtttttagtggcaaaaaaaaaaaaaaaaa

SEQ ID NO: 388294 - DNA, 547 bp, Oryza sativa
  unsure (1)..(547): unsure at all n locations
aaagggggaatgttcctgccaaggccggattaaagttgggttanccgcccagggtttttcccccagttcacggacgtttgtaaaaaccgaccggcccattgancgcgcgtantacgactcactataggccgaattggttaccggcccccccntcgaggtcgaccccacgcgtcccggatggattcacttggattccctctggaatcactttgatttcctctgaatataagattgctcggcaccccatgtgggtttagtagctccccaaagaagttcatcttgctagaataatgtcgatcttgggaagatgattacaagcagcaactttttgttgtggatccaccaccaacatgtatcatagcatcctattttgcagtttatgtaactacaaggcagataaaggaactaaggaagcatagtgtatatttcatagtagtttcagcttcttgatacacgaaatagtatttttttcccctcccctttctgccatttcatttgtcattggagaacgactatgaattaattaacatgattagactttatagcc

SEQ ID NO: 388295 - DNA, 974 bp, Oryza sativa
ccacgcgtccggagggaaagaaactattcatcagctatatggaacacgggtggccgtacttgctggtgattttatgtttgcacaatcttcttggttcctagcgaacttagaaaacatcgaagttattaagctcatcagccaggtgatcaaggactttgccagtggtgagataaaacaagcatctactctttttgactgcgacgtcacccttgatgattacttgctcaagagctattataaaaccgcttcgttgctcgcctcccgcgcgtccgctgctgcactatgcagtggcgtaagcaccactatatgcgaacaaatgtatgaatacggcaggaatctcgggctctcgttccaggtagtagatgatattcttgactttacccaatcagctgagcaacttgggaaaccagcagggagtgacttagcaaagggaaacctgacagctccagtcatattcgctttgcaagatgaacccaaactaagggagataatcgattctgagttcagtgaaagtgattcattggctactgcaatcgacttggttcacagaagtggtggaataagaagggcgcaggagcttgcaaaggagaaaggtgacttggctctccaaaatttgcagtgccttcccaagagccagttcagaagtacccttgagaacgtggtgaaatataatcttcagaggattgactgatggattcacttgattcctctgaatcacttgatttctctgaatataagatgctcgcacccatgtgggttagtagctcccaaagaagttcatcttgctagaataatgtcgatcttgggaagatgattacaagcagcaactttttgttgtggatccaccaccaacatgtatcatagcatcctattttgcagtttatgtaactacaaggcagataaaggaactaaggaagcatagtgtatatttcatagtagtttcagcttcttgatacacgaaatagtattttttt

SEQ ID NO: 388296 - DNA, 1107 bp, Oryza sativa
  unsure (1)..(1107): unsure at all n locations
agacgacggcgatggcgcccaagcgacttgtctgcttcttggccgtggccgccgcgctagcaccacctgccacgggtggggcgccggcgccggcgatgtcgtgtcgtcgtcggcggcggcgctctcgttcgtggacaggctgaggcagatgatgatcccggcggccgtgggcgacggcgactactgcgacagtggcgcgtcggcgtggaggcgaacaacgtgcgggggtggacggcggcgccgcgcaagtgcgacaactacgtcgagaactacatgcgcggccaccactaccgccgcgacagcaaggtcgtcgtcgacgaggccgccgcctacgccgaggccgccgtcctctccggcgaccccgccgccgacgccaacgccacctgggtgttcgacgtcgacgagaccgccctctcccacgtcaagttctacaagaagcacggcttcgggtaccacagaaccgacgagccggcgttcatggagtggctgatcgccggcagagcgtcggcgttgccgaacacggtgacgctgtacaagaagctgctcctcctcggcgtcaagatcgtcttcctgtcggacaggccggacacgccggagctgaggaacgccaccgccaccaatctcatcaaggaaggcttcgactgctgggacgagctcatattaaggtcggagaacttcgacggcgacgggatcggtggtggagtacaaagtcgggggagaggaagaagctggaggaggagaagggggatgggatcatcggcaacatcggcgaccagtggaccgccctgctgggctcgccggaggcccgccggaaccttcaagctgcccaaccctgcctactacatcgacaactacaagcgcgccggcgccgccgtccgcgccgccgtagccattacagcctcctcctcctcgtcgtcgtcgtgaagcaaacgatgcctagctagctatagtactcaactttgaattgcatttttttttcagacacataagttcagttaataatcggtcgtgtacgtacctgccctgctgtgcactgttgtatctttttggtgagacgattgaaatatctttgggtttatcttttattnaaaaannnaaaannntnaa

SEQ ID NO: 388297 - DNA, 824 bp, Oryza sativa
  unsure (1)..(824): unsure at all n locations
ccacgcgtccgagccaaacctctgccgcgctcctcctcctctcctctcctctcctctcctctcccggtggcggcgcggccaactccagccatgtcggactccaaggccgcggcggcggtcaccctccgcacccgcaagttcatgaccaaccgcctcctctcccgcaagcaattcgtgctcgaggtgatccaccccggccggcccaacgtctccaaggctgagctgaaggagaagctggccaagctgtacgaggtgaaggacgcgaactgcatcttcgtgttcaagttccgcacccacttcggtggaggcaagtccaccggattcggcctcatctacgataacctcgacgccgcgaagaagtacgagcccaagtaccgcctcatcaggaatggtcttgctaccaaggttgagaaatctcgcaagcaaatgaaagaacgcaagaacagagctaagaagatccgtggtgtcaagaagaccaaggctggtgatgccgggaaaaagaagtgaaaactcatttacatttgtactactggctctgggaacactgttgggtctagtggcaatggcgtaatcatgtttctgttagttttttgttgttttccctcgtcactgaagtcaagttttgtgattgtggatggaacttagctagtttggctatagcatgttatgatgttaaatttatgctagcgttagaggtactcattggaaggctgtaacttgtaagccgacctgttttatcttgcaaattattatgtggtttgattatccctttttctcatcagcnnnnnnnnnnnnnnnnnnnnnnnnnnnnnnnnnnnnnnnnn

SEQ ID NO: 388298 - DNA, 759 bp, Oryza sativa
  unsure (1)..(759): unsure at all n locations
cccacgcgtccggtctccgcttctctcccccgcgccgccgccgcctccaccgaaagcagcagccgccggcgagccagccagcagcctagccatgtcggaatcgaaggccgccgcggcggtgaccctccgcacccgcaagttcatgacgaaccgcctcctctcccgcaagcagttcgtgctcgaggtgctccacccgggccgcgccaacgtctccaaggcggatctgaaggagaagctggcgaagctgtacgaggtgaaggactccaactgcatcttcgtgttcaagttccgcacccacttcggaggcggcaagtccaccggattcggcctcatctacgacaacctcgacgccgccaagaagtacgagcccaagtacaggctcatcaggaatggtcttgccactaaggtagagaagtcacgtaagcagatgaaggaacggaagaacagagcaaagaagatccgtggtgtgaagaagacaaaggctggagatgctgggaagaagaagtgagagatgatactcatcttgcagtcttgatgtgttcattatcaaaaccttgctttgtttagagctgtctccttgtggcaatattactgaatgcttaattataactagaaaaattttgccacttatgttcttgcaatgttgaggcatctgtagtgttcttggattttgaggaaatttgtcggactctagcatatatagtactttaatcacggcgcatgttctttgtgtcttctnnnnnnnnnnnnnnnnnnnnn

SEQ ID NO: 388299 - DNA, 789 bp, Oryza sativa
ccacgcgtgcgctctctctctctctctctccctctctctctcgcccatgtaccactctcgtcgccgcccccgccgccgccgcagcgaggaatctccggcgaggacaccaccgacgcaagcatggccgacacgaagacggcgccggcggtgacgctccgcacccgcaagttcatgacgaaccgcctcctctcccgcaagcagttcgtgctcgaggtgctccacccgggccgcgccaacgtctccaaggcggatctgaaggagaagctggcgaagctgtacgaggtgaaggactccaactgcatcttcgtgttcaagttccgcacccacttcggaggaggcaagtccaccggattcggactcatctacgacaacctcgacgccgccaagaagtacgagcccaagtacaggctcatcaggaatggcctcgccaccaaggttgagaagtctcgcaagcagatgaaggagaggaagaacagagcaaagaagatccgtggtgtgaagaagacaaaggctggagatgcaggcaagaagaagtaagcaatggtgttgaattgacataccaccttagctgccttaagttctccgcccactatcaatttttgtaccccttagcgcatctccttgtcgctattcgcagaatatggattgatctgctagaaaaaaaagttttttgagcattttgacatatgcccccctgttacattacattgctgcgtttactgtgacttggctttgatcaacataccatctcagtgtccctataaattggctcttaatcaaaaaaaaaaa

SEQ ID NO: 388300 - DNA, 1180 bp, Oryza sativa
agataaaggtgaattactagagtatcttccccttccttcccttgggccttggcgtaaaagaaagagaaatctccattctcgtcgtctcctcagctgcttgcgccaagacgagtcgcggctcaacagggggaggggcggcgatctccatccatccggcgagcagagcaggggaggggaggggatcctggaaaatgctaaaccttattaagataaagggtcaaaagaaggaagatgcagccaatgcaaatggaaagcctcctgccaaaaagcaaagtccaggggagttgcgtcttcacaaagatattgctgaacttaaccttcctaagtcgactagaatttcttttcctaatggcaaggatgatttgatgaactttgaagttactattcgacctgatgagggatactatgtaggtggtaaatttatttttactttccaagttcctcctgcctatcctcatgaaccacccaaagtcaagtgcaagactaaggtctatcatcccaatattgacttggagggaaatgtctgccttaacattctgcgtgaagattggaagcctgtcctgaatgtcaacacgattgtatatggcttgaatcttcttttctcacaacctaatgatgaggaccctctaaatcatgaggcggcagcagttcttcgagacaacccagaaaagtttgagagaaatgtccagagggcaatggctggaggctatgttggtgaaacccacttccctagatgtatgtaaggcctgaagatggtgatcggtacctgacttatctgctgctgccatttctcctaccaatgcactatggtaaaagcagtatatgtaaccaagaaggaacttctctgttatgtaacaacagcagttgctagaaagtaagttagtgaggcaattgaactcacgttcataacccgcaatccgaagactctgggttaacctgttgtggcaaatgttctcttttggccctcgcgcgcatctcagtcattctgattcataccagtttctgagatgcttttgtataatgccagctagagaaaatgctgaacagtatgtgtgtgctgcacttactgcctgttatgacttatggctaccaggaagtaagaacaagttcactaacattgcttaatgtaacatgctaccttgggtagttgtgttgttcttttttcaaaaaaaaaaaaaaa

SEQ ID NO: 388301 - DNA, 936 bp, Oryza sativa
gcgaaacactactctttttttctttttttgcggggaagctagcaaacagtactactaaccttctgcttatatatcaccaacaaatactatgtcggtcacgcctaccaacgacgtcttgatgactggccctgtagctggcgccggcgacgtgcaggccgctgagacgttccgcgtgttcgtcgggtacgactcgcgcgaggacatcgcgtaccgcgtgtgccggcgctccctgctgcagcgctcctccgtgccggtggccgtgatcccgatcgtgcagcaggagctccggtctgcggggctgtactggcgggagcgcgggcccacggagagcaccgagttctccttcacccgcttcctgacgccccacctggccggctaccgcggctgggcgctcttcgtcgactgcgacttcctcttcgtcgccgacgtcgcggagctggcgcgcatggccgacccgcgctacgcggtgctgtgcgtgcaccacgactacgcgcccaaggaggccaccaagatggacgggcgccgtgcagacggtgtacccgcgcaagaactggtcgtccatggtgctcttcaactgcgcccacccaaagaaccgcgccgcgctgacgcccgaggccgtgagcacgcagaggcggcgcgtacctgcaccgcttcatgtggctggacgacgccgacatcggcgaggtgcccttcgtgtggaacttcctcgtggggcacaaccgcgtcgaccccgccgacacggccgggacggcgccgcgcgccatccactacacttccggcgggccgtggttcgagcagtacaagaactgcgagttcgcggagctctgggtccaggaacgtgacgcgtatgaggccgaggcggaggaggacgaggagaaggaagagcacgagcccaaggccatcctgcatgcccctgctgcgccgtcggcagttcct

SEQ ID NO: 388302 - DNA, 678 bp, Oryza sativa
  unsure (1)..(678): unsure at all n locations
ccaccttcttcctcctcttcatttgccatctttagtaccacctcgccttcccaatccaatctcgccgcccattaaggcccgagagcccccattccgccagatccatgacggtctcgtcgccgtcggggagggagccgttccgggtgttcgtcggctacgacccgcgggaggacgaggcgtacgaggtgtgccgccgcagcctgctccgccacgcctccatccccgtcgacgtccgccccatccggcagccggatctccgcgcggcggggctctactggcgggagcgggggcccaccgagagcaccgagttctccttcacccgcttcctcacaccctacctcgccggctaccgcggctgggcgctcttcgtcgactgcgacttcctctacctcgccgacatcgccggcctcctcgcctgcctcccctgctgcgaccccgaccaccgcttcgcncgtcgcctgcgtcaagcacgagtacgcccccgccgaggcgaccaagatggacggcgccatccagaccgtgtacccgcgcaagaactggtcgtccatggtgctctacaactgcggccaccccaagaacgtcgccgtgctcaccccggacgccgtcagcacccagaccggcgccttccttcaccgattcgcctggctcgatgacgacgagatcggcgagatccccttc

SEQ ID NO: 388303 - DNA, 970 bp, Oryza sativa
cagttcttctccaaacccaacccccccaagaggccaaaaccctctcctatatagccacactcatccttgcaattagctcaactcagctcaagttggcgattcatatcaaacagataacatcagtagttcgcagctagatcgatcgtcacagcaacacaatcaccacgacgacgatggcggcggcggcggtggagaagaagagcgggagcgagatgacggtggtgcgggggctggacgtggcgaggtacatgggccggtggtacgagatcgcgtcgctgcccaacttcttccagccccgggacggccgggacacgcgggcgacgtacgcgctgcggcccgacggcgcgacggtggacgtgctgaacgagacgtggaccagcagcgggaagcgcgactacatcaagggcaccgcctacaaggccgacccggccagcgacgaggccaagctcaaggtcaagttctacctgccccccttcctccccgtcatccccgtcgtcggcgactactgggtgctctacgtcgacgacgactaccagtacgcgctcgtcggcgagccgcggcgcaaggacctgtggatcctgtgccggcagacgagcatggacgacgaggtgtacgggcggctgctggagaaggccaaggaggaagggtacgacgtcgagaagctgcgcaagacgccgcaggacgacccgccgccggagagcgacgccgcgcccaccgacaccaaggggacgtggtggttcaagtcgctcttcggcaaatgatcgagaaattctcagcggccgatggatggatcagaggacgacgatgtatagctatagtatgaatttgccttcagtagcagtggagaataaaatggacttttggtgtgagtgtgttcttgaggtgattgtgtgtttgtaatgctgtgctttacaggaattaatggaaatgaactcttacacgtgcttaattttaaaaaaaaaaaaaaaaa

SEQ ID NO: 388304 - DNA, 1407 bp, Oryza sativa
  unsure (1)..(1407): unsure at all n locations
ggcgccgncaacgctctggcggctgatccgcctagaaagcggtcgccaccatgcgcacgcctcctcctcctccaaccgcctattgcccactctcctccgtcctcctcgcgacggtttccgcggcggccgcctcatcgcctcctcctcctcctcctcctctcagatggcggcgcctgccgatgcaccgggcggatccgcggacgcgttcgaggtgatccgcgctcaccaggaaaaagctgctcgacttcctccggttgaagaaatacggaccattctggaccaaagtgttaggggtgtccttgccacccattctcagggtcatgttggctatccgtctggttcaatggttgattttgcatgtgatcaggatggttcccccatattagcagttagtagtttagcaattcactcaaagaatctctctgaaaatcctaaatgctcgcttctggttgccaaagaccctgaggacagaacagatactgtgattactgtatatggtgatgccacacctgtaatgctccagatactggcctgcctatacccttgattcttttctgtatgacactttcctatatcatattggtcatgttacgtaacaaatatagatctgttggtctttgtattatgtttgaaaggtttcagaccaagaaaaagatgcagtacgaagtgcatacttacgaacacatcctgaggcattttgggttgattttggtgacttccgttttctgcacatcaagccaaaagccgtgcgatatgtgtctggggttgcaactgccatccttggttctggagaattcagtgctgctgagttcaaggaggcaaaagtggacccaatatctcaattctcaacccctattacgagccacatgaataaggatcattctgatgatacaaagctcattgtgcaatactcaaccactgtcaaggtggactttgcttacatgcttgatgtggatagtcttggtttcaatgtgaaggcgggctatgatggaaagtgttctgaagctgcgtatccccttccctaggcgtgcacaggacaggaaggatgttaagacacttattgtggaaatgctccaagctgcaaaagcctcatcgtcttctgctgaatgaatgtcctgttctagaaagggacgtctttgtccttgtaaatgaaataaagatgtccttttcgatgagttttttctgatctaggaaatgtcatgtttttacacatgatatatcacaatgccacagcttaacaccgaacagatgccaatctacttgtatattatttacactgaaacgctccaccgtgtgtacatttcttacttgtcttaagtcttattggaactttggaagtctgcagatgcagctaccatcatctctcataaatgcttgcgaaatgtgtttttgggatagcatttcagc

SEQ ID NO: 388305 - DNA, 471 bp, Oryza sativa
tgtgatcaggatggttcccccatattagcagttagtagtttagcaattcactcaaagaatctgtctgaaaatcctaaatgctcgcttctggttgccaaagaccctgaggacagaacagatactgtgattactgtatatggtgatgccacacctgtttcagaccaagaaaaagatgcagtacgaagtgcatacttacgaagacatcctgaggcattttgggttgattttggtgacttccgttttctgcacatcaagccaaaagccgtgcgatatgtgtctggggttgcaactgccatccttggttctggagaattcagtgctgctgagttcaaggaggcaaaagtggacccaatatctcaattctcaacccctattacgagccacatgaataaggatcattctgatgatacaaagcttattgtgcaatacttaaccactgctaaggtggactttgcttacatgcttgatgtg

SEQ ID NO: 388306 - DNA, 600 bp, Oryza sativa
ccacgcgtccgcccacgcgtccgcccacgcgtccgccacgcgtccgccacgcgtccgcgacatgatgccacctccaccttcaacatctattccttctcaccaagagagagaaagaaacatggctgcagatgggggtgagaagagcaaggagattgataccccggaaaaaccatcgtcatcatcaaggaagagaccctattctgataccactacaaaaggggcaggtgctgtaccaaatggcggtgctacaagccagcatgatgggtctgaggatagcagccagaagtgatgcttgtcgatgctgcagaattttttccttccaacaggctgaataagccattgtgtttttatggtttaattacaaaaatccttcatatccgtgtagttcacaatgtacaatagagtaaaatgtgtttatgattgctgtttatgctagccagattctatgtgacttgactgctataggatgtttcacctttcagtatagctaacttcgttctgaatgtataaaaagttaagttaatatttcagttagaatagactagtttcctgtagtgctggatgctactaaaaactgtgaatggtaatcttggtttcttg

SEQ ID NO: 388307 - DNA, 594 bp, Oryza sativa
  unsure (1)..(594): unsure at all n locations
tgaactcgaaattggattcaagttccttgtcgagagtnatgtttctaatgtggagatggagaagccaaantatatcaagacgacagcatctgaangtggactttttnatcatttnataaatgtttggnagttcaagcctggtccngttcctggaacatgtgacctttacttcttggttgattttaagtttcagtcgccactatatcgtcaggttgcttccatgttcttcaaggaagttggtgcccggttagtgagctcacttagtgatcgtggttatagaatttatgggcctcccattccctgtgctggaaaatacttaatgggcaaggaagatagacaaaaggtaatccaattttgaagtatgttcgctccatgaatatctgagtgaggaaatcttaatatacattgcctttgccttcgattctgatgtcattatacccatagggtaccattaggcaagaggattttgaactaaatcagccagaattttcacttcttggctatttctcaggtgttttttttttccatgtaccactaaacgattcccatgtgtaacaacaaatggctccctaatacacgattgtttacctagcc

SEQ ID NO: 388308 - DNA, 756 bp, Oryza sativa
  unsure (1)..(756): unsure at all n locations
tggaaggaagagctggaaagccaggtatcttctactgtcgaagagcatgaagaactgaagagcaagtacaatattacgctggaggaaaagcagttgttgaatgagaagtatgaatctgcaaagaaagagcttggggaagcaatagctaaattagaggagcaaatgaatgttgacaagtcagaaaaagaattgcacatctcaaaattggagaggcagatcacattgtctgaactaaaatacatggaggagatccaaaccatgcaagtggaaacaactgaaaaggatgaggcgcttacaaccaaaatgcaagagcatgcaaacttggtccatgaaaaagatgcgttggaacaacaattactggaagttaggaaggaactaaatgatgcttaccataccatagcaaatcaggaagagcaagtttcagtgagggagataaagtgggatgcatataagaagttctcagaggatcaacttgaagctgagcagcagcatgttgcagagctggtagtacatgtatcatctcttaatcatcagctgctagaaactgagatccattacatgcacaaggaagaacaggtttctctaagggaggttcaatgggaagcagatcaagaacattcagtgagtgagctaaaagctcagcgtcagtatgctgcagaattagagaaacaanatggagctcttacacagcagttacaattggttgaaaaacagtatgagcaaaaggttacagaagagagggagaaacttgctctc

SEQ ID NO: 388309 - DNA, 701 bp, Oryza sativa
  unsure (1)..(701): unsure at all n locations
cgtgccgtaccggaacggcagggtcgacccgcgcgacccgtccgaaagggagcattctgtcgccagctgggcatcacaccactcttgaagtacacaccaaatgcgagcctcgggtcgatagttatttgtgcggggatcggacttgtggactacaaagcacctattatcattgggagggtctgcaaaatgggtcccatttctggcatgggagcattctttggtgtggtcttcgcatctgttgagataggtcttttaatagctgtatcgatgtcatttgctaaaattcttcttcaagtaacaaggccaaggactgtacttctgggaaaccttccaggcaccacaatatacaggaacactgatcagtatccagaagcaagacatattcctggggttgtaatagtgagggttgattctgctatctacttctccaactcaaactatgtccgggagagaactcttaggtggttgacggaggaagaagagaaagccaaagcagagggacagtctaaaatcaatttcttgatcatagagatgtccccggtcatagatatcgatacaagtggcatccatgctctagaagatctatacaagaatcttaagaagagagacattcagctcatcctagcanatnctggatccatcgtcatggaaaagctcttgtcatccaagctcaacgagcacaatanggagtaacaatattt

SEQ ID NO: 388310 - DNA, 616 bp, Oryza sativa
cgagagggaggaagaggaaaccctagctcagagtcagaacacggtgcccgcgatgtcgccgcctttgttgctccgccgcgccctgcagaggcttctcccccaccgcacccgctctttctgcagcagcagattatcctcctcatcttcctccccgggagaggtcaaaagtatcaggcgatttgatgaatttgaggcgatggcacaaagggagattgttgaagatgtggaggaagtgaggaaactgaagagcgaagatagaaattatctcaacaggctgttaacttcttggggggtgcccaatggggagtttcgagataagctaatgtggggcggtaatgttgcagcgatatttattgcgtccagtgcagttgggactttgagtgctaaaactagatgggagtgcgtaagtatgcatgcaaacgattcgggaaaggaagcacttgttctcctgttatcagctctcatcgtgtgtttgtgatgacttgttattgctgacataacagccattgcacttaatatccttttgtcctaaccgtggtgtgtaacatattaacatatatttgaattgtgttctcagtatatgcatgtgacactgaggggaaaaaaaaaaaaaaaa

SEQ ID NO: 388311 - DNA, 1182 bp, Oryza sativa
ccacgcgtccgcccacgcgtccgctgcctctcgtcttcttctccaagaatcccgccgctgccgccaccgctgctgctgctcaactccgccggacagttcggcgaccccaaccgcccgcccgaggcggcggaggcggcggcgggggaggagagcgcggtgaccaggctcgtcgtgaggccgctcaaggaggcgttccagcgcgtcgtgctcgggttcctcttctggcaggccaagcagccggcgagggtcgagaaggtcctcaagagcgtgtacaaggatgcgaccaacgtcgacgaatacctgatcgggtccatcacggcgccgacggcggacccgaacgccggcgaggtgtactacaggctgatgtcgcggttcatggcgaaccagagccggtacacgctggacaggctgctgggcaagctgtcgtgcccgctgctgctgctgtggggggacctcgacccgtgggtcgggccggcgaaggcggcgcagatcaagaagttctaccaggacaccaccgtcgtcaacctccaggccggccattgcccccacgacgaggcgccggagcagttcaacggggcgctgctcgagtggctcgcctccctcgacgccggcaagccggcggatcagccggagcccgctctccaatccgtgtgatcaacaataaacctggaagagaaacaatgcgatgttcaagtgtactcctataagctagttaaaaatgataaataatttactagtagtgattttagtttatagtgatctatgtatagtgttggggtgtttgttacctagctgacgaactttttttttttttgagaaatccctcgttgccatgcgagatccgctcgaaattagacaaaattcaaaccggaagcttcaattcataacctcaaggtaaagaatgtagcgttacttagcaagtgattatataaattatttattattaccaaaaaaaaaaaaaaaaaaaaaaaaaaaaaaaaaaaaaaaaaaaaaaaaaaaaaaaaaaaaaaaaaataaatgaaaaaaaatatcaaattcaaaagaaaaaacaaaataaaatataaatgaccaaaataaaaacggcggagtgacttgggggggccctgtttttaagggtccttaatttccttccagggtttttcctatttatccattttttttagttagcctaaatgccctttc

SEQ ID NO: 388312 - DNA, 1330 bp, Oryza sativa
gtctcctcgtcctcctcctcctcctccccctcccggtaaggcggacgaccgagctgaggctgagctagggctagggcacccacctcctccccttccgtatcctggatggctgctggtcggggcattaaccagctcctacggagaacactccataatcagtcctcaggctcatctctgctatcctcgttccggataaagcatgaagaatcctccgctggactgagagcattggctcttcttggagttggtgcttctggtcttttaagctttgctacaatagcttctgcagatgaagctgagcatggtttggcagcagctgaatatccctggccacatgctggcattcttagctcttatgaccatgcatctattcggcgtggacatcaagtttatacacaagtgtgtgcctcttgccattccatgtcattaatttcgtaccgagatttggttggtgtggcctacactgaagaagaaacaaaggctatggctgctgagattgaggtggttgatggtcctaatgatgagggtgaaatgttcacacgtcctggtaagttaagtgaccggttcccacaaccatatccaaatgagcaagcagcccgttttgcaaatggtggggcatacccaccagatctcagtcttatcacgaaggcaaggcacaatggccagaactatgtgtttgctcttcttactggttaccgtgatccacctgccggtgttcagatccgtgagggtttgcattacaatccctacttccctggtggtgccatagctatgcccaagatgcttatagatggagctgttgaatatgaagatggtactcctgccactgaagcccagatgggcaaggatgtcgtttcgttcttgtcatgggcagctgaacctgagatggaagagaggaaactgatgggagtgaaatggatcttcctactgtcacttgcacttctccaagccgcatactaccgtcgcatgaggtggtccgtcctgaagtcacgcaagctggtccttgatgttgtcaactgagggaccactgtttcttactttcattaaaatgttttgagcatttaagcggaagcatttcaaataatgagtatgatgtacattctgccactggggtttcccatgcctagaattttctgttttcttcctctgctgcaaaagcattttcttcatgggagcacttgcaatttttgtcaatgttacctgaatggtaccagcaagcttctaacagaactgctaaagttcataaatctttatgttttgaactgtgcacaattcatttgtttcgagcacgctgatgatttgggtttcccctttttaataaaaaaacaaa

SEQ ID NO: 388313 - DNA, 437 bp, Oryza sativa
cggcggtgatggtctcattccaccaggaggccccgctcagctcagagtgaacaggacggggagggtcgagcggcagcatatcggctgaagggcttcacagcctcagggtgctcctggaaggccaatgatagctccactgctatcatcagccttgaagttgtgcagaattgaagagaaaccttatcttgatgttgtgcagaattgaagagcaactgtatttagtgattttcggcatcttgctgtttacccccaatccattgtcgacattccagtgtgtgttattgtgtgagaataaaaccaacgaacctgagatctcaccttgcattgtgaggcccaggcattgtaaaatagttgggagatagtaggtaaggagtgtgaggtgtgtgcattcagggggctttgaggcttattatgcgatgtattcccctgtcatcttg

SEQ ID NO: 388314 - DNA, 1152 bp, Oryza sativa
atggcatcggtgcactattatgtgcaatcacacatacagatgaatgaatatcgagatcgtgttgtactgccgaaagcctctaagatgttcgggaaacagattaacacttgcctaaaggttatggatatgacggggctgaagctttctgccttgaaccaaataaagatgttatctacaataacagccatcgatgaccttaactatcctgagaaaacagagacctatttcattgtcaatgctccatatgttttttcagcatgttggaaggttgtgaagcctcttctacaagaaagaacaaaaaggaaaattaaagtcctgtacggctccggaagagatgaattactaacggctatggactatgaggcactcccaaacttttgcaagcgagaaggatcaggctcgtcgaatgattcgtcggatggagttgattgctactcctatgatcacccttttcaccaggagctgtataattacatcaaacagcaagccctgaatgaagacttcatcggtcccataaagcaaggctcaatgccatgtggaatgtgccccacacctgatctgggaagaggccaagatcatggagacgatcgaaatcggagctccacaaattccagtggagctaatggcctctcgcattcattccaacaagatcaagattgaaggtccgtgatgttgcccgtgatcatatctcgtgacggagacgacgatctgcggagatattatgcttatccatctccagccccagggaactacggtggggttatagcactcccttgcttgcaatctctagctgcaggcttgactaggatccacgagtagaaagaggttagtaattgtgatgcgattctaataaccgaatccgtattatctgaaagtgtagccagttctttttctaattaacctagcgactgtatcatctgcgacacgttactatttcagtgcttatggcaactgggaaggaaatgtgatgtttccagtccttccgagtaagttgctgccctaaatatatatgtaacagtgtatgtatagcctctagctgccttttgattgcagtggtatatatcaagtgctgtactcactgctaagaatgaatcatctgcatgtttcatttcactggatgctgtgaaatttggtaaaaaaaaaaaaaaaaaa

SEQ ID NO: 388315 - DNA, 445 bp, Oryza sativa
ccacgcgtccgcccacgcgtccgcccacgcgtccggttattgagtctagagtcacctcacttggacattctagtccagagagctcaattggattgaagggaactatagggtatatagctccagagtatgctcagtgtggccatgcatcaacatatggggatgcttatagttttggaatagtacttctagagatgctgacaggcaaaagaccaacagaccctatgtttgagaatgagctcaacattgtcaactctgtggagaagaacttcccagagcagataccacagataattgatgctcaactccaagaagaacgcaagagatttcaagctacagcctagcaagaaaatggtttctatatatgcttggtccgtctgtattgcatgtggtctcgttcttgcactcctctgatcccaagagaacgaatgaacactagagaaatagc

SEQ ID NO: 388316 - DNA, 731 bp, Oryza sativa
  unsure (1)..(731): unsure at all n locations
tagttctagatcgcgcgaccaaacacacccccatcccctctctccgcgcctcgcctcgccacccgcatcgccatctcgcaccgccacctcctccactctcggcggcgggggcctcatcgatggcgtcgaggatggcgctccggcccaacgacgtcacgctccgcctcaccccgcccctcgccgccgccgcgngcaaccgccggcngccgccgngntgtcagggtctacgncgtcgcgtccggggccgtctccaccaaggttgagaacaagaagncatttgctcctccacgagaggtgcacgtccaggttacacattccatgccaccccagaagattgaaatattcaagtctcttgatgattgggccagagataatattttgtcccaccttaagcctgtcgagaaatgttggcaaccacaggatttttttcctgatccagcctcagatgggtttaatgatgaagtcaaagaacttagagaacgtgccaaggaaattcctgatgattattttgtttgtttggttggagacatgattacggaggaagctcttcctacgtaccagactatgcttaacactctcgatggtgtccgagaatgaaccaggtgcaagccccactgcctgggctggtttggccaagggcatggactgctgaggagaacaggcatggtgacctcctgaacaaatatctctacctcactggtagggtggacatgagacaaattgagaagaca

SEQ ID NO: 388317 - DNA, 468 bp, Oryza sativa
agaaaaaaaaaaagcagagacatcttctcgaaggcctgagcaccaatggcacggtatcttctccgtcctcccaccgccgccgccgccgccgctgccgccgcctcttcacaccgcaggaatggcacaacctcgccgcggggaccggttcttggcctccgggcgcttgcctccagggccggcaaagctcgccccgtgatggcggtggcgtcggagcagcccgccgcgaggggcaagtgccccaaggtggccgcccccaccaccggcccgattccggccgcggagctcctcggcgtcatccaggacgcagccagggccggagccgaggttataatggaagctcgtaataagccacgcaatattcactacaagggagttgcagacctggtcacagacacagacaaattgggtgagttcggcattctggaaggtgtgaggaagaccttcccagaccaccttatacttggggag

SEQ ID NO: 388318 - DNA, 644 bp, Oryza sativa
ccacgcgtccgcgtcgccaccgcgccgccggccgaggacgaggacttcgccacagctgctgacctccagttcgagccgccgctcaaggtcgtgaagtaccccgacccaatcctacgggctcgcaacaagcgcatcaacaccttcgatgacaacctccgcagcctcactgatgagatgttcgacgttatgtacaagactgatggaattggtctctctgcaccacaagttggggtgaatgtacagcttatggtatttaatccagctggtgggaagggagaaggagaggagattgtccttgtcaacccggttgtatacaaaatgtcgaagagattgttagtgtatgaggaaggctgcttatcattccctgggatatatgccaatgtggtgagaccagacaatgtcaaaattgatgctcaggatgttacaggggcaaagattaaagttaaattgtcaggtctgtctgcaagagttttccaacatgaatttgatcatttacaggggattcttttctttgacaggatgtctcttgatgttcttgagagcgtgcgtgagggactgaaagacctagagaagaaatatgaggaaagtacagggctatgtagccctgaaagtttgagaactacaaaggaagaaaggatctcatt

SEQ ID NO: 388319 - DNA, 538 bp, Oryza sativa
ccacgcgtccggccgatatgacaaacccagatgagcttgatgaagaatttgatacattcccaacatgaaagagtccagatctggttaggatgaggtatgacaggctacggcatgttgctgggaggatacagacagttgttggggacattgcaactcaaggagagaggctgcagtcgctgctcagctggagggatccaagggcaacatctatgttcctattgttttgcctgcttactgcagttatcttgtatgtgacaccattccaagtgattgcactctgccttggtttcttctggatgaggcacccacggtttcgtcataaggttccatcggcacctgtgaacttcttcaggaggctacctgcaaagacagattctttgctataaatattttcagagatcaatatccaattgtgtatttattttttgtttttcagtatattggtgtatgatagcattaagggaaatacattaatatttgtaattgttgcttcatctgagaggataaataagtccagtcaacagataatttctgactg

SEQ ID NO: 388320 - DNA, 529 bp, Oryza sativa
ccacgcgtccgcccacgcgtccgctcctcccctctccactccttctagaaccttctcgaccccgccatgcgccccgcggtcgccgccgccctcctcctcgtcgccgccgccgtcgcggcctcgccggtttccgccctctactccgccggctctcccgtcctccagttcaaccccaacaacttcaaatccaaggtgctgaactcgaatggggtggtgctggtggagttcttcgcgccgtggtgcgggcactgccagcagctgacgccgatttgggagaaggccgcgggcgtcctcaagggcgtcgccacggtcgccgcgctcgacgccgacgcgcacaaggagctcgcgcaggaatatggaataagaggatttccaactattaaggtgtttgttcctggaaagcctccagtagattatcaaggagcaagagatgtaaagccaattgttgaatttgctctttcacaggtcaaggctcttcttagagatcggttgatggaaagacatcagcaggttcaggtggcaagaaatc

SEQ ID NO: 388321 - DNA, 854 bp, Oryza sativa
  unsure (1)..(854): unsure at all n locations
gtccaaatcacgtctccatcttcttctatctcatccatctataaggatggctcgtatcatcctcactctctctccccactcccgcccgctcccgctctgaacttaacgctgcaaaaaaaatcttggagtgtataactgtgtaagctttgctcaatggcggaggagaacaagtccggctccggcgacctgatggcgagcggcaaggtggtcgcggaggcgaccatgtcggtgttccagcagaagagcgtggagggcgtcgacaagaaggaggtcgccggcgccgccgcggacctgctgcactcggcgtccacctacggcaagctcgacgacaagccggtcgggcagtacatcgacaaggcggaggggtacctcaaggacttcagctccggcagtggcggcgccgcaccgccaccgccggcagccggagacgccgcagcgccgaagccagcggcggaggagccgcccaaggagcctgcgccggctgagaaggaggaaggcaagccaccgtcgtcgtcggaagggttcggtctcgacgacgtcatgaagggggccgagtcgctgatggagaagaagggcggcggggaggagagcgccggcagcggcggcgccgccggtgggctgttcaagatggcgcagggtttcatgaagtaggagagctctttggctggatatatagctgcatgcatgcttgtctctggattgtggctctgctttaatttgcttgttaattaactgatgatctgtatgatgttttgtaaatgtctctcagctctgttgttaattttgtgtggtgaataataagaagacagctactttgtgtgtaaaaaaaaaaaaaaaaaaaaannnnnnnnnnn

SEQ ID NO: 388322 - DNA, 1286 bp, Oryza sativa
  unsure (1)..(1286): unsure at all n locations
ccacgcgtccggtggaggaggacggcaaggtgaggctgggtgggtcggacgtggcggtgaccaagctcggcatcggcgcctggtcctggggcgacaccacctactggaacgagttccagtgggacgataggaaattgaaggctgctaaaggagcatttgatgcgagtgtcgattgcggaataaccttctttgatactgcagaagtatatggtgcagggatatcaggagccataaattcagaaagtttactaggaagattcatcaaggaaaggcaacagaaagaacaggtcgaagtagccattgcgacaaagtttgcagcccttccgtggaggcttggcccgaggaagtgttatttctgcactgaaggactcgttatcccgccttggcgtctcctcaggtgagctctaccaacttcattggccagggatatggggaaatgaaggttaccttgatggtcttggagatgcttatgagcaaggtcttgtaaaagctgttggagtctcaaactacagcgaaaagcgtctacgggatgcttacgagcgcctcaagaagaggggagttccacttgcttcaaaccaagtaaactacagtttgatatacaggaaccctgaagaaaatggggtaaaagcggcttgtgatgagcttggtattactttgatcgcatattccccgatcgctcaaggtgttctgacaggaaaatacactccaaataatcccccaactgggccccgtggacgaatatacactcctgagttcctgaccaagctccaaccacttattaacagggattaaagagattggaggaagttatgagaagaccccaactcaggtggttctgaactgggctgatctgccagaggcaacgttggtgccgatccccggagcgaagaacgcagagcagggccagggagttcgctggtgcgctcgggtggagcctgacggatcaggaggtggaagaactgcgttccatggcacgagagatcaagccggtcatcggattcccagtagagaagttgtaatttctagtgagtttttcttctactttgggtctccgagaacatcatttacataaatacacaatgatctagacatacatagataggaaccatgtgtagtctttggaactggaaattaagatgtcttagaaaataaccaaaatttacagtctgagtagcgtacatgcatgtatgctcatcgaccatattacaactaagattggtaactggattatcttcaagaaaccaatgttttattttctctggnnnnnnnnnnnnnnnnnnnnnnnn

SEQ ID NO: 388323 - DNA, 989 bp, Oryza sativa
ccacgcgtccgctctttgaacgccttactgaagcttatggagatcaaattacatccatgctcactatccagtacagaatgcatgagctcataatgaattggtcatctaaagaactttataataacaagatcaaagctctttctagtgttgctgatccatatgctctatgacattgaaagaattgaaaagattcttctcccacagacccgacttttcatactaaatggccctactgggtgtgacctggaagaagtaaaagatgaggaggagagcactatgaatgaggttgaggctgcagtatccattgctcatgccaagctgcttgttgagagtggtgtccgtgcatctgatattggaataattacaccttatgctgcacaggtaacctgtctgaagatgatgagaaacaaagtactaaactgaaggacttggagatatcgacagttgatgggttccagggtagggagaaagaagccatcatcatttcaatggtcagatccaactcaaagaaagaggtcggattcttaagtgatcatagacgaatgaatgttgctgtaacacgagccagaaggcagtgctgcctagtgtgcgatgtagagaccgtaagcaacgacaaattcttgaaacgcttggttgagtactttgaggagaacggggagtacttgagtgcatcagaataccagagctgatgacttggggtgttaacccttaaccgtgatagcccgtgcttatcgcaaagatagtgaagagatatatccaaacgatgcttgtgataggaacatcgtgcacttcaaactggtgcaatatggccaatggagatactgtcattcgacttttatagattggaaacagatcgctgtgagactgaacagataattagctcaggagtggatcaatttcgtcttgactggccctgttctggtctcttcttctgtggcttatggaaatgaaacctcagttatgtgtttttaaaaaaaaaaaaaaaaaaa

SEQ ID NO: 388324 - DNA, 1123 bp, Oryza sativa
ccacgcgtccgcggacgcgtgggttccggccgcagcctacctctgcctctctcctctcctcgcggcgtcggcagcgagttctcctcggatcgggagtggaggagaagcgggaggaggaggaggaggagggatgagtctcttcgggctcggccggaatcagaagacgttccgtcccaagaagagtgctccttcaggaagcaagggtgcacagcttcggaagcacatagatgccactcttggcagtggaaaccttagggaagctgtaaggttgccgcctggagaagatatcaatgaatggctggctgtgaatactgtggatttctttaaccaagttaacctgctgtacggcacactcgctgagttctgcacacctgagagctgcccaccattgactgctggcccaaagtatgagtacagatgggctgatggtgtacagataaagaagccgatagaagtatcagcaccaaaatatgttggagtacctaatggactggattgaaggccaacttgatgatgaatctatatttccccaaaagcttggcacaccattcccgccaaacttcaaggaggttgtaaagacaattttcaagcgcttgtttcgtgtttatgcccacatatatcactcccattttcagaagattgtcagcctcaaggaggaggcccatcttaacacgtgcttcaagcacttcatcctgtttacaactgaatttggcctgattgacaagaaggagctggctccactccaggagctcatcgaatcgattattccatactgagaagaatacagggacggaacggagcgtggataacgagttctttacatggacgatcgaggaatcaggctacttgcaacactattttactggcatagagcttactgttccagatatcagacataaaaaaggacatttgacattgctaatgctatgttttttgtgtactgatgttcgttcgtcctgattcagtattaccttgtgtaagcgtgcttgtaatgtaataacaggattggtggattgggatatattgcaaagaacgatctattaatccaatcgtgagttgcaattgttgcttcaaaaaaaaaaaaaaaacgcccgcccgctcgcgatctagacggacgcgtggg

SEQ ID NO: 388325 - DNA, 1400 bp, Oryza sativa
  unsure (1)..(1400): unsure at all n locations
ttggtggggatgtagggaggttctctatgataagctgccacttcataaatcatatgaggaacgtcctatcctatccaaggctacaagtagagagataataaaagcagatgcatatgtcgcagcttgtgatgtcccggggatcaaaagacttttaccttctgaatggaggcaatgggatacatttgacaacatctacaagttagatggtgttcctgtagtcacagtacagcttcgttataatggatgggttacagaacttcaagatttggagaaatcaagacaactgaaaaaggcagttggcttggataatcttctctacactccagatgcagatttttcatgtttttcagaccttgcactttcatctcctgctgactactacattgaaggacaagggtcctttgatccaagctgtgctaacccctggcgatccttacatgccattgcccaatgaggagataattagcaaggttcaaaagcaggtcttagaattgttcccgtcatcacaaggcttggaacttacatggtcgagtgtggtgaaaatcggtcaatcattgtaccgcgagtcaccaggaaatgatccatttagacctgatcaaaagacaccagttaaaaacttcttcctgtctggctcttacacaaaacaggactacattgacagcatggaaggggcaactctctcaggcaggagaaccgcggcctacatctgtggtgcaggagaggagctgctcgccctccgaaagaagctcattgtcgacgacagcgagaaggccaggggtaaggtcgaggcccttcagacaagctgagcttcctcaaatgacacatgctggagtgagtggattgctatgcccaaaacaaaaacagcttcctgggtgtagtaggcgatttccgcagcgactctcatgtaaatcctacttgattgagcatttaggtccaatctgctgctgccctttttgccttgacacgatcgttcgttcgcccgtcaatggtgtgttcttcgttattgtgaatttgtgattgggaaccaaaggtggcatacgggattacatcaggcagcgtgtgttttgttcagcttaaccgatcattgaacccattgatgatgatgatgatgtttatatagtgcacacatcacttaaaatcttgtgagagatggtgcttaaatttggtgagtactgctgtactttataaggcagctttagagtttttataaggagtatattttgaacattgtgagatgagaaattttagatacttaaaagtacgagttacttaaattttacactagtaagctgttggtatcttaaaattttggtaccaagtcggtaccttgtcaaggacagtaaaatttatcaaggacagtaaaattaccttgtgnnnnnnnnnnnnnnnnnnnnnnnnnn

SEQ ID NO: 388326 - DNA, 454 bp, Oryza sativa
ccacgcgtccggcagaaagaagggtttgccagcctaatgggctgcaggaactgatagatggggagatatcaaattactctcatgggcgatgtttcgtgcggccatctggtaccgaggatgtggtgcgtgtatatgcagaggcatcttcagaggaagcagctgattgccttgcaaaacgagtggcgcagcatgttgagcgcattcttggataatttgccttccctttttttatctcttcattttccagaagtttaaagtgttcactttagctcaattgcctgacacatttgaagaatatcaaaatccatttgtttgtaatgcaacactacatgtttattcgaaattttcagattgtacatactgtgtgtagagccatcagttattgtaccaaaaaaatagtatgaacagattgagttccaacgcttctttttttaagaaaggaagttgtccgtgc

SEQ ID NO: 388327 - DNA, 450 bp, Oryza sativa
  unsure (1)..(450): unsure at all n locations
ccacgcgtccgctgacatcgagacaactgcccttggagctgcgtatgcagctggattagctgttggagtctggtcgaaggaacaaattttcgctggtttgcacaaggagaacaccagagtcttccgcccgaaattggatgaggcccacaggaggaagagagcagactcctggtacaaggccgtttcaagatcatttgatttggctgacctttctctttagaatgacgagggatttgtgaattacttctggattgtataaggtgcttagcacttgttatgtccatgaataagttggtcaatggaacatccttcaaaagaattagttgattccccacgctttgctgctggaattattaagtaattttcaatatacttttttnacaattgagataggagtaaaaagaaaaaataatgaaatgtcagtgtttattnagtaaaaaaaaaaaaaaa

SEQ ID NO: 388328 - DNA, 443 bp, Oryza sativa
ccacgcgtccgccaaaaccttatcttcccaaagcctcatctcctccttcctcccaccacctcgcctcgccatggcggccaccctcttctccacctcgctcacccccaccttcctcccggccgtcccctgccccaagcccgcgccgccggcctcagcctgcttcccctgcgcgctgccgccgcgcgcctgcgctagcggcgccaccggcgccgctgcggaggcggctttctcccgtggccgtcgcggtgtcgtcggaggtggaggaggaggagggtggcgcggagtccgagggggagttcgccgaggacctcaaggtgtttgttggtaaccttccgttcagcgtcgacagcgcgcagctcgcggggctcttcgagcaggccggctccgttgagatggtcgaggttgtatatgacagacagaccggaagaagccgtggctttgga

SEQ ID NO: 388329 - DNA, 499 bp, Oryza sativa
  unsure (1)..(499): unsure at all n locations
ccacgcgtccgccacgcgtccgcggacgcgtgggatcgccgcgagacggaatggcggcgtcgcccatggtgatccgatctagggttttagcccgcgccgtctccgcctccctccgccgcaccctcgccgctcctccctctcccctcctcgccgcctcctcgcgccgcgcctcctccctccacaggttaccctcggtgtgcgggggcttgttgtccgtgatgccgctccacagcgccgtcgcgtcggccaggctccggtcggccatctcgcccgagtcccagagctggggcatcgtccctcaagggaattctatgcctttatgacaacatacttttcctgccctagccattgtaacttggttcagaagctttttgaaactattgatgccttttagcacaaaccatagaagagcttacaagaagccataaactgtttaaccattaaaaggcatggcttttttggggtgctgtacattcagtttcanatgtccatggtattg

SEQ ID NO: 388330 - DNA, 978 bp, Oryza sativa
tgtctttcttttcctcctctgctcatcccctccccagatctccagccccaggagctccggagggttcccaatggcggtgaaggtctatgtcgtgtactactctatgtatggacatgttgctaaactagctgaagagatcaagaagggtgcttcatctattgaaggtgttgaggctaaaatatggcaggttcctgaaactctccatgaggaagtacttggaaagatgggcgcgcctcctaagccagatgtgccaacgatcacaccacaagaacttactgaggctgatggaatcctgtttgggttccctacaaggtttggcatgatggctgcgcagatgaaagcattctttgatgcaaccggtggcctgtggagtgagcagagccttgcaggcaagcccgccggcatcttcttcagcactggtacccagggcggtggtcaggagactacaccgttgacagcaataactcagttgactcaccacggcatggtgttcgtcccggtcgggtacaccttcggtgccaagatgtttaacatgggagaagttcaggggggcagcccgtacggcgccggcacctttgccgccgacggctcgaggtggccgacggaaatggagctggagcacgccttccaccaggggaagtacttcgcaggcatcgcgaagaagctcaaggggtccgcttgagatctccattgggcaaattcaattgggcgtgtgcgtgtccctacgcacaacatcgtgaggcatttcatacagctccaaaccataccgacatacagtcaatagcttggtctcttcttttgtggtgtttctcgatgctatgtggcttctccctggaacttctcattgccgtacgcatgatatgatgctgttttacgctttggtcagctggttgtaatttggagtaagttctgttattgtattattggttcccccatgatatatattggttattgaacggggaaatctcttggttcccc

SEQ ID NO: 388331 - DNA, 547 bp, Oryza sativa
ccacgcgtccggaaggttctttctaagatagccttcaaacattcttatgctaaaataggagtattctactgtggggctccagttctggctcaggaattaagcgatctttgccatgattttaatggcagatgcacgtcaaaatttgagtttcacaaggagcatttctaaaatcaggtaaatgccaaatagggaaataatagaagattgtgctacttgtatgacaccttttcttttacacgatgccttgttcacaatggaattaatagcaagggcgagaagcatagaggtgctatcacaacgcaccctcctggctacggccagtttgcactgtacacttcttgcttgagatactcagaagatacaataagagtgccaagataagagttttggggatcatctggtacaaaatatataggacatcaatcatggggaaacataggttccaacttccaagtgcatcggcgaggtgattgctcgtaacatgttgatctcctggatttggatttggttttcgactataatctggtgtaggacatagaaggctacc

SEQ ID NO: 388332 - DNA, 1258 bp, Oryza sativa
  unsure (1)..(1258): unsure at all n locations
gtggacaatgccctcagagatgcaaagttgtcatttaaagacatatatgaggtgatccttgtcggtggctccaccagaattccagctgtgcaggatcttgtgaagaaaatgactggaaaggaccccaatgtgactgtcaaccctgatgaggttgttgcacttggagcagctgttcaggcaggagtgttgtctggtgatgtgagcgacattgttcttcttgatgtaacaccactttctctgggttgggagacactgggtggtgtgatgaccatgattatcccaaggaacacaactttgcccacctgcaagtcagaggtcttctcaaccgctgctgatggccagactagcgtggagatcaatgtcctccaaggagagagagagtttgtcagggacaacaaatctcttggtagctttcggcttgatggaattcctcctgccccacggggtgttccacaaatcgaagttaagtttgacatcgatgccaatggcatcctttctgtcagcgccgtagacaagggtactggaaagaagcaggacattacgataactggtgccagcacattgccgaaggatgaggtggagaagatggttgaagaagcagagaagtttgccaaggaggacaaagagaagagggacgcaatcgacaccaagaaccaggcagagtctgtcatctaccagactgagaaacaattgaaggagctcggtgacaaggtcccaggcgattgaagggtaaggttgaggcgaagctgacggagctcaaggacgctgttgcaggtggctcgacacagacgatgaaggatgctctcgctgctctgaaccaggaagtgatgcagctggggcaggccctctacagccagcagggtgccccaggagcaggacctaccccaggagctgatgctgccgctggctctgctggcccatccgagaagccaggaggcgaggaaggtgatgtcatcgatgctgattttacagacagccaatgagcaggagagtagttaggtccgaaattttaaggaacgtttcgcgacgagtttgaaatttgttccacaagattgtaggatctggggtgtatctttttgttagatgggcacctttgcttcctatttgtggagttctgggcggcggagtttttgagttctgggaatttcacttccaaatagatgatgctttcgttgctcatacaaaaaaaaaaaaaaaaaaaactcgagggggggcccggtacccaattcgccctatagtgagtcgtattacaattnca

SEQ ID NO: 388333 - DNA, 773 bp, Oryza sativa
ccacgcgtccgcccacgcgtccgtttttttttttttttttttttttttacttcaacagaaattgtgtataggtgaagcagaacaaccgtacctgaacagtgtgcaagtttcagtacatagtaacatatataatagctattacaaatatctcataatgcaagatgatgattatttcctagtgattgattgattgatttttctcaatgagcacgctctctaagaagctcaatgtccagctccgacggatcagttgcctgaatctcatagtgcacaccatccagctctctcctgaaccgttctttggaggtagcatacaacatcttggcgcggatgcgagaaaccgaaggcgaccatgcgacgaagaagatcttgctcttctggcagttctcctcggtgacgaagtcgaagtcgtagatggcgtagcggcagtcagattcagggagtgagtccatgaaatcgtcgaagctctcggtcgatgaacctgtcttttcgacgacgacctccttgcacttgtcgtcgatcttgaagatgacatagcggtgtgacccacttcctctgaagctccagaaatgtctgcttgcactcggcagctacaccgattccagaggaagcatttgcgcgtgatctgacgaatgccatggttaatttcctcctctaaagatgctgattaagcagagaaagatacaagaacacacaagaacaagaagctactagaccagaaacagatatatagagcaagctaagcaaaagcaaaggcaaagccggacgcgtgg

SEQ ID NO: 388334 - DNA, 1392 bp, Oryza sativa
  unsure (1)..(1392): unsure at all n locations
tttgactagggnaactagaagatgaccggngggtttttttgagatgacttcgcgggcttcaccccctatacagaatataccaaacaagtacacctcaaagatgcttctagctgctattgatgaaaatcataaagggacttatgattttatttacctaccaattgacttcaagaacaagtgcaatgtaggctatgctttcatcaatatgaccaatcctcagcatatcattccattttatcagacgttcaatggcaagaagtgggaaaagtttaacagtgagaaagtggcatcacttgcttatgctagaatccaagggaaatcagctcttattgctcacttccagaactccagtttgatgaatgaggacaagcgctgccgccccatactattccattcggatggtcctaatgcaggagatcaggaaccattccctatgggtacaaacatccgagccaggtcagggagatcgcgagcttcctctggcgaagaaagccaccaggacatctcaatcacctcggttaattgtgacacttctaccaatggagttgatactacagggcctgccaaggactgagtaacacaactgctctggatcactaacccccaaatcccaaatcataacttttgcgacgcggtttccatttcccagttttccgccctttttcccccaactttggtttttttggtatgacccccaatctgtatttattaacttccatgaatgcgggttaccgaagacttggctagattgctgcaacattttgtccctgatggaaacatggatagagagacagagagggtgcttccagtttcccctgaacctaccattatcatattaacctgaaggccgagaaaggtgaaaggcgcagcgagagcttccagattttggtcactttttaagaatgtattaaccccatgttgtatagcagtttccagtaactgtgctgaggggagagagagaaagagaggagagcaaggagacaatttacatgagtttttagtggtggtgtggagaggaagtctttccctgcattttcttttggaaccttttctggcgtcttcatctatgttccattttgagttgaggtctcctcttttaagttgtgtgcagaggagttccgattttgtcttcagggaactttgaccgtatctatcgaccttcatatgtaaatcaacatctctatatagtttgtgtgccctctgttgtatgaccggcggtcgttgaagcggangaagaaancgtcngcgtgccgtgcancactgcgtcctctgctcgttgtcatcantggtgtgcaccgcncaacgaagcgggtgatattgaactctcctgttcagtctcttggaaacgcatcccgtggaaaagggctcngtgtnctgtgtccccgcagcgaa

SEQ ID NO: 388335 - DNA, 714 bp, Oryza sativa
  unsure (1)..(714): unsure at all n locations
gttcgcctgacgacgcaacgccaatgccaagaaccaccaccaccgcccatgaaacctggagacgcgccaagagtacgcagaggctgagctgagccaccgcgacgtacgacgacgacgactatggcggcggcggcgttgctgttggcgccagtggcggcgccatggtcgcgtgtaccgtctgcagggaggagggttcggtgcgcggcgactgcgccggcgccgatgggggagaagacggagtaccgggacgggccggtggagcgcgccttcatggggctgttcgcgcgcaagatggagaagtacgccgtcgtctccagctccggcgggaaggggaaggagaagaagaaggagaagagctcgaggtcggtgtgggagtgggactacgagagcttcgtggacgtgtcgcggcgggtgatggtggggcggacgcgggcgcaacagcaggaggccgtccgcgtggtgctcctctccatgctcccccccggcgcccccgagcagttcaagaagctcttcccgccgacgaaggtgggcctgcgagttcaacgctgccctcaccgtccccttcttccactggctcgtcggcccatcagaggttgttggaggttgaggtcaatggggttaaacagaagagtggagttcttataaagaaatgcagggtaccttgaagaacaagcggcttgcgtcggaattgtgcgttaacatgtncaaaattcc

SEQ ID NO: 388336 - DNA, 843 bp, Oryza sativa
  unsure (1)..(843): unsure at all n locations
gngancgcnancncncnantncngntcgactgccctcatcgtgcgctaaactctagccagatctcgctcgctcgccgctcgccgccgccgccgcgttccaccgagcggagagtagagggaatggcgtccgagggcgtgctcctggggatgggcaaccccctcctcgacatctccgccgtcgtcgacgacgccttcctcaccaagtatgacgtcaagctgaacaatgcaattctcgctgaggaaaagcacttgcctatgtatgatgagttggccagcaagggcaatgttgaatatattgccggaggagccacccagaactctatcagggttgctcaatggatgcttcaaactcctggtgcaacaagttacatgggttgcattggaaaggataagtttggtgaggagatgaagaagaatgcccaagctgctggtgttactgctcattactacgaggatgaggctgctcccacgggcacatgtgctgtctgtgttgttggtggtgaaagatcactggttgcaaacttatcagcagcaaactgctacaaatctgagcatctgaagaaaccggagaactgggcactagtggagaaagcaaaatacatctacattgctggctttttccttacggtctccccagattctattcagcttgttgctgagcatgctgccgctaacaacaaggtgttcctgatgaacctctctgcaccctttatctgtgagtttttccgtgatgcccaggagaaggttcttccgtttgtggactacatcttcggtaacgaaacagaagcaagaatctttgctaaagtccggggatgggagactgagaatgtttaggagatcgcg

SEQ ID NO: 388337 - DNA, 598 bp, Oryza sativa
ccacgcgtccgcccacgcgtccggatcaatcaggcggcagatgagtatgactcttgctgtggcagatgggcacctggttaatatgggaaaaatgatagaagaaatggagggcaagctcagaaacccgttggaccaggtttattttgggaagaccagagagatggtttgcacgcttcggccaccacccgaagtattaaacaggaggctacctgacagctgagaaaacgcagagatgtgaatttttaacacaagaactatatattagtcttgcaatcatctccttagcgacctagagtctcttttcgtaattgatctgtatttaatagtagcagtctctaaaatggacaccactttgagccatcataggagtgtcttctccattgaattgtgaggaaactgggcaaagcttcttcatggcagctgtaacagagagtttaagcaaaagggagcaggagtttgcatttgccgaactcgttgtcactgcccctgagagcaatattctgtcatctttgtgaagatctacatcttcttgtgaccttacaatttgttaaatcaatgcaagaatatggttatctgcttaaaaaaaaaaaaaaaaaaa

SEQ ID NO: 388338 - DNA, 472 bp, Oryza sativa
attcagcatgtctcttgtcaatctaactaccatgaaaatcttggtaaaccgccacagattgatgagcacaagcagccagaagaaaaccatcagttgcatcattcaagacagattctccgagaatcaggagaaccagttgacttggcgaaggctcatatggagcgtattaaccagagtgctagctgtagccaggatattcgcaaaggaagtggatgcactgggagcggtgaaactgatgcaaatacaaatacggtaattgcactagaaagtggcaatgagagcggtgtccagaactgcagtaataatgtattggatggtgaccggtctcgccgtgaagctgccttgttgaaattccggatgaaaagaaaagatagatgtttcgagaaaaaggtcaggtatcatagcaggaagaagcttgcagaccaaagacccagggttaagggccagtttgtgagccaaaaactgaagtcag

SEQ ID NO: 388339 - DNA, 570 bp, Oryza sativa
  unsure (1)..(570): unsure at all n locations
ccacgcgtccggggaaagagggcacattggatgcagcaagacgtgcttctgcttttgttcggggagatgatgttgttcataagctatttacagagctagcctaccgttacaagaaccgagctggtgggtacaccagactattgcgaactaggatacgagttggtgatgctgcaccgatggcatacattgagttcgttgatagggaaaatgaacttcgagaagccaaacctgcaacaccacagccacctcaacggtctcctcttgatccctgggccaagtctcgtgctagccaacagtgggcgggacctaaaatcagcgagggctctagaaaagaaggcttatgaaaataatattcatgtgttgagttccttgagactgtattcaattttctgtactaggctatgaggcaccagcttgtcattttggaggagttttgtcacgagatatattgtcaatagaataatttgaacttggctgcttacttttaacaaancctgatgccctcatganatgtgtatcatgtttgactgcaaatcattcattgganatatgaaatgcanaattatccaa

SEQ ID NO: 388340 - DNA, 538 bp, Oryza sativa
tcttcactcgcccgacatacttgcttcctagcatcacaaggtagacgatggctaagggtcacgtcctcgtgctcccgatgccatgccagggccacgtcatcccgttcatggagctctcccaccgcctcgccgacgagggcttcgaggtcaccttcgtcaacacggaggtggaccacgcgctggtggtggccgcgctgccgccgggcggcgccgcggagctccggcagcgggggatccacctcaccgccatccccgacggcctcgccgaagacgaggaccgcaaggacctcaacaagctcatcgacgcctactcgcgccacatgccgggccactttgagcggctcatcggggagatcgaggccggcggcgggaggcccaaggtgcggtggctcgtcggagacgtcaaacatggggtggtcgttcgccgtcgccaggaggctcggcatccgcgtcgtctacttctcgccggcgtccacggcgtgcatcgccttcatgcgcaagatccccaagctgatcgaggacggcgtcctcaacgaga

SEQ ID NO: 388341 - DNA, 480 bp, Oryza sativa
ttgttagtacgtgcagttgccgcctctagccacaccctcttgcagcctccacagaaagccatagtagcatcacaacttcacaaggtagaagaagaggagaagggagatcggcaaatatggctaagggtcacgtcctcgtgctgccgatgccatgccagggccacgtcatcccgttcatggagctctcccaccgcctcgccgacgagggcttcgaggtcaccttcgtcaacacggaggtggaccacgcgctggtggtggccgcgctgccgccgggcggcgccgcggagctccggcagcggcggatccacctcgccgccatccccgacggcctcgccggcgacgaggaccgcaaggacctcaacaagctcatcgacgcctactcgcgccacatgccgggacacctggagcggctcatcggggagatcgaggccggcgccggcggcgggaggcccaaggtgcggtggctcgtcggcgacgtga

SEQ ID NO: 388342 - DNA, 675 bp, Oryza sativa
tgccggcgccggcgttggtagggtagccatggcggaggaggccaccctgagccacccgtcgcggtacgtgaagctgagcagggagcacgacgcccccgcccccgccgaggacatccgccccggcgagctcaaccagccagtccacgtcccgcagctcgagggcaggaggtgcagcgagtgcggccaggtcctgccggaatcctacgagccccccgccgacgagccctggaccaccgggatcttcgcctgcaccgacgatccacaaacctgccgaactgggttgttctgtccttgtgttctttttggacgcaatattgaggccctcagagaggatatcccttggacaacgccttgtgtttgccatgctgtctttgttgaaggagggattgcgcttgcaattctcaccgcaatatttcatggtgttgatcccagaacgtctttcctgattggagaaggtttggtgttcagctggtggttgtgtggtacttatacggacatctttcgccaagaacttcagaggaaatactcatctcaagatttctccatgtgacccttgcatggtccattgctgcttgcactggtgcgcgaattgtcatgagcaccgtgtaaggacagtgcggcttgcatagaacagcgcggtgccaaatacttccgtgaatacatctgcattgcttg

SEQ ID NO: 388343 - DNA, 888 bp, Oryza sativa
acgcgtccacgcgagagatgggctccgcttcgctggcgacgcagccttcgccggcggcgtgcctcccgtccctgcccgccggcggccgtgttcgcctccggctggctccaccaccccgcgctccgccgcgcctctgcaagcgcgccggcaaactccgggttgctaccatcagatcagctcatagtggtgtgagcaacgtatctgtagaaacccctcctgacaatgaggcatccgtgaccggtgctgcttacggcttcagaggagcaacaacatcgcttacgaatgagatgctaactctgccgaagaagattactcttgtcaggcatggtttgagcacttggaatgcggaaagccgcgttcagggaagctcaaatctgtccgtgttaacagaaactggtgccaagcaggcagagaaatgtcgcgatgcccttgcgaacatgaaattcgacgtttgtttctctagtcctatctcacgggcaaagtcaactgccgaaattatatggaagggaaaggaggagcctcttatatttcttgattctttaaaagaggctcatctattcttcttagagggcatgaccaatgcggatgctaagaaggaatatccagagttgtacaccagatggcgggaggatccttcaaatttcaaggtcaatggcatatacccagttcggaagttatggggaacagcaagagaagcttggaaggaaatcttgcttactccaggagaaaatatgttggtcgttactcacaaatctattttgcgcgcacttatttgcaccgcgctaggtcttccttctgagaggtttcgttccattgatgtgaacaatgggggcatgtgcgtcttcactgtaaacaaagcggggagaggctattccttcaagcccttaa

SEQ ID NO: 388344 - DNA, 1246 bp, Oryza sativa
  unsure (1)..(1246): unsure at all n locations
tcgtcgacgagacgacgtgcccgccgctcgccaccccccccacccgctcgcgcgcagtaaatacagcacgccacgcccatccctctccctctcaccaacaacagtaacccaaccagagagcttgcggaagcgggggtttggtgcgggcgcgcgcgtgtgaggggggagagaaggccaggaggaggcgacgccgtcgcccgagggaggcaaaaatccgatcctcctcctgccctgctcgctcgctcgctcgcctgcgctgcgcgacattggccccgtcccgtccgttcccgctcgccaggcatagaaagatggtgctctgggtcttcggctatggctccctgatctggaaccccggattcgacttcgatgagaagatcctgggcttcgtcaagggctacaaacgcaccttcaatcttgcttgcattgaccatcggggcacgccggagcatcctgcgaggacctgcacacttgagtccgacgaggaagccatatgctgggggattgcatactgtgtcaaaggggggcttaaaaaggagcaagaagcaatgaagtacttggaaagaagagagtgtgagtatgaccagaagatctctgtggatttctacaaggaaggagattctttgaagccagctgtgacaggtgtactagtctttgtatccactcctgatccagtaggcaacaaatactatcttgggcctgctcctttggaggacatggcaaggcaaattgctacagccaatggccccaatgggaataacagggattacctgttctcaatggagaaggcattgtccaacatatgccatgaagatgattcaatcatcgagctagctaacgaggtcaggaaggtgttgagccggccgaaggagaagatcactggctccgatagcccacaaaaatctcacgctctcgtacacctgtctgcgcttcctgagggcactgttgtggactcaagatagcaagctcggcggtggaagagatgagatctcctctgacctactcactcttgacgctggattgaacgagtttaacagtctgcttcgagctccctggcacactggggaaccagaatgtgctgattttctttcgcaaccgctgcggcaatgctgtaactttcattttgctaatactagagccgagactggtgtgctgctgtttcctttgacacactaaataataaagggattccatgagcttttcactctaaaaaaaaaaaaaaannnnnnnnnnnnnnnnnnnnnnnnnn

SEQ ID NO: 388345 - DNA, 392 bp, Oryza sativa
tacgaacacttccccgtgcccgcgcctcgcgacgggcccaaatccaacacgacgacgaggaggaggagatcgagtgcgccaccgaatcgaataaccacaagccgcggaagatttcccctccccccggtggatccctcctcctcctcctcctcctcctcctcctccggggtcgcctcctcccctccgatggagtccgggagcgagagcggcagcgggagcgggagccgaggggagatcacgctggccatcggcggtggcggcgcgtcggcggcggcgtggactcggctggtcagctccggcgtggaggacgtgctggtggtggggggcgcgggtggctggcgtggaggaggaggaggagatggagcgggttgactgttgtcggtcgggtattt

SEQ ID NO: 388346 - DNA, 448 bp, Oryza sativa
cccacgcgtacggggggaccacatgttccagaagatcatggacatctgcatccagaggctcaggaagtgctactgcggcctgaccgcgcacaacgtcatctccaggttcgacggcaggaggtcgacgctgtactacaacgtttctgaacctgaggatgtgaactgcaatgcttcttgacaacggatcgcccaaccttccgtcaggttcgcgttgtgatctagcattaggctctgtgcaatgcagtgcagagtctcgagtacagcgacctgggtaactgcttgtgaagcagaaatcctctgtaaatatgaaaagaagataggatttatggcaggtcgggtagctctgaccggctgttgcagtttcacgtagattgcagctgaactgaagaagatcttgaagacttttcagaaaatttcgtttctgtgtatgcgctcacgctaagcagct

SEQ ID NO: 388347 - DNA, 1123 bp, Oryza sativa
  unsure (1)..(1123): unsure at all n locations
cggnacgnccacggctatctatactgctgacctgacacaattntttacatggacatgtgctagatgtggtgacctgattgaggggtttgaaatgatggatatcatcgtagatgtgggagaactgcttgcaggcatatgtaggttttgcaagtgatatcaatgctatagtagttgtatttagaggaactcaagagaacagcattcagaactggatagaggacttgctatggaaacaacttgatcttgactaccctggtatgcctgaagcaatggtacaccgaggattttattctgcttatcataacacaacaatgcgtgttggagttgtcagcggttattcagaaggctcgaaatttgtttggagatgttccgatcctggtaacagggcattcaatgggtggagctatggcttcgtttttgtgcacttgatcttgttgtgaactatgggctagatggtgtgaagctaatgacatttgggcagcctcgggattggcaatgctgcttttgcttcctttttcaagaaatacttgcctcacgcaatccgagttacccatggtcatggatatcgtgcctcacctgccaccatacttctcattcttcccacagaagacctaccatcatttcccaagagaggtatgggttcataacgtcggactaggaagcctagtgtactcggtagagcagatctgtgatgattctggtgaagacccatcgtgctgcaggtctgtgagtgggagcagcgtgcaagaccacatatactatctcggcgtcagcatgcacgccgaggcatggagctcctgcaggatcgtcatggactacagcaagctgcgttaccggatggacatcaatggcaacatcgtcttgtcaaagcatctgggtttgtcaggtgacctagaacacagtgaccaatgattcaaaatggaacagatttagtataatggtagcttagatgtgttatattattgtacagtactactacacgtgtgttcctctctctgatgctcatatgtgtcaaaattgttcatgcgtcagaagaggattgggagatgcttgctgtaaatgtggtttggtaatgtgaagcattgttcagttcacaaaaaaaaacacannnnnnnnnnnnnnn

SEQ ID NO: 388348 - DNA, 1017 bp, Oryza sativa
  unsure (1)..(1017): unsure at all n locations
tgctggtggaggtgtgtttaaaaatgataaaggccttaagtgccagattccaggggccaatcttaatgatattgcaaaccaggcagatgatctcttggagtcaatggaatcaaggcccacaattcctgatcgaaaacttctcgctagactagttatcgtaagagaggaggctcgaaatatgatgggaggtggcctgttagatgaaagaaatgaccgtggtttcacaacgcttcctgaggcagaggtgaacttcttgagcaagctggttgctctcaaacctgggaaagcattggagaggatgatcaaggatgttatgcagggcaaggcagaaggtgctgataacattgaaaatgcaaatgctggaccagattctaagcttaatcatctaactgggatatctggaaggggaagtgtgacaggcctcaagccacggccagtccgtccaggaatgttccttgagacggtttctaaggttctaggtggtatatatgcaaacaacacatctggcattacagcacaacatctagaatgggtacatcaaacaacactgaagattcttcaggaaatggccttctaatgctgttttctggacgacattcactgccctgttcaagtatatgaactccctagattcttggcccttttaagcttatgatattacagcctagtgggcaaaaggatcatggtatggaccttagtcttgctgcaaaaacttattgatttttttttaccagtgaatggcaaatcttggaggaacttgagtggccattactaatatagttaaaaatagaagcagaagaaatgatgtctgggcatgcaaaggccaatggtgatctctgggtggaatgtaatatttataccacatttagtgcagaagtaaagtaagagcttcgaaaagcaaatagtcaaatggacacagtgatatttagcttagcttcctacaatggatattaagagagtttagcttacttttgagtgaaatagaagatggccttngatctaaaaaaaaaaaaaaaa

SEQ ID NO: 388349 - DNA, 463 bp, Oryza sativa
ccacgcgtccggcgccagcgagctcggcgacggcgtggacgcgctgcggcggtgcgtggacgccatggcccgcgtcgccgtcggcgaggagtcgtcgtcgacggcggcggcggcgaggaggaaggtgaggttcgaggtggacaacgtgcggacgtgggccagcgcggcgctcaccgacgacaacatgtgcatggaagggttcaagggggaggccgccggcggcggcggcgcctgggaggccgtccgcgtgccacatcttgggcctcctccacctcaccgcaaacgcgctcggcatcctcaacgccatggccaagcaaatataactcctccctagctagttgataactcagtgacatacatacccatgtacgtacgtcgaggtatgcatactggatttatacggttttaccgtttgttttccgtcatatattcaacatgttttgcgtacatatatataccaatt

SEQ ID NO: 388350 - DNA, 556 bp, Oryza sativa
gatagcttctgttgtctgggaccaggaggctggtcggtatgtttcagtgcctgcgcagacaagggcagttcctggtcttgatctgccagcaagaaccccgcgtttcttggcaaatccaactggtgagtcaagcaaccatgggaaaaatcttgcacctgcaaacgcttcttcctcggcaatatcatcagggcagccatctgagagattgacgtacactgggcagtcgatattctttggcgggccaattctgagcacctcaggtacgaacgctcagaggagcgaagcgggcacaagagcacgacctgatggaagtagtgatcctcctaatgccttccagcgtgatacccggggcgagagagcacgcacgggctccttcccggtgtttgctcctgggacttttcagaagaacccaccatttgacaagtgatttcctgttcttgatgtcatctctgctcaagagcttccatgacaatagaatgaatgatgcatctgcacttggatagttcagatcagttgaagaggttgcctcttctggtgcagccacaagaagtaagca

SEQ ID NO: 388351 - DNA, 712 bp, Oryza sativa
tctagatcaccggccacgagaccaccacgagtgcacgactacttgaggatggcgagcccaacaacaatggtgggagtggcaacctcggcgcatctccacaccaccaccaccggccgcctcagctgcgcctgtgcaccaccgacgaggggaacaaggcggcggcggctcgcggtggcggtgcgggtgcgggtgcgggtgcgggcgtcggcgtcggaggcgatggcgacggagaagctcggcgtccgtgtggagcgcaacccgcccgagtcccgcctctccgagctcggcgtccgcgagtggcccaagtgggggtgcgagaagagcaagttcccgtggacgtactcggccaaggagacgtgctacctgctgcaggggaaggtgaaggtgttcccggacggcgccggcgaggatttcgtggagatcgcggcgggggacctggtggtgttccccaaggggatgagctgcacctgggacgtcgccgaggccgtcgacaagcactacaagttcgagtagatttggggatttggcacgccaatcgatttcagccatatgacatggcgatggtttgtgcttctgctatcttctactagtaacttagctcgtgctcttatgcgttatatgctccagttgttgtggatcatctcctgcaaatgaaataaaacttgattagtggattaaaatgatgggattagtggtaaaaaaaaaaaaaaaa

SEQ ID NO: 388352 - DNA, 502 bp, Oryza sativa
cccttataagagaagcaattggtgtgaccatatgtattgcatgctcaaatatgcgattatctaggttatttgggcatggtgattctctagatgtttctggggatgtaagcatgactgaacaaacagggagtgagaactggtcaaaacagttgacagatggagctactgaattatctatcagtatacaaaataatatttctaagcaactggagtcaacaccagattcagtaactgaaaatggcttggacaagaaagaggaggctgatgtgaaaagaatggaaacgatttttcacttcataattgcatcgctgaagtctgggagatcatctgttctactggatgttattatcggactcatctaccctgttctctcattacaggaaacatcaaacaaagatttgtcattgcttgcgaagtcagcttttgagttgctgaagtggcgtattttacaacggccttttcttgaaactgctattatgactattctttcttcagccaatga

SEQ ID NO: 388353 - DNA, 525 bp, Oryza sativa
ctgaagtctgggagatcatctgttctactggatgttattatcggactcatctaccctgttctctcattacagccaatgatccaaactggcggaccagatctgcattgttatcatatctcaggacatttacgtacaggcatacattcattctttccagctcagagaaatcacaaatttggcaaacaattgagaagttacttgtggatagtcaagttgaggttagggaacatgctgctggtgtccttgcaagcttaatgaagggcatagataaagacctctctaaggactttcgagatcggtcatatgcacaagctcagcgtatccttcatacacggcaaggaggtgcaaagtcaggccactctgttgctactatccatggtgcagttcttgctttgacggcttcagtgctttctgttccatacgacatgccaagctggcttcctagtcatgtaactctgctggcacgctttattcgtgagccctctcccataaaatcaacggtcacaaaagccgtcgccgaattca

SEQ ID NO: 388354 - DNA, 531 bp, Oryza sativa
tcgcgtacattggtggccttaataatcgaatcaccgagcaggatttgagggatcaattttgcgcacatggtgaaattgagtccataaggatggttctgcaacgtgcctgtgcatttgtgacgtacactacaagagaaggtgctgagaaagctgcagaggagcttgccaacaagttagtcatcaagggtatacgcctgaagctcatgtggggtaagcctcaagcaccaaagccagaagacgatgaagctggaaggcaagggcatgttgcacatggaggaatgctccccagggctgttatatctcagcagcagagtggtgaccagcctcaaccacctggaatggagggacaacagcaagcaccatcgggatcatactacttcaacattccagcaccgccaggagcagagcggacactgtacccttcaatggatccccagaggatgggtgccttggtcaagtcacaggagggtgatggcaaacccggtccacagcaggctgcccaagctcaggcatcaagcagctcagggacag

SEQ ID NO: 388355 - DNA, 740 bp, Oryza sativa
cggtcgaccacgcgtccgagatattgctgcacggtctcaagctgttgctcgccagttcaagtcactgaagaggatgttgacagcaataatgagaaagagaagtcatatggttacatgctgatggaaaggctgacaggttcaccagatggtcggattgaccatgtacttcaggagaaaacatttcaacacctatacttatctgcccttggatctcatatccgttctcgtagcaattattggcgagatcatgatactgctctcttcattctcaaacatctgtaccatgatatacctgaagaaactccaactgatgatcctgaaaggatgcctattcgactgttttatgtgagggatccaattgctgagagattcccttgacgttttcagataattcattagttaaggaattctcaagaaaagtgatgacttattcaagaaatcggagaacgattcaagctgtgaatcttcctgatggtatggacgaccaattgtattcttctcaagtcttttcaggctactggaatagtggaagctgtggaggatctactcagatgttgatcgaaatggtgctgaatttgggagctgttgttctcaattgccgtgacctatcagtgtatttcaaccaacgtgatcctccacgtttcatctgatggtcgctgcaacttgaagaaagggtggatgaagtttgcaaggcacaatcacatatatgctggaatagtatgcatctttcactttctaca

SEQ ID NO: 388356 - DNA, 899 bp, Oryza sativa
ccacgcgtccgcccacgcgtccgcttgctttttgtactcttccatctcacaatctctctatctctctctctcttccttacgcggcaaaacacaccgtcgtccatggacagttctaataacaacaacaacaacaagagggcgcgcgacgccgaggatgaggccgacgaggccaagaggctgcgggcggaggacctgctcgacatgctcgacgatgataccgacgccgggggcgccgccggcgacctggcgtccgtcatgcggagcttcgaggaggagattgttgctggggatgtcgccggggacgttgcccccacgacgcagcccgagctcgggttccttctcgaggcctccgacgacgagctcggcctgccgcccgccaccgcgtcctcgtcggaggaggaggccggggctggggagcccgaggatgccatcgggttcggcggacagatctgggggttcgaggacgagattggcggaggcggctacgctggcttcgccctcacctcgccggaggcggtggccgccgccgccgccgcggcggagtgggacgacgacggcttcgacgccggcttgttcggcttcggcgacgaggtctcggcgcttcgccacgagaccatgccggccgtctgatgggcctgggccgaagtggattagtttttttttattttcctcgttttttttacctttggctaaccttagctctacccttgtttaaccttggatgtaaagtttctagtagaaggttaaaaaaacagaggggaggaaacttggaaaaaagtttcatggatggagaggagaaaaaaaaaacagatgtaggcatggttaaaagaaaaaatctgatgacaatgcctcacgaacaaaaatgagaagaatggctccatgccttcataccaaacaaa

SEQ ID NO: 388357 - DNA, 496 bp, Oryza sativa
ccacgcgtccgccacgcgtccggcgcatccatcgcttctcctccgtatcctcctccagatagcggcggctgcctcgccttctccgacgagctccaccgccgagtcgccgccccttgccaggacaggatggtggtggccacggaggaaatggcggtctactgcttcgacgccctcgtctcccactacagcggcgaccagccgccgccgcccgccttcgaggagggcatccacccattgtttgtcacctggaagaaggctaccaatggttcagaaccacgccttcgaggatgcattggaaccttggaggctcgtcagattgtcactggcttcaaggagtatgcgctcacaagtgcattgagggaccgccgctttcctcctatacagtcgaaagaactgccgtatttggagtgtacagtatctatactgaccgaatatgaaactgcacttaaccaccttgactgggaggtgggtaagcatgggttaattattgaattca

SEQ ID NO: 388358 - DNA, 692 bp, Oryza sativa
  unsure (1)..(692): unsure at all n locations
ccacgcgtccgnttttttgtgggctacatctttcttgctgtacctcaagtatggctctatatgatcataattaaataagacatatctatgtgcttggagccatggtatctaaggtcaccatgccctttccagccaatccgaccatgtggtggaaaagaatgggcatgggaattgagcttggtttatctatactagttctggattttcgagagaacctaatttcccatccttctaaataacgagagcaaaatgtaagactctcatcaaacaaatagccttcagcaattgatccctcaggatgactcttggtgcgtacatatccctttaacctcattagaaacctttctattggatacatgttgctgtactgaactgggccagaaatccttacttgggtgggaagatgagccattaagtgaaccataatatcaaaaaaggctggtagaaatatagtctctagaaggcttaatgtttcagcaatttcagcatctaacttttccatatcacttatggaaataacaggtaagtatattttcttaaagaagttactcacacgaaccaatactgcactaacatattctggcaatgtctttcgtactgctagtggaagcaagtgttgtaagaggatatggttgtcatgacttttcagaccaattatccttttctctttaacatgtacatgccggcaaata

SEQ ID NO: 388359 - DNA, 462 bp, Oryza sativa
  unsure (1)..(462): unsure at all n locations
atcgcccagcccacccctctcctcgcgccgcccccgatctttgccgggcgcccgcctccgcgccgctacatcaccatcgcccggagttgccagggtcgtcgtcctccgatctccttcgcccgagccgatctctccaccgatttgctccgctcgtgccgatctctcccgtccgcgtcggcagtaacggccgcctcgccgatctcctccgtgccaccgtcggtactccctcaccaatctgctccgcccgcgccgatctctcccatccgcgtcgccagcaagggccaccccaccaatctcctccgtgccacctctggaacaaccgcggccgcttcgccgacgacctagaattaagtagtagttgctagctctggtttgcagacatacaaatttnatcgagcacgtttnagcgtttagaattctnagtgtctatattgtggtaagatcaacaagatgagaggcctc

SEQ ID NO: 388360 - DNA, 1068 bp, Oryza sativa
gactgaccatattgttgctttagtcatcaattttgggggaggaggcatcatagggagcgctcctctcactgctgtgcagctattgtgggtcaatatgatcatggatacactgggagctttagcactagcaacagagcctccaaatgatgaaatgatgaacaggccacctgtccgaaaaggggaaagtttcattaccaaggtcatgtggagaaatatcatgggccaaagtttgtatcagctatttgtacttggagctctcatgtttggtggggaaagccttctgaacatcaagggtgcagattccaaatccatcataaatacactgatcttcaactccttcgtgttttgtcaggtattcaatgaaataaacagcagagaaatgcagaagatcaatgttttccgtggtatcatcagcaattggatcttcattgcagtcatagctgcaaccgtagcatttcaagtggtgatcatagaggttcttggcactttcgccagtactgttccgctcaactggcaacattggctgctcagcgtcggccttggctccatcagcctgattgttggtgtcatcttgaagtgtataccagttggttcaggtgaaacctctgcaactccaaatggatacaggccacttgccaatggccctgatgacatatagctgaagagtaatcactaataagggaaagtagaatccagggtgcaatacagcatccagctgcccagctcagttcagttgttttggaatacactaaccaaccactgattttgttcaaattttgccaaactgcctgtcatgtaattgttactacatcacacgttactgatgtgcacccttaccactctgctttcaacttcagacttcattgtatcagtgaattcatattatcattatgacggttggtggtttggattcttaaccggcataaacgtggagatcggcgccaactgggtgagggggcgtaaggggaaaaaaaaaaaaaaaatatggggcccttggtgtactccacgctcaatcttaggaactttacgttccaactactttttccttttcccaaaaacttttacaag

SEQ ID NO: 388361 - DNA, 633 bp, Oryza sativa
tcgtgctgctccacttccccccttttaatccaccgctttttctctcgcatcgtcctctcccccgaacccgcagccgccaatccacacgccagaagccgcgccagcttccagaagcttccccagggggaaggtcgctctcactcatgagcgtctgaccggccgtcgccatgggttgcgccggatccacacctaaaaccgatgataacagcaagaagctgaaaaagcccaagccttggaagcacaatcaagcaataacaacaacacaactcaaacagatgcgtgatgaattctgggacactgctccacattatggtgggcagaaagagatttgggatgcgcttcgagctgctgcagaagctgagttatctcttgcacaaacgatagtggacagtgccggaatcattgtatcaaattctgacatgacaatttgctacgatgaaagaggtgccaaatatgaattaccaaagtatggtctgagtgagccaacaaatttgatcagggaaggctaagtaatataatttgaagggcccatgtaaattatgtaaatctcatttgttcactgacatcagtctttgacttgctcgaaatttgaatgaagatattgttcgcactttaaaaaaaaaaaaaaaaaaa

SEQ ID NO: 388362 - DNA, 1096 bp, Oryza sativa
  unsure (1)..(1096): unsure at all n locations
ccacgcgtccgcccacgcgtccggccatcttggtttgttgtcaacagaggagatgcaaaatcagctcagagactggttggatttgtcacttaatcattctgtgccatcatctcttctaatactatcaagagcttttaccatgtctgggaaaatgaagcccgaggaggctgttgtagcaacattatcttctcttccagatgaagttgtagatactgttgggacagttcttccttcagaagattctgtgtccgacaggaagcggaaattggaattcctggaaatgcaggaagaacttatcaaggaagaggagaaaaggcaagagaaagaagacaaggcaaaacttgaggtaccaaaggcaactgaagaagatgtggctttgaaagaaatgactgagcctactgctagggaagaaaaggaactaaagaaagcaaaagttgagcatgacaggaaggagcagctttgtgatatcagccaagcattggccgtgcttgcatctgcttcttctgttgccaaggaacgtcaagagtttctgaatcttgtcaataaagagatagaactatataacaccatgctggaaaaggagggtacaaaaggtgaagaagaagctaggagagcatacaaggctgcaagagaggaatcagaccatgctgcagagatagctgcaggagaaaaggtctcttcagcattaatagagagggttgatgcaatgcttcagaaattagagaaagagattgatgatgttgatgcacgaataggcaaccgctggcagctgcttgatagtgaccgtgatggcaaagttacccctgacgaggtagcagctgcagcaaattatctcaaagacactatagggaaggaaggcgtccaagagcttattagcaatctttctaaagacaaagatggaaagatcctcgttgaagacattgtgaagctggcatcacaaacgggagaaagcaacgaacaagaagaaaccccncggcaataggtngataaacagtcccttccgtggctgttgaagttnccancccactctttccgccggtaagcgcatggcagtgccatgtnttacaaaaatggcagggacggtcattttttttgt

SEQ ID NO: 388363 - DNA, 1341 bp, Oryza sativa
ttcggcacccaccaccaccaccttccttccttcttctctctttctcagtctcagatcagaattatcagatcccgagggagggaggaagggaggccatggccaccgcctttgactccccgaccgcctcgcccgccgcctctcccttcgacgacgactccttcctccgcttcgacgccgccgcgcccgctcccgcgccagcggacgccttcccgccatcaccggagccctacgccttccgccccgacgcgccctcccccttcggtatgcccgaggccaacggctccctccacgacgaccccttcgccgcccccgacaacgacaacggacccgtgctccctccgcccaaccagatgggcgctgacgagggcttcctgctgcgcgagtggcgccgtcaaaatgcaatccttctggaggaaaaggagaagaaggaaaaggagatgaggaatcaaatcatccttgatgccaaagaattcaagaaggcatttgttgagaagcgaaagctgaacgttgagacaagcaaggatcaaaaccgagaaagggagaagctttacctggccaatcaggagaagttccatgctggcgcagacaagcagtactggaaggcgatatcagaactgatcccacatgagattgcaaacattgagaagagaggagcaaagaaagacaaggataaggagaaaaagcctgggattgttgtgatccagggcccaaagcctgggaagcccactgacatgtcacggatgcgtcagatattgctgaagctgaagcacactccccctccacatatgaagccacctccccctcccgctgcagccaccggtaaggatggtgctgcaggaaaggatggagccaaggtagctgcggcagctagcaaggacgccctctgccaatggcagtgttcccagagatggagaaggccccctgctgcagcagcacctgcagcagcagcaactgaacccattgctgctgcctgagtgataacggcttggctcagctgctaatggtttcctgtaggacacagaggagaaggcagagtgtctggcacggatgtgcgccacgtatggtgtagcgttgtttttgttaagaaagtgttgtgttgtgttgggaccttgattcgttgctacatatattgttattgcattttgtagagaaaagatgagaggggatatatcctggcaataataagttaaatctgttgtattaggatgtgcgtgattgtgtgatgttgtgacggtggttgtactattttccaggttgtcggattttggtaaactcaactgtgtattttatttgcatatattattattattattattattattaaaaaaaaaaaaaaaaaaa

SEQ ID NO: 388364 - DNA, 436 bp, Oryza sativa
gtgctgcaggaaaggaatggaagccaaaggtagctgcggcagcctagcaaaggaacgccctctgccaaatggcaagtgttccaagagaatggagaaagggccgcttgctgccaaggcaggcaacctgcaggcaagcaagccaaactgaaaacccaattgcatggctgccatgaagtgaataacaggacttggacttcaagctgcatacaaatggtattttcctgtaggggcaccaagagggagaagggtcagaaagttgtcttggccacggaatgtgacgcacaacgatatgagtgtagcagttgttatttgttaagaaacgtgttgtgttgtgttgggacccttgattcgttgctacatatattgttattgcattttgtagagaaaagatgagaggggatatatcctggcaataataagttaaatctgttgtatt

SEQ ID NO: 388365 - DNA, 1160 bp, Oryza sativa
  unsure (1)..(1160): unsure at all n locations
tcttccttagccttaagcgtaaagcaactcgtctcatcttcagagaagcaaacccaacaaaaaaaaaaaaagaattttcaggttttcttctcgctttcaccggagaaggagaaggagaggaaggtgttgatcgaatcctcctccaatcgcgcgcgattcgatccccgttgctggccgctcgctcgctcgatccctcatccgatctgaatcccccgatctgatggcggccaaccccggcaacaagatccgcaacgccaagctggttcttcttggagatgtgggcacgggcaagtcgagcctcgttctccggtttgtgaagggccagtttgttgagttccaggagtccaccatcggcgcggccttcttctcgcaaaccttggcggttaacgatgagacggtgaagttcgaaatctgggatactgcagggcaggagaggtatcatagcttggcttccgatgtactatcggggtgcggctgccgcgatagttgtctacgacatcacaaatgcggcctctttcacacgtgcaaaaaaatgggttcaagaacttcaagcgcaaggaaacccaaacacgataatggctcttgctggtaacaaggctgatatggtagaggcgaggcaggtgccagcagaagaggcaaagacctacgcacaagagaatggccttttcttcatggaaacatctgcgaaaacggcgatcaatgtgaacgatgtattcccacgagatcgcaaagagattgcttcaaggacagcaggctcaagacacaccggctggaatggttctcaaccagagaccagctgagaggatggtgagcagttcttcatgctgctcataattcaagtgtggagtatgtgacaactacataatgccatggcctgaaatccaggagaagtgtgtatgcatcagagatgcacacaaagcttgtaaagtggctgctgccatcccagctgctgtttcttattttgtcatgttcgttctgtaaatgtgaatactagggtgtcgctgcagaaattcagatgtattactacagtgtatgctcttgcttaagtatttctcgacactgaaacagagtaaagcaaagtctagtcagattcgttttgtttgcttcaattcagatcatgcagtgagcttgctttttacnnnnnnnnnnnnnnnnnnnnn

SEQ ID NO: 388366 - DNA, 1099 bp, Oryza sativa
  unsure (1)..(1099): unsure at all n locations
ccacgcgtccggagagccttgcagagctgtactatgctaatggatgtgacttcaaccatactattgaaatcctcacccagctagagatgcaagttgatgctacctccaatccaactctgacccccaggacaccaaactttagcacaggggacttccccgcactgccaacagttgaagaccaaaatggtttttccaaaggcaatgcagatattctaagcatcttcaatggacgcagctcaccctctgtatctactggtactggtgattttgtttcagctgttcgcaaacttgcatcgcaaaattctggccattggaagtataagaaaggtcctgaatacggtaatggtgtttcaactgtttctgtacccaagcagtacagttctacgaccaaaacatcttctggaaacaagtttcnaagtgttngcagtgcaaganctgctccntggctcgaaactggagatgcagtancaaacatgtnctcnnaatcaaggggagaagcccgtgattttgcccgcatccgaaatgcatgttttgagcaggctagacaggcttacctgattggcaacaaagctctagcccaggaattgagtatgaagggacagacatataacacacaaatgaaagcatctcatgagaaagcaagagaagctattttatcgacagcggaaacccatcttcgcaacgagggagcgaccgtctgatcgatctacatggtctccatgtgaacgaagcaatccatatacttaaggtcgagctcggtactcttaagagcaccgcgagggctacaggtgagaggatgcaagtcatgatatgtgtcgggacaggtcatcacaccaagggttctcgcaccgccaggctgcccatcgccgtcgagcagtttcttctggaggaaggcctccactacacgcaggcacaacctggtttgctccgtgttgtggtgttctaacatctcttaggtcagcagcacgaagaaaaaagaagcaaaacaaaaaaaggagaaagagatgtagggaaaagaaaaacctaaaaaaaatggccgctgttgcagcactgtaattatcttgtagttgtatattaaaagaggcagtaggagaatagc

SEQ ID NO: 388367 - DNA, 807 bp, Oryza sativa
cgcctcgcctagtcgcctcgcctcttccgtttcaccaccaccgtctcggatcaaaccggccaacatctcgcctcgccgagaaattcccaaacgaggaagaggggaaaaggagttcatccccatggcggccaacccctcctccccgtcggcgggcggcggcggcgacgtgtcggcgtcctcgccgacgctgccgccggtgcggctcgcggcggcgcaggcggcgtcggcggcggcgatccaccccacctcgccgcggtacttcttctcctcgctcgcgggcaccaacgcctccccgcaccggcgcatcgccatcgccgtcgacctctccgacgagtccgcgtacgccgtccggtgggccgtgcagaactacctccgccccggggacgccgtcgtgctcctccacgtgcggcccacctccgtgctctacggcgccgactggggctccatccccgtctccgtctccgacgacgccgacggggaggtcgcacccgcggcatccgcggaggagctgcagaagaagcgggaggaggacttcgacgccttcacgtccaccaaggcggaggacctggcgcagccgctggtcgacgcgcagatcccctttaagatccacgtcgtcaaggaccacgacatgaaggagcgcctctgcctcgaggccgagcgacttggcttgtccgctatgatcatgggaagccgcggcttcggtgcctcgcggaagggcgggaaggggaggcttgggaagtgtagtgattattgcgtgcatcactgtgtctgcccgggtgtgggtggttcgttacccccatgatgctg

SEQ ID NO: 388368 - DNA, 752 bp, Oryza sativa
gtttctggctcatatcatgtgacatgtgtgacagtctgagagctttcgtcctcctccattccacaccaagccggccatggctaaggtagctctcagctccctcctcgccgtcggtggcgccgccgccttcgccgttcagccgtcgaagaaaaccggctccggtttgtttcgcaatcgcgtcatcaccgtcaggcggcccaggatttcagccaatctcggtggagatggggaggtgaagcctgcaggtaacaagaagaagttcatcaccagagaagaggagccagagcagtattggcaggcggcaggggagaggaagggcgagaacccgatgaagacgccgctgccctacatcatcatctttggcatgtcgacgcccttcgtcatcctcgccatcgccttcgctaatggctggatcaaggtccccgtccggtgaacctcctcccgtccatgtcgcatcatcatcagttcatcacatcagccaatcttggaaggttgctacttgctgccaagatactcctcactgcgaccactgcactcctaccgggagccctgaagagtaaaatttcatagagatcttgagcataccagtacgtaatgtatgtgataaacaagtaccttttttcccagtactgtaaatctgtaagtaattacagttcatattaacatccttcctgcttctgatccaaggaggttttgtcatgtacaagaggaggtttttatggcatcagctttgtcaaaaaaaaaaaaaaaaa

SEQ ID NO: 388369 - DNA, 724 bp, Oryza sativa
  unsure (1)..(724): unsure at all n locations
ccacgcgtccggttccttgtatgagtgatgaagttgcaacagcatggctgaacaacgatgacgtcagagcagcagttcatgcccaaccagtgagctcaattggctcgtggcttatatgcaccaacgtgttggatttcatccatgatgctggaagtatgatcagttatcacaagaacctcacaggccagggttatcgtgctttcatatacagtggtgatcatgatatgtgtgtaccttataccgggactgaagcatggaccagatctttgggctacggagttattgattcatggagcccgtggcacctgaatggccaagtttctgggtacacccaaggatatgaacatggcctcacctttgctaccattaagggtgctgggcacactgttcctgaatacaaaccacaagaatcattggctttctatagccgctggcttgctggttctaaattgtaaatgcttgtgaatccgacatccaataatgggaagcatacatatccatacagccatgaatcagataaaggttgatacaaagataatataaaaaaactacaaaccaatttagaaagccacatttatttcagaatagttggtgccaacaccatgttgtatgttcttttatgcaaacagtagatcattcatcattatttgtggaagcttactgtgctgtaacatcaaaatgtcaatccttttttctgataaaaaaaaaaaaaaacannnnnnnn

SEQ ID NO: 388370 - DNA, 877 bp, Oryza sativa
  unsure (1)..(877): unsure at all n locations
ttggcngntgaggntctttnaaanagaccanctgctggccnttctgcaaangaaactntttattaaagaagatagctctgagggatctgtcaccactgaccctacagaagctgcttcaacagaatttgtcaccgcagtcgttgaggaaagcgctccgactgctagttcagttgaaacttctgaagatgatagcacagttgatgacaaactcgttgagcctactgcttcagtttctgcgactgaagctgagagcaaagaagatagctctgagggatctgttgcttcaacagaatctgtcaccgcagtcgttgaggaaagcgctcctgtgtcatctgttgcaattgaagttcctgctcctgaagcatcagaggcctccgctcaggagataattgaggattctactactgtggaaggtgccgccgatgatcaaactgtagaatctgatagtccacctccagaaggtgttgagctgtcctcgaatggggctccagacagctctattgctgaggataagcctgatgaaccagaagaatcgttgatagtagaagaggttccagtaactgcaagtagtgagtctgaggataaagaacctgctgcggtacctgaagaagtagcagcctcaagtgagaaaactgcagatgttgctgttgcaggagctgaagcaagcacggccacagcaactatttctcctgctcttgtcaagcaattgcgtgaagcaactggagcaggcatgatggactgtaagaaggctcttgcagaatcagggggtgacattgagaaagcacaagaattcctccgaaaaaaggtttggcggctgctgacaagagggctggcagggccactgcagagggaagaattggtttttacatacatgaca

SEQ ID NO: 388371 - DNA, 470 bp, Oryza sativa
ccacgcgtccgggaggcaccctgaacctccatccaagtcacctttgcatccagcatacacacctgatgctcaggggcagagtccaatgaatccacagcatggaagaaggcaggaagctgatccccatcgacggcattcgctttctcagcagcgagaggtaggcggtggcatcggtagcgcaccgagaagcccatacaggatggttcatggctccgcttcaccagcgcagccgaacaacccatcgaagccgaagcacaggtcatctggaatgcagactccagagaggagggcttcatcggagggacatggccagcatactcctaggaggagcagggacaagcagggtggccgaggctatgatgcacctgaagatgatgtagctgttccaccgtttggtgagtgggatgtgggtaatgcagcttcaggcgatatatttattggtatcttttacagtggagtgggttgataaa

SEQ ID NO: 388372 - DNA, 507 bp, Oryza sativa
cccaattccttcccaccaccggccacctctagcgtatcgcctggtccttccatgccatgcctgctggtcccccaaccccccatctccaagctctttctctccctgctggctccccatcttcacctcgtggcggcatctggtcatgcacctcggccacagcgcagctcgagcagtcgacggggtggagtggcctcggcagcggcacggattggactcggcgacggtggtatacttccggtcagtctctcgtccggatctacttccgacaagcctctcgtccggatctagggccttgcagcggtaatcactggatctggggtctccgcggctggatgccctctcctgcttcgtcgttgcggtggcaatcaccagatctggggcctctgcgcctggattcggttgatgggagttttggagcgaggatggaggtgtgtttgagaataatcacccctcgtctgctgactcggccccattgcccgaccggtccacggggttcaggcaacatgc

SEQ ID NO: 388373 - DNA, 711 bp, Oryza sativa
  unsure (1)..(711): unsure at all n locations
ccacgcgtccgctaagctcaaggaaagcagaagtccgtgtgcagttcaaagatgttcctggtgacatctttaaatgtaaaaggcaaggaagaaatgagtttgtcatacgccttcagccatcagaagccatgtacatgaaacttactgtcaaaaaacctggattggagatggccaccgagcagagtgaacttgatctgtcatacgggatgcggtaccaaaacgtcaaaattccagaggcatacgagcgtctcatattggatacgatacgaggagaccaacagcacttcgttcgccgagatgagctgaaggctgcttggcagatcttcactcccctgctgcacgacatcgacgaaggcaaggtgaagtctattccataccagcctggcagccgaggccccaaggaagccgatgaactgagcgagagggttgggtatatgcagacccacggttacatatggataccacccacccttgcatagacagacagacagacagacagtagtattgtttagctaggaagagtgcctctaaactgttattattgcggatatattcgtttcatattttcacgataacgcctgactagtgactacctggcgttgtaataatgtgttgcttcgtaagtataactgctattgtgaaataaaagtgcatgtttcgancnnnnnnnnnnnnnnnnnnnnnnnnnnnnnnnnnnnnnnnnnnnnnnnn

SEQ ID NO: 388374 - DNA, 2426 bp, Oryza sativa
gcgtggagcctgcgtggctcgtggacatcacccagtgagaggctgggacggcggatcaccacaattagctgagctaataaaaccttttgttaaactggttacaccaagcaacaacaacccatctaatgggcatgctgatggttcctgcagctcctcaactggtttgccccaaacacaggttgatcccaaaactaatgacgagcccaaaatagacacaagtttggggtcgcaacccttggacacgcagaactccaaatcatctggtgctagaggtcttaagactctgtcagttgaggctcctgctacatcgggtgttaaatcttctcaaggtcaacaggcatcattatacccttccattgaggagttgctgttctccccctttttaccgaactcaggtgatgacaaatctgccagcaagggaattagtgatgctcaaagcaagggaaaatctgttatgacctctgctacaccacctacccctcctgctgctcctgctttccgtccagctcctccaattccatctctgaatgattggtctcagccaccagcacgtggatcgacattttacccatctatttggcagtctgaagctgatccaaaagccaatagtgattccagatggcgtgttccattgtgcagagctggccatccattccaaccccatgctcccctgagccgtccacccccaccaatgcctgcaccaatgagctatggaccttctccacattttccttaccctggccgcctcttgtcctctggccatctgcatggagaccttggtaataacattgagaactcaccagcacgcacattccatagatggattcagtgtgatggttgtggagtgcaaccaattgttgggcctcgatacaagtctaaaacaaaagaagattatgatttgtgtgatgcctgctttcatcgcatgggcaatgaggtcgagtacaccaggattgacaagccactcttaccccagagattactgagagaccctacattgtgtcgcaagatccattcacgggctgcgatgaagtcaaagcgggagaaacttgaaagtcgcttcattttggatgtaactgtcctggatggaacattgatggcaccttcaactccgtttactaagatttggcgtatgcataacaatgggtctatcatgtggcccttgggcacacagcttatatgggttggtggcgaccagtttgcactgcagacctatgttccattagagattccagtggacgggtttcctgttgatcaggagattgatgttgctgttgattttgtggcacctgcaaggcctgggaggtatatatcttactggaggttagcatcaccttctggccagaaatttggtcagcgtgtttgggttcacatccaggtggaggatccttcttttgtcagtaacaacaggactgccgctataaacttgaatttgcccccagaaagcaatatcacaaacacaagtaatttgattgatgtcaatattgagcctgtggatcaagtcttcaaccaacatgtcaatagcacaaacaaggagttacttgaacatttgatacaccaccagattgacgagcccaagaatcctgagcctgctccattacctgtgcccattgtttcttccacaacatctcttcaccccatcattgatgttgatgttccctccagttcaactgctgctgcttttgtgcctgtctttgatgagcctgcgcctgaacctgctgtgactcctgtgcctccaactgttaatgtgcctgctggtaatgcacctgcgtctgttggtgcatcatcatctgatcatcatggcattgacaatctcacagaagagaaactgctgaaggaacttgaggaaatgggttttaggcaggtcgatctgaacaaggagatactcaggcagaacatgtacaacctggagcggtctgtcgatgatctctgtggcgtcagcgtaatgggaccctctcctggaggagctgcaggaactgggctttgcggacactgagataaacaaggagacgctcgagaagaacggtggaagcctcaagcgggctgtgatggacctcatcgctagggagaagaaagaccagtgaagatcgtgtgctcttgagccatccctatctataacctaactatgtgtgtatatgcgtaaataatgtgacgaggtgtaaggctagcgccggccgccggggctgctgctacagtctcagggcctgcttgcttatgaactgtgtgtggtgttgtgcgactggtatatttgtcgcggagatatgtgttaagtgcgcgtgcgcgcctcttaaaaagcggttaccttgccaggtaaactgcgtgtaattactatgggcttagctgctctatgcctcttatctactgctgtgactggaacttgatggattaataagatctatgttgcgtatgtttaaaaaaaccaaaaaggg

SEQ ID NO: 388375 - DNA, 446 bp, Oryza sativa
  unsure (1)..(446): unsure at all n locations
cgccgattcgtcgccacgcgtcggcctctaccaagatactaagaccctacatgtcgccagatccattcacgggctgcgatgaagtcaaagcgggagaaccttgaaagtcccttcattttggatgtaactgtcctggatggaacattgatggcaccttcaactccgtttactaagatttggcgtatccataacaatgggtctatcatgtggcccttgggcacacagcttatatgggttggtggcgaccagtttgcactgcagacctatgttccattagaggtaggtactatgcatactgtgacctcttttcagtttactgttctaattgtagttatgcatactgtgacccctgttcagtttactgttttgactgtagtttagactgcatgctatttaaaatatgtaaaatcattaaacctgagnttgtggtctgtgcagattccagt

SEQ ID NO: 388376 - DNA, 494 bp, Oryza sativa
cttccccgcgctctccattattttccggtcctgcgcctcccgtacaccgccgtgtgggaggggataccagacttgggaggtgacggcgacgaagcagagaaggcgcccaccctctcccctgcggctgtggcttgtgctcggggatggatgcggcgacgggcgacggcgacgcactgcggcgatggcgagcgacgggctcggcggggctgtcccccgctcgaatccggtgacgacggtcgtcctccgcccggatccagtggcggcgggcgtccctcgcctgacctcgcacggatccaccggcggcggtgggaggagagcagcgtgcggcaggccaccttgcagtcctctcctcctcttcctcctcccgcttcttcctgcccgctgccgtcatcgtggttgtcctccaccagcttgccgcgtggccgccgccgtctgccgatggacgtcgactctgacccgggcgccaagggcaagcccacccagatggacctcga

SEQ ID NO: 388377 - DNA, 490 bp, Oryza sativa
ccacgcgtccgcccacgcgtccggtagcttgtgcggcataaagtggaccgcggcatctccagcctcccggccggggagggttgctgtggtcaccggcggcaacaaagggatcgggctggaggtgtgccggcagctggccgccgacggcatcacggttgttctgacagccagggacgagacgaggggcgtggaggccgccgagaagctcagagggatgggcctttcctgtgtcatcttccatcatctggaggtcacggacagttccagcgtttctcggttggctgatttcttgacgactcgttttggcaagctagaaatactggtgaataacgcagcagttagcgggatggagcacgcccaaagagtagatactaacgaggaacagttcgttggcatggacaagcaacagagacttgaatggttgaataaacaaggccgggagacctacgacgcctcaaagaacggcgtgcagacgaactactactgcacg

SEQ ID NO: 388378 - DNA, 444 bp, Oryza sativa
  unsure (1)..(444): unsure at all n locations
ngagcangncntngtcagtcactggtcgaatcagaaacttggtgtggatcgaagctaggcatttgtgcatctgcttgtacggcacataatggaaggagccacctccagcctcccgagccaaagcgccagggttgctgtggtcaccggcggcaacaaagagatcgggctggaggtgtgccggcagctggccgccgacggcttcacggttgttctgacggccagggacgagacgaggggcgtagaggccgccgagagtctcagagggatgggcctctccagcgtcgtcttccatcagctggaggtcacggacagctccagcgtttgctcggttggctgatttcttgaagactcgttttngcaaagctagacatactggtgaataattgccncggtttggggaatggagtacgcccaagggagtagatancaacgagggaacaattc

SEQ ID NO: 388379 - DNA, 650 bp, Oryza sativa
  unsure (1)..(650): unsure at all n locations
ggacccggtcgagagaatgctgatgatagngggagattggaggagtgggtncctgtatcaacattggctcgtcctgataaactgggattgagatgcccagagcgaccagagttaggccacgccctcaacaaaatagtttggctgacggaactaatcttttacctggagctgctgttgatgtatggcaatttagtggctggtgggaaggagttctagtcagtgcagacaacatttcagctgatagcctacaaatatattttccaggcgagaacttctttagtgtatgccagctaaagaatttaagaatttcgaaagattgggtcaagagccactgggttgatatagaaatgaaaccagatgtgttatcgaaaataccttcggttggtgttcaaacaaggcaacctgataatctgacatctgttgagaggccggactccagaaattctgcaatgtctgaccaagagcttgcagccatacaaacaaactctagtgaagataaacaaacaggagctgaccagccagcagatgctagtttgactgatatggcctctgcttttgcagaggaccagaaacaaacagttctaggaaagcgnacctaggatgatgatgctgaacaacattgcaatggggaagtaggcatagatgttggc

SEQ ID NO: 388380 - DNA, 614 bp, Oryza sativa
ccacgcgtccgcaccaagtcactccaaagggtcatcagatgttaacaaattgtcaaaaggtgggatacccttggctaatggagatgtgcagttgccaaagccacctccatgggcatatcctttgtggagtcggcatgaaacacaaaattatgaaacagacagaatgctgaagtctacctctcaggttattgaccaagctatggctcaattgtgggaggccaaagtaaaatttgtaaacgttagtttctcggttgagaaacctggtcgttcaaggagtgttgcaatttctgattcgggacataggtcacgacaatctacagcagattcaaatgagccttcaggagattcccaaccaattgctgatcagcctattgagtgggtaaaggttactttatctgcggttccaggagttaacatggatgatgttgatgacaatgaaccaacgcggaagaaggaccatcgccgcgttccaagtacaattgccatagaggaagtcaaggctgcagcattaaaaggagaagctccacctggtcttccactgaaaggagtcggccagaatgctcaaaatatagaatctaaggcaactgatggtggagatcctaatccaactgatg

SEQ ID NO: 388381 - DNA, 577 bp, Oryza sativa
tgacagcacagaggcaacagcaaaacacactctcatcagtgtcaggtctccacaccacacccaagtacaggtacacacaagacaatcctcccactgaactgaatcccatccactcctttatcatcatcaccatttccctccttcccttttcctcccctcatttccatttccagttgcggcaagagctgcctcctagctctcttcctgccatccatggcaaatgcttccctccaatcctttcttcttcaccaccaccattctttccttagcaatggtatccatgagggctcctccccttctataattctcaagctcacaacaaacagcaacagcagcatttcattcaagctcttctccaacaccacctcctcctcatcatcatcagtgaccaccacagcatcaacccccaactcaccggtgacccctgctccggtaacagcctcgtctccgccaccgccttcgctggagctcctgggcgcccagctcgccgagagggattaccggcaggccgacgagaccacccgcgcgctcctcatcgagctcgcgggcgagccagctcggcgccgagggtacgtct

SEQ ID NO: 388382 - DNA, 538 bp, Oryza sativa
ccacgcgtccgctctctctctctctctctcgctgctcttcatccgattcaactcggaccaccagattgcttccttccttccttgcagaatctttcattgttcttgttgggaggaaggagacgaggcgcgcgaggcggcgagagggaggaggcattctagcatatacagatacagagccaggggaggtatggaggagggccttgcacgagcacgacgatgccaatagaagctgtggcggtcgcttctttaccgatggcgtcgcgcagcgccgccctgtgcttctcctccgccgccgctgcccggagccggagcaggagccggcacggcaggatggccgtcagctgcgacgccggggcctcagatctgctctattcctctctggctgccaagctgcttggccctcccaccagcttcgatgcccgcaagctgacggtagagttcgcccacagccacgggaacagcagctccgggttccccagagcttacaccctcacccactgggacttcaccgctaaccttaccctagccgttttcgaca

SEQ ID NO: 388383 - DNA, 497 bp, Oryza sativa
  unsure (1)..(497): unsure at all n locations
ttctgcatttcagctcaggaagcctctgctactttgcttggcctgtacagtaatacagataaagacctgcagttctttggtctctttagtgaggactgaggagtttggttggagattgttgaggagatgggcatcgtcgacgttgtctccgagttctgctccgtgccgaggactcgccgacacctcaagaagaggaaacaattccagacagtggagatgaaggtgcggatagactgcgaaggctgtgaaaggaagatcaagaaggcccttgaggacatgaaaggggtgagctcggtggaggtgacggcgaagcggaacaaggtgacggtgacggggtacgtggacgccgggaaggtgatgcggcgcgtggcgtacaagaccgggaagcgggtggagccatggtcatacgtgccgtacgacaccggtggcgcacccctacgcaccgggcgccttacnacaagaaagcccccgccggggtacatgccaacgtggtgtcc

SEQ ID NO: 388384 - DNA, 502 bp, Oryza sativa
agcacacaaagcatggatgaagagccctgaggtgcttgagaactgttccactggacttcatttccctgcagagcaaatagagaactctgaggaccaggtgattccactgaagtcggttgctttctatccagctgacgggtgagatgtcctgctaaggccatggaccgtgcctcgtcgctgccagaaacgagagggattctgccagggacgttgtaaatttactagagcagctgtaaataagcttgcttgacgatactgttagagatgctgacagtgtagttcgcttcggtttagcctgtaattgcgttgtacctatgttaacctgtctgtcctgagatacaatgacagccagtagatggaactccagcagaactgtataaagactgggtgttgtaaccgtatatgtactgtccgtatgctttgttaaaacaagttcttgtgttttaaaaaaaaaaaaaaaagccgaacaatagatagcaagcaagcgtacgcgtgcgtgcat

SEQ ID NO: 388385 - DNA, 613 bp, Oryza sativa
  unsure (1)..(613): unsure at all n locations
ccacgcgtccgcgcgtgtgaagctgaatgagagcttgctggaccagatcttcagtgggaggaaggagacgatccggataaactggcctgcgtatccacactatgaagctccagaagtatttgctccgataaatactgggcggtaaacagctgtactacgtgaatacattcgagagcgcagcgagcgccatggagacgggggccgttgcagcggaaaacgtggccaggctcctcattgcaaggctcaggctgcctctcccttcccgacctgctgcgcctgcgcccgatcaccacgaccagcgagcagatctgtaactgtgactctgtgactgtgatgtgaggaggtcatcgcatcgatcggctgtattgtttgtgtctaacatgtctggaacccacatgttcgtaggagttttttttaaataataaatcagccagcaggtatattactaatcaatactaagttctagagttnaaatgacatggaacccncatgtatgaatatgatgatgaccnccttagtaagtnggagtatgttttcacagaaatgataagttatactaggctgaggctaagttagttgngnnnnnnnnnnnnnnnnnnnnnnnnnnnnnnnn

SEQ ID NO: 388386 - DNA, 602 bp, Oryza sativa
tcttcctctccctgagcgtcgccgcacggaggaggaggagatggtgagggagctccagaaggagcgcgaacgcagcgaccgcaaccgtgactaccgtgaccgcgatgttagacgtaggaaagatgacggtgcagagccagaagctgatccagaaaggagatcaaaggactgtatttgccttccagctatctttgaaggcagatgaaagagacgtctatgagttcttctcaagagcagggaaggtccgtgatgttcgccttattatggacaggaactcgcggcgttccaaaggagttgggtacattgagttctatgatgctatgtctgttccaatggcgatagctctaactggtcaggtgcttcttgggcaacaagtgatggttaagccctcagaggctgaaaagaatctagttcagtcaaacgtggcatcaggtggaatagcttcaggtggagcaagaaagttgtatgttggcaacctacattccaatatcactgaggatcaattgagacaggtattcgaaccatttgggcaagtggagcttgtccagctgccggtagatccactaaccgggctatgtaaagggttcgggttcatccagttc

SEQ ID NO: 388387 - DNA, 537 bp, Oryza sativa
ccacgcgtccgctgggactatcggatcacccacctcaatcgaatgcacgccaattccattccgagccaacttcagccctccagaaagtggagatggagaaggcaaagcaggatgatggcctatctgatctaagtaacatattgaccgagctgaaaggcatggcggttgacatgggcactgacattgacagacaaacaaaggctttgggagattcagagaaggactacgacgaactgaacttcacgatcaagggagcaaacactcgggcacgccgtctgcttggaaaataaactgcacaatataatctcatcacaggacaggagtccttccatcccttttacccttagtcttggggaggataattaattgttttgtgggccattggttctgatgattctgcgcatcacattttgatcagtaccgggaatggttggtcctggatatgtcacggtataatgaatctgcatatactgctatagccattagccagtaatgctttgggccattggtttggaaaaaaaaaaaaaaaaggcggcc

SEQ ID NO: 388388 - DNA, 719 bp, Oryza sativa
cccggtcccgagttccgcccacgcgtccgcgtgcttttggtcgagatgctacaaaaattgcggactatgttcaatgttctcctaatggagctggcaagggaaagaaaatggctcctgaatgcgcatctgctggtatagaaggttttccgacatggattatcaacggcaaggttttgggtggcgaccaggaacttccaatccttgctgaagaatctggtttcactgttgagggaaccgagcaatcataaggccagacacgacagcaagtttcattcaattgaaggcgagtgtttttatgggttttagtgaagaactcagggttgtgaaggctgactacaacaattccgcatgacataccgtcacaccgagggaaggttttcgttccacggttgcatagcctacctaatacagcccctaaccactgtaataatcagtaaaagctgctcttctctcatacggagattgggagatgatagaagaagcccaaatgagaggtgttgtataatcattttgtagtatgtagattgtgatgtaaaatgtaaaagggcgcattgcttctcttcctaggtacataatgtaatgtataataccttgcaatgtgatatttgtacagaaaagtgtattgttcagtcttttaccctcggataaaggcagttaatgagtagccagttgacgagaatctaaagaagtgtttattttgaaaaaaaaaaaaaaaaaaa

SEQ ID NO: 388389 - DNA, 400 bp, Oryza sativa
ccacgcgtccgcggacgcgtgggctccgctccttgtgccatctcgcggcggaacaggggaggggaggggcggcgatctccatccggcgagcggcgagcggcgagcagcgagcagagcagagcaggggaggagatcctgattcatgttcttcatttctgtgctggttagtatttccaatcaccaacgctttcttcaagaatggagttacaggaggatgaatccagtgacgaagtgttcatgaagcagatgctaaggaatctgatgtttcatgaacttaaccgagcaaattatagaaaccagttaccaaatgttttacagcatttgtacagttcaaattgagcaactgttgtagttggagttttatgtcagtctgctttcacatttgaaaatttacagttac

SEQ ID NO: 388390 - DNA, 865 bp, Oryza sativa
gtttaacatgatgtccatctagtataacaggcctcgtattttttttctataattgatgctaagatttatatatcttctcttatcttttgttttagttagtcaacattttagccttacaagcatagtttgtcgtatcctttttggaaaataaacggcctatacttttctgttgatatctgaggaggtgtatggcctgcgtcaaatttattcacctgtggtacaaaggttttagctagaatctcgtgggttggctatgaatgatatgtgcaagaatatataattgttccagacataaattaaatattgcctgtctcttgtactctttatatatacatctttatgccatctttattcctttttttttcctcttggtctcaggtgtatttcacttactcttttggatagcatggcttatatcggaactacctctatgctaacattgtctaggtctcattagctagattaacttaactgttttcacttagtggtgttagtctgtaaagaaaatgaatacccagtcttagttgagtcttttgtaaaaaaaaaaaatggaaccaaagaatgcaattgcactggatgaacatgtgctggattctactatccgcaagaggaagcgtgtgggtgctactcaatgtgctgaggccaatgacgcccccaacctctctcagaatggtccaaaacagaatctcgctttatttcctgattcgactggacataagaagtccaagatgatgtgctctgccgatgacattctggagaggtacaataacttcaagataagcgggatgcctgttcgtgtgatgtctcaccaacatggtggctggagagactttccagaggatgttgtcaattcggacagcagagc

SEQ ID NO: 388391 - DNA, 518 bp, Oryza sativa
  unsure (1)..(518): unsure at all n locations
ctccgcccctaggcaggtttacgggctaggattgccgcccgccggaatatctcccccaccgccgccgccctcccgccggcccacgggattggattcgcctctttacaaggcctatcctgccctctctactaccacccttatcgatctctatctggtttcctttacctttcgatttgattcaaccacatcgaaatcgattctatctctacccgcgacgcgatgaccacctcctaccgctactatattcacaactcgtgtgatggatgtgcttacgtgctttccagtgccatgggatcgtattgtggccttcatcttggtttctccaccaatgtccgtggggaggaaccatggccaacaatggaattatgttcttcttgttgctggagcaccgntatcttcttctcctattattttctggtgccgccttcttctgtgccaaccagccacaccagcagaagttgtgcttcgactgatggtggcgggaagcacaattaattgtgccctttatttcagagcat

SEQ ID NO: 388392 - DNA, 626 bp, Oryza sativa
  unsure (1)..(626): unsure at all n locations
cgcttattacgccagctggcgaaagggggatgtgctgcaaggcgattaagttgggtaacgccagggtttttcccantcacgacgttgtaaaacgacggccngtgagcgcgcgtaatacgactcactatagggcgaattgggtaccgggccccccctcgaggtcgacccacgcgtccgatctcccccaccgccgccgccctcccgccggcccacgggattggattcgcctctttacaaggcctatcctgccctctctactaccacccttatcgatctctatctggtttcctttacctttcgatttgattcaaccacatcgaaatcgattctatctctacccgcgacgcgatgaccacctcctaccggtgtatttcacttactcttttggatagcatggcttatatcggaactacctctatgctaacattgtctaggtctcattagctagattaacttaactgttttcacttagtggtgttagtctgtaaagaaaatgaatacccagtcttagttgagtcttttgtaaaaaaaaaaaatggaaccaaagaatgcaattgcactggatgaacatgtgctggattctactatccgcaagaggaagcgtgtgggtgctactcaatgtgctg

SEQ ID NO: 388393 - DNA, 1037 bp, Oryza sativa
  unsure (1)..(1037): unsure at all n locations
ccacgcgtccgcgtcaacggagactgtcttgctgtggttaatacctctcagcttccttcggatctcatcttgggtgtggcaagcactacaaactcggactggcaggacacaaactggtacgtgacaggtcatcaaagcggtgctgtgaaggtatggaagatggtgcactacacgtctgatgaggcagcaaacagcaagagcaaatctccaccgtccacccttggagggatgagcttgaatggccagactcaggagtacaggctacttcttcagaaggtgctcaaggctcacaagcacccggtcactgccctttgtcttccacccgacctgaagcagcttctgagcggggatgccagtggccacttgttctcatggtcactaaaagatgatagctttaaggtttcatagcaacagctcaacagaggatagtcaggattcacctgccacattatagagacccttagttaaagttatataccctctggtccctttctcacccagaatctgacaagcacctgcttgtgctgccaaagaaagaccccagagttggcctcggcatgcagaaacattctacaatatggttggcccaggccccagcccattcagcaaaatctggggtgaagacacagtacaacagaaacacactggaagggataaaatggagatggcgttgtgctgacattacaatcttattatactgtgaattatctaccggttctacctcatcttcttgttttttcatgagaggattcgtgcggggtagcaaccagcgtgtgtaaagtttgtataggatgcttttggttagtagtggtgaggggacgatggtgatgatgttgtacggtgaagatgttatttttcgtcttggggatgtaaggaaaggggtgttaggttcctcttctttttctgttttgtttctctattttgtccccagaagtggtggtgttcattcattgactgggtgtaatttgagcacccttctgttcacttcagttcatttgcacatacatgcnnnnnnnnnnnnnnnnnnnnnnnnnnnn

SEQ ID NO: 388394 - DNA, 446 bp, Oryza sativa
  unsure (1)..(446): unsure at all n locations
ccgcgcgccccccctcccctccgggaggagacgctgggactgggtgggtaccctccgccgccggctgccgcggctacctcccctcttccttccctcctctctcgcatccacgcgacagatcaaaccaaccacccccactaatcgaatccctcacccgattgccccgaccacatcgccgccgccgcggccgatccgaccccgcgagcgagaaccgaagccaatatggctgccttgccattagccaccgctgaagtatgtgatgcaaatgcagatttaatcatgaatggtgagcttcgtgctctccagcccatcttccaaatctatggaaggcggcaggttttggcggcccctgtgatatgaaggttatgaggaaatgttcttatcgtgagttcctnaagagaanggtatgaaaggtctcgtggttatggtggtggagctttgctgtg

SEQ ID NO: 388395 - DNA, 945 bp, Oryza sativa
  unsure (1)..(945): unsure at all n locations
ccacgcgtccggaacgataggtctgggccttctcagtatggacgagataaccatggaaggtacccatatgcaagagacaaccaccatgattcaagaggaagggttccaccataccatcagagcggtggaaactcgtatcaatcacattctgctccatcagcaggtcctggacggtatgcgcaacccccaccatatgctggggggcgcggtcgcggcggccagcctgcaccgtatggaggtggtcagcagtggcagcagcagcagcaacaaccttatggctcctatgctgggtcagggccttatgggggtggggcacctcctgcaaggcctaattcacgaccacagcagtcgcagaaccgttacaataccttagataggaattctaacaggagacctccaccaggtcatgggcgacactaagcccaacctctgtttgttgtacctgtggttttgttgttagaaaacctgcgtactaaaatagagaacctcagcctagtaaaacagagaacctcagcttagagatatatatagagcaatttgcatagtctcgtgatcgacaagctgttatagcatcaaaggttctaagaggcatgtgttgtacaatagaattgtcagttcatcagactactggtgcctgtctgccgtttttcatttgtggcactcattattttagccccctaaggttgggacatatgtttaaccaggtttgtatttttaagataataatgttctaggttaactttcagttttggtggatctatgtcaaattcttgtattcttttcttgtttataatggaattgtggtttccctctaanaaaaatacacaatatttatatatacatttttttttattcttttctattgattaatcattttatttatattttttattttcatttctacttttttcttcattactaccttcttatatctcttaattatat

SEQ ID NO: 388396 - DNA, 761 bp, Oryza sativa
tcgacccacgcgtccgcggacgcgtgggttgggttccacagactttggacagagcccattatactctcatcttctgagtcatggattaacttcatgctgtcaaaccatcctggtgctgtactgttcatgttcatggatgtctttttattgactggagcgcttattctgacaggagcacaagcaacacagatagcacgcaatctcacaactaatgaagcagcaaaccagtcacgctatgcatatcttcgggggcctgacggacgcttcaggaatccttacagtcgaggatgccggaggaactgcgctgattttcttgtaaatggatacagtaatgacgaggaggctgcatggccaacgcttcaacaaacagtgcaacgaagctagtcacaaatttctggagcaaataccagtcttatacagtcacacagttcataagatccaggagagaaggtttgaacaattttctgacttggatggacaacaacaggtgcggaaagcgatctcccctttgagccactctgcttcatccaggtgtttatacaaggttgagtcatgggaatggtttgattttgtagattatgtgtatgtgctatatatgtattcttttttggcggttacatcactattaccatacatatcgtgttgtattcgatttcgagtgccaatagatgagaaatgcaggtttgaacttctgatgtataataatctgtaacattagatgctttcgtgcaagtagacaaataccctgagaaattttcacc

SEQ ID NO: 388397 - DNA, 562 bp, Oryza sativa
ccacgcgtccgcccacgcgtccggaagaccaccacatccgcacgaaaaatctccgacgccacgacgctcgctcgcctctcccggaatggaaacgttcgcgcggtggcgtccaccgccgccgccggcggcagctgggcgcgtgtcccttcgaccggcgtacgggaggcggagccgggccgccacggtctccccgcgcgcgttcggcggcggcgctgacttcgacggcttcgtgcggcgggcgtggcggggcgccaacgccggcgccgagcggctcgcgttcgaggtgcgccagaccgcgcagcgcctggacgggaggttctcgatatcgaggcgcctggccgaggccgcgcgcgccggccgcgcgcgcgccgccgagaatcgacgccgagctcggcatcggccggcggtggcgctccttctccgtcgactttctcccgcaactggcccaggtataggagggagctgactgacttcatggccacacctattgggagagctttcactacgatcttttcatttggtttgcactgtcaggatggctattcagagttttcatttttgg

SEQ ID NO: 388398 - DNA, 1098 bp, Oryza sativa
  unsure (1)..(1098): unsure at all n locations
cccacgcgtccgcccacgcgtccggttccgactcgccgggaacaagcaaagtgggaccgagcagctaaggcagcaactggtggcagtgatgtcatactaagggaatcaaagtcaagagggcagcaaggagaccctgaggtattggcagctaaatcaagggagcaatatctagagttgaaacaaagattgcagttgtttactttaggcattggtggcattggtttggtctccgcctatttttcctactctcctgagattgctgcaagctttggtgcagggctgattggatctgtcctgtatctccgcatgcttgggaccagtgtggattccttagctggtggaactggagaaactgtgaagagtgctgctgcccaaccaagactgcttattccagtggcacttgtgatgatgtataaccgatggaatgagattttagttccagattatggcttcatgcacctggaattgatacccatgcttgttgggtttttcacctacaagattgcaacatttgctcaggcaattcaagaatctatacctgcagttgggaatcgtgaatcttgaacatagttctggtgaatagaattaaaggtagttgccctgaggaagataggtcacggagatactgaggccaaggttttataagaatctgatctggggatgttaccaagataagatgcacactcagtcattgaggagcgagtataccatctgaatcttgatccaaattttattatagctgcacaatagaaagtttgtacataggtatgtaggcaacttcatccaacattacacgtaaatcatcaaaaatcatgtacacctctaaacttttagcacagtgaccaccgaattttatggttgatcttaaatttaacagtngaaaaaactgaacaaaaatactaaaaaagaaaaaaaaaaacaaagaggaggataagataaaaagacaaaaaaaaatgaaaaagctcgcaaacataagaaaaaatgatacaaagaaaaagaaaaagaaaggaggggggggggctttcaaagggaacaagataatggccccgtttcttgaagaaaatagtgtttttattggggccactaaaaaaaaatact

SEQ ID NO: 388399 - DNA, 829 bp, Oryza sativa
  unsure (1)..(829): unsure at all n locations
ccacgcgtccgcccacgcgtccgcccacgcgtccgcccacgcgtccggtgtgaacaccctccattttttccccccaatcccttccgacgcgctctcgagctccccgcattccccgtctcccctccgcctgccccgggagctcctccggcgagatccgcctctgacagccaccctcccacggctgctcgtcgtcctcacctccggcgaccggctcaggaagaaagtaacttgagccatgggaaagaggaagtcagcggctaagccaccacctaagaagaggatggacaagcttgatactgtattttcctgcccattctgcaatcatggcagtagtgttgaatgccggattgatatgaagaacctgatcggcgaggcttcatgtaggatctgtcaggaaaacttcagcaccactgtcaatgcactgactgaaccaatcgacatatatagcgaatggattgatgagtgcgagcgtgtcaacaatgtcgaagacgacgacggagcatgagcaacgcaaaatgcctgatgttgccgtacctgcactggtgctattgactgccaccttcagccacgtctgtaatagtgtaatggctgattggtttgttagtaggcagttcattcccgcacctaaataaacacctgaagacgtgatgttataccggcttcccatcaaaaactcaaaaacagttatatgcgtgtgtaattgtatgggcctagtgccttacctgggatattgtaaccgtaacttttcaaatcagcatgtttccatggatgaaatttctatgaaaaaaaannnnnnnnnnnnnnnnnnnnnnnnnnnnnnnnnnnnnnn

SEQ ID NO: 388400 - DNA, 855 bp, Oryza sativa
ccacgcgtccggtctatgggtcctgcatgaaatcataatgcctattgtcaccaagctccttacagctctctgcgttccatatgttcttgcaaggggtgtcttcccagtgcttggttacccactcattgtgaactcagcggtctaccgtttcgcgtggcttggctgcctgatattcagcgcgctgttcttctgtggcaagagattccatgtttggttcaccaatctccacaattccattagggatgaccgttatctgattgggcggaggctgcacaactttggtgaggactcactccattcaagtgaacctggaacaactacagcgtctgacgatgatgaacacgagcaagcactcattcctcgcgatcaggaaggagagttggggctgaggttcaagcgccatatcatgcgtggaaaccaaccgagaatggctgcataagcagggacaagtttttggacaaagcaaggggcatatgcacgatctgacttctgccctggagcttctgcttgtgattagtaatccccattgtagagtgaaatgagtccgtcagttagtgataggaaaagtaaggattgttgtacaacaaagtccaagggaagaacagctcaaaaaaaaaagaatacacaccagaaaactcatggtaagctcacttccctgtggctatgtgttgctgactgtaaatatagacgaactaccccacacaatttattgtggttctgatgtgtaatggacaatgaattactcctacagtagtacatcaagttggatagtagctagggttggtagacgatgttgtccacacttcatttcttttcatttcttgtgaactttttgtaaaaaaaaaaaaaaaaaaa

SEQ ID NO: 388401 - DNA, 494 bp, Oryza sativa
aagcttcggcatatccgtactatgctgcgtcgttttcaacaatgggagtccttcttcatcttctcatttgagtacctgtaccacaaatagataactcatgagagagcacgagttacctgaggctgatgtgtgctagatccatgcactgattgtgctgtaaacccagtgttgggggttccaagttcatagaaccatatttttgtagcgcaatctagagcacctttgacgaccactatcattgataacaagaaattgtactccctgctgctagaatcttccaaccatcccccttttctttcaatcttgcctgatgaagagctgttgaaactttcatagtcaatagaatcataacaacataagcaattcggtgagttcggaagcgcatgtgaactgttgtccctttacctggggcttcgaagttcagagacgagatatggttattgtttcagatgggagtgtgcttgaatgcgattttcttttgccaaaaaaaaaaa

SEQ ID NO: 388402 - DNA, 472 bp, Oryza sativa
ccacgcgtccgaccattgccgcggtcgtctgctccgattccgctcgcggcagggatccctaccgctctcgtcgccgtcgccgtcgccgtcgccgacgagatcatccgccgcgatgcctcggtactattgcgactactgcgacacctacctgacccatgactctccatctgtccgtaaacagcacaatgctgggtacaaacataaggcaaatgttcgaacctactatcaacaatttgaggagcagcaaactcaaagcttgattgatcaaagaattaaagaacatcttggacaagctgcagctttccaagttggtgctcctttcaatcaacatcttctctcatttccaggaggtgtgcctcgtcctcgtcttccaattctgccaacacctggcatgccacttggtgttcctcaagtacctggtgcacctttgatgccaggcgttaggcctcctattttgccagctcctggtatt

SEQ ID NO: 388403 - DNA, 466 bp, Oryza sativa
  unsure (1)..(466): unsure at all n locations
gcccangcgtccgcgttctcgtgcaactaacgggcggcttcctctggagtgactgattgtcagcaagcctttattggagggatagcttatggcggctatgctcgcaagattgttggaagagttctacgcaaaataccggcacaatttggccatgcacgcattgaggaccacccagattatctcctggaagcattacaagaagctctatcactagtcgggcctgtgaaaggttacccaaccttgccaagtctctgaaactagtaaatggcatctccaagttctcatccagatataggataactttgatccagttagttagtatggaagttgcntngagaaggtaagccaaggtgagaaggtattctgccaacngattgcccaatgaacagtctgggagttgggaccaaccatttctggctaagtggcaaaaatcagtaatccaacagtcagcagaacaatcactaac

SEQ ID NO: 388404 - DNA, 1072 bp, Oryza sativa
  unsure (1)..(1072): unsure at all n locations
gcctgcggcaccggtcccgaatcccgaattccgagccacacccacgcgtccaccaatacatccaggaagcgcggggagcgctagtcaatgtgcgtgggctacacatgaagatgggtcctgcaagggctttggccatgttcaatccgcttcatctgaagaagctaagacggcgctcgaattgcatggctgtgatctggatggccgaccagcgagacttgacttggctcatgaaagaggtgcatacacccctcacagcaggaatgatactggatcattccagaaacaaaacagaggttccagccagtctatatttgtcaagggttttgattcatctcttgaggagagcaagatccgagaatctctnnnaggacattttgctgattgcggagagatcacacgagtcnnagttcccatggatcgtgaaactgccgcgtgctgcgggatagcatacatagattttaaggatcaggcttccttctcgaaggcacttgaactaagtgggtctgaccttggtggctacaacctgtatgttgatgaagccaagcctaaaggagatagccgagatggtggtgggagaagaggtggccgatctggtgacagatttggcggccgatctggtgacaggtttggcggccgatctggtggtaggtttggaggtagagatggtgccagaagaggtggacgtggtggcagagatggtggcagaagaggcggacgtggcggttttcagagcaggcagagtgctggtacagctagtacaggaaagaagacaacttttggagatgagtaatggagcttgatcttgcacagctacatgcctacatcttatgcagctgtcaaaaggactgcctacctgcaactgtagtgaaatgcgatgagttctactcccatggtttactctatattgccgccgaatggctgtaccagtgaacaagttactgtgctggtatttttgtctgcagttttggtgtgtttccggtgattgtactggacatctagcgattagtgtaatgcaaggatttcctattacattgttatacatccaagtatttgcttcaaaaaaaaaaaaaaa

SEQ ID NO: 388405 - DNA, 693 bp, Oryza sativa
  unsure (1)..(693): unsure at all n locations
ccacgcgtccgcaatcaatcgcgaaatgttttcagcaagaaacttctggctgataaagaggaaacattggatgatataaacctcttctcgataatgactgttatgtcatttttattatctgccccactgatgctgtctgtggaaggcatcaagttttccccatcgtacctgcagagcaacggagttaatctacaggaactatgtatgaaagctgctcttgctggcacttgttttcatttttaccaacaggtttcttatagtttattggctagagtatcacctgtgacccattctgttgccaactgtgtcaaacgagttgtggtcatcgtctcatccgttctcttcttcagaactccgatttcacctattaatgcccttggaactggcgttgctctagctggagttttcctgtactctaggttcaaaaaagctaaaccaaaggctaagactgcatgagtcaacatacacagctgcaatttaactagaagattcaggtttatctcttcttgaggtgaaatgggccgccanncnntcacttggcttctctccaatttgtcttttgccagcttgtctgggtcttagaagcttgtgtataagatttttctcaggaaggtagtgatgggccggcnccaaaataacaaaataacattgtcagaagatttttcaagagaaatgaattttggcacatacttt

SEQ ID NO: 388406 - DNA, 1352 bp, Oryza sativa
aaaaatggtgaagctgtgaagcaccagtgccccaccaaatggcggcgccggtgaggtcggtcctccccgtcgtcctcctcggctgcggcggcgtcggccgccaccttctccgccacatcgtctcctgccgcccgctccacgccaaccagggcgtcgccatccgggtgctcggcgtcgccgacagctcctctctgctcgtcgccgacgacctccactccaacggcttcgacgacgcgctcctcgctgatctctgcgccgccaagtccgccggctcgcccctatcttccctgctcgctcgagggcaatgtcagctattcaacaacactgaggctaggaggaaagtcattgacactgccagcgttcttgggaaaacaactggtcttgtactagttgattgttctgcaacttatgatactgttggcatgctaaaggatgccgtggatcgtggatgttgtgttgtattggcaaacaagaaaccgcttacttgtgcttatgaggatttcgaaaagttggtttccaacttccgtcgcatgagatttgaatctactgttggagccggtttgcctgtaatagcttctgtgacccgtattattgcctctggagatccagtttctcgtattgttggcagtctgagtggtacacttggttatgtgatgagtgagctggaggatggaaagagatttagtgaagttgtgaaaactgccaagtctcttggctatacagaaccagatccacgtgatgatctcagtgggatggacgtagctagaaaggcattgatcttagctaggcttctggggcaacagattagcatggagaatattaatgttgagagtttataccccagtgaattaggacctgatgcaatgtccacaaaggacttccttgaaagtggtttagtacctgcccataaaagcattgaagaaagagtaaaggcagcatctttgaaaggaaatgttcttcgctatgtctgtaagattgaaagcacagggtgccaagtgggccttgaagaactcccgaaaaactctgcactgggaaggttgagaggaagtgacaatgtggtggagatatacagcagatgctacgagagcgccccctctggtgattcagggcgctggagctggcaatgataccactgcagctggagttcttgctgacatacttgatctccaggatctcttccacaaaacggcttgaaatctatgtcttgtaggtcgaaccgcagagttgattgtgagtcgtgacttgtggggttcttttggtcacagtattacctaaataaatcttgaccagccatatcaatatttggactgcacgcagaaggcgttctgaactactttggaagtcgagcccac

SEQ ID NO: 388407 - DNA, 715 bp, Oryza sativa
  unsure (1)..(715): unsure at all n locations
cctcctncgtcgacgtcgacgactccaccacgtncctgccgttccccccggccaggaccnccgccatcatcgggaaccacgcagcagccagacgttcagcgtctctacgacgtcaagagcagcaggatcgggttcgccgccggcggctgcagctgagaacgccgagagcgccgccgaacgcgcacccaggcatggtccgcatggatacttgggtaaattaatgggcaatccatttgctattggctatactagctagcacgccattcatcaattcaaccacacaagctgttacataagcatggggatgaacatatcacaaggtagataaaaacgaattggtaaaggtgtttgctctagcgcttagataagaaaacacaactcaaaaacaatattagcgtaatgttaattaatttatgttgtcgaggccagggggtacagagtatttgaaagtggaacagcagaactccaaatatgatacactacacaaatccagtagaggtgacatatatagcttgtcatgtagtaattctttggcaagtactggccgaaatgtttactctgtaaatgtaaattaatgggtgtgtgtgtgctgcgtttgtagcttcttctttagtaagtacaagagctccaaaactgtaagcctgtgttcgtgtgtgagtaccttggacaatgaaatcaagttggtttatatactccaaaaaaaaaaaaaaaaaaa

SEQ ID NO: 388408 - DNA, 1034 bp, Oryza sativa
  unsure (1)..(1034): unsure at all n locations
ccacgcgtccggtggtgaagagactgccctactggaaagtctcgaaggcaagcaaggtaaaccaaggttgaagcctcctttccctgccaatgctggcctatatggctgccccacaactgtcacaaatgttgaaacagtggctgtgtctccaacaattctcaggcgtggtccagaatggtttgcaagctttggacgcaagaataactcgggaactaaactattctgtgtctcaggtcatgtgaacaaaccttgcactgtcgaggaggaaatgagcatacctcttaaggaattgattgaaaagcactgtggaggtgtgagaggaggagnnaacaacctgcttgcaattattcnctgtggttcatctgtnnnnntagtaccgaagcatatatgttatgatgtgttgatggactatgatgcactcaaggctgtgcaatctggattgggtactgcagcagttattgtgatggacaagtccacagatgttgttgatgcaattgctaggctatcgtacttctacaagcatgagagttgtgggcagtgcacaccttgcagggagggaacagggtggctgtggatgatcatggagaggctcaaagtaggtaacgcgaagcttgaggagattgatatgcttcaggaggtcactaagcagattgaagggcatactatttgtgcccttggggatgctgctgcatggcctgtgcagggacttatcaggcacttcaggccagaactggaaaggagaatccgtgagcgagccgaaagggagctactggcagcttcggcttaggacactgtcaatgacgatcctgcactagtttcctgatttctttcacagaaataatgcaaactgatggagctcatctctgtatacgaaatgcagctcccctgatttgtttaaacctttatgtggatgtttatttaatgccctcagaagctggtgaattttgatggactgatgaaaacttttttaagtagaaacaaaatgcagttactgtaccatgtatgtcacatgagccagcaaaatatgatggtgg

SEQ ID NO: 388409 - DNA, 564 bp, Oryza sativa
ctagacccacgcgtccgtttgaaatgcctggtcctgagggtgtattctctttgcctgaagaaggtgatgatagtgttcccattgagactgatgagattttgtacaacgatgacacccagaaacttactgctatcattgattctttctgggaacagttcctggtggctagccctctatctgttgataatgatgagagtcgactcaggtgtactagaccaaaaggaaacacaacaggggaatggatggaccaaagctgaaaacatggctaaccttacagaacagatgggcctcctgtcatcacaccatacaggatgatgaggtacaataggacatacttagccaccatttgtcaaggtaccctgggatctcggtaataaactccctcatcatcacctacccttatgtctatgttatgttctatcattttgctgaaacaatactgaaacgtcaccctatatgtgggaggatactaatcttccacctatgaaacacggtttacccgaggggtttacctgcttgtatctaggtttggcaggcgtaagaattgatcaatggtaacttgtc

SEQ ID NO: 388410 - DNA, 938 bp, Oryza sativa
  unsure (1)..(938): unsure at all n locations
gcttaggaaagtccaccacctcaatccctaaccaagatcgccagtcggaccaccgccgcccgcgactcccccgcccatcgccatgtccgacnccaaccccggcgcggcgaaccctgccctggggccggacgncgacgcggcggcggcgagggccttgagctggcgcagttcgcggcggggtgcttctggacgtggagctgacgtaccagcgtctcccgggcgtggcgcgcacggaggtgggctactcgcagggccaccgccacgagccgacctaccgcgacgtctgcggcggcggcacggggcacgccgaggtggtgcgcgtgcactacgaccccaaggcctgcccctacgaggtcctcctcgacgtcttctgggccaagcacaaccccaccacgctcaacagacacgggcaacgacgtcgggacgcagtaccggtcgggcatctactactaacacggcggagcagggagaaggcggcgcgggattcgctggcggagaagcagaaggagtggaaggagaggatcgtgacggagatcctcccggcgacgaggttctaccccgccgaggagtaccaccagcgctacctcgagaagggcggccagtccgccaagaagagctgcaacgaccccatccgttgcttnagtgacgccgccgccgccgacgccgccccgagcggcactcgccggaccgtgcgctcgatttgccggcgttccattgcacatttgcaggtgtgcatgtttactgtagtaataactaccggtatcgtaaactcgtcaaaggaacctgcaaattctaagtcgcggtgtacgcgattgtgccattgaaagtttgaaactgtgggagtatatatatctgtgttacaataaacgcactgcttgtcaaggtgcagtatagttatgctgtatttgcttcattacctgatcaaaaaaaaaaaaaaa

SEQ ID NO: 388411 - DNA, 554 bp, Oryza sativa
  unsure (1)..(554): unsure at all n locations
ccccttgtaacctttggcggcctcggcttgcttaaaaggatacatatgcttttgtaactagaacatttgttgttgaatttggattatttgatcccatggcgaattctcgggctagccgtttcaagatgtctaatctatcagagccctcaaaagaagctgcatcagctgatgattcaagtgctgtccagaaaactggagcatggagtaacacgttgaacattcttctgcaacaagcttcagtctatggtgtggctgctggttattgcctgtcagcatccctgctctccattatcaacaaatgggcagtcatgaaatttccataccctggagcattgacagctttacagtacttcactagtgttgttggaggtcctcttatgtggacaactaaagcttattgagcatgatggccttaatttgaggaccatgtggaagttcttgcctgctgcggtgatgttctacatctccancttcacanacagtgaacttctactccatgccaatgtggacantttcatcgtgtttcgtcagctgtgccaatttttgtggccatt

SEQ ID NO: 388412 - DNA, 614 bp, Oryza sativa
  unsure (1)..(614): unsure at all n locations
atcgtttctcaccttgtcaacctctctctcggggtctttgcgatcctctcctgttgaataatgcggccgctcatcggcaagcagaaggggaattggtactctgctaaggcatctgaaagtagcatgtcgggcctgttcggttacaagtccttcatctgcattgcacttctcgttggagatggcttctacaacttcgtcaaagtgatcgttgtcactctcaagagcgtacgcgaaagatcaaggcgcaggggtcttaacaacagagtggcggacgcggacaccatggcgatcgacgacatgcagcggaacgaggtgttcaaccgggacaacatcccgacctggatggcggacacccgggtacacgctgctcagcgtcatcgccgggggcctcatcccggtgatgttccggcaggtgaagtggtactacgtgatcatcgcgtacctgctggcgccggcgctggggatctgcancncctacggcacggggctcaccgacatgaacatggggtacancnactggaagatcgcgctcttcatcttcgcggcgtgggccgggaaggacgacggcgggtggccgggctcgtcgggtgcgggctggtgaagcaactggtgct

SEQ ID NO: 388413 - DNA, 648 bp, Oryza sativa
  unsure (1)..(648): unsure at all n locations
caaatgaagtaaatttgggaggtgctgctggaagcgtttcatacttcagtaatttggcatgtgaaagatcacaatatgtgaacttgggatccagttccacagctcaatttgcacttagcaagcactcacaacctaatttccatagagacacatcatctatgcagtcaagtgtgaacccaagtactgaatccatttgggcccagcagccgtttgaacaattactcggtgtatcaagagcagagttgaataagggcgagggtaacaccgaccagagatcaagtggtgtcaccaaacacgatttctctaacaaaggatatgaggtgaaacttcttcaatcactcaggtttttgcatcatggagctcttgaaactgggagggtccaggatggctctttgagcaaaatggtggctgtgatggaaaattaattgatcaagttgctgtagctgagagagtttcacaacataccactgaaaatcagttatctgctgatctccagctccatagttctgatgaagacttgcagccactgcaaaggaatgataacagggatgccaattgcatgagcctactgcccaatgtgtggnntgattgtgtttggcaggcccccctgattgtcagtttttttctnttgtgcatccgccagattct

SEQ ID NO: 388414 - DNA, 774 bp, Oryza sativa
  unsure (1)..(774): unsure at all n locations
ctgtcatttgatgaagttgctggtaatccccttgtgaaggaaacattcaatgctgctcatgagaccgagagaaagcgtgctttatctgcacttctctcccagacaaaacagcaagaacgaaaggatgctgagattttagcagaagcaaaacgcattatggaaactcgtgctgctagcaaacatactgaggaagcgggagcactggcacactttgataatgttgatggtgtatctcccttgagcaacacacacccattgtcaactgctacacttccagctgcagcagtgaataactccatacctgcttcactgcgaatgcttcgagtgtatttgagaacccaagcgcttgatcaaatggtccaagcagcaagtgcctcggcgggccttagtagttatcaaaagggttgaccagactttacaagacctcggggtgaatttgaagcccaaggtcccgacgaaagcagtttgcgtcgagcatcttgaactacggaatgagatacttacactgcttaacttacagaagcagctgcaaaataaagaagctgaagtttcagctaacagagaaaattcctttacagaggcaccaagcacacctaagcgtgctaatagagatgttgaaagacgcgnngttcctgatactgttgggtttgcaggtgagagagcaggcnngcgggaccacaagcggaagaccactggaagatttatagatgcacctccctcaccaccccagtccaagaggcctcggaagttgaaagcatctgattgatgagtttc

SEQ ID NO: 388415 - DNA, 512 bp, Oryza sativa
  unsure (1)..(512): unsure at all n locations
cccaaaatgggaatatcgacgcatcaaaggcaaacgcatcagagtaaaagtctacccaaaagacgaacgtgaagaaccaatgagaaaagctggcacagatgaagtggaagaggaagaaaacatggatggagatagtgaattggaagaagcggcaagtgcaggcctggacaggaatgtattggacgaagcagcttgtggagaccttgaatttgtgtagttcagagctttcctttggtattattcatgcctgcttcatcaaagcaggttagaacaatgaactgataagaagtaactgactagttagattcagttttgtgccatgaagtcatggattgccacattagaagatgtagaatatgtaaaacattagctcgttgcagatttaattagcacgattagcctgttatacaaggccatgttantntataacacgagtatccttggagtttgtaggcctagcactgatttatgatatcattccttagagcactcgttctacttgttagaattat

SEQ ID NO: 388416 - DNA, 485 bp, Oryza sativa
ccacgcgtccgcagacatcttctgtcccggattttcgtggcaaacccagacgaattaccattcctgagatcaagaaccacccatggttcctcaagaacctgccgatcgagatgactgacgagtaccagatgagcgtccagatgaacgacatcaacaccccgtcacagggcctggaggagatcatggccatcatacaggaggcgcggaagccgggtgatggctccaaattctccgggcagatcccgggcctagggagcatggagctcgacgacgttgacaccgacgacatcgacgtcgaggacagcggcgacttcgtgtgcgcattgtgacgaggccgtgaacttgctttctcttcttggagtgtgctgctcctttggtggtgctgcgtgttcatttctgagagctccattctgttgttgtgtcagtgtttgtaaacgaggtgctgtggataatctgaactcttttatatgttgggttcttagctg

SEQ ID NO: 388417 - DNA, 562 bp, Oryza sativa
  unsure (1)..(562): unsure at all n locations
cccggtcgccccgcgtccggcgttggtggcggggaagaggcgtgcagggcgagggccaagtacaagaatcttctccaggactacaaggagctcctcgaggaaactgaagcaaagaagaagagattacagatggagaagctcaagaaacagaggcttttggctgaagtcaagtctttgcggaaaaggtacaaatccggggccgaaaatccatcccagacgtttgtctatagagtaaagaatccggcattgccgcccacattgcggcaacctggttggtctcatggtgaagagtaccacacggttcgggctatcggaagctctagcaaaggcccatcggcgcaccggaggctgaatgctgctccaagagcatctccggtgattgacctcaacgaggcctgcgagccgnttatatttnnngcgaactcggttaagttccgttatctgaagaaattattttnnnaatgtggttgaatttgctctttccagagttcagaagagattggggagcttcatggttaccaggaacctgttagggttggcagggtcatgaggtacccaatgg

SEQ ID NO: 388418 - DNA, 969 bp, Oryza sativa
  unsure (1)..(969): unsure at all n locations
tctccatcttcctcgtgctgcagtgatgatgagggtggcaagactctgctcgagcctagcacatataaggatgtgttgatcttattccggttcgatgaccacgatctccctttcagactaaaagaagtaatactttctgatgtgaggctgttaacattgctagagtatggccttccttcatgggtcatttttctccagtcatatccagtgttctgcaagacatatcgcccatggatgtgtcctcttgccagggcattgtatgtcttgatgtcaatagttactgttctcataggattttatgacctctacaagaatgtccccatgttgaaggcaactgcatcaagattgtttggccctttctttgactggatagagacgtgggaaatgatttcacgactgaagtatcttggaaccatgctttttctacataacttccagcaggcttttacatggtctcttaagattgtaactgctactaaatctgctctaagtgttttgacaaagccaatcatgggaccaattttggaggttcttgaatttaccctgccgctatggaacctttgtgctgaaacagtaggacatctgagctcagttatcatgttggcgatggagacttcatgcagtgtagttatcagtacaatgcagatgattatatggcctttttggctggtcttcagtgttgtgcttaatgttgcaaattcagtcctgtaccctttcgtttggcttcttggagaaattctagctgcacctttccggcttgttgttgcgatagcaagttttgtggcagactcttttgtggacattgttggagttctgagggagacctggtcttnnttgagttccttatatcaagttggttctgcatccggatcnnccggtcttgcatctgaaactaccatcttggggtcactatggaaagatctctgtaccagatttccgtgcgattcgaagcattctgtatgggttgtg

SEQ ID NO: 388419 - DNA, 615 bp, Oryza sativa
  unsure (1)..(615): unsure at all n locations
ccacgcgcccggggagctcgagcaatccgccgtccgtgtcgtcgtcgtcggcgtcggcgaggtcgtcgtctccggcagggggtgggggagccaggtcgaggcgaggcggggggagcccggaatcaggaagatgactcgcggcaaccagagggaccgcgaccgcgagcgcgcgcaggcgcggaagcccaacgccaagggcccccaggacgggctcaccccggagcagcgccgcgagagggataagaaggcgctggaggagaaggccgcgaagaaggcggcgcaggccgcgggcggcgggacctccacggacaacaagaataaggccggcggcgcaaagaagtaaccggcaccggcgacacgtctgtacgattagtaatgccttataagctttgtacctcatgcatctgcgtatccgtgtgccttaactcttgttactctgtctcgttagatgcggtatttgttgggtcataaatctgtctcattagatgcggtatttgttgggtcataaatctgtcatctgtaagcttcaaatactgaatatgatgataataatatgcgtgttctggtggttttntgggttgtcgcnnnnnnnnnnnnnnnnnnnnnnnnnnnnnn

SEQ ID NO: 388420 - DNA, 640 bp, Oryza sativa
  unsure (1)..(640): unsure at all n locations
ccacgcgtccgcggacgcgtgggcggacgcgtgggggaaagaagatggatgcccaaagatacaaattggtaaagtgaaaattgaaattccactgtcaatttttatctcctgttgctgtagctggtgcagctgctggaatagctggcacattggtgtgtcatcctcttgaagtcattaaggatcgcttaactattaaccgagaagtctatcctagtattagcgtcaccttcagcaagatataccgaactgatggaattcgtggtctctatgctggcctctgtccaacactaattgggatgcttccttatagcacatgctattactttgtgtacgacacaatcaagacttcttactgccgcttacatatgaagacgtctttgactcggcctgagcttctagttattggagctctgtcaggcctgaccgcaagcacaatcagcttcccgctggaggtggcgcggaagcggctcatggtgggtgccctgcaagggaagtgcccaccccacatgatcgcggccctggcagaagtgatccaggaggagggcctcccggngctctaccgcgggtggtgggcccgcttgccctgagggatgcccaattccggcattaccctgatgttctacgaggcctgtaaggacat

SEQ ID NO: 388421 - DNA, 648 bp, Oryza sativa
ccacgcgtccgcccacgcgtccgagccatattagtaaatcttggttccttgcgagcaattgctatgcatgaacgcgttcttatattcaattacaacagcccaggaggaaaggccttcttagattcattactgccacggttaaatccaagaaatatcaatggtggaccagcaatgccatttcaacttgaggttgtcgaagctgccctgctttctagaatacaaaggttggagcgaaggctaatgcgtatcgagcctcgtgtgggtgctttgcttgaagttctaccaaatcggttgacagctgatgtgttggagcagcttcgtctaagcaaacaagcattggttgagctgggttcacgagcaggtgatctcaaacaaatgcttattgatctcctagatgatcctcatgaaatccgtcgaatatgcataatgggaagaaattgcacgctcgacaaattaagtgataacatggagtgctccgttcctttagagaagcagattgctgaagaagaagaggaagaaattgaaatggttgttggaaacttatcttcaaagatgtgaatcaatccatggtcaagcagagagacttcttgattctgcaagagaaatggaagattcaattgcggtcaacttaagctcccggagacttga

SEQ ID NO: 388422 - DNA, 466 bp, Oryza sativa
ccacgcgtccgcccacgcgtccggacagacaaggatgaattagcatctttgaaaggtactgaaaaagaaaatgaagatgattcaacatcaaatcatgcagcagcaggttctcttatagaagattgcatagaaatcagcagaaagaactcaggaaacaatggcatttcttctgatattcttgtaaatgcaagtactgaattggtcaggacaaaagtttctacaaaaacgctgtactatcttactaaaatttggttgctgaaaaatgctcatgaaagagatgcaagtgacatgaatagagatcttggagtttaccagccaaggagggaagttgggacgagggaaatgattgagaaatcgtttgcagctcgagaagcccaaaaggttgagttggaaagagtaatcaaacatttgggggaacaattgaaggataggaatgggctaaaacttgatgtataacttcagtgat

SEQ ID NO: 388423 - DNA, 1236 bp, Oryza sativa
  unsure (1)..(1236): unsure at all n locations
ccacgcgtccgggagaatcttagtgttgcttcccgtttgagagatatcaaactaaatgaaccagcattagattggcctncnnnnntgagaattgtacttggagctagtggnggnntggaataccttcatgagcactgcaaccccaagattatccaccgcgatgtcnnggcagccaatgtcctgcttgatggaaactttgaagcagtggtaggagactttgggttggcgaagatgatagacagagagaggaatacagttacgaccggggttcgcgggacaatgggccatatagctcctgagtacctnnnnacaggaaggccatcagtgaagacagacatatttggatatggtgtaatgttgttagaaatagtgacaggagagcgtgcagtgttccctgaattctcggaaggagacagtgagatcatgctcaatgatcctgtgaaaaggttggtgcaaggaggacgattgacagacattgtggaccacaacctggacactgcatacgatttgcaacagctggagaagatgatccaaatagcactcctctgcactcatgtggagcctcatcttcgccctgctatgtcagaggttgtgcagatgctggaaggcaatgttgtcccagcggagcaatgggaggagtggcaggtggctgaacttgcccggcggcatcagcatgagatgaaccaacagcgcaggctgttcagcttcagtgaggagtctctcaatatccaggaagccattcagctatccagtggcagataactggaagatcatacaattgtatcacatgagcttcacttgttccccaagaaagggtgaaggagcgaggagtctctcaatatccaggaagacattcagctatccggtggcagataactggaagatcatacaattgtatcacatgagcttcacttgtttcccaagaaagggtgaagggagacaacagtactcgctatagttgtggattgttaggaatagcctagagtcctcacggtttgcataagtaactgtatctaacatttatgctgtgaacacaatgtcgtgcagctacatctcgttcagacattcatgtgtatacatagacataggctacagactactatagattatattctatagtgtttttgtgttaatgtatacttggtaaaatggtaaccctgtgaaaagagggcgccctcaatagaggacccgctcttgtgtgcgtgcgcatgccgtgtcatactcttttaatatagt

SEQ ID NO: 388424 - DNA, 831 bp, Oryza sativa
ccacgcgtccgcccacgcgtccgcccacgcgtccgcggacgcgtgggttcctctcgaaattgcccaaaaaagatctggagttggtccatactctctcagtttcactaaataaaaggggagatcttcgctattatgatggggacctccactcagcaagaagctattatgcgcgttcgttggatgttcgcagaagtgcagcaaaagaacactcagctgtggcttcccaggtcattgatgtagcaacttctcttgccaaagttgcggatgtcgatagaaatcttgggaacgaaagcatggcagttgagggttttgaggaagcaattaaatgccttgagaatttgaagctggaatctggagaggccagtcttgagcagcggcgtctctcggttctcgactttctacaaaaacaactggatgacaagtgatatgcacggttctttgaagagcacactcacaggatatatgtactatccataacgaggatcagctccagtagtctctgtgatgcatatggaagggagttgctccagaatgaatggtaactggtgtgtatttgaggtttgctgcgacacagaataaatactttcaagttgtatatgtttcttgtgtctgccacgggcggagacctctttgagtcaagatggccacctcttaagccctgaggcaccacggagacgaaacttctcggaagtactggttccttgttgcctctgccgtgttatgtgaatgttatcccactgtatatttattgatgatataatataagaaaagaacagcacagatgttttgtatcgccctatcaaagtaaggtgtttggcatattctagcggc

SEQ ID NO: 388425 - DNA, 450 bp, Oryza sativa
  unsure (1)..(450): unsure at all n locations
cgggcttttngcgcacagaacattgaaagtgcaaagtcaaggctcagtatgtgtgcagaagacatcagggaagagttgaaatctaaagaagacaaccaagaactgtgttctcaacttggagctgtgttaggaatgcttggggactgctgtcggaccttgggagatgctccttcagcaatcacttactatgaagaaagtgctgaattcctctcgaaattgcccaaaaaggatctggagttggtccatactctctcagtttcactaaataaaattggagatctttgctattatgatggggacctccactcagcaagaagctattatgcgcgttcgttggacgttcgcagaagtgcagtaaaaggaccactcagctgtggcttcccaggtcattgatgtagcaacttctcttgccaaagatgcggatgtcgatagaaatctggggaacgaaag

SEQ ID NO: 388426 - DNA, 1763 bp, Oryza sativa
  unsure (1)..(1763): unsure at all n locations
cccacgcgtccgcgcactcctctcctctcatctgacatatctcctcccgtcctttcgaagcctctcgaatcgcatcgccgagccggatggcggtcaccgccgacgtgaagctcgagggcctccgcgccgccaccgacaagctcgaccagatcagcgagaacgagaagtccgggttcatcagcctcgtttcgcgctacctcagcggcgaggcggagcagatcgagtggagtaagatccagaccccgaccgacgaggtggtggttccctacgacacgctctcggctgctcccgaagatctcaacgagacgaagaagctgctcgacaaactcgtcgtgctcaagctcaatggaggcctcgggacgaccatgggctgcactggtcccaagtctgtcattgaagtccgcaatggctttacgtttctagaccttattgtgattcaaattgagtccctgaacaagaagtatggatgcaatgtccctttgcttctaatgaactcattcaacactcatgatgacacacagaagattgttgagaagtactccaactccaacattgaaattcacactttcaaccagagccaatatcctcgcattgttactgaagacttcttgccacttccaagcaaggggaagactggcaaggatggctggtatcccccaggccatggtgatgtgttcccctccttgaataacagtggaaaacttgataccttgttggcacagggcaaggagtatgtctttgtcgcgaactcggacaacttgggtgctattgttgacatcaagatcttaaaccacctgatccataaccagaacgagtactgtatggaggttactcctaaaacattggctgatgttaaaggtggtaccctcatctcttacgaagggagagttcagctgttggagattgctcaagtccctgatgagcatgtgaatgaattcaagtcaattgagaagttcaagatcttcaataccaacaacctgtgggtgaacttgaaggccatcaagaggctggtagaagctgaagcacttaagatggaaatcattcctaaccctaaggaagttgatggtgtgaaagttctgcaactcgaaactgcagctggagcagccattcggttctttgaaaaagcaattggcattaatgttccccgctcgagatttctgccagtcaaggctacatctgatttgttgcttgtacagtctgatttgtacaccttggtcgatggctttgtcatccgcaacccagccagaacaaacccatcaaacccttcgattgagcttggacctgagttcaagaaggttgccaatttcctggcccggtttaagtcaatccccagcattgtcgagcttgacaccttgaaggtctctggtgatgtctggttcggctctggagttacactcaagggtaaggtgaccatcaccgccaagtcagggaagttggagatcccagatggagccgtgcttgagaacaaggacatcaacggtccggaggatctttgaggctgctcacggaaaccttccagatatatttagctgagcgttttgtaattgtcgtgtgcattcggcagccagggctcgatgatcccattacagaataattgtaatcatcttggcacatccgtacttctgttttttggtgtgccaagggcgttgtatttcatttacttaaatgatctcgtaataccatagttttgcatgcactgtagctgggagctcgtagtttactggtaattctattcagagtttactaaaanaaaaaanaaaaan

SEQ ID NO: 388427 - DNA, 650 bp, Oryza sativa
  unsure (1)..(650): unsure at all n locations
ancgacnttntaaaacgacgnccngtgagcgcgcgtaatacgactcactntagggcgaattgggtnccgggcccccctcgaggtcgacccacgcgtccgaccttggtcgatggctttgtcatccgnancccagccagaacaaacccatcaancccttcgattgagcttggncctgagttcaagaaggttgccaatttcctggcccggtttaagtcaatccccagcattgtcgagcttgaccccttgaaggtctctggtgatgtctggttcggctctggcagttacactcaagggtaaggtgaccatcaccgccaagtcagggaagttggagatcccagatggagccgtgcttgagaacaaggacatcaacggtccggaggatctttgaggctgctcacggaaaccttccagatatatttagctgagcgttttgtaattgtcgtgtgcattcggcagccagggctcgatgatcccattacagaataattgtaatcatcttggcacatccgtacttctgttttttggtgtgccaagggcgttgtatttcatttacttaaatgatctcgtaataccatagttttgaaaatttaaaaataaaaataattataatttaatacataaaaaataaaataatattataaaattttagg

SEQ ID NO: 388428 - DNA, 801 bp, Oryza sativa
  unsure (1)..(801): unsure at all n locations
ccacgcgtccgccttcttctcccttggtttttccctcgtgacatcacggacaccagcggcgatccatcggcgatccaccgcgcgcgcttcgatcggcgaccgcctcagtttagttagttaaagtttccccatggccggggagccccagcatcccgaccaacagctccgctctcatcgccatcatcgccgacgaggacacggtcactgggtttttgttggctggagttggcaatgttgatctgaggaaaaagacaaattaccttattgttgataacaaaacaacagtcaaacaaatcgaagatgcatttaaggaattcactacaagggaggacattgcaattgttctcatcagccaatatgttgcgaacatgataaggttcctggtggatagctacaacaggcccgttcctgctatattggagatcccatccaaggatcatccgtatgacccagcacacgattctgttctttctcgcgtgaagtacctgttttctgctgaatcggtggcatcagataggccgttaaaactgtttgtgttatgcaacatgggcatcctactttgtgtgtaacatttaccctttgaaactgctcaatttatgcctattattgtaaactccatttttgtgtgaataatgagagggacgatcgggcagatgaactacaacaaaataaagacacgatgaattcatgtagctccttttgtgtatgactctggtgttcacaaacggacatattgtatgtcgatgttgataaacgatgattttcatttgtggtnnnnnnnnnnnnnnnnnnnnnnnnnnn

SEQ ID NO: 388429 - DNA, 568 bp, Oryza sativa
ccacgcgtccgcggacgcgtgggccacgacaccgtctcgatccccccctcctctcctcctctcgccggcgacccctccgccgcttccttcgccggaatcgatcgatcccatcctgcccaagccgccgccgatttcacctcaccttggtcgaggtcgccatggcggggaggcccagcatcccgaccaacagctctgcgctcatcgccatcatcgccgacgaggacacggtgactgggtttttgttggctggagttggcaatgttgatctgaggaaaaagacaaattatcttattgttgataacaaaacaccagtcaaacaaattgaagatgcgtttaaggagttcactacaagggaggacattgcaattgtactcatcagtcaatatgttgcaaacatgattagatttcttggggatagctacaacagaccggttccggctatattggagattccatcgaaggatcatccttatgacccagcacacgattctgtcctttctcgcgtgaaagacctattttccgctgaatcagtggcgtcagataggcgatgagaaactggtatgtcatg

SEQ ID NO: 388430 - DNA, 817 bp, Oryza sativa
  unsure (1)..(817): unsure at all n locations
ccacgcgtccgcccacgcgtccgcccacgcgtccgcccacgcgtccgctcatcgccgccttcggaagccctagcgaagcgagcgcccaggcggcggcggcggaggaggagcgagcgccatggcggaggacgactacaacgacatggacatggggtacgaggatgagcccccagaacctgagattgaggaaggagctgaggaagagcctgagaataacaatgaggatgctgtggatgatgtggttggggctgaagatgacaaggagcaggaaaagacggctcgtccacggaaaacatcaaagtatatgacaaaatacgagcgtgcacgcattcttggtacacgtgccttgcagataagcatgaatgctcctgttatggtcgagcttgaaggggagactgatccacttgagattgccatgaaagaattgagggcacgcaagatccctttcacaatctaggcggtatttacctgatggaagctatgaggactggggagttgatgagctcattgtagaggacccctggaaacggcaagttggtgggggctaaataactggatacccatgtttgatgtagtatggccaaagcttttagttttttcgggcaagttaacatgatactttctatgacagaaggttgatgtaatgcacagttatgtgnncgcatatgattgcgctgtactttggaactataattgtctggtttcatggactttttcagattattgtgatcatgctcaatcacttacattttaatagncnnntttggactgcttgatatttgggttggctttcatggtaaatttgacttaatttgat

SEQ ID NO: 388431 - DNA, 554 bp, Oryza sativa
ccacgcgtccgcccacgcgtccgcccacgcgtccgcccacgcgtccgagcaactgctgctgggctcagggccatggagaaagaaatcagaaaagaagtcgatgatgccattgcgaaagcaaaggagagtcctatgcctgatacttctgagctctttacgaatgtatatgtcaagggttttggtgtggagtcatttggggcagacaggaaggaattgagagctactcttccataggctgacaacgagaagatggcggcattatttcttctaatatgatatgatagcctggagaaataagcattggtgaagaagtcctcaggcatttctgccattctttgttgcaaaaatgaacctgtatagagatgcgtcaggaagaatcgcaccatatttgtttttgcttcttttccttttctgcaattcatctaaccgctgttgtcaggcttcaaattcaagcttgagactttgcctgcgtgattgctccttttcggaagaaaatgttcaagattatacatctagagtataaattgcctcgccgcttactgtcttggaaacat

SEQ ID NO: 388432 - DNA, 660 bp, Oryza sativa
  unsure (1)..(660): unsure at all n locations
ccacgcgtccgtgcacagtcagattctcgcaaacctatacgaaagaggaaaccgcttcgcttgccttctatggctatggctccactacccagggccagatttttgaggcccttaatatatcggctttttggaagctgacaggtatatcggtctgaaaaaacaaccattatgggatgggaaccggtgagtgtagggcaataaagagccatgcctactacaagcgtgccgattatgtgcctggatcgatggttgttggaatgcatgctcttgctgctgaacaggcacgcaaattcccacaagagcatgctattgcaaatggcccaattgttctcgaaatggacacctacaggtaccatggccattctatgtcagatcccggaagcacttaccgtaccagggatgagatctcaggtgtaagacaggagcgtgatccaattgaaagggttaggaagttgattttggctcatgacctagcaactgctgctgagctcaaggacatggagaaagaaatcagaaaagaagtcgatgatgccattgcgaaanaaaggagagtcctatgcctgatacttctgagctctttacgaatgtatatgtcaagggttttgggtgtngagtcatttnggggcagacaggaaggattnagactactcttcctaggct

SEQ ID NO: 388433 - DNA, 493 bp, Oryza sativa
  unsure (1)..(493): unsure at all n locations
gagcgtnntgnatgcggagggcaataagatctcagcggaggaggagacgagggggagggagacccagcgagggaggagaggaggattccgagcgctgcagccagccatggcgaacatggggtgaagaagacgagggacgcgaacaagaagcggatggacctcatcctgcgcctaatcctcgcggccaacgttatttacatagtagtgagaatggctgtaatgcattcgtctttcacctggaagcattggattggtcttgctgtgacatctgctgcatattttctgccgtacaagcaacttgccaatatgtcagagccagaatactctgagaatggagagttaattaatgctggttatgacttgaacgctggtggaatgtccgaatatttacaagatgtgatatatatcactctctttgtgcagctgatgtctatttgttctgataaattttggtggacatatttggtgattcccccttatggtggatacaaga

SEQ ID NO: 388434 - DNA, 902 bp, Oryza sativa
  unsure (1)..(902): unsure at all n locations
gtaacacaaaagcgacatggaacttatatcttcatgtagttttcttcttgtgttgtcaaataatagttatgtattgactgttctcctattactagatgctgaattttcacatgccacactcagggtgctgtcaaagtaatggccaaagatcttattcgaacacggcatcagatcacaaagttttaccaacttaaatctcagcttcaaggagtttctctaagagttcagacgctgaaatctacacaagctatgggtgatgccatgaaaggtgttacaaaggctatgggtccagatgaacaggcagttaaatctgccaggattacagaggattatgatggagtttgagcgacaaaatgagagaatggagatgacgagtgaagtcatgggggatgctatagatgatgctttggagggagatgaggatcaagaggaagaaactgaggagcttgtgaatcaagtccttgatgaaattggcattgatattaaccaagagcttgtaaaggccccttcggctgccgtcgctcagcccgcagcagcaggaaaggttgcgcaggctgaatctgctggtgggaatggtgacggtggaatcgacgcggatttggcaggcgaggctggacaatctgaggagaatgtagatttccgaccggtgctgtgctgcactaactaaaaaaagagtgctagtgccttgtagcaccatatcttgtgaatatgtattttctactaaaagatttgcaagtgtacttagagatttggaaatacatactcgatatgtggtatactttatactaataatgatcgatgagcaacctctttgctccgatgtgtcattcttcttacagaagtaccgagtgatggaaatttgagattgattttcnnnnnnnnnnnnnnnnnnnnnnnnnnnn

SEQ ID NO: 388435 - DNA, 496 bp, Oryza sativa
aaactactcctcctctcctcctagcgaagagaagggaaagggtagcgaagccgccatcggcgtcggcgagcgaggagaagccaaattcctctactcgatccgagctccttcgattcgatccacctcgtctcggttcctctccaccccgcctgccaagatgagtttcttgttcgggaagcggaagacgcctgctgagctcttgagagagaacaagagaatgctggatcgatcaataagggaaattgaacgagaaagacagggattgcaagcccaggagaaaaaactcattactgagattaagaaaacagcaaaggaaggccagatgggtgctgtcaaagtaatggccaaagatcttatggtcgcggatgaacaattccactttgctgctaaaaatggacagggtgctgtcaaagtaatggccaaagatcttattcgaacaccctttcagatcacaaagttttaccaactgggatctcagcttcaaggagtttctcta

SEQ ID NO: 388436 - DNA, 993 bp, Oryza sativa
ccacgcgtccgggagaaaacagtaaactttttcagaaagtggcaaagaaaggaactagtgtttatccatccaatggcactgctgttgttatgctgtggcttggtgatgagaatcataatttttatatttctgagagtgaattgcagactcatgttgttccaccaccactctggtcaagatctgggatgcattttcaagtaatgggggatggagctctagaagcagacaatactggtataatttcaggtgaacttgaaatagaaaagctccagactcgcaatattgaatctaggtcaaagaatcttataccagtatttgaatctcttcatacatccaggtttcaacagtcaagggtgagcacacctgatagtaacaaatatggattgcttcagcgtcaaaagtccggattttcagaggacggtagactctcctgcagaagcagttctagctctttggactgcatgtctgaaggcccaattagcactgatgataatggttttggtcaatgtttagtagaagatagtggtggtgctgtaaataagaacccaaatgttaacccccgttccgagcttgtaaataatactcagagccttaacacagaggcccagctcggatttgtaaaaaacaaagaggaattgtgaagacagagagcaacccccagatttgtgatagcaactgtgatccaaagacgatcactggtgatggaggagcttcttgaatcgcaagtcttcattgtgcgtgtgtagctgctattctttcatttctcctcctggagttcttgacctctcttctatagctctatttataagcattcatgataaatttactgataaaaaaatgaaggggaggtcgaattaaggcccaatgggtatgggagcggtggtgctgtgaagttgggtttccatcttacaaaagaacgtgcacataacaagattgtccattgcattttcaataatagctcttaatttgtgaataaaaaaaaaaaaaaaaaaa

SEQ ID NO: 388437 - DNA, 811 bp, Oryza sativa
cttttcttagaatcttcccactgacaagctaaggattatatacatggcagttaatggtgttatatatgtaatccaggtttgcatttggatataccttgggacaaatgatagtcctctgctagagcctgtgagcaaaatttttatatcagatgtctcattcttagctcttttgggattcttaatttatggtggaaggctatttttcatgctgaggcgttttccgattgaatcaaagggccgcataaagaagctctatgaggttgggactgtgacagcaatttgcttcacatgtttcttgataagatgcattgtggtggcgatgtcatcatttgatcctgatctattttttgaggttttggatcatccaatactggatttcttttactatatgttaacggagatactgccctctggtcttgtcctattcatcctccgaaagctttcaccgaaacgagtatcagcacagtacccccctattcgttagaagggctggttttgtcgtcacaagcattccaaaaacttgtttcaaagcgagaattgtgatatttgagctgagcttcaagtagttttgatgggtcatctatgtcatgctctcatggatgtggaagcggtttttttgtcctctcctgacccatttttgtggcctttatatttcttgagaccaccaatagttgtcagatgatgttcattcttggttctgcccaccacaacgtaccgttgggagttaattacccccggcccttattattttgcaaacggtatgttaataaaaaaaaaaacaaacaaaaaaaaagaaaggccgcccagctaa

SEQ ID NO: 388438 - DNA, 645 bp, Oryza sativa
  unsure (1)..(645): unsure at all n locations
ccacgcgtccgggctattgggcaagttctttttcttcgtccttatgttaatgacttcagcacagaatgggtcctcacatntntnacactactgacgcttggatcggtgnnnncaactttcattggcgaaagaatatctgatttaaaactcggaaatggaacatnncttcttatatttacaagtataatatcgtatttacctgcatcgtttggaaggacagttgcacaggcatttcaagatgggaattatgttgggcttctgacaatcatattatcgttccttttcttagttcttgggattgtttatgtccaagaagccgagaggaaaattccgctaaattatgcttctcgatacagtagtcggagtggagggctccaacgatctgcatatctaccatttaagggcaatagttctggtgtcatgcctataatattttctacatcttctttggctttgcctggtactttggcacgatttactggcttagactttcttaaaaaggctgccatatccctaaatccaggaggtgctttgtatattccaactaatgtactgcttatagcctttttcaattactattacaccttccttcaattggatcctgatgatcttagtgagcaattgaagcggcaaggtgcttcaata

SEQ ID NO: 388439 - DNA, 519 bp, Oryza sativa
tgcccgtcccccgttcaccgaggtggtcaggatgctggagcaagtggagatggaggtcgttaacactgtccggagggcccgcttccggtgttgcatctcccagccaatggccctagactgagtcacagccaggatccagggtggaaaaaggcaccctggagaaaagttaagtcctgtggccctatcatattaataggcctgttctgcagagaagatgaaagcccaagctgagtgtacttggcgtcgcgcgttctcttcgtttgccctagccaatacctagtatctatcgtcagactggaatgtattagcggtagctttttatctttgacaacaaaaaaacaccatgcagggctcttgttgcaacaaccgcatgttcctgctgtatgttatctgttgtaatcatcctgcttggaacatgtgcaaggctgcaaggcttgatgcctaatagtatatatagcatatgtataattccctggcatgtgtcaaacctgtttttatagttctggcatgtgttttttt

SEQ ID NO: 388440 - DNA, 441 bp, Oryza sativa
ccacgcgtccgaagcaatcgagcgagcaagcaagaattcagaaaggagaaggggaattatgagttaccagagagtccctcccgacgaaccctaccctccaccagggtatcctcaatccgggccatatccatacccaccttgcgtcaggtgctgtgtaccctcctcagggttaccctagctcccatggtgtgtaccctccaccacaggggccttaccccccacctcaccagcctccaccaccagggtaccagggctacttcaatcagggccagcaaccttactacccgccgccaccactgccatatgaccactgccaccaccactgtggtgatgagggttctggagctgggtttctcaaaggatgtttggccgctctttgctgctgttgcctgctggaggagtgctgcttctaaggagaagaattattttgctctgtgcagc

SEQ ID NO: 388441 - DNA, 965 bp, Oryza sativa
tgctttgctctgatctggttgatcgatctcgtcgtgggcgatggagaagttgctttcctcctccggcgccgccgccgccgtccgccgcgccgtcctcgacgccggcaaggagctcggcttcttccaggtggtgaaccacggcgtgccgccggagacgatgcgggagatggcggcggtgtgcgaggagttcttccggctgccggcggaggacaaggcggcgttctactccgacgcggaggagaaccccaaccgcctcttctccagcaccatctacgaggtcggcgaccagcgctactggcgcgactgcctccgcctcgcctgcggcttccccgtcgccgacgacaccaacacccactggcccgacaagccccaccatctccgggatgtcacggagaagttcttcgtggcgacgaggggattggggatcgagctgctgcggctgctgtgcgaggggatggggctcaggccggactacttcgagcgcgacctcaccgccggcgatgtcatcatcaacgtcaaccactaccctccatgcccggatccgagcctgacgctgggcttgccgccgcactgcgaccgcaacctcatcaccctgctcctccagggcgacgtcttcggcctccaggtctcctacaatggcgactggatcaacgtcgaccccgtccccgacgccttcgtcgtcaactttggccacctcctcgagattgcgacgaacggagtgctgaagagcatcgagcacagggcgatgacgaactcggcggtggcgaggacgtcggtggcgacgttcatgatgccgccgatggactgcctcgtcggaccggcgaaggagctcgtcggagtacggcggaccagccgcagtatcgcaccgtcacgttccgcgagttcatgcgcatctacaagaccgtcggcgcgcgccgcgacagcgtcgagaaggccttcaaaatctgatcctgacaaaaaccaaa

SEQ ID NO: 388442 - DNA, 428 bp, Oryza sativa
gctctattgctttgctctgatctggttgatcgatccgcgggtcggcgatggagaaggcgctttcctcctccggcgccgccgccgccgtggcgtcgcagggccagctcccggactgcttcgtgttcccggccgaccggcgcccaccggcctccaccgcggccgtgtcgctccccgtcatcgacctctccggcccccgcgacgccgtccgccgcgccgtcctcgacgccggcaaggagctcggcttcttccaggtggtgaaccacggcgtgccgtcggagacgatgcgggagatggcggcggtgtgcgaggagttcttccggctgccggcggaggacaaggcggcgttctactccgacgcggaggagaaccccaaccgtcttttatacagcaccatctacgaggtcggagaccagcgctactggcgcgac

SEQ ID NO: 388443 - DNA, 575 bp, Oryza sativa
  unsure (1)..(575): unsure at all n locations
cgccttcgtcacctaccaggagatcgccgccgcgaacaacatccccgaccccaacaagataaatgtcagccagacgctgtggattccgctgccctgcagctgcgacaaggaggaaggctctaacgtgatgcacctcgcctacagcgtcggcaaaggggagaacacgtcggcgatcgctgccaagtacggggtgacggtgtccacgcttctcaccagaaataagatcgacgaccccacgaaattgcagatgggacagattctagatgtcccgctccctgtgtgccgttcatcaatcagcgatacctcagctgatcacaatctgatgctcctcccggatggcacctatggattcaccgcaggaaactgcatccgctgcagctgcagttcaactacctaccagctaaactgcactgcagttacagaacaagggatgcccgtcagtgccactgtgcaatggaacgctgaagcttggtgagacgaacggcaccggttgcggatcaacaacgtgcgcctacagaggttactccaacagttcatcgctcatnnnacaaaccagccttgcaactaatcagaca

SEQ ID NO: 388444 - DNA, 548 bp, Oryza sativa
gtcttctccccgccgcgctcgtgccctcgcctcgggtggcctcgccgaaaccctaaccctagaatcgtcgatcgcccgcgagagaggagggggagggggacgagggggaaccgcgcgtgatggggaagaagaagccgcgcgtggagaaggtgttctgctactactgcgaccgcgagttcgacgtcgtgaagatcctcgtgcagcaccagaaggccatgcacttcaagtgccacgtctgccacaagaagctctccaccgccggcggcatggccatccccctcctccaggtccacaaggagtccgtcaccaaggttcccaatgcaaagcctgagagggaatcaacagagattgagatctttgggatgcaagggattcctccagatgtgttggccgcccactatggagaagaggaagaccctgcatcgaaggtagccaaagtggaagtgccatcgctaaggcctcctgttatgcccaatccagcgggcatggtatatcctccacgaccggcctatggtgtagctccacctatggataaccctgcactgaat

SEQ ID NO: 388445 - DNA, 425 bp, Oryza sativa
ccacgcgtccgctccaacaacgcaaagctttgcaaaagctctagcagaaaaaagggccataagcaagaagaagccgagcggcagcagcagagcttagcagcattccatggcgatctcctccgtcttcctgcgtccatcgctgttctcttccccgccggcggcaggcggcggcttcctctccccggcgacatgcagcagtgctacgcgtcacctcgagcaagaggagaccactcttctcaagggcggcgacgtcgctgacggtgagatgcgagcagacggcgaagccaggcggcggcaccggcgccggcgccgccgacgtgtggctgagccgcctcgccatggtcagcttctccaccgccgtcgtcgtcgaggtctccaccggcgaaggcctcgtcccgaacttgggcgtggtgacgcctgctcca

SEQ ID NO: 388446 - DNA, 711 bp, Oryza sativa
  unsure (1)..(711): unsure at all n locations
natgggtntacccacgcgtccgcggacgcgtgggttgatccaagacatagagcctttggatctaagtgtcattcagaaagatgttcctccggaaacagtttatgcaatgaagaggactatctntnnnnttttgggcctgcttccatcagatcagttccgtgttgttgtagaagcccttnngaatcccttcttcaagttgttggtatcttcaattatgacggggtatactctgcgtaatgctgaatacaggctctcttttgaaagaaacctagagctttcagaagaagattcggaaggtcaaaatagagatatctctgaagacaatcatcataacatcaatttgggtagccctgtcacaattttcagattatctgaagaagacatgctacaagacactgaaaaaaatgatgaagaattaccatgggaaactgtgggggaagatcttggtaacggggcacgctcaagcggaagattacataatccaattgcagtctcgattggatgccatgaaaaaggtgattgaagtttcattctttgtctccctgactaggtagtcgaaatagtggtggataaaatttgttctattttttgttattatctccaccattctactactcttcccagcatcagtcctgaaaagatcatcaaattcattgttcgctatcttttgggaatggntatgtattaactgggtaattatggctcgttctc

SEQ ID NO: 388447 - DNA, 536 bp, Oryza sativa
ccacgcgtccggaaacctagagctttcagaagaagattcggaaggtcaaaatagagatatctctgaagacaatcatcataacatcaatttgggtagccctgtcacaattttcagattatctgaagaagacatgctacaagacactgaaaaaaatgatgaagaattaccatgtgaaactgtgggggaagatcttggtaacttgacacctcaagcggaagattacataatccaattgcagtctcgattggatgccatgaaaaaggaattgcatgatcttaggaggaaaaattctgctctgcaaatgcagcagtttgttggagaagaaaaaaatgatttgctggactatctaagatcactaacaccagaaaaggttgctgaactctcagagtctacctctcccggagtgcaagaggctatccactccgtggtgcatggtttgcttgcaactctttcccccaagatacactcgaaggcccctcctccactaggtaatgcttctgggggtgtactgaatcttggggggggggatgatgact

SEQ ID NO: 388448 - DNA, 526 bp, Oryza sativa
  unsure (1)..(526): unsure at all n locations
acgatttagctttaatctatcgtggcggtggacgctctataactagtggatcccccgggctgcaggaattcggcacgagtggcgcacgggcttcgggacggaccagtcggtgtggaagcacctggtgccgcacctggtggccgactaccgcgtggtgctcttcgacaccatgggggcggggccgaccaacccggacgacttcgacttctcccgctacgccaccctcgagggctacgcgctcgacctcctccgccatcctccaggacccccgcgttcgcctccctgcatcttacgtcggccactcctgtcctcccgccgtcattccggcgcctatcgcctttccaatctttccgcccccgaaactttttttttcaaagtttgattccccctcttcccggcttccccctcggggtaccccccaaaaaattttttaaaaaccttttgggaaggaatttttaaacccggaaaggaatttcttttaaaaaaaaacccccttttttaaaaaccctntnggggttttcaaatc

SEQ ID NO: 388449 - DNA, 598 bp, Oryza sativa
  unsure (1)..(598): unsure at all n locations
gcagatggaggcccgccagttccggcggtacgcangaggccgcgaggatcgcgagcgtgaggtacaggaaganctcgcctcgctctccgacctcgccgcctcctaccactcccgcctccagtcccacgggatcgaccctgattccttctccgacgacggcgaggaggagcagcacgacgaggaagatggcgaagaggtagaacagatcgacacggccgcgctacagacagatggaagcagcggcggcgactcaatcggtggcatgcaggtgaaagccatggtcgacgatgatgtggaagtgctattcacccctgtngagaaggagttcgagtacacggtggatgtgaggtgcgcgagctcgacgacgaaggtatccggggcggtggttgttggggagttcatgggggagggcaatgcagctgcagggggattgtacgccagggtggaggctctggaggcggacagggcggcaatgcggagggaaatcgcagcattgcgagcagagagtgcttcactggtgatggcgagggccatggccctgcggctgtgccgggaggtggttgctgaacagaaagccaagaaagtggctgcctcacca

SEQ ID NO: 388450 - DNA, 672 bp, Oryza sativa
  unsure (1)..(672): unsure at all n locations
ccacgcgtccggcaagtcctgggacattccaaagaagtgctcctccacgtaggagctcacagatgctcgacnnnnnntgaaagaggcattagttatatggcaggcatncatctaacaagaactatgagtccactataagaggcatccaaggcctaaattttgatgccaacgataggatccactactaatattgttgggatcttatgcgtaatcgtttgatctcttgggtataaaaggggaagtgaggagatattttcgacttgctccccctatcctgagatggatgagaatgctggagtgttatggcagcctgctgacccgaagtactggaggctggctggctaaataaagggtcggcctggtactccagcggctatgaccttaaacaacgttttaagccccctgtacatgctcttgtttgctcctattgtgctcttagatgctgtgtgttagtctttttttagatgtcatatcctgtatcaaggttgtcaagatatttgccctctgggtcacgcgtcgtgtgtgcatttcgatgcaattgctgtctgagaaagtgtggaaattgtaagtaacttaaagtgattatttattgacgtgtttgtgtagtgttgcgttttagtttgtgcccaaaaaaaaaaaaaaaacccaaaannnnnnnnnnnnnnnnnnnnn

SEQ ID NO: 388451 - DNA, 1021 bp, Oryza sativa
  unsure (1)..(1021): unsure at all n locations
nttntctctctcaaaaccgcgggaatcaatcaatcgccgttcgcgtcggccacgagatattttcccccaagaaaaggtagtagtaatcttcgacgatcttgatcgatcgccatgagctagctagctagcgagatttcttgttgtttcttttttgggttattgatggcgttgttgttcttgttcttgtttgttgcagttggagtgagggatgagtgctatggcgatgtcgtcgctgaacccgaacgcggcgccgttcatcccggcggcgttcaggagggtggaggacttctcgccggagtggtgggagctcgtcaagaccacggcgtggttccgcgaccactggttcaggcagcaccagatgtacgaggacgctgcggcggaggaggaccaccaccgccaggtgttcgacgacgacctcgccgcgctcctgcccgacgactcgctcgacctcctcgacatggtcgacaccgacgacctcttctacacccccgacccccccgtccaccacaagccgacgacgactcccaccctcgacgccgacgtgctcagggcgctcagcctcaactcgccgaggttgggcggcgccgggatggtgaggcacgccgagaagccggcccagttcgtcccgccaagggcggcgccgcccgccacgtcatccaccagcctcgctagagcgccatgggtgagtggtgatgctgctgctgctgctgtctagtgtataaccttggagttttcagagtttagtctctctgcttttcttcactgtgtataaaaactgaaaaaaaaagggggaaaaattgcagctttctggtgctgcatcccttgtagtagtaaagcagcttctgttcagtttcaggtgcatcatctaaaatgtgttagaaaaaaaaaagcaaaaatagagagtgatgtagaatcatgtgtactaatgattctactaccgcccttgttaatgttggatatattaagatggcaagcagtctaatgtttagaatctttcaaccactaattaaaaaaaaaccaa

SEQ ID NO: 388452 - DNA, 551 bp, Oryza sativa
  unsure (1)..(551): unsure at all n locations
ccacgcgtccgacaagaaacccaccgtttctctctcaaaaccgcgggaatcaatcaatcgccgttcgcgtcgcgccacgagatattttcccccaagaaaagttggagtgagggatgagtgctatggcgatgtcgtcgctgaacccgaacgcggcgccgttcatcccggcggcgttcaggagggtggaggacttctcgccggagtggtgggagctcgtcaagaccacggcgtggttccgcgaccactggttcaggcagcaccagatgtacgaggacgctgcggcggaggaggaccaccaccgccaggtgttcgacgacgacctcgccgcgctcctgcccgacgactcgctcgacctcctcgacatggtcgacaccgacgacctcttctacacccccgacccccccgtccaccacaagccgacgacgactcccaccctcgacgccgacgtgctcagggcgctcagcctcaactcgccgaggttgggcggcgccgggatggtgaggcacgccgagaagccggcccaagtttcgttcggcngccaaaaggcgggc

SEQ ID NO: 388453 - DNA, 1200 bp, Oryza sativa
  unsure (1)..(1200): unsure at all n locations
ngctcggagcagtgccancgcgcgctcgagatgatgcgggaggctgatctgggcatcgccgtgtctgaggaggaggaggaggaggagggcgccgacgccgtggcgggaaatccggaggtggggggcagcgacgggtgtgatgaggagggtgcgccgccgccgtctccgccgtcggaggccgactacgagacggacgagttgtgcgatcttctcaaatcgagggttgcatcgcctgaatttcttgaaaaactcgataatattcagaagtcggtatatcaaaatggtgcagtagatgaaactatatcatgggatatcataagtgcggcagacatatgggacgacattgacaagggtatgaacattagtgatgattcagaggatggatatgttctcattaaacaagaggacatagttgatggtattgcaagcttcatggctgcatacttgctgtcgctgaaacaaactaaggacttgacacctaatcaacttcaacaagctcttagcaagaccttttcagctaagaagaggaaaagcaagcttcagaaagcatgggatggaacaaaagttatttataatatagcatcatggagtgcaactgctattggcatctaccagaatccagcaattctaaaagcagcaactgctgccttctggacttcctgccgtgtagcatccaagtttctgtgaatagtccatggctggtcgttgtggtgctgtgtacattgtgtgactacggcaacgatgttgcttccccgtgccatctgtcaaggggaaaatacttttgccaaaacattgtagtacactcaattatatgatgatgtaattctatcgagatcctccaccacaggttcacaggttgattgacagttagttcatgtgtcaggaaagatttcagctcagaccacatttgttatgaacatgtgggcctggtctatagtatcttgcacctgatctaatggttggaggacacctccctccctgtgtttacctgtatcatttgtatcagaccacctccggtttgtgattcctttgtacatataagcccgttcattgtaaatatatcagccattcaacactccaacagtgtatccgtccaattgtaaatatgtcgattcgtttgaataaactcatcgatcacatggctttcactcctctggagtnnnnnnnnnnnnnnnnnnnnnnnnnnnnnnnnnnnnnnnn

SEQ ID NO: 388454 - DNA, 1301 bp, Oryza sativa
  unsure (1)..(1301): unsure at all n locations
agcttccgcaccgccgcctcgccatcgccattcccctcgcttccctcctcctcccgacaagcgccgccatgctccagcctccgattccccagaccaagaaacgggaggatggtgggggtgcggaggagggcgtccggattcgaggccttccctcccctacctggtaaggtgttcgtcgaggaggcaattggagctgaatatggggaaggttttgagacatttaggatggatggaccactcaaggtcgatgtggattatctgaacgaaaaattgcaagaatgcttccttcaaaggataagacatgctatgaagccagatgaagcatgtgggcttattttctcatgggacaacgtaattgctgatacagactcactaaagttggatgcctggagacagcttgctttggaagaagggaaggatatcccaaatgctggtcatgtccaaaagagtattcttcatggtgctgccgaccatgtgcttagaaaggttttatgttgggcaaaagatgaaagtcaaatggaaagactgaaggcacggcttatagagttatactacgaaaatctcttcaaacttgatacaccagtaaatggattgcgggaatggttggatgctgtccagacagcaggcatcccttgtgctgtcgcatcgtccctggataggagatgcatgattgaagctttggatcgaatggaactaagcaaatacttcaaggcaattgtgactgccgaggatgatatggagtcaatagcacataggttcctctcagctgctatgaagctggatcggaagccctcaaagtgtgtggtgtttgaggatgacccgagaggcgtaaccgctgctcacaactggtaccatgatggcagttgcactcattggtgctcatcctgcgtatgagctggtacaggctgatctcgccatcgcaaaatacagtgagctctcggttatcaatctcagaaggttgtttgcacataaggggttaagtttcatggacttgcagaagcagatcatcgagaggtcacctcccaagaggaagctgacagtagacaccatcttctaatgaattctttacctcccaatactgaaaaagagagaaaagaaaatagcaccatgcatcctccctactgtgctgtgtatatagcattccatgttggttagattacatagaaagctgatgttagatgatctgttgttgcatacctccattctggatgtactagatgtaaactgatgtttaaccattttaatcatgataaatactaccagtctaccnnnnnnnnnnnnnnnnnnnnnnnnnnnnnnnn

SEQ ID NO: 388455 - DNA, 500 bp, Oryza sativa
ttgggagagagaagcagtgcaatccttttctgaggacctcaagtccagagataaagaataccctgtccatcccagaccattttgatgatgcacgcgttcttgaagttgttcgacgagcgaaggataacttttaactaaccataaaaaaggaaaatttcacgtccatgacccaattgtcatgttgaggagagaagcagacaaagaactccacaagagaaacaaaagaactacaaggtatatgatgactacataagatcgagctagtttgtttctaaaatgcttcggcaaaattgtgtcgcggtgtatgtagcttttggcagtggttgtaaaatgtcgtccaatagcagctggtgattctttctatcaactacaaataagtgtgatctgttatcatcaactctgtaaaaagaatgcgagttagagattgatagttctcccagaatctcaatcctgtccttatgactcatttcatttgaagtgattaagagcccgctaaagag

SEQ ID NO: 388456 - DNA, 1409 bp, Oryza sativa
cgaagccttccttcgcccttgtcgtccaaccctcctctccgcccctcctcgtcgcggggcggggggtacgccccctcctcctcctcctcctcctcctcctcgtgtgggggcatggccccgagcgaggcggccgcggcgcaggaggcggagatggacccggacttctcgggcgggggcggtgggggccccaccttcgagttcgccttcaactcggtcaacttctcccaccgggtgctcccgatcgaggtcgtcccgggggacgaccacgacgacgacgaccacgcgcccggcttcacccgggacggcggggcccgctcgctctcggattgggcgcgccaccgcaagcgccgtcgcgaggagctcctcaaggagaaagagtctgaagcagttatgccagaccagataaattgcaaagtagaaccagaagaatgtgatgcatatgaagaaaatcaagaagaacctgtagcaatgatggacgactctccacccagtgttggccctgatggtgatgatggaccaagtatggactcaccttggagtggtggggtgagcacaccagttctaagagtaaagaacatttatatcagttcagcgattcttgcagcaaaaagtcctttctttttcaagcttttctcaaatggcatgaaagaatctgatgagaggcaggcaacccttagaattactgattcagaggaaaatgcccttatggagcttttaagctttatgtacagtggaaagttgacatcaactgaccctactcttctactggatattctgatggctgccgacaagtttgaggttatttcgtgcatgaggtactgcagtcagttgctcacaagcttgactatgactacagaatctgcactactctacctagatcttccatgctccatttcgatggctgctgcagttcaacctctgacagatgcagccaaggaatatctttccaacaaatacaaggatttgcctaagttccaagatgaagtgatgaacatccctcttgctggaatcgaagccatcttgtcaagtaatgacctccaggtggcatctgaagatgctatctacgatttcttgatcaggtgggctcgcgcacaataccctaaatcagaggaaaggcgtgagatcttgagttctcgtttgcttccgctcgtgcgattcagtcacatgacctgtagggaagctgcggaaggtcctaatatgcaccgatctggaccatgagcaagcaaccaagtgtgtcactgaggcacttctatataaagctgatgctccacacaggcaacgtgctctcgcagcagacgtaacaacctgtcagaaatttgcagagcgggcttacaagtacagacctttgaaagttgttgagtttgaccgaccctacccacagtgtatagcatacttggatctaaagcgcg

SEQ ID NO: 388457 - DNA, 559 bp, Oryza sativa
ctccgctccttgcgccgccaagacgagtcgcggctgaacataacaggggaggggcggcgatctccctctccatctccatctccatctccatctccatctggcgagcagagcaggggaggggaggggatcctcacctggaaagtgtgggtaaagcgcagggcaacaagaaatggcagcattcctgaggtcaaaatgttcgtcagttggacgtaccttgatgggaggccttgggaacaatctatttggagccgttaactcatctgttgaaacggtgtcaagaccatctcattgtgatcctatctttcagcaaatcagaacattcatccagatgagaacaaacctaaaggtggtagacaactctggtgccaagcgcgttatgtgcatccagtccttgagggggaagaaaggagcgaggctcggggacactataattggatctgtcaaggaagcacagcctcgtggtaaggtgaagaaaggagatgtgggctattggagtggttgcccgtgctgctatgaagcgaggacgcaacgatgggcacgagatccagtttgatgacaa

SEQ ID NO: 388458 - DNA, 420 bp, Oryza sativa
ccacgcgtccgaatttcatcacggaagttccagagcaagtttaatggattttcgatcctggaatcatcagctgtcgtttgccttcctcggggaacagtatgctatataccttatcctctggacggggactatagaaaatagaaatgtaaggtaaataagcttcggctttgcttcttccggctggcacatgttagattgtgcccagtagtagaccctgttcaaagttggacacagttatctttttgcccaaaattgtgtcctaaggaaagaggggacaactcgaccagagatatccttattcagattgtaaatagctcccgaataagatttctatgtcccttgcaacatggttcttccctgtatagatcatcagtggcactattcctcctgggtccatgcaattattcttccgtgccaatc

SEQ ID NO: 388459 - DNA, 628 bp, Oryza sativa
ccacgcgtccgcccacgcgtccgccacgcgtccgggccgcgcctatgtcctctccggcttgagctcacactcatggcagagagcaactgcgcgaggcgactccacagactgcgagagctctaatccaggcctaccagacttcatccatggtcgacatgctgcttgcgcttcgcagaccaatgaagccgcttccttaaacccctccacagatgaggcatgtgaagtcgtttccagcgcgcccgcagcctaggtaactgcaatttctagtgtttggcaacgccaataaggatgggttttgctaaagcctagatgtgaatttggtgaaagtagtagtgtcagttgaattcttggttttgtggcgggaggacgggacgggggtatagtttgtggggcataagggggattttaacggtgtaaattaatttgggtgtggtgggggtaaaagggaaaaagaatctgtatttgggagaaggatggtataagagttggggaaatggggtaagatagggtggctattattttttttttccttcttgttggttacctggtatactcccagtattgtactagtagctctcctctctcctttgtgtggtgatgtacataaagagaagggtatacatttgtg

SEQ ID NO: 388460 - DNA, 1060 bp, Oryza sativa
  unsure (1)..(1060): unsure at all n locations
ccacgcgtccgcacacctgcttatgttgctccagaagtgatcaacagaagaggctatgacggtgctaaggctgacatatggtcttgtggagtgatactctttgtgctattggccggctatctacctttccatgataagaacttgatggatatgtataagaagattgggaaagcagaattcaaatgtccaagttggtttaataccgatgttcgaaggctcttgctcaggatacttgatcctaacccaagtacaaggatctcaatggacaaaatcatggaaaatccttggtttaggaagggtctcgatgccaggctgctcagatataatctacaaccaaaggatgcaattcctgttgatatgagcacagattttgactccttcaatagcgctccaacattggagaagaagccgtccaacttgaatgcttttgatataatttctttgtcaactggacttgacctctctggtatgtttgaggagtctgataagaaagagtccaaattcacatccaccagtacagcttcaacaatcatatctaagattgaggatattgccaagggcttgcggttgaagctcacaaagaaagatggtggactgttgaagatggaaggctccaagcctggaaggaaaggtgttatgggcattgatgcagagatattcgaggttaccccaaactttcatcttgtggagctaaagaagacaaatggtgatacacttgaataccgtaaggtcttgaaccaagagatgagaccagctttgaaggacatagtctgggcttggcagggtgagcaaccgaagcagcagcagcagccaacgtgctaaaaaactttgacaagggcaagttttttgcaatttgagtcgacttccaatcgtttatgtatttctgcagcttttgttcctcttgttattcattttcattcctcatgtattgttaatattaatatcgatgctatcttcaaatgaggatttatttgaaaaaaatgttgagtttgtttctggatgttactgtttttgctcatggagaactgtaatactgacatttttcatttatcatgncccg

SEQ ID NO: 388461 - DNA, 484 bp, Oryza sativa
  unsure (1)..(484): unsure at all n locations
catggtgtaatgaaaagaaagttaaaaagaatgtaaaggctcggccaaaaggtgacttgggagctgccaagacattgtgtaccccatttgaacagccagatctcccagaaggaaccacatgctttgcttctggaaagccggcgaagaaatggtcattctggggccgcagctattgatctgtaacggatctcggttgtgatcattcattcctgctggcgaagccgttgattccccatagacatgtattgcagttttcatactagcaaagcatgatacacatacatctatttaccgtgcagttttgctgcttgtcagaaatcttgacattggaatgtttaagtaacatcttgtttggttcagaatcttgtttacccagcaacttaattgaactaatcgttgnnnnnnnnnnnnnnnnnnnnnnnnnnnnnnnnnnnnnnnnnnnnnnnnnnnnnnnnnnnnnnnnnnnnnnnnnnnnnnnnnnnnn

SEQ ID NO: 388462 - DNA, 480 bp, Oryza sativa
aacatcttacaagatttatagggtataggaagagagggaggggggtataccatgatgtgcagggttatatggatttggatattggaagtgtatgtggcattttggccaatcacagtaatttcagtattggttttgggatattgtaatctagattcttagtataatgtagcactagcactttacttcaatcctcttgctccatgagaatgatgaagtggcatatatgtttttgttaagctcaaaatcatttgtgctgcatgtcaaacaagaatatactttttttaactgcaacaataccacttgatgatttcttgctcaagaaaaaatattataaattgtattaatgtttttattaatatttttctgtctatttaatttttttatttttttttgataattataattaataatcttttgggggggggccgttttagatattcaaatttatcttcccggttgtgtgatattattttttttttt

SEQ ID NO: 388463 - DNA, 483 bp, Oryza sativa
cgacgcgtccgcccacgcgtccgcccacgcgtccgcaaaaaaaagcctataaaaaagtataaaaccattgcaccatcgagcaaggcagtagcagtgatcgaggagaataaaagcagaagtagtagcagaagcaagaaaacactttgagcatttttgttttgttctccttgcagttacagctgaagcagcaagcagaagattaaccctcttggctaagattcaggttaacctgcagcgagaggttagctcagctcagcttagcttagcttaagctttgctcgagcttgccgtgcactccactgtctcttttccggtgggataatttggtgcggcggtgagctgccggccatgtcgaccgtctcctccgcgctgtcggcggtcctctactgctgcttctcccccaccggcggccaccggcacggccaccgcgccggcgcgtacttactacagcagccacccgacgagcaccaacacctactacta

SEQ ID NO: 388464 - DNA, 587 bp, Oryza sativa
  unsure (1)..(587): unsure at all n locations
ccacgcgtccgtggtgtttcttctgtaagcattgtttgtgaaggggagatggatcttgaaaaggctgacatgtggttgggaaacctactgctagaacgcagcgatgacatataccggatgaaggggctactttctgtcagtggaatgcctcagcgctttgtctttcagggagtgcacgacattttccagggatctcccgagagaatgtgggaaccaaatgagccacgcatcaacaagattgtattcataggcaagaatctcaatggggaagaactggagaagggcttcaaggattgcctactgaagaaataagcgagaaacgagtttgtacgtttttcctacacacgggatgggaatctccagcttcatgattttgagctttgcggctgtagaacttatccttgaatctgaagtgcgattgaatgaactaacttgcatcatttgcgagatgtacagaatgggttaccgtaatatccttgtagccttgccatcatttacagttacgaattgtaccctgaaattgcgcacgctgtaatttgaacatacagagatggtgtttcttaattcctagtaaanaaaaaaaataa

SEQ ID NO: 388465 - DNA, 668 bp, Oryza sativa
  unsure (1)..(668): unsure at all n locations
ancggaattntattnaaaataaaagggaggaaacncttaaatttaagnaatgggnggaacncggggttaatncantttnggtcatggaaannccccttttggaagagtagaaaacagcnagggacctgtnangttcttcnaagtgntgagnaatnanagtttgaaaaaatggcattgtgctcaanatgctcgggatggtgtgcagttctcggcatgcaagcaactgttggggctttggtagcgaaggctcttactacctctgcagtaccttactatcaagcaacttcccctggtcaaagtcctgttttggctctagatgttttcctagttcaggcttcagcgaacatcatcctgtcgcatttccttggcctggcgagctcccctggagttgctgcgctccgtggccatccctccagcagaagctgctgcggcgtgagcatatcagcgcatatgccaaaggcaagggctcccgttgatcatcttgctcttcatttgctgcttcgggctttggtattcgctaggagtagcaccgctcgtccgcctgtatgtttcttgtccagacaaaattttaaaaaaatctagctttcactgcgtaaaaaaaaaaaaaaaaaaactcgagggggggcccggtacccaattcgccctatagtgagtcgtattacaattnc

SEQ ID NO: 388466 - DNA, 810 bp, Oryza sativa
  unsure (1)..(810): unsure at all n locations
ccacgcgtccgcaccgtggtgccaaccttgaggttaggatcgctcgtatcttcaacacatatggccctcgcatgtgcatcgatgatggccgtgttgtcagcaactttgttgctcaggctttgaggaaggagcctttgacggtttacggtgatggcaagcagaccaggagtttccaatatgtctctgatctggttgagggattgatgaggctcatggaaggtgagcacgtagggccattcaacctgggtaaccctggtgagttcaccatgctggagctggccaaggttgtccaggacaccatcgaccctaacgcaaagatcgagttccgtcccaacacccaggacgacccgcacaagcgcaagcctgacatcggccgtgccaaggagctccttgggtgggagccaaagatccctctccacaagggtcttcccctcatggtcaccgacttccgcaagcgcattttcggtgaccaagacagcaccgccacaaccaccggaggccaacaagggtagaaggaggaggaggcataagactctgggaattttgatggcctgctttctagctgcttggttaagctccttactgacaaaaggcatggcctcatagttagttcctctcggagcttgtttgttactaaaaatacccttggttgatgatgctgctgctgctgccttgtgatgccattcttttttcttgtaattttttcttcctcctctcagtctctctcatctatacgaaacttcagttggacataaaagttgtggatcttctgattctttgttgagatgatagcattatatggtatnaatt

SEQ ID NO: 388467 - DNA, 617 bp, Oryza sativa
ctcttctcgcttcgccttctcctctccttgtccttgacctcccctgctccgccgcgccgcagagcgagcggccatgaccaaggtgcaccccaacgtcgcggtggtggcgccggcggtggtggaggaggagaagggggaggcggtgtcgctgacggtgtggcggcggtcgctgctgttcaacgggaaggggttcacggtgttcgacggcaaggggaacctcgtgttccgcgtcgagagctacgccggggggtcgccgagggaggtcgtgctcatggacgccgacggccgcgccctcctcaccatccgccgcaagaagctgagcttcgcggacgagtggctcatctacgacggcgacgcggcgtcgccggcggcgccgggcgccgaagaggttcacggcgcggcgccacgtcagcctgcgccccaccaagtccctcgcccacctgtcgccggcgcgcgcgtcgtcgtccgccgccgccggcggcggatcggcgaccgcgccgagcggcgcctgccggtacgacgtggagggctcgtacgccgcccgctgcctcgacgtgttcgcctccgccagcgccggcgagcagcggctggctcgtggcggcggtgtgcaataagga

SEQ ID NO: 388468 - DNA, 855 bp, Oryza sativa
ccacgcgtccgcccacgcgtccgggggttctagaggcggaggggatgccggcagggctactcgagacgattaatgttgataagaagatgctagttgacagggtgaggcaagctctgtatgcgtcaaagatttgcagctacgcgcaggggatgaaccttctgcgagcaaagagtgtggagaaggggtggaatcttaacctcgcagagcttgcaaggatttggaagggcgggtgcattatccgggcgaagtttcttgataggatcaagaaggcgtatgacaggaaccctgagctggccaatctgatcgtggacagggagtttgcaagggagatggttcagcggcagaatgcatggcggtgggttgtggctcgtgctgtggaggctgggattagcactccagggatgtctgctagcctttcatactttgacacctacaggtgtagtcggctgcctgcaaatctgatccaagcacagagagacttgtttggggcacacacctatgagcgcattgaccgtccaggttcgttccacacagagtggactaagctggcgagaaagagtaatggtgcggccatttgaggacttgaatggtatcagtaactctgtgtggtgtctctttgtgggttctctttgaattcactactgttgtctttatgattctaggtctgaattctgtactttgaataatgaagtgtcatgtgcggtatgcatggaaggaacattcatgtagcttgtgcttttatatggtctaggtgcacccattcagttttctcataaatttggaatgcaatggttttaccctttaacaaccaaaaaaaaaggcgccgctaagaggaccaagctacgacgcgtcatc

SEQ ID NO: 388469 - DNA, 445 bp, Oryza sativa
ccacgcgtccgcccacgcgtccggcacaaaccaaaggcggaagctaagcaagcaagcagcagcagccgcagccatgggggcggtgaaggagatgtcgatgagggagtggtgcgtcgcgctccccaaggtggagctccacgcccacctcaatggctccgtccgcgactccaccctcctagaacttgcaaagcaactaggtgataaaggagacattgtattcgaagatgttaaggatgtaatcatgaagaatggaagatctctccctgagtgtttccgactttttgaactgtatcatatacttacaactgatcatgatacagtgactaggatcaccaaggaggttgtggaagattttgccatggagaatgtagtatatctggaaataagaacaacacctaagaattatgaagccaaagggatgaccaagaggtcttacatgaatgct

SEQ ID NO: 388470 - DNA, 895 bp, Oryza sativa
ccacgcgtccgggggtgctgagtaccaggaacaagatgcacttctggtgaagcctgagagcagaagccttttagagtcactttgtgaaagggaaagggtttcaatggctgtcattgggacaatcaatggatgtggaaagattgttttgattgacagtgctgctgtggagcatgcgaagttaaatggccttcctcctccaacccctgttgaggatctcgagcttgaaaaggttctaggagatatgccccaaaagacctttgaattcaagcgagtctctgtagtcagtgagcccttagatattgcccgtggagtaacaatcatggatgctctgaagcgagtattgagtcttccgtccgtatgctctaagcgtttcttaaccacaaaagttgacaggtgtgtgacaggtcttgttgcacaacagcagacagttggacctctccaacttcctctcgcagatgtggctgtgattgcacagacatatactgacttgacaggtggtgcctgtgccattggagaacaaccagcaaaaggtttacttaatcccaaggccatggcaagacttgctgttggggaggccttgactaatctggtctgggctaaagtttcatcactttctgatgtcaaagcaagtggtaactggatgtatgctgcaaagcttgatggagaaggtgcagatatgtatgatgctgctgttgcattggctgactgcatgattcaacttggtattgcaatcgatggggggaaaggacagtctttccatggcagctcaatgtgatggtgaaggtttgcaaggctcctggaaatcttgtcatcagtgcttatgtgacatgtcctgatataacattgacagtaacttctgatttgaagcttggcaatgatggagttttgctgcaca

SEQ ID NO: 388471 - DNA, 749 bp, Oryza sativa
ccacgcgtccgccgccatctcctccgctccctccccggcggcgagcttgcacaccgccggcgccgcggcggtgatgaaccccttcgcgaagaagcccacgccgcgagaggcgatccggagcatcaaacgtgagctgacgaatgctaccagaggtattgagagagatattggaacgttgcagctagaggaaaagaggctagttgctgaaatcaaaaggactgcaaaaactggcaatgaggcagcaaccagaattctggcccgccagctgatcaggctaagacagcaaatttctaatttacaaggtagcagagctcagattaggggcattgcaacacatacacaggcaatgcatgccaacacttcagtggctgctggcatgcaaagtgcaagcaaagcaatgggagctttgaacaagcaaatggatccagccaaacagatgaaggtgatgcaagaattccaaaaacagtcagcacaaatggatatgacgaatgagatgatgtctgactccattgacaatatcttagacgatgatcaagctgaggaagaaactgaagaccttgcaaatcaggtcctggatgagattggtgttgatattgcctcacagttatcctcagctcctaaaggaaggattactggaaagaaggttcaagctgatgaaagttcaaaattggacgaactcgagaagaggctggctgctctgaaaaatccatagaagagggaacttctctgtaacccaacaatttacacaa

SEQ ID NO: 388472 - DNA, 843 bp, Oryza sativa
ccacgcgtccgcccacgcgtccgcccacgcgtccggcgcggcagggagaccgatgaagaggttgctcgcaaattgcaccgcgccatgaacagctcgccgcgcatttccttcactggaccgaagaggccacgcaccattgctgctgagaatggggtgtgcttgatgcttgcaatggttcttcaccttatccaccaacgtttgaggtcagcacgataactaacggatgctctttagggcaatctagtgagctccctgtgccattttccgagcatgagggtcttgatgatgataataaagattcttctggtcatgatactacaaagagtagggctatcgttggtaatggagttggagctggaaacctaagtgctggtaggaaagtgagatcaagagaaaggaactggcttttgaaccaacataatagtaaagatacacaagaggccaaagaaataaaaccgtctatagattctatacgatacgacgaatcaaagcaaaatggagctgaaaagagattgaaccagcttgtagatgcaaaggatcccggtgatggtttggcgccgatgaagatctcatctgtatggaagttcaaaaagttcaaaacatcacactgctcttctgacagtaaggttttgcacaacgtgtgcccctctacttcggcggctgagacctctgcttcggtgaaagctgattagtgaggtaccttagctcatagttggcagatgcttgtcttagctatgtttggtgtgagattttgtatgttgaagctaccattcggacaaacagggagggcaggtgatctctcccggtagattccccaccttctatttgattttcatacaaaaa

SEQ ID NO: 388473 - DNA, 638 bp, Oryza sativa
ccacgcgtccgctcatcaccatggtcatctatcggatctttagattccgaagcaagttttttgtctcttggttcggcagtttcatcagatgacctatctggttatgatagcttgcctttgttctcttcaatacatccagaagtcgctgtaaatggaaaagtagctctcagaggcaaatattctgttactagcatatatgctaaacaattccaagatcttcgaaagaagcgctgcccatctgagcttgcatatattacttccctaagtcgctgcaagaagtgggatgctcagggtggaaaaagtaaagctttctttgcaaagacagtggatgacaggttcatcataaagcaaataaagaagacagagtttgagtccctcataaaatttgcccctgattacttcaagcatgtttaccattctctagacactggaagccaaacttgccttgccaaaatattgggaatttatcaggttaagcaaacaaggcatggaaaagagataaagatcgatctgttggtgatggaaaaccttctcttcgggcacaatatttcacggatttatgatcttaaaggtgctatcttttcacgacacgttgcacactccaatgaccgtaatactgtttacttggatcaaaacta

SEQ ID NO: 388474 - DNA, 1123 bp, Oryza sativa
gtccaccgccggcgcctcggccgccgcgtccgccgccgcgtcggggctccccagccacatgttcgaggccggcgcctactccttgggctcccgcgtcgcgacgctgctatccaagggcgccacgttcgccgccgtggggttcgccgcggggctcgccggcaccgcgatctccaacggcctcatctcgctgcggaaacgcatggacccggcgttcgagaccccgaacaaggcgccgcccacgctgctcaacgccgctacctgggcgatccacatgggggtcagcagcaacctgcggtaccagacgctgaacggcgtcgagtacctgctcgccaacgccgcgccgccgtcggtgttcaaggtgtccgtcgttgctctccggtgcataaacaacgtgctgggtggcatgtccttcgtgctactcgcgaggttaaccgggtcgcagaagtctgatgcgccggccgcctcggcgactgcggaggaggagaaggagaggttgatagccgtgggcaatgacattgccgcagaccccgtcggcgcgggaagggatggagagggtaagtgagtggatgcataatgcatatgcttgcttgcttgcatcgctcaagcttcgtttgcggcttcttggacatgggccaagaaagctctgtagatgataagccggttggcttggcaataaggagtgaggcttgaaacaatttgttcagtccatctttggtgttcttggtttaatctgtcgacatgcttagttgatcttagaataaagctttaccttttttctggttgctcggttttggtcactggcctaaccggggggattactttgcgcgcggtaacttcaattgctttgtttgcatgcaattctgtgatccgatcagaccaacattgtagatgtaaggactgaacaaatgaaaatctaagcgttggggggttagtgatgtacaactcagataaaattctctagtgtttgcataagtgaattgctgtttgtgtgtttaagtgcagataattatgtctgcacagccagaaccagacttacctcaggtcttccactgtggcaattcgagttttaccttttccttcataaaccatatctgaaattggctgtttaaaaaaaaaaaaaaaa

SEQ ID NO: 388475 - DNA, 475 bp, Oryza sativa
ccacgcgtccgtggagatgatgattgtggattatcagatgagcgcactctttcacttgtatccattaaaaacgccggacctggacagaacgacgggtcacattctgctgctgttcgtatccaaattaagtttagaggatggaaaggtagaaaggagtttatgattattcgacagaaaattgtcaagatacaggcccatgtacgaggacatcaagtaaggaaaagctatcggaggatagtctggtctgtaggcattggtggagaaaattatattgaggtggaggagaaagcgaaggggcctgcgtggtttccaaccggtaaaacagcttgaaggtccatcaccgatcccaacagcttgaaggtccatcgcagatccaaccagcaaaggaagaggaagaggatgaatatgattacctcaaagatggcaggaagcaagccgaatgcagattacagagagcactagctcgtgtgaaatc

SEQ ID NO: 388476 - DNA, 458 bp, Oryza sativa
ccacgcgtccgggcgaccccggtcatcaacctcgtcgaggaggaggacgaggaggaggtcgccgccgcgatggcgtccatcaagtacgagcccgagaccagcgagagctccgagtcgaacgccctcccggacttctcctggcagggcatgtcggcctccgacgagttcgccgtcgccgcggcggcgcttgtcgctcgacagcgacgacgaccctcgccaagaagcgtccgaggaccgagccggaggacaccaccgactccggctccggcgacgacaccgacgcgctgttcgacgcgctgctgttcgccgaccagtacaaccacttcaacggcggcgcctacgagtccctggacagcctgttcagcgccgacgccgtgcagaccaccgccgtcggcggcggcgccgaccagggcatggggctctggagcttcgacgacggctgctgcctcgtcgacgtc

SEQ ID NO: 388477 - DNA, 679 bp, Oryza sativa
ccacgcgtccgcggacgcgtggggtccgttgctttgcccggtttatagctgagcttgaaaacctacagggaacacatagcttcaaaattcacactggcgctgggctaatcattcctgaaatacaaaatgatggcaaggtaaaggttgatatgggccagcccattctctctggaccagatattccaacaaaactgccatccaccaagaatgaagccgttgtccaagctgatttggcagttgatggctcaacatggcaagtaacctgtgttagcatgggcaatccacattgtgtcacatttggcacaaaggagctcaaggttttgcatgttgatgatttaaagcttagtgatattgggcctaaattcgagcatcatgaaatgtttcctgcccgcaccaacacagaatttgtagaggtcctgtctcgctcacacctcaaaatgagagtctgggagcgtggtgctggtgcgacgcttgcttgtggaaccggtgcttgtgcagtagttgttgcagctgtcctcgagggtcgagctgaacggaaacgtgtagttgatttgcctggtggaccattggaaatcgaatggaggggggatgacaatcatatttacatgactggtcctgcagaggctgtcttctatggatctgctgttcactaggtacctgcccgggcggccgctcgaat

SEQ ID NO: 388478 - DNA, 676 bp, Oryza sativa
ccacgcgtccgcccacgcgtccgcccacgcgtccgcccacgcgtacggcccgcaccaacacagaatttgtagaggtcctgtctcgctcacacctcaaaatgagagtctgggagcgtggtgctggtgcgacgcttgcttgtggaaccggtgcttgtgcagtagttgttgcagctgtcctcgagggtcgagctgaacggaaatgtgtagttgattagcctggtggaccattggaaatcgaatggagggtggatgacaatcatatttacatgactggtcctgcagaggctgtcttctatggatctgctgttcactagggaccaagctggaaaagtttaccgcaactgggagcctgagagattgagtataaggtctatcaaatcggtgttttgggaccagcacaacccctcttgattcttaattgcgcctgtggcctgcttactatgggcaaaattacggggttctttcaaacaaatctactattttaaatcttttctgcttctttagtttgtcaggtttgaaccctatattggtagtaaatctcccccacttttttttgttccttcctttggcaataaacccctgctgtcttaagtgcataactgcatgtgcatttgagttttttgtctacaaatatcctgatttactacaaaatgattgagcatgtgtgttttttggc

SEQ ID NO: 388479 - DNA, 503 bp, Oryza sativa
tcgtatttctgtagtgaatttaaggaccttttcaaccggagacacttcattgagtcactcaaagaagacattgatattgttgaaatgctgcccccagcatacaagcatattgagcctgtggctaaagctccaatatcttggtcaaaggtgaattattatagagatgaaattctccctcttttgaaaaaacacaaagtcatttactttacgcatacagattctcgccttgccaacaatggtcttcctagttatattcagaaattaagatgccgagttaactataggtctttgaagtattcccaaacaattgaagatcttggtgctaccttggtttcacggatgcatcaggatggaagcccatatcttgctctccatctaaggtttgagaaggatatgcctagcttttactggttgcagccatagcctgacatcagaagaagaggaagaattgcgtaaaatgcgttatgaggttagtcattggaaagagaaagaaataaatggaa

SEQ ID NO: 388480 - DNA, 919 bp, Oryza sativa
  unsure (1)..(919): unsure at all n locations
ggactgttgagggttattctgatattattgttctgagacattttgaangtggggctgcaaggagagcagccgccactgcagacattccagttattaatgcaggcgatgggccagggcaacatccaactcaggctttattggatgtctattcaatagagagagaaattggcacactagatggaataaaacttggtttggttggagaccttgctaatggaagaactgttcgttctctagcctatttgattgccaaataccaaaacattaagatatactttgtatctccagatgttgtaaaaatgaaggatgacatcaaggaatacttaacttctcaaggtgttgagtgggaggaaagttcagatttgttggaggtggcatcaaaatgcgatgttatttatcaaacacgcattcaaaaagaaagattcggtgagaggatagatctttatgaagcagctcgtggtaagtacattgtggacaagaaggtcttagatgtgctgccaaaacatgctgttatcatgcatccccttccaaggcttgatgagatcacaatagatgttgacagtgatccgagagctgcatattttagacaggccaaaaacggcctctacatcagaatggcgttgctcaaacttctgcttgttggtcgctgacagctttcttagtgcgtggcgctgtggtgttgatgggggtcaaaaaatgtttgtcttaatcaatggctccaaatcaactgattagtattgtactaggcaccataagttagatccttgcaaggatttaaccatgtctagaactctagatgcataattttcgatgtaacaaaatattctgaaacagagatttgttgctctcatatgttcttgtgaatcattatcaccgaggactgcactaattttcctaannnnnnnnnnnnnnnnnnnnn

SEQ ID NO: 388481 - DNA, 617 bp, Oryza sativa
  unsure (1)..(617): unsure at all n locations
ccacgcgtccgcccatgcagatccagcttgccactcatacagaagctccgcgcggtgctcatggaccatgcgctgggcaacggtgacaaccagctggccaaggtggctgagttcgagcagcagctccgcgcggtgctccacgacgaggtggaggccgcacgcgcggctgtggagagcggcacggccccgaacaggatcacccagtgtcgctcgtacccgctgtacaggttcgtgcgcaaggagctcggcgccgagtacctgaccggcgagaagacgcggtcgcccggggaggaggtggacaaggtggtgatcgccatgaaccagcacaagcacatcaacccactgctggagtgcctcagcgagtggaaaggcgcgcccctgccacttaattagctcaactacgtacgtacaaataagagaagacgaggtgtacgtctgacggatgaaaaattatttaaagcaaaagtactatcctactatatatacccaataattcacgcggcgggccggggcgtaagttgaataaagaattaatgggacttatattataanatgttttgnnccactttatttattaaattcaatgggttgtaacttggtggtccttaacggtttaa

SEQ ID NO: 388482 - DNA, 805 bp, Oryza sativa
cattctttcattatttgctgcacaggctggtgccagacatgtatatgcagttgaggcatctgaaatggctgaacatgctcagcgtcttatttctggaaacccatctcttggacaaagaataacggtcatcaaaggcaaagttgaggaagttgaacttccagagaaagctgacatacttatttcggagcctatgggaaccctcttggtgaatgaaaggatgctggagtcctatgttatagctagagacagattccttgtgccaggtggtaaaatgtttccaacaactggaaggattcatatggctccattttccgatgaatacctctatgttgaaatggcaaacaaggctctcttctggcagcagcataacttttttggtgttgatcttacacctttgcatggttcagcattccaggggtatttttcacagcctgtggtggatgcattcgatccaagattattggtttctccgcctacgtttcatacgcttgatttcactaccatgaaggaagaggagctttacgagattgacattcccctaaattttgtggcctctgttggcactagggtgcatgggctagcttgttggtttgatgtattggtcaatgggagcactgtccagaggtggcttaccactgctccaggctcccctacgactcactggtatcaactacgatgcatactttcacagccattatatgtcatggcaggacaagaaataacaggacgacttcatctggtagcccacagtgcacaaagctacacgatatacttgacgatgtcagctaaaatgtggggtgagggg

SEQ ID NO: 388483 - DNA, 466 bp, Oryza sativa
ccacgcgtccgcccacgcgtccgcccacgcgtccccggccgcgcggccggccggcgccacgccggagtttcgttcacaagttctcgccggtgagcctgcgttcgatgttgaaaagacgaggagtggctgcgcagcagcgggcgccggaagcgatggttctggcggcggtgctcctcctgatgatcgcctacggcgtgcgcccggaacgaggcggcggtgcccgactccagtctctcctgcctctccatgcctcgccaacaagacggcgcgacaactccaaatcggcgttccttatccgtgcacccgtcgtgctgcactagtagccccccgccgagctgctataaacctcaaccctgcccaccgtcctaatcgaccgaaaaggccaaaatatatacatacacaaaagttaccatatatatttcaagatcggtggaagtacttacaatatatattaacgtgttgtgtc

SEQ ID NO: 388484 - DNA, 491 bp, Oryza sativa
  unsure (1)..(491): unsure at all n locations
ccacgcgtccgctgcaacaaaaacattaaagcataatctgccattgcaagaagtaggcgattgttgtagaactatgaagcagcagggtgcattcagtgtttcaagatgccatgtaataaggttggccttcgtctggatgagaatgcaaaagagggtatttattgcagaaagcattggcattgtaccaaactttattggaataactagtatttagcgtagcatctgaattccgagaaggttggaaccgtgttactatgttcttgtagtgtagttgtttctcctgtttaagagaactttaccaactgtagaatgccatgcatatggttgcatcgcaagattttcctgggcttcgcatgccagtcgtgcactcgccgtatgtttttctgtaatattaatggctacataatgcatcctgtaataatccatggtagtagctccagtcatctgctgaggttgnnnnnnnnnnnnnnnnnnnnnnnnnnnnnnnnnnn

SEQ ID NO: 388485 - DNA, 1072 bp, Oryza sativa
  unsure (1)..(1072): unsure at all n locations
ccagcttgatgttgcacagcagattggaactacccgctcgcagatactgtccaacttcagtgatatttcactgggcactagtttcttgtagattacattggaaataatagcgtcaatcagatttagaagctggcagttagccaactctgaagccacatgaagtttcttcctaatttctgtgatctcatggcaattggcaccagctttggtgtaacccttgcctagtccctcaagggttaatagttgatgtatgcccattaagggaattatcctcagcaaactgtgacaaccatgctagtctacgatttttatttaaaacccacatgatgctggagaagctggatattcttcccaaaattccagtgacctgaccatttgacaccttgtgaagatagcagccacaatgtaaaagagatcattgacacttgacagttggaagtgatcaagattaattagaaaggcactgtgtttgccatagtggtttataaggacgagactaatctactgctaattaggtctgcgccctcttttcagcagaagtctagttgagcttactggatttccttttttttatagtagtgcgacatggttgaagctgtaagttcgttttcaagatcattgaacttctatactatacgggccatgttttatgcacattttagcagaactctgtaagtgcggttactgcatttgctctgaacttctttccaatcgtcacaaaaaatttggaagaatatataaatcgagagcccgatttatcccnnnnnnnnnnnnnnnnnnnnnnnnnnnnnnnnnnnnnnnnnnnnnnnnnnnnnnnnnnnnnnnnnnnnnnnnnnnnnnnnnnnnnnnnnnnnnnnnnnnnnnnnnnnnnnnnnnnnnnnnnnnnnnnnnnnnnnnnnnnnnnnnnnnnnnnnnnnnnnnnnnnnnnnnnnnnnnnnnnnnnnnnnnnnnnnnnnnnnnnnnnnnnnnnnnnnnnnnnnnnnnnnnnnnnnnnnnnnnnnnnnnnnnnnnnnnnnnnnnnnnnnnnnnnnnnnnnnnnnnnnnnnnnnnnnnnnnnnnnnnnnnnnnnnnn

SEQ ID NO: 388486 - DNA, 562 bp, Oryza sativa
ccacgcgtccgcggacgcgtgggcggacgcgtgggtcggtctgacggtctgaccagtgccgggtaggaagcgtaattttgaggagagactccgacccgcgccgccgccgccgcagccaagccatggagggatccgccggggcgccgctccgcacgcgcgtgtgcatcatcgggagcgggccgtcggcgcacacggcggcgatctacgccgcccgcgcggagctcaagcccgtgctcttcgagggctggctcgccaacgacatcgcggcggggggccagctcaccaccaccaccgacgtcgagaacttcccggggttccccgaggggatcctcggcggcgagctcatggatcggtgccgcgcccagtccctccggttcggcaccagcatcatctccgagaccgtcaccccggtcgacttctccgcccgccccttccgcgtcgcctccgactccaccaccgtgctcgccgacgccgtcgtcgtcgccaccggcgccgtcgcccggcgactccacttcgccggctccgacgcctactggaaccgcggcatctccgcctgcgccgt

SEQ ID NO: 388487 - DNA, 647 bp, Oryza sativa
  unsure (1)..(647): unsure at all n locations
ccacgcgtccggcgaagacaatgtgcacaagagcatcaaatatggtgtttgggctagcaccacaaacgggaacaagaaactagactcagcctaccgtgaagcaaaggagaaagaagagcattgcccaatttttctgctgttttcggtgaatgctagtgcacaattctgtggtgttgcagagatgattgggccagtggattttgagaagagtgttgactattggcagcaagataagtggactggccagttccctgttaagtggcacattgtgaaggatgttccaaataatcttttccgccatataattcttgaaaacaatgataataaacctgtgaccaacagccgggacacacaagaggtaaaactcgaacaaggtatggagatgctgaaaatcttcaaggatcatgaggaggatgcatcgatactcgatgactttgacttctacgaggagcgtgagagagccctgctggacaataaggcgcggctgcatcagcaacatcagctgcccagctctactgtggttgagcccaagaagcccttgactgtggccactgatctagttggtcatataactaagagctttgcgcaggcagttcggcttngtgaggcccaagaatgtgngccctaattcagctgacaaaggtgcc

SEQ ID NO: 388488 - DNA, 659 bp, Oryza sativa
  unsure (1)..(659): unsure at all n locations
ctataagtttgctacccccatctacgatcaaacccaacaaaatggagctatcctggtgggggtctgaatcaaattcctggagaaatgtacaatttcaggggatataaggttgactcctttctncagcacgacatctgtagtgaagaaattacaagagtatgtacatgatataaatgagaacattgaaaagcttcctactcgtggtccggtatctaaatatgttcttcctgatgaaaacctccgaggaaggcttgagatcactattgatgaagatattatgaatggggtggcctgtaatctcgagtcgcgaggctttcaagcattatgcaaagcaactgaggaaattgtcggccacgtggaaccatattccattactgggagtctgcccctgattagggaattacaggatgaagggtttgatgttcagactgctgggtatggcttactcaagacataccacgcaaagaacgagtactgtctattttcagatatggcccaaggctttcaagtatttctgagcatcatttcacagttggaagcagatgtttgagtcttgttttagggaggaaaaaaatgagcgttcactggtacttattcctgttacttgttgctctaataaaggcactcacagtgcaagctacccaaaaaaaaaaaaaaaa

SEQ ID NO: 388489 - DNA, 692 bp, Oryza sativa
  unsure (1)..(692): unsure at all n locations
ccacgcgtccgcccacgcgtccgggtatttgaggcttctagttttggaggatctaatattgatccctcggcatgggaagataagaagtgtaaaggtgaatctagattcccagcgcaggtgaggatccgcattagaaagctctgcaagcctttggaagaggatgctttcagaccagtgctgcaccattacgatggtccaaagtttcgtcttgagctctccatagctgagaccttatcactgctagacctttgtgagaaagaaggcgtctgaactgttgaagaggtggttgctttgaggctttagtacatatcgctcttgtatgttgtggaaggtggttcactatgttctcatgttcgttaagcgcaagctgttggttgccccctgcaaggacctggtacttgaaggcctctaatacgtgtgcctgtctgtattgtgccgtccgtaatcttgaaaatgtgtatgttttgctatttatgtattttggtagagtacacccagaagggaaccccaaaatggggggatactgtaatgcatcataatgccctaaataagggcagttgatgttcagagtgtattcgtgttgtatcttaaaaaccttgcatttgccttaatgctgctttgcacttcaaaaaaaaaaaaaaanaannnnnnnnnnnnnnnnnnnnnnnnnnnnnnnnnnnnnnnnnnnnnnn

SEQ ID NO: 388490 - DNA, 1474 bp, Oryza sativa
  unsure (1)..(1474): unsure at all n locations
ccacgcgtccgcccacgcgtcctccggtctaatccgattcaaacccgccgtttccaagcttgctctcctctcccccccaatccttccctcccgagtggcagggtgctcgacgggatggcgcagaaggaggccaatggcagcagcaacggggagcacaccacccgcccgccgccgacgccctcgccgctccggttctccaagttcttccaggcgaacctgaggatcctcgtcaccggcggagctggcttcatcggctcgcacctcgtcgacaagctcatggagaacgagaagcacgaggtcattgtcgcagacaactttttcactggttcaaaagacaacctgaagaagtggatcggacacccaagatttgagctaatccgtcatgatgtcacccagcccctgcttgtggaggttgaccaaatctatcaccttgcttgccctgcttcaccaatcttctacaagcacaaccctgtcaagaccatcaagacaaacgttatcggaaccctgaacatgcttggacttgccaagagagttggagctaggattttgttgacttcgacctctgaagtttacggtgatccgcttgagcaccctcaaacagaggcctactggggaaatgttaacccaattggagtcaggagttgctatgacgagggtaagcgtgtcgcagaaacactgatgtttgactatcacaggcagcatggcattgagatccgaattgccaggattttcaacacctatggacctaggatgaacattgatgatgggcgtgttgttagtaacttcattgctcaggccgtacgtggcgagcccctgactgttcagaagccaggaacacaaactaggagcttctgctatgttgctgacatggttaatggtcttattaagctgatgaacggggacaacactggaccaattaatttgggaaacccaggtgaattcaccatgctggaacttgctgagaatgtgaaggagttgatcaacccagaggttaccgtcacaatgactgagaacactcctgatgatcctcgtcagaggaagccagacattacaaaggcaaaggaagttttggggtgggagcccaagatcgttctgcgtgatggcttggtgctcatggaagatgatttccgggagcgcctccaagtgcccaagaagaaccaggcctaagctgctgcatcgcatttggcgaaagatgtcactggagcatacttaatagttgggtttcaccattatttgtgtcgcagttcattgtggaatttgggttccaataaattctgatacacctttgttgttcacctgaaatattgtgttactagaatcgtcatacggggctgggctatttgtatcattaccgcttttggagaactctttatacttttgtttgtagcctgtgtactcgcctaaatcaattatagcaatgttgatgaatttttagcttgtttgttttattaaaaaaaaaaaaaaaantattaat

SEQ ID NO: 388491 - DNA, 2223 bp, Oryza sativa
tcgtttacgcgtggggtttgtagactacaatgagcctcaaacagaaagggtttactcttcgtatcttgagttggatcttaatgaggtggaaccttgcatttcaggcccaaagaggcctcatgaccgtgtccctttgaaggaaatgaaatctgactggcattcttgcctggataacagagttggtttcaagggttttgctgtaccaaaggaacaacaagataaagttgtgaaatttgacttccatggacaacctgctgaactcaaacatggcagtgttgtcatagcagcaattactagctgcacaaacacatcaaatcctagtgttatgcttggtgctgcccttgtggcaaagaaagcctgtgaactgggtcttgaggtgaaaccatgggtaaagacaagccttgcccctggatctggggttgccactaaatacttgttacagagtggccttcaagaatacttgaacaagcaaggtttccatgttgttggatatggttgtaccacttgcattggcaactctggtgatctagatgaatctgtatcagctgccatttcagaaaatgatgttgttgctgctgctgttctgtcgggcaaccgtaacttcgagggtcgtgtgcacccattgacccgggctaattaccttgcttcaccgcctcttgtggttgcatatgcacttgctggcactgttgacattgattttgagaaagagccgattggagttggaaaggatggtaaagaagtcttcttcagggacatatggccctcaactgaagaaattgcagaagtggtccaatctagcgtactgcctgatatgttcaaaagtacatacgaggctattacaaaaggcaacccgatgtggaatcagctgaccgtgcccgaagcatcgctctattcgtgggatccaaactccacctacatccatgagcctccatactttaaggacatgaccatgtccccacctggcccccatggggtgaagaatgcctactgcttactgaactttggggacagcattacgacagaccatatttcaccagcaggtagcattcacaaagacagccctgctgccaagtacttgcttgagcgtggtgtggaccgtaaggacttcaattcatatggtagccgtcgtggtaatgatgaagtaatggcaagaggaacatttgcgaacatcaggattgtgaacaagtttttgaatggagaagttggacccaagaccgttcatgtccctacaggggagaagctctatgtatttgatgctgccttgaaatacaagtctgagggtcatgacactattgttcttgctggtgctgagtatggaagtggcagttctcgtgactgggctgccaagggaccgatgctcctgggtgttaaagctgtgatcgctaagagctttgagcgtatccaccgaagcaacctggtgggtatgggaatcattcctctctgcttcaaggctggtgaggatgccgactcacttggccttactggacatgagcggtacaccatcgacctcccgaccaacgtcagcgagatccgtcctgggcaggacattaccgtcacaaccgacaacgggaaatcctttccacttggtactcttcgctttgacacagaggtggaaactggcatacttcaaccatggaggcatcctcccatacgtcatccgcaacctggcgcagaactaggagaaaatgcacaccatttcaagttttcaaccatgacaacaacattgcaggctcctctccttcccctcccctctgttgtgatcagcctgcaccgacatcgagagttcgcctgggacaatcagcctccctttgttcaccatataaataaaaaaaaaccgaaaataaagccgcaggagacaaggagccacacctggagatcttggtgtgaggaacaaacaattttgcctgctgcgtttagttgtgatgttgaaccctactagcttgtgttgatgatgaaccctactagcttgtgttcagagaaaaggacctttttattcatggattgagttagtttggtcgggtgccctgttgataggcagggtgaggtcacgaggtgtacatggtatggtgcgacttgcgtacatctagagttcttactgcttttctaccttttctactaccgttttcacttgccattggccagtctaaggtctagcccggtttacattgttttgcatcggctggatggttgtttcatcgtataatcagattagcccatccaggc

SEQ ID NO: 388492 - DNA, 980 bp, Oryza sativa
  unsure (1)..(980): unsure at all n locations
gcgcccacgcgtccggattcagacagtcgcagtgaggatgctgaatgcgaggcaaccgaagagaccaaatcgtcgtcgcggcgatatggatcaaagaggagaactcgtgcagctgaagttcataacctgtcagagaggagaagaagggatcggatcaacgagaagatgcgcgcattgcaagaactcatacctcattgcaacaagaccgacaaggcatctcgattagatgaagcaatcgagtatctgaagtcactccaaatgcaagttcagatcatgtggatgactactgggatggcaccaatgatgttccctggtgctcaccagttcatgccaccaatggccgtgggcatgaattctgcgtgcatgcctgcggcacaaggcctaagtcacatgtcaagattgccatacatgaaccattctatgccaaatcacatccctctaaattcatctccagctatgaacccaatgaatgttgcaaaccagatgcagaacattcaactgagagaggcaagcaatcccttccttcacccagatggctggcaaacagtgccaccacaggtatcaggaccatatgcttctgggcctcaagtagcacagcaaaaccagataccgaaagcgtcagctagcactgttctgccaaattctggggctgaacaaccaccaacctctgatggaatttagaatgnccagaaacatgataaggaattcaatgtaggctttgcacaaagggtcgtctttctggagatagctgaaaatattgacatgatgaacagattgcatccatattgctgttatgtatntcaatcagtatctgtctgacataaatgctacaaggtgttctgtaaatgcacatagcatttccccccttccctaagatgctaattcccagtgtatgtactaataatccttataatatgaagtgccagtggcaatctttgcccttctttatcatccnnnnnnnnnnnnnnnnnnnnnnnnnn

SEQ ID NO: 388493 - DNA, 980 bp, Oryza sativa
cgctatagcctatagcgtctctcccggggctcgttgacaccactcctctcttctctccggctcctctcctcgctgcattgcgatcccaagagcctgtgagcctttagtgagctttgttcatcacgacctgaaaatcatggagtccgaagaccgctgccacaaggtccaggagcccaaattcgactgcctgctgtttgacctcgatgacactctgtacccactgagctcggggatcgcgtcccatgtcaagaagaacattggagattacatggttgagaagctgggtattgaggagagcaagattgagaaccttggcaatctgctgtacaagaactacggcacgacgatggccggactcagggcaataggctacagctttcgattaccgtggagtaccacagttttgtccatggaagactgccctaacgagacatcaagccggaccctgtcctgaagcacattctcaagaacctgcgcatccgcaaactcgtgagttcctccagaccagaatcgaaaccaatctcacatgtctcatgtaatcgtgttttggttctgaactggcacgcgtcgttgcagatattcaccaacggcgacaaggaccacgccgtgagagccctcaagaggctggggctggaggactgcttcgaggggatcatctgcttcgagaccctcaacccgccgtgcccgtcgccgccgtgcgacgggggaggccagcatcttcgacatcgccggacacttctccatgcccggcgccgccgccgacgagcttcccaggacacccgtcctctgcaagcccaacgtcgacgccatggaggaggccctcaggatcgccaacgtgaacccttcacaaggcggtgcgtcacttcacgtcactcctgacgccaaaaggatcgttcttttttattcctcccttcgctcgatcgattgaccttcgtttttttttctcaatttcttcagattttcttcgacgacagcgtgag

SEQ ID NO: 388494 - DNA, 532 bp, Oryza sativa
ccacgcgtccgggttgagaagctgggtattgaggagagcaagattgagaacctcggcaatctgctgtacaagaactacggcacgacgatggccggactcatggcaataggctacagcttcgattacgatggagtaccacagttttgtccatggaagactgccctacgagaacatcaagccggaccctgtcctgaagcacattctcaagaacctgcgcatccgcaaactcatattcaccaacggcgacaaggaccacgccgtgagagccctcaagaggctggggctggaggactgcttcgaggggatcatctgcttcgagaccctcaacccgccgtgcccgtcgccgccgtgcgacggggaggccagcatcttcgacatcgccggacacttctacatgcccggcgccgccgccgacgagcttcccaggacacccgtcctctgcaagcccaacgttgacgccatggaggaggccctcaggatcgccaacgtgaaccctcacaaggcgattttcttcgacacagcatgaggaaca

SEQ ID NO: 388495 - DNA, 1049 bp, Oryza sativa
gcttgatcctgtgccaataacaattccagggtcgggaatgatgcacgactgtgccattacagagaattattctattttcatggaccttcctctgttgttccgtcctaaggaaatggtgaagaatggtgagtttatctacaagtttgatcctacaaagaaagctcgttttggtatactccaacgttatgaaaaggatgacacaaacatcagatggtttgaacttcccaactgcttcatattccacaatgctaatgcttgggaagagggtgacgaagttatcctaattacctgccgcttggagaatcctgacttggacaaggtgaacggttaccaaagcgacaatctcgagaactttgggaatgagctgtatgagatgagattcaacatgaaaaccggtgctgcttcacaaaagcaactatctgtttctgctgtagattttcctcgaattaatgagagctacactggcagaaagcagcggtatgtgtattgcgctattctaaacagcatagcgaaggtagcaggcattataaaatttgatctacatgctgaaccggagatcagtggcaagaaacaacttgaagtggggggaaatgtgagaggaatatttgacttgggacctggtagattcgggtccgaggcaatttttgtgcctagggaacccggtgtatctggagaagaagatgatggttatttgatattctttgtccacgacgagaatacagggaaatctgaagtcaatgtgattgatgcaaagacaatgtctgctgatccggtggcagttgttgagctaccaagccgagttccctacggattccatgctttctttataaacgaggaacaactggcaaaacaatcagcgtgacaagtgacagcggactgcatacatcctacagtaacttgttatattttagtcggagggaaatgatatatacatatgaatgtacatgtgtatcctcttactcggggaaataattggcttaaggtacatatatgtttaactcgaattgaacaattactcctatattaattacttattaagggagggttat

SEQ ID NO: 388496 - DNA, 1385 bp, Oryza sativa
  unsure (1)..(1385): unsure at all n locations
ccacgcgtccgccacgcgtccgcccacgcgtccgcccacgcgtccgcgcctttgcctccctccgccttcccctcgctgcaatctcatcgtccacccccccgtttccatccccccgaatcttcttcttctcttcttgcggtgactgagaagaagaaaaaaaaaaagaaagaggagaaaaattgctacgagattccttcttcgtcgccgccgctgctgctgcgttatccccaagatttttgggatagtgttttctgttctctctcataactcataagggtaaatgggttcagaaggaccttcagttgttactgtccatgttaccggatttaagaagttccatggggttgctgagaacccaactgagaaaattgtgggcaatcttaaatcattcgtagaaaagaaaggattgccgaaaaaccttgtacttggaagctgcacagtgcttgaaactgcagggcagggggcacttggcacattatataagggttttgggaatctgccattgcagaaagagagaatgggtcatcggctcaggggcaagtaatttgggttggtatccaccttccttgattccatattacataatgatgtaatgcagtcagcaccttgcgtattgcaatgctgtcctatcagaaaaagaataaggaagtttctatttgccttcaatgccactcgaatagtcaaactaattatcatttgaaacttgttcagatccattttggagttaatagtggtgcaacaaggtttgctcttgagaatcaggctgttaacgaagccaccttccgttgtccagatgagctagggtggaaacctcagagggttcctattgtaccatcggatggagccatctcacggacaagagagactacgcttccggtaaatgagttgaccaagtcactccggaagacaggctacgatgtaatgccatcagacgatgctggtcggtttgtatgcaactatgtgtattatcattctcttcggttcgcagagcaacacggcatcaaatctctgtttgtacatgtgcccctgttcttgacgatcgatgaggaggtccagatgcattttgttgcttcccttcttgaagctcttgctgtcttgaactagggaaaaagaaataacaattcaatattggaagcaggctgaataaaactgtattgtcatcgatgatattggtcttgctccaaagggtgtatttatgaggaaattggctgcttagagtgtgttcttggtcagatgccacttgtattccactacatcacttgttctaaacatgcctgaaaacaaacttggttttcaataaaaatcgacagatcgtcgaaatggatgcattgcatccagtacggttgttgatgctgcttttgcnnnnnnnnnnnnnnnnnnnnnnn

SEQ ID NO: 388497 - DNA, 435 bp, Oryza sativa
ccacgcgtccgtttctcttcttcccctcccgcaaccctaattttttttccccatccgcgaaaccctagccgccacgcgaaaccaaatcccgccgcgcggatccttttccgccggattccacccgcgaatcggggttccccttacgattcgcgggcggattagcgcgaggcgcgcctccccctacctctgtgtgatccgggggtgaggttaggccggacgccggggcatcagccatgtcgaggtgcttcccctacccgccgccggggtacgtgcgaaacccagtggtggccgtggccgcggccgaagcgcaggcgaccactaaggtttgttgaaccatcggatttacacacgcacgtgccgggatcatttgctcttgcctgttggttttgatcggatctgttggttgtgcgtgtgtgatttggggatccgacgtgc

SEQ ID NO: 388498 - DNA, 840 bp, Oryza sativa
  unsure (1)..(840): unsure at all n locations
cgggtcgacccacgcgtccgcggacgcgtggggccttccagccgctccgggagaacccgctcctcgggccctcctccgccactttggagaagatgggagcactagactgggcgaaggttgttcatcagcaccaagcatggcgtctcattagctgtatctggctacatgctggcctaatccacctgattgtcaacatgctaagcttgctattcatcggactccgtcttgagcagcnaattgggtttgtgcgtattggaatcatctacttgctatctggctttggcggtagcgtgctgtctgtgctgtttttacgtaataactacatctccgttggtgcctctggagctttgtttggcttacttgggtctatgctctccgagcttattatgaactggactatttattccaacaaggcagcggcaaccgtaactctcctgtttataattgcaatcaatttggcgatcgggatactacctcacgctgataactttgcacacattggtggatttgtgactggattccttcttgggtttgtcctgctggcaagacctcaatttggttggatggaacgtcatgagttgcctcagactaatcaaccacgaaagtacagagcataccagtatgttttgtgggctgttgcactcttcttgctgctagttgggtttgtgattgccctggtgatgcttttcaaggggaagaatggaaacgatggttgtcactggtgccactacctgaactgcataccaacatccagatggaagtgcagtacttagatgcttcagaattccgttagctcttctccaaattacaaatattcttcgggaaccattttcaagcttg

SEQ ID NO: 388499 - DNA, 557 bp, Oryza sativa
  unsure (1)..(557): unsure at all n locations
ccacgcgtccgccatatcaaagatggttgatccttctattcaaggagagtgttctgagaaagtactgtcacgttttgcagacatcatcagccgttgtattcggccggaaccagaattcagaccatcaatgtcagagattgtccaagacctagctaggattataagtgttaccagtgaggaatcagagtaacgaagagatcaaggtggggccgtacatctaggaagccagctctcgcagctatcaaaaatattcagaggaaacacaatcatttctgtggagcatcctttcagtatttataatggacagcattgtcctttagtgtacatgttgattctggagccgcatttacctgttgaaaggtggtagtggtacagccaggggaacatgggccttctcattatgggccaagtagattcctgtacttcctagacattatcaaattgcatgtatatcttataatccattctaattttgattattttattacattaaaattagcgatgttcanatggtgttngcnnnnnnnnnnnnnnnnnnnnnnnnnnnnnnnnnnnnn

SEQ ID NO: 388500 - DNA, 744 bp, Oryza sativa
  unsure (1)..(744): unsure at all n locations
cttttgcaatggcccttaaaaggctcgaaacaaggaagaacgacttgttgcagctttgangaagattgaaccggatgacccatcagaacctacccatgatcctgaggtgcttacacctgaagagcacttctatttcctcaagatgggtcaaaaaagtaaaaattatgtgcctgtaggaagacgtggaatatatcagggantgatcctgaacatgcatttgcantggaaaaagcaccaaacgctanaggtaattgtgaagacattcacaccagangaggttaaggaaattgcctcagagttagccagactaagtggtggaattgtgctggatattcaagaagggaatacgattatcatgtacagaggaaaaaactatggcacagccaccacctgaaataaatgtctccaaaagttacacttcctagaaaaaaggccctggataaatcaaaatacagagaacgcctccgagctcttaggcggtacattcccaggcttgagcaggagcttgtagatcttcatgcacagatgaagttagctagagattataaaggacagaatgcagcggaagatattacttgtatttcagatagtgtaaacagtacatctgcgaaagaatattcttcttgctcagttcgcaagagaagtgtatctgatctcctgtcagaaagtatagaagggtctggaaggctagaggatgaaaattatgagggtagtgctgattcggcttcagagtctatcacatac

SEQ ID NO: 388501 - DNA, 460 bp, Oryza sativa
ccacgcgtccggttcttcgcgacccgcactaagcccgggtacgagaggacactgaagcagagcctcgagagggtgctgatcaacgccaggtggatcgaaggcatcaggggtgaagctaagcttgctcagactgtccatgagcttcttcacaaaccctgatctgtatccggtgtgatccctcccccccgggagctgcattccctgctatgaagtgccaactttaggcgaagcatttgtcgtagcagcagcatcccagcacattgttgctctctgtttataagtcatgaagcataggctgcatacgaggcaaagggatatatagtgcttaccgtttctcttcataggttgtgtacagcttgtgcccaggagccatgcatatgattcaagagttgtcgcacaattctactgtagctttgaagtgtccgagtgaataagattttacctttcagcattctgtatc

SEQ ID NO: 388502 - DNA, 1049 bp, Oryza sativa
tgctaatgatgaacatgagagaagcatccttaccaagctaaagcaacaatgtggagggcagttcacttccaaaatggagggcatggttactgatctcactgtggcaagagatcaccaggctaaatttgaagagttcataagcacacactcagagttgaatcctggaatagccttagctgttactgtcctcacaacaggattttggccaagttacaaatcttttgatataaatctacctgcagaaatggtgaaatgtgtagaggttttcaaggagttttaccaaacaagaacaaaacacaggaaacttacctggatttattcactgggaacctgtaatattaatgctaaatttgaggccaaaactattgagctcattgttacaacttatcaggctgcattgctgctgctgtttaatggagttgatagactcagctattctgagattgtgacacagttaaatctctcagatgatgatgttgttcgattgctccattctctatcttgtgcaaaatacaagattcttagcaaagaactaaataatagatctatttcaccaaatgatgtcttcgagttcaactcaaagtttactgacaagctgcgaagattaaagatacctcttcctccagttgatgagaagaagaaagtagctgaagatgttgataaggatcgcagatacgcaattgatgcatcaattgtgcgtattatgaagagtcgcaaagtattgggtcatcagcaacttgtgatggaatgtgtggagcagcttggacgcatgtttaagcctgacttcaaggcaataaagaagcgaattgaggatcttatcacaagggattacttggagagggataaagacaacccaaatgtgtacagatacttggcttgatgggttttctgctggtggacggatacttgccggagcctgacttctgtgccctgcggtgctgcatttacgaatgggaaaatgataaaagtcgtcttgtggtacaacaccactggctgctttgagttttcagcaatggttggtctgtcaaaaactagcagagtccgcagga

SEQ ID NO: 388503 - DNA, 1866 bp, Oryza sativa
gtgctctcttgcaagggcaggcactacaggcactgcagagattttttgcttcactggtccagtctgcaaatacaagctttgacactttgttggattctcttatttctactgctaaaccatcgcagtcaggtggacttgccaaacaagcattgtcttccattgcacagtgtgttgctgtgttgtgcttagcagctggggatcagaagtgtgcctcaactattgaaatgcttaaaggcattttaaaagatgacagcactactaattctgctaaacagcacatggccttgttatgtttgggagaaattggaagaaggaaggacctcagcaattatgctcaaattgagaatattgtcattgagtcatttcagtcaccttttgaggagatcaaatctgcagcgtcatatgctctcggaaacattgctgttggaaatttatcgaagtatttgccttttatcttgaatcagattgacaaccaacagaagaaacagtatctattgcttcattcactgaaagaggtaattgcacggcagtctgttgaccatactggccagagtgagctccaggattcaaacattgagaagattttggcattgctctttaatcactgtgaaagtgaggaggaaggagttcggaatgtagttgcagaatgcttaggcaaaattgctctgattgaacctaggaaattaatccctgctctaaaggaacgcacatctagtcctgctgcaaacacaagagctacagttgccattgctataaaatattcaattggtgaacggcctggaaaaatagatgaaattatgtactccgagatttctaccttcctgatgttgattaaagacagtgacaggcacgtgaggcgtgcagctgtgctggccttgagtacagctgcccacaacaagccaaatttgattaagggtcttcttcctgaattattgcctcttttgtatgaccaaactgttgttaagcaagaattgatcagaacagttgaccttgggcctttcaagcatgttgtggacgatggtcttgaactcaggaaagctgcctttgaatgtgtggatacattgctggatagctgtcttgatcaagtgaacccatcatcatttatcgttcctttcctcttatctggtttaggtgatcattatgatgtaaaaatgccttgccatctgattctctcaaagctagcagacaagtgcccttctgctgttctggcagttttggactcattagttgaccccattgagaaaactataaatcacaaacccaagggcgatgcagtgaagcaagaggttgatcgcaatgaagacatgattcgaagtgctcttcgagcaatcgctgctctaagccgcataagtggtaatgattacagcatgaggttcaagaatctgatgaacaagataatggcctcacctccgcttgctgacaagtacaactcggtgcgcaccgagtaagagctgatctttttgtatatggtagaaaatagttggagccgacttggtatatgtgccactgcctattctgaggtgaagattcaacccagcattgccctatatttttctggtggagctagtccgaaacactgaacgatacagctgagactaagaggtggtttgaaaatttgcgaacacaaatggctggttggaagctagacttttttttttttgtcttgtacaaagtatggcggcaattcactagattcagtaaagttggattatattttagccgtcttgtgcgtattttttcattgcgtggtactagtaattcttccaatctctagacgccggcctttttcaagttttggtcaagggtgatattggaaattaaaaacttgaaaatcgaattaaaaacgatcaattttttacttgatcg

SEQ ID NO: 388504 - DNA, 1069 bp, Oryza sativa
gagctgcagctcctccgctcctccacccaccaccgccgtatcttccctcatctggccatccactccggtgatgtcgagcgcgtggtgtcgcaagaacgttgcctcgtttggtgagaggggatagtgcagcgagccgcctccaatcccttctgtcccactgctactcgctgtcgcagagaggagatttgtccgaccgggtttcatgttaagctgtggctttatttcccaccatcctcagtcccatcctatttctctttcttgttcgagcaatcgaatctgatttaaggatctgattttctcttgctaattttcaggagtcaaccgtctatttgctgtcccgtgcaccaacacgaacattgaccggatttcattctgacacagtagtagtaagtatcacgaattgtgcattttattctaaaatgtactagatttatatagcgtttgtcacacattgactagaatggatctgtttagttaatttgtctgctgtgctgctgattttaaaagtttagtgtatagagttaataaaaacgtgtgtgagctgatagtttgcaggagtgataaaattcccatgtgagcaactttgttgtttttatatcagtgcagtgtttagtaggaggaaatgaattaaaggacaattcaggggttgggttggttgggtcagtgaaaaaatcagcaaaactgcagtccacaagatacaatgaattatgcttacaaggtgtttgtgttaatgactgcaagttgacacttcacagcatgtcctttgcattttaactacaaaaggtcgtgtcctatgcatgctaactccgtgctcatcactagttgaaaaatttgtgcagttatttttccctgattattatgttatctcactatatgatgcaaaaatttaaagctcatgttatctcatgatgtgatatgctctttatacaatctcttagtagttctccaaagtgcctcaccaatttgtgactgacattttttcccaataaaatgctatgctgactatcgcattatatatctcatttttgaaacacaatagtatgagtacttgcttttgattttgtatcgt

SEQ ID NO: 388505 - DNA, 623 bp, Oryza sativa
  unsure (1)..(623): unsure at all n locations
ccacgcgtccggttacatgacaactggttctctcacatcgttcattttgtacagccttacagttgggtcgtcagtctctgccttgtcaggactatacacaactgtaatgaaagcatcgggcgcaagccgacgagtatttcaacttctggaccgtgtttcctcaatggcaaattccggggacagatgcccaacaaatgaaaatgatggggaggttgagctcgacgatgtctggtttgcatatccctctcggccttctcatatgattctgaagggaataacgttgaagttaacaccaggttcaaaggtagctcttgttgggccaagtggtggtgggaaaactacaatagcaaatttaattgaacggttttatgaccctctaaaaggaagaatcttgcttaatggagtgcctttgccagagatttcacatcagtttctccacaggaaggttagcattgttagtcaggagcctgtgctctttaactgctccatcgaagagaatattgcttacggattagagggcaaagccagctctgctgacgttgagaatgcagctaaaaatgcaaacgcncacaatttcatatgcagttttccagaccaatacaagactgtagttggagagcgag

SEQ ID NO: 388506 - DNA, 762 bp, Oryza sativa
  unsure (1)..(762): unsure at all n locations
gaaaaaacagtagcggtggcggcatcatcagcagcagcagcagcagcggtggtggtggtcgccgtagcggctgccagctttnacccccacctcacccgcctccggcggcgccgccgctcccgttcctgcgctcgccggcggcgcggcgggtcctcctcctttccctctggcgcgcggggccccgccccctctcccacccccaacatggaagcctctagaaggaggggaagctgctgatactgtgatcgaataattgcccctttttctgttacaagcaaatgtgataatggacaaccttggccatagagaaaatgggacccaaaggccagaccaatataaaggacttcatacccagtggatgatgccccagacccaaaggcatctgaaggaccatcaaagtatgaatctcttggcactgatgaatgatagagataatgccatccgagaaagggaccatgctctggctgagaagaaggcagccatagctgagcgcgatatggcgtttactcaacgggatgctgcaatggctgagcgtaatgctgcagtcgtggaaagggacaatgcccttgctgctcttgagttagcacgtacaaacgggttgaacatgaataacgggcaatggattcccccaaggttctctcagcggatcaaagaacatccaccaccacgaccagctttctcatgctcagtcatcaccgctgcaactggcagattcttcatatgatcatgctagagaaatgcacatatcagaagcatacccta

SEQ ID NO: 388507 - DNA, 773 bp, Oryza sativa
  unsure (1)..(773): unsure at all n locations
ccagcgtccgttttgattccacctgttgggcggcagcttgcgtacattctccgtggtngaaaccaagttcaagaatatcaagaagaacaagactactggaggattttcagtgactttcttgggcgacattgtggcgactgggctgaaggttgaggaccagctctctcttgggaagaggttggcactggtggcgagcacaggtgcaatgcgagctcaaggcgacaccgcttatggagctaacttggaggcacgcctgaaagacaaagattatccgattggccagtccctgtcaaccctgggtctttctttgatgaagtggcgccgagaccttgctctcggtgcgaatttgcagtcccagttctcgattggaaggggctcgaagatggtggttcgtcttggattgaataacaaactaagtggccagatcactgtcaggacaagcacctcggagcaggtccagatcgcgctgttgggtcttatcccagttgcagcctccatttacaggagcttcaggcccagcgaaccctccttcgcctattagcttcgcatcaagatgaacaatttactcatgtcggctgcgcctcctttcgtcttagcaattttcctatcttatatgaaccataattttctgtctgtttttgcttttaccagtgtactccgaagatcgttcctatcataattttggctgaagagggttgtgaaatttaatgtggaacttcaactgaataatgttgttagatctatataccatccgtttttctattaaaacaaaa

SEQ ID NO: 388508 - DNA, 936 bp, Oryza sativa
ccacgcgtccggttgtgaaaggtgtaaagtttgttggtgatgggtacaccaattgtgaagcttctggcattggtaggtgcgaaattaaaaatggaggatgctggaaagaaactagaaatggcaagacaatatctgcctgctcaaatgaagtatctgaaggctgcaaatgtccaccaggtttcaagggtgatggaataaaaagttgtgaagatattgatgaatgcaaggaaaaactttactgtcaatgcaagggctgcagctgtgagaatacatggggtagctatgagtgcagttgtggcggtaacaacatgttatacatgagagagcatgacacttgtctcagcaaggaggctacgtcagctgttggctggagttttctgtgggttattttctttggacttgttcttgctggggtcggagcatatgcggtgtataaatacaggctacggagctacatggattcggagattcgcgcgatcatggcccagtacatgcctttggataaccaagaagcagctaaccaacatcatgtcgcgcatgctggtgatgatatttgaaacggcactcctttcccgggtgcgcgaacatttcatatgtgtactgatgcaccggtggccatcgactttacaggggtcaactgggcgcaaaagatagtgtgtgtgcgcgagaaagattagccgtatacatgtatgattgtaagagagacatcgtttgagatcatctttctgtaaaacccaaagaacagcataggcaaatattgtgacagttttagcccttcctcagactcagctgctcctgctgcatacatgagtactgaatacatgatacattcaaatgtcgtgtaaatacctgtctgttcttcagactagagaattcctcctcgcctcaacttaataaaagctcgagtcttgaaggggtcaaaaaaaaaaaaaaaaa

SEQ ID NO: 388509 - DNA, 892 bp, Oryza sativa
  unsure (1)..(892): unsure at all n locations
ctcccctgnctgtatacaacatctggaagatggaccaagatggatttccttgtgtgtctatgtgcatttgctggtgtaatcttcatctcagtccaacaaggccttgcaatagcggttggtatatcaatattcagggtactgttgcaaatcacaaggccaaagatgatgattcaagggaacatcaaaggcactgatatttaccgaaatcttcatcagtacaaggacgctcaaagagttcctgggttcttaatcctgacagttgaggctcctataaactttgcaaacaccaactacctaaatgaaaggattaaaagatggatagaagaagaaagttctgcaggaaccaaacaaagtgaactccatttcgtaattttggatctgtcagctgtccctgcaattgatacaagtggcatatcgttcctcatcgacttgaagaaatcaacagagaagcatggactagagcttatacttgtgaatccaactggagaggtcatggagaagatacaacgagcgaatgatgctcatggtcatttcaaatcagatagtctgtacttaaccactggggaagcagtggcttcactctctacattttccaagatgacagcgccttagagctgattctaaggttgtcattttcattattattctaactgcgctgctaagtttgcaatgcaagattttccaccctgttctctcagcaatagaagtgcctccagcaacgtatttcccggttatgtttgtacccccaatcttccgaggtattcagactatgtgatgcaaacttggcagtagaagtactgagaatatgtaccttgtgcatacccatcagtatttgtctacatgagggcaaacacaccaacagtacagaatatatagtaattctcaaaacaaa

SEQ ID NO: 388510 - DNA, 564 bp, Oryza sativa
ctcttttcccagaagaagaaaaaagaagggctgcgactcattcgaaccgcgcatctcgtctcgtcgaagcgagcgaaaccacacgcggcgcgtcgatcccaacaccaccaacgcaacccctacccatggcggcggcgggcggcggcggcgcgggggcggccggaggcgggaaggtgtcgttcaagatcatcctcacctccgaccccaagctccccttcaaagtgtttagcgtgcccgaggcggcgccgttcaccgcggtgctcaagttcgccgccgaggagttcaaggtcccgccccagaccagcgccatcatcaccaacgatggagttggcatcaacccacagcaaagtgcaggcaatgtgtttctaaagcatggctcagagttgcgcctcattccccgcgatagagttggagcattggctgcgcctttctagattctatagttataattgagaaacttaacagaataaagtcgatgttgggtgcttgcttgcttgtataatgtgacaagttgatgataatttatcgacagtttacctggtataaaaaaaaaaaaaaaaaaaa

SEQ ID NO: 388511 - DNA, 411 bp, Oryza sativa
tcagtaatccagtcaaatattgaaaagccgtgtccagttttgccttaaaaacccctctattggtgatacgatcctccgcttgccatgctttcacatgttccataaagaatgcatagacgaatggctaagaagtaagaaactatgtccagtttgcaagtctgggatcacataaaggtgacaattcggttccatgaatattctgcccttagactcaagaaaacagaaggaagtcgcctgcaacagtggttgcgtttctatctttagacgacagtggtatcggcgggaggttgcccaatcttgtagagccttgttcgaattgccttcggtgctaattctctgttttgtgggtttaggcaccatattttgtacataccatgtcctttattcatcaactggcaaaatgtgaggctc

SEQ ID NO: 388512 - DNA, 1114 bp, Oryza sativa
  unsure (1)..(1114): unsure at all n locations
cgctctctcgtttcgtctcgtcgtcctcccccgcccacccccccgcgccctccctccatggcgtcgacggatgccgacgaggaccagctcctcaagagcttcctcgccgaggtcagcgaggccgaacgcgacaacgaagtgctcaggattcttggttgcttcaagttaaaccctttcgagcatcttaagttgtcatttgattcatcagcagatgaggtgaagaagcactataggaagtctgtccttgttggttcatcctgataaatgcaagcatccgaaagcacaagaagctttcgcagctctggcaaaagcacagcagctcctacttgatccacaggagagaggatatattcttgatcaagttactgctgcaaaagaagagctgagggcaaagaggaaaaaggagctgaagaaagacagcgcgtcaaagataaagtcccaagtagatgagggaaaatatgaagagcagtatgaacgatcagaagaatttcagaagcagctaataattaaagttcgtgaaattttgacagacaaagagtggcgtcgcaggaaaatgcagatgaggatatcagaggaagaaggaagactgaagaaggatgaagaggaaacaaaagaaatgtggaagaagaagcgggagcatgaagagaagtgggaagagaccagagaccaacgagtctctagctggagggattttatgaagacaggaaagaaggcaaggaaaggtgagatcaaacccccaaagctgaagaccgaggatccgaacaaatcttatgttcagaggccggtgaagcgtgcttaagaggaatgatgttagtctttgcagccaaagcatatatacagtaaccattcttcttgttacccgatctaagctttatcctatcaaagctcctggcaggctgtaaggttcggttatgccttccgtgttcccactgtagtcagggaacataacacatctttgttagcagaatggcttcatgttctctacatagagttgtattggattaatgtacctcttggatataacacattcctggaaaatgttgaaaaaaatatgtgaaaaagaaactcatcgaattgaatgctgaaaaannnnnnnnnnnnnnnnnnnnnnnnn

SEQ ID NO: 388513 - DNA, 461 bp, Oryza sativa
ccacgcgtccgctcctcccagctcacaaaaacctcaaacccccagccttctcgggcctccacagaaagccgaggaagagaaaaaaaaaatggagctcttcggctccaccgtcgcctccgcgcgcgccaccgcccccttatgcttcgcctcctccttccaccaccgccgcgctgctcctcccgccgtcgccgccgccgccaccctccgccgcagcaaccgccacctcccgactcgaggatggcggtgcgcgagcgcggcggcgccggacccggtgccatcggaggagcccgcgtcggcgtcggcgtccaccgtcgtcgtcacggaggacaagcccgatccgccgccggcggaggagaagagcgaggaggtcgcggcggtctctaatggcgggtctctggagaccgtggcggcggcgccggggttcgcgggggcagccgaggaagaccgcggcttggctgaca

SEQ ID NO: 388514 - DNA, 431 bp, Oryza sativa
ccacgcgtccgtttcatttggagttgaagactttgtcaagagatatggagcactgaaaccatcacagtttgttgacgttgttgcgctttctggagataaagccgacaatataccaggagttgaagggattggagatattaatgcggtaaaactgataactaagtttggttccttggagaatctgttgaaatctgtggatgaagttgaggaagaacgaattaaacaggctttgatatctcaatctgaacaagcaatgctttgcaaaagcctggccacattacgttctgaccttccatcctatatggttccttttaagacatcggatcttgtgtttcagaagccaaaggatgatggagccaaattcataaaactcttgcgagctttggaagcatatgcagaaggctcgtcagcagacctaatcataagaagag

SEQ ID NO: 388515 - DNA, 560 bp, Oryza sativa
tcgaccgacgcgtccgcaacgaatccctcccccataccaaactccgccgccgccgccgccgcccgccgccgccgagaccgacccgaccacgatgggcctatgggacgcgctctaccgcgtggtgatgcgccgcaacgcggtctacgtcaccttcgtcgtcgccggagccttcgccggcgagcgggcggtggactacggggtgcacaaggtctgggagatgaacaacatcgggaaaaggtacgaagatatatcagtgctggggcaaaggccggccgagtagaacaatgaaagcccagcactcatcatcttgcttgctttacgtgaaagtagacactcttttaagctctaatgtcttgtcattttcttcggcacaataagcaatgtaaaacccctatctccgtttctgagagttagcactcgattcatttactcgaacatgatttgtgaattttgagatgcatggccaaaacctttcctgtagccatgtgatggtgcgctctggaatcagttgaaaactatacaaactcctcggaatgaaagtattttgagggttggtttgt

SEQ ID NO: 388516 - DNA, 649 bp, Oryza sativa
ccacgcgtccgcggacgcgtgggtaggtatctagctaagcagtggtgtgatcagtaggaagttgcaggtgggggatatatcaccaatggctccggtcagcatctccgacgagcgcgccgtctcggtgtcggcggagcgggtgtggaaggtcttctccgacgcgcccgccatgcccaaggtttgtgccggcttcatcgacgccattgaggtcgagggggatggcggggcgggcactgtcaccaccatgaagctcaaccctgctgtggatgatggggggtcattcaaaacacgtgtggtggcacgtgacaacccagctcacattatcaagtcagaggttctggatgtgccggccggaagtaaggtgggcaagctcaagtcgcacgtgacagagactaatatcgaggccgccggtgccggctcttgcttggccaagataaacgtggagtatgagctcgaggacggcggctcactgtcgccggagaaggagaagctcatactcgacggctacttcggcatgctcaagatgatcgaggactacctcgtcgctcaccctaccgagtatgcttaaaaattgtcataaaccaaaataatatacatccatttccgtattggtgcttcctgataattaaataatgtgagccacgacaaa

SEQ ID NO: 388517 - DNA, 749 bp, Oryza sativa
  unsure (1)..(749): unsure at all n locations
cagatctacgccatgccggtgttcgacatgatcgagaccgtgctcgtcaagaagctcagattccctcccggcctcacgcttcgcctcatcgcaagaacactctacgttgcgttcaccatgttcatcgcgatcaccttcccgttcttcggtggattgcttgggttcttcggtggattcgccttcgcgccaactacttacttccttccctgcatcatgtggctagcaatctacaagccaagaaggttcagtctctcatggttcaccaactggatctgcatcattcttggagtgatgctcatgatcctgtcaccaatcggaggactccggcagatcatcatagatgccaagacatacaagttctactcgtagattacatgttcatcatagtaatctcatgtggctgcaagttcaagttctactcataggcacacatgatgaaaccagttactgcaaaagttttttttttagccaacaaaggaagaagaaagttcaacaccaagttcatacattgtcactacgacgatgatcttttgagacgtgtcatgcatgcatcagtcgttaattatgtgacttaattaaaaacaaagaggttgtgtttgtgcattgtcgctgggttaatcatactgtgtttttatatttcaatctactattatattgtaggctggacatggaaactgtgtgcagaaagatgaaagggatggataattactggttgattcttttgctttcnnnnnnnnnnnnnnnnnnnn

SEQ ID NO: 388518 - DNA, 635 bp, Oryza sativa
  unsure (1)..(635): unsure at all n locations
ccacgcgtccggggaactgttttgatacattctgctgagcagctagaaaactatgctaagactgaggaagctaaggtggaggagcttatcaaagctgttgctgactcgggtgcaaaggttattgtcagtggagcagcagttggcgacatggcactgcatttctgtgagcgttacaagctaatggttcttagaatcagttcaaaatttgaactgagaagattttgccgtactacagggtccattgcacttttgaaactcagccgaccaaatgcggatgaattaggatatgcagactctgtttcggtggaagagatcggtggtgcccgagtaactgttgtcaagaatgaagaaggtggaaactcagtggctacggttgtcttaagagccgccgcccgcggccgattggatgatcttgaaagagctgttgatgatggtgtgaatacttacaagtcaatgtgcagggatagtcggattattcctgggggctgctgcaacagaaatagaattggcaaggagatttgaaggaattttcctctgaaggaagcgggggttggaccagtatgccattgcaaaatttgctgaaagttttgaaatggttccaataaccctgnntgaaaatgctgggcttaatgcta

SEQ ID NO: 388519 - DNA, 591 bp, Oryza sativa
ctccctttctgctgaggatggctgagtgctgcatctgcttgtgtccctatgaagacggtgcggaacttcgagaactccccctgcaatcatccatttccactgtacctgcatagacaagtggcttcacataaatgcaacatgtcccctgtgcaagttcaacatcatcaagagcaaccttggtccagaagacgtctaggtttccacaggacgagcaatctgttgaaggattgatatgctccagttgcgttctttagctatgggttccttcaggtgtaagtatggggtataggtgatgcacagctggttgatcagtattcgctcctgaatgaaatgttttagcagtttcttgatgccggtagagatgtacattccttctctctaagtcaattgtgtcgcagattctcattttagccttgtaggaagtatttgaattgaggattctcatgtacgttgtgttagcaagtgttgaataaatacatggaaatgcagaggtttgtaagaagaaaaatggttgtggaattggagctttgttaacagcacatgctgtctccttaatatgcagtagacgtacattctaaaaaaaaaaaaaaa

SEQ ID NO: 388520 - DNA, 926 bp, Oryza sativa
ccacgcgtccgcccacgcgtccgcccacgcgtccgcttggaatcaccagctgcaacttgttggcgagctcttgtgggtgcagttcgctctacgaccttttttgtctgcttttgttacattcttccaggctgccatctgtttgcatcgtaaagttgcaaccaaagaccacaagtttgtgtactggtttgctggtctgatgtctggtctttctattcttttggaaaagaaagccagaagagctgagctagctctctatgtacttccccgcgcaggggattctttgtggtatatattaatcaaccgccatctgctcccaaatattaaaaacgctgaggtggctcttttctgcatgtgcatggggggaatcatgtatttcctggagtatgagccagataccatggctccattcctcagaggactcatcagacggttcctggcaagcaaaataagcaacccgagcccaccgccaaatcccaatgcctcctactcctaccttcagaagctgaacgtgctggagcaaccaagaacacagcagggcccagagaatggcctgccatcatcagagaagtacaccctggaagcaattcccggactttgagtagagacgtcgcattcgtggcagtttgagctttctttgcttgtaccctttgaaaaccaacaaatcctaaccgtaaagcatccaatatgtcaggatttagcatccttttgcacggctggtgtggtgttaatatctatacccaaggagtatatatagtgttctattgtgtcccttgcagaagaaaaggttaaatagagcgccccaatttgttgggtgcggaatgattagaagttcttgaattgctcttatctaggcgtttttgtgcatgttgagtgtaagatactcgcaacaaaaggagctatcgtaataaacacaggcattcgttgct

SEQ ID NO: 388521 - DNA, 672 bp, Oryza sativa
ctagttctagatcgcgagcgaaaccgcggcgcccaaccccaacccaaaccaccagaccggcggcggcgggggcgacctaaggcgagaacacgagcgaaaccagagagggggcgatggcgacggcgacggcgctcaaccgcggcctccgctccgggatccgcctcctcgccaccgggctgaggcctccaagacagattctcgtggattccatgccactggtgtgaagaggatgggagggcatggccatgatgagccctactacctccatgccaagcacatgtacaacttgcacaggatgaagcaccagaagccgaagtgtatctttccgtgctgggagcagttggcattggcatcgcagtcccagtttatgcggttgttttccagcagaagaagaccgcctccggataagctctctaagtgctacataatgaacttactttctatagcactccgcgaagttaaaattgggacttcactttaaattggttattgcttgttactccattttgcacttgcctgaagttgtaagctccttttcatggcgtttgatgtaggaatactgctattttctgttaataatatcatggcatgaactttcctggctgtggagaaaccaggcagcgtgatcacaagtgctctaaactgggctgtggagcatatgtacaccgagat

SEQ ID NO: 388522 - DNA, 685 bp, Oryza sativa
aatcttatcctctcctctctccctctccctctcctctcaccctccccctccctctccgagcctgcaaagaggagagctggcgatccgggcgaggaggaggtggtccggcagtggcggcggttcggcggggagggccagcaacgacggggtgacgagagatggtccggcggcgggctcggcaaggaggggtctagcggcgggggctcggcaaggcggagtgatggccgtggggtcagagcggctcggcgaggaggccgcccggcggcagctcggcgaggcaaggaaggccagaggcggctgctcggcgacgagggacggcgccgatgatgagggccggcggcagataaaccctccctccccggtgtgggcgtcccctccctcactccctcttcctctcagatctgcccggagggggacgggtggaggccggcggcctcccttccctctttcctctcagatccgcccggtggggagaggccaccggcggcagcggcatggccctcccctctgcagcagtagagggcggcagggaggaggccacagagctgtgtttttttatttgtttttattttgattgatgttgcaatgcaaatcggtgttgtggggatttgaatccgctgtatctgtgttcatgtatagattgtgttgatgaatggatgtttgtgattgtaaaaaaaaaaaaaaa

SEQ ID NO: 388523 - DNA, 625 bp, Oryza sativa
ccacgcgtccgcccacgcgtccgccacgcgtccgccacgcgtccgcccacgcgtccgcggacgcgtgggtcgagaaggacattgagagggagaggcggagtaaggagaaccctgaagcgatggaggaagatgaagtcgacgacattgctgagatcaaggcagcccacttcgaggagtcgatgaagtacgcgcgccgcagtgtcagcgatgccgacatccgcaagtaccaggcgttcgcccagacgttgcagcagtctcgcgggtttggcagtgagttccgtttcgagcggacagaagctggtgctggagctgcggctgatccttttgcgtctgctgccgccgtcgctgatgatgacgatttatatagttaggttgtctgttgtgtccttcgttagctcgccctccgagtttgtgttcaatattggttccatctgccatgcctttgtgttgaaactaatcgtacttgaaacacggcaaagccctctggttatatttattttcagtgcaatagggtgctgcttggctgaggacgatgccctcggtctaagccgttgccctcctgtggctggctactggacgatgacaatttctgaatttcccaacaatatacagctatttttttata

SEQ ID NO: 388524 - DNA, 387 bp, Oryza sativa
ccacgcgtccggacggcgaccgggccgctgtcgtcgtcgtcgaccacgggggccctcttcatctcctccggcagcggcggccacgccaactccaagagcggcatcccctccggcacggtggctccccggtagcgttgcgtgccgggctaacgtaacgtttttttttccccctttcgcgtcgtcgggtgtaaaatggaagggaattttcttccggtgtaaattagctgtatggtagtagcccgtacccctgagtgagtgagtgagtgagtggtcttgctgctgttccaggtgatttcttggtctttacagtgggtgatttggcccctgttgtaattaacccatagatgaatcatgaatcatgaatgcttgcaaccaacgtttagatcc

SEQ ID NO: 388525 - DNA, 472 bp, Oryza sativa
cgaaaccgctcttcttccctgctgcggggtgagggatggagcgcgtaaggagggcttcgcacgcccgccctcgcgtccccaacaatgccaggaaactggatgagggacttgaatgggttggctgagggcttgctggtctcaccaagtcccctgatgtgagggcagtaattgcgccccatgctggctattcatactcagggcggtgtgcggcttatgcttttggcaacattgatccaactaacatttctcgggtcttcctgttaggcccttcacatcactactatactccaaaatgtgcattaacacgagctactatttatagcaccccaattggggatttgccacgtagaccatgaagtcattgaggcaactcaacgctacaggaaaatttgattttatggaccttagtgtggattaagctgaacatagcatggaaatgcatttaccctatctttctaaagttttcagggac

SEQ ID NO: 388526 - DNA, 767 bp, Oryza sativa
ccacgcgtccgattctcaagtggtcactgttaggttccatcttatcaaatttgttacttgttcttggttcatcactcctctttggagggatcgttaatatcggcaaggagcgtccactagataaggacagttcagatagcagtagcagtgaagatgatgctacagacaaatcagttataggatttgccagtgcaatggtctggttgatagggatggccgtagtcactgctatgttgtctagttatgttgttactacaatagaggaagcatcagaatcaatgggtatccctgtcaggttcattagtattatcctgcgacctattgttggaaatgcagcagagcatgcaggcgctatcatatttgccttcaagaacaaaatcgatatcagtctgggaattactcttggatcagcaactcaaatatcgatgcttgtggtaccagtcattctaattgtgtcctgggtgaatgccatccctatggatcttgacttcaaccttcttgagactggatcattggcaatggcagtaatcaccaccgcatttacacttcaggatgacaaatggcattacttgaagggtttgaatctagtattttcctatatcgtcatagcggtgtgctttttcgtcatgaaagctctcccaacgctaaaaaaggaagatgactaaatgtgttgttttgaaccgaatcaagagaccgatgagacgatgcatgcatgtgagttgaagactgtagctagatcggtgagctcctgatcaagctggtcatca

SEQ ID NO: 388527 - DNA, 485 bp, Oryza sativa
  unsure (1)..(485): unsure at all n locations
ctagctagcaaaagacaactcaagccaaaaccatctcagagcttcagagaggaagacaatggccggtggaggagatgagctgaagctgctggggatgtgggcgagcccgttcgcgctgcgagcgaagtccgctcagcttcaagggcctgagctacgagtacgtcgaggaggatctcaagaacaagagcgagctgcttctcacctccaacccggtgcacaagaaggtacccgtgctcatccacaacggcaagcccgtctgcgagtcgcaggtcatcgtgcagtacatcgacgaggcgttccccgacgccggcgttcctcttctcccatccgacccctacgaccgtgccgtcgctcgcttctgggccgcctacatcgacgacaagctgttgaagtcatggctgcaggcgtcgatgtgcaagacggagcaggagaaggcggcggcgattaaggagacgttcgccgcgatcgagaaccttgagacggng

SEQ ID NO: 388528 - DNA, 589 bp, Oryza sativa
  unsure (1)..(589): unsure at all n locations
caatcacccacaagtcgaaaacccaacctgaagtcctgaacacagaacaccaagagaacccactaacgcaacacacatacacacaaacatcgacacatcgtgtccatcggaggcacaggagagatggccggcgccggacacgacgagctgaagctgctcggcaactgggcgagcccctacgtcaccagagtgaagctcgcgctccacctcaagggcgtgagctacgagtacgtcgaggaggatctccgcaacaagagcgacctcttcctcggctccaacccggtgcacaagacggtgcccgtgctcatccacaacggcaaccccatctgcgagtcgcagatcatcgtgcagtacatcgacgaggtcttccccggcgccggcgactccatcctccccgccgacccatatgaacgcgccgttgctcgcttctgggccgcatacatcgacgacaagctactggcgccatggaagaaggtattcagggccaagacggaggaggagagggccgcgtggatgaagcagatgttcgtcgcggtggacgttcttgaagggaggccttaaggagtcttccaaggggaagggatgcttn

SEQ ID NO: 388529 - DNA, 567 bp, Oryza sativa
ccacgcgtccgaaaacctcatctagagcatcgagctgagaggtaaggaagagaagaaaacaatggcggggaaagacgacgacgtgaaggtgctcggcgtggtggtgagcccgttcgcgatccgcgtgcgcatcgcgctcaacatcaagggcgtgagtacgagtacgtcgaggaggacatcttcaacaagagcgagctcctcctcacctccaacccggtgcacaagaaggtccccgtgctcatccacggcggcaagcccatctccgagtcgctccgtcatcgtgcagtacgtcgacgaggtctgggccgcggcgccatccgtcctccccgccgacccctacgaccgcgccgtcgcccgcttctgggccgcctacgtcgacaacaacatgttccctggaatggctggcgttcttttcgcggcgacggaggaggagagggcggcgaaggccgaggagacgctggcggcgttggcgcagctggagaaagcgttcgcggagtgcgcgggcgggaagggcgttcttcggcggcgactccatcgggtaccgtcgacctcgcgctcgggagcaac

SEQ ID NO: 388530 - DNA, 481 bp, Oryza sativa
  unsure (1)..(481): unsure at all n locations
cgngcgagcgacctacaaaacacaatccaaagcgtgttcatccaatcattctctgttccgctctctcaccccagcgagatggccggatcaggagacgagctgatgctgctcggcaaatggccaagcccattcgtcaccagggttgagctcgcgctcggcctcaagggcctcagctacgagtacgtcaagcaggacctcgtcaacaagagcgagctcctcctcgcctccaacccggtgcacaagaagatccccgtgctcatccacaacggcaagccggtctgcgagtcgtcaatcatcgtgcagtacatcgacgaggccttccccgacgccggcgccgggcgccccctgcttccccgccgacccctacgagcgcgccgtcgttcgcttctgggtcgcctacgtcgacgacaagttcgttccggcatgggttggcgacgttcaagaggcaagacggaggaggagaaggcgggtgggatgaagc

SEQ ID NO: 388531 - DNA, 446 bp, Oryza sativa
  unsure (1)..(446): unsure at all n locations
accagaacagtctcaaagcttcgcccaagcagagaagaatggccgccggaggaggaggaggagacgagctgaagctgctcggattgtgggcgagcccgtacgtcctgcgagcgaaattcgcgctcagcttcaagggcctgagctacgagaacgtcgaggaggacctccacaacaagagtgagctgctcctgagctccaacccggtgcacaagaaggtgcccgtgctcatccacaacggcaagcccatctgcgagtcgcagatcatcgtggagtacgtcgacgaggcgttccctgacgccggcgagtcccttcttccctccgacccttacgaccgcgccgtcgttcgcttcttgggccgcctacatcaatgacaagttcatgccggcgttgcagaaaggcgtcgtttgggcctnacgggaggaggagaaggccgaagcgggttgaag

SEQ ID NO: 388532 - DNA, 382 bp, Oryza sativa
  unsure (1)..(382): unsure at all n locations
caccatttaaccacctccaagcttcgcattccaagagaccgagcgactgttcagccagagattaatcagagaatggctggagaaggagatgatcaactgaagcttctcggattgtgggtgagcccatacactcaccgagtgaagcttgcactcagcttcaagggcctgagctacgagtacgtcgaggaggacctcagcaacaagagcgagctgcttctcagcaccaacccggtgcacaagaaggtgcccgtgctcatccacaacggcaagcccatctgcgagtcgcaggtcatcgtgcagtacctcgacgaggagttccccaactccggcgtctcggtcctcccatctgactcctacgatcgngccattgctcgtttctggg

SEQ ID NO: 388533 - DNA, 434 bp, Oryza sativa
aacagaacagagctcgcaactcacaagctgatacagagcagagaccatcggagttcagagttcagacacgagaaagccatggccggaggaggagacgagctgaagctgctgggcatgtgggcgagcccgtacgttctgcgagtgaagctcgcgctcagtctcaagggcctcgactacgagtacgtcgaggaggatctcaagaacaagagcgagctcctcctcagctccaacccggtgaacaagaaggtgcccgtcctcatccacaatggcaagccagtctgcgagtcgcagatcatcctgcagtacctcgacgaggcgttccccgatgccggcgccaccctgctccccgccgacccccacggacgcgccgtcgctcgcttctgggccgcattctgcgacgacacgatcgcgaaggcgtcgcagcaggcgtcgtc

SEQ ID NO: 388534 - DNA, 307 bp, Oryza sativa
ccacgcgtccggaaaaaagaaaaaaaaaaacagagatcccccacaacttccgaatccgatcggcggtcgcggcggcggcggcggcgtcggcgacggcgacggcggggagcttcttcccgatcccctcctgatcgcccgcaggatcgatcgagctctccccccctctcactcacctcggggggcgcggcggtggggggctagggatttgagccggatcgcggcgagcttgaaggggcgcggactgaggcggcgagaggagcgggtttccggttcgggggaaggaggggaggagtgatgaaggaaagga

SEQ ID NO: 388535 - DNA, 561 bp, Oryza sativa
  unsure (1)..(561): unsure at all n locations
ccacgcgtccgcccacgcgtccggaaacgcaaacctgaggctcgaagcgtatttctcttctgcgccttcgcttttgcctaagcacgatgtctgctacaatggacatcgacggcgccgccgccagcgccgccgcgggcggtgggagacattcggagaaggagctcttcagcgcggcggagtccggggacgccgcggccttctcctccctctcccccgccgacctcgccgccgcgctcgccctccgcgatgaggacggccggtccctcctccacgtcgccgccgcctccggccacgcccaggtggtgagagtgcttgccgcgatgggcggcgacgcggcggccagcgttgtgaacgggaaggacgaggaggggttgggcgccgatccacacggcggcgagcagcggaaaagctgagatcatctccatcctgctcgatcaaggtgctaatgttgatttgacaaccgatgctggccggactgctcttcattatgctgccagtaaaggacggcttaatatagcagaaacactaatagcgcacagtgcacatgtcaacangaaagat

SEQ ID NO: 388536 - DNA, 970 bp, Oryza sativa
cctggagctaagaaactcaaaagggaagcatgcacagttcttatgtgacatgtgccagttctatagagactggcatcccgaatcccatggctttcatggaatttccctccatgatcctgtgagcttcactgccctagttcaccctgagtacttcacgttcaagaagggtgttgtgagagtagaaacccagggcatttgcactggtcacactttaatggaccaaggattgaaaaagtggaattcagagaatccatggtctggctacaagccaatctcagttgcatggacagttgatgtgccaaatgttctcgcattcgtgaaggaactcctcatggctccatgagcgattttacgcctatttcttgtgcttttggatacacaagcaaatttgacaaatacagagttgtgattagatcctggaaaccggaagctttctattcccctatgaataagaagatatggttgttttgatttcttgagttcaagtctggtggctcaaaacaacctggttccacctaagaacagaataaggactggtttgttctgggctagtaggcatcagacctgaggaccaaaacaatctgttatcttattatatgtaataggaggattagaagtttgcttcctagctacaagcaaaatatatgtagtaaattgaaattctgcatacgaaagacagcattattacaaactgtttcagacatttgtgccacagatatacatttcaaattcggaaaaaaaaaaaaaaaaaaaaaaaaaaaaaaaaaaaaaaaaaaaaaaaaaaaaaaaaaaaagtaaaaaataaaaaaaaaaaaaaataaaaaaaaaaaatatattaaaaaaaaaaaaattatataaaaataaatattaaataaaattaaatggggggggttttttaaaggttttaatttttaatatcgttgtggggtataaaatattttttttttggggacataaaattttagtaagg

SEQ ID NO: 388537 - DNA, 487 bp, Oryza sativa
  unsure (1)..(487): unsure at all n locations
ccacgcgtccgggaatgcaggcgattctactagtcctgaaaatggcaaacatattgaagatcagattattgattgcagaatgactgctttgaaagatcatgagatcaataccgatgtcaggataagagatgtcaacctcaattcatgtttagatgcaatgtctcctcctgtttctggtgcaaattatgaaacatctaatgccatagatgacaataatagatcatccatcattgcccaatgctttggtgctaattctgccgatgacaatgcttgtaaggaggaaaattttgtaaacaaccagagcagtgtatccaaggctgaaagcttcaaccagaacaatgacatgatatatcaacctaatttgaccatggntcctatctctcctgctcaaattaatgtggattgttttacttcttgttcaatgacatctgaaattaaggacaatagcaacagacgtgaaggtaatgccaaagaacagttggtggat

SEQ ID NO: 388538 - DNA, 1617 bp, Oryza sativa
tcggcatttgctagctagctcatcgtcgataccaatggcgactaccagggccacatcgacgctgctgctgctgctgctgctggtttcggcaacatgggcggcatcggcgccgacgacgagtcgggcgaggaacgtgataacacacgtgaaggggttccaagggaggctgccgttccacctggagacggggtatgtggaggtggacaacaccaataccgttgagctcttctactacttcatccagtcggagcgcagccccgccgatgaccccctcatcctctggatcaccggcggccccggctgctccgccctctccggcctcctcttcgagattggccctctcaagtttgacgtagctgggtacacggaagggttccctcaattgttctacttccaagattcctggaccaaggtgagcaacgtgatatttctggacgcgccggtggggacggggttctcctacgcccgtgaggaacaagggtacaacgtcaccctcacacagacgggacagcagctggtggtgttcctcaccaaatggctgggcgatcacccagagttcgcctcgaaccctctctacatcggcggcgactcctactccggctacaccgtcccagtgacggcgctccagatcgccaacgacgacgacgcccgggcgcggctgaacctcaagggctacctggtgggcaacgctgccacggacgtcaagtacgacagtgggggcaaggtgcccttcatgcacggcatggggctcatctccgacgagatgtacgaggccgcgcggagcagctgccgtggcgactacgtgtccaccccgaccaacgccgactgcgccaacgcgctgcaggccatcagcatggcaaccttcgccatcaacccggtgcacatcctggagcccatatgcggattcgcgctgcgcgggcgcgcgatgcctgagacgacgatggaccagcgcctgcgcctgggcctccccgtggagtgcagggacaacggctaccggctgtcgtacctgtgggcggacgacccggaggtgcgcgccacgctgggcatccacgagggctccatcgcctcctggagccgctgcacggcgctgccgctcttccggcacgacgtggacagcgccatcccctaccacgcggagctcacgcagcgcggctacagggcgctggtgtacaacggcgaccacgacctggacatgacgttcgttggcacgcagcagtggatccggacgctgggctacaacgtggtgaccgcctggaggcccgtggtactccaaccgccaggttgccggcttcaccaccgtctacgaccacaacctcaccttcgccaccgtcaagggcggtggccacaccgccccggagtaccgccccaaggagtgcctcgacatgctcgacagatggacctctccggccggcgagctctgaattactttactatactaattcatcaccgtccgtatatatgtccgtttatgggaaatcttacccccttcataatttatctacttatcttttatcatgtcttatctttctcttttcttagcctatactacacacacttacttacaaaattcggagcatttgtgtggtctgtcgttcttttcccaaaaaaaaaaaaaaa

SEQ ID NO: 388539 - DNA, 549 bp, Oryza sativa
  unsure (1)..(549): unsure at all n locations
ccacgcgtccgaggttccggaggctcagtttgcgtcatggggaaaaactgcctcaaaagcagtgaggagatcatcgagattcatcaaaggtacaaggcagcaactggctacctaccaatcctattcgatggatcatccccaggcgctgccaaattcggctacctgaagatccgacgacgcccctcgtcaccaattgctgccaaatgaagagattggctttcagtttgtcgtgcaactcggtctgtcaatgagtttcatcaagaccgttgattgaaaacattgtgccatcctgtcaactgcaattgttcgttcattgattaattgctccattctggggcacagtcgttgcaattgtagatttcgtgtgacagccaattcgttgggttgctttcgtgtggaactgtgaaaatgtgaaatactggattcttctgaaaggttagtggtttggtactttggtttgtgggttagnncccaattggatccatgccaatgcaattattttgccgtattagaannatgctactactattcgcgaaaaaaaaaaaaaaa

SEQ ID NO: 388540 - DNA, 576 bp, Oryza sativa
ctcctctctttgcatgtgttgttgttgtggaggtaaacaagaggaggatagtgaagactgaagagaggagtagtactagtgaatagtgagtggtgagaggggagagagatggaagtggaggctcaccatggcttcctaccaccagcagcagggaggcagcacctttatggccatccccactatcaactttcaggagatgatgagtggtgggagtacatcccttgccccttctgctacattgaggtggaggttcatttcctttgtgaccatctccaggaggagcattgctttgacatgaaaaatgctgtgtgtccaatctgcgccgacaaccttgacaaggacactgatgaacatttcagggttcagcactcacatctactcaagaggaggaagtcttcttctttttcttgcaagccaagctcagcagcagctgacaagggatcatatgaagaggactcctactttgaagcaccctcacactgcatgggcaggccggctcctgattcctctcctgaccctcttctctcccagttcatctgctgcagcctcgctcctccggtcgattcgccgcgccgc

SEQ ID NO: 388541 - DNA, 531 bp, Oryza sativa
ccacgcgtccgcccacgcgtccgcctagagaccagccgcgcgcgcggggctgtgtgcctcttgctagctaagcaaggagatagccggagccatggcgaccatcgccgctgccgccgccgcccgcaccgccgtcgttggccggccgtcaggggtggctcagctgagagcgaggaggggtgagagggtgaggtgcggctactcctccagggacggcaaggaggcgacgcccgccgccgccgtgaaaggcgcgacgtcgatgctcgcggcggcggtgacggcgtcgtcgtcgtcggcgccggcggcgatggcgctggtggacgagcggatgtcgacggaggggaccgggctgagcctggggctgagcaacaacctgctggggcggatcctcctcggcgtgttcggactcatatgggcgctctacaccgtctacacctgcacgctcgacgaccaccacgagaccggcggcctctgcctctgacgccttgttcggttaatccgagaaagagattgacgaggggatcgagagaatat

SEQ ID NO: 388542 - DNA, 559 bp, Oryza sativa
ccacgcgtccgaccaccatacacgcctcgcccgaggagataagttttttttttttttttcaaaaaaaattcctcctctgcggcctcccctcaccgccgtccccgtcccgaccaccggaggccggcccgctccggcgagctgccgatacgcatggccgtcctcctccgcaccaccacctccgctacgaccgccacgagcggcggctcctcctcggcgacggcgctcctcgccaccacgttccgacgcggcggcaggcgcctcctcctcctccccgcgacacgcggttcggcgccgcgccgcgcggccttactcacggctcgcgcctcggcggagccgctggaggtctgcgccaaggcctccctcaccgtccccgaccgcctcggcgactgtcctttcacacagagagtgttgttgacaatagaggagaagcatcttccgtatgatataaaactagttgatctcgctaacaaacctgattggtttctgaaaattagcccagaaggtaaggtgcctattgtcaagcttgaggaacaatgggttgctgattctgatgttatta

SEQ ID NO: 388543 - DNA, 480 bp, Oryza sativa
  unsure (1)..(480): unsure at all n locations
ggacgcgtngnanatacaaatgcatgatttatcggcaatgcttctgtccacttgcaatagcgttccattacagggatatgaagaggaacttctgcaattagtgattcaaaatcttagagatgctagttcctgtataagcaaggttcaaaatatgagttgttcaaggaataacttatggatggcaatgcctgaacactcattagtagagaacgattcagaattgaagacctctatttcacaggctgttgctaagctcccagaggataagacgcttgatgatattgatgtctcgcaattgtcgatctacaaaaatttgtgggttgaagcagaagcatcagcatgtaagctcaaatatgagcttcaacttacccgtgtgaagcttgcagcaatggaaaatcacaataacacacaagttcctgttgacttatcaaaaggcaataaaatctttatctcaaccataccccataggtaaccacaaaa

SEQ ID NO: 388544 - DNA, 559 bp, Oryza sativa
tttacgcgtcggctcgcttcttcttcccactagccaaaagcacaaaccaccgagaaaacgcttctcagataaacatcatcaccatggcggcgtctcttgcctgcgctttcttcttcgacgccgagccggtgggcgagcagggcaggcacgcgctggacgcctgcgcgctctgcaccaagcagctcacgagggacagcgacatcttcatgtacaagggggacacgcccttctgcagcgaggagtgccgctacgagcagatgcagctcgacgcggtgtacgcgaggtcggccggacggaggcagcagcagcagtactccgggagggcggattcgcggcgcgggcaccgggaggaccaggaaggtgtccgtggcgagctaatcaagctgcgtcgataatataatgatcagctgagaagaattggcgttgaatccagacgagatttcaagagctaagccacgcatcaacatgcggcgacgagggagattgatttctccaagccgcgatgcctgacggcgccggagaagagtctgaggaagtccatccgcaagatgagaccttg

SEQ ID NO: 388545 - DNA, 776 bp, Oryza sativa
ccacgcgtccgcttctccgaagcacaagcaaaaaaaggttgcaaagccaagaaaagcttgggagattctcgatggcacggtccctcgcatgcgccttcttcttcgacgccgagccggtcggcgagaccgggcggcacgcgctggacgcctgcgcgctctgcaccaagccgctgcgccgcgatagcgacatcttcatgtacagaggggacacccccttctgcagcgaggagtgccgctacgagcagatgcacctcgacgccgcctgcgcgaggcaggccgcgagcgccaggcggaagcagcagcagcaggggcagcggagcaggcacgagaccgcgccggcggcgcccgtgtcccggaaggcgggggtgtccgtggcgagctgttgatgagctgcataccttaggtagacgagcgtgagcttgcaagatgtgatgaaggagttgttcttgctcatgtctggccggccgctgtgccgatggatggatctggtcggagtcgaagcagagaaaggacggatctgaggaagggactccgagattcaccaggcaccatggtttaatttaggccatgtgtgcttctcttttttttccccttttggttggctccttttgtatgaggagctgatctgagttggtgtgaagagcaattccgctgtaaatattcgaggcattccgagaagttctattgagccataattttttgagcagaatcatatttgtgtctactcttttaggagtatgaaacacccgtgacttttcataatttgagccctcatc

SEQ ID NO: 388546 - DNA, 1016 bp, Oryza sativa
tagggagagggttggagaggagaggagacacaggtgctgggaagaggcctgtggggatcaagaagatgaggaggtgggtcttggccattgccattcttgctgctgctgtatgcttcttccttggagctcaggcccaggaggtgcggcagggccaccagacagagaggatctcaggaagtgctggtgatgtgttggaagatgaccctgttgggaggcttaaggtctatgtctatgatctcccaagcaagtacaacaagaagctgctgaagaaggatcctaggtgcctgaaccacatgtttgccgctgagattttcatgcaccggttcctgttgtcaagcgctgtccgaacttttaatcccgaggaagctgattggttctacacaccggtgtacactacatgcgacctgactccctccggtcttcccttgcccttcaaatccccaagaatgatgcgcagcgcaattgagctgattgcaacaaattggccttactggaatagatcagagggggctgatcatttctttgttacaccacatgactttggcgcttgcttccactatcaggaagaaaaggcaattggacgtggaatcctcccattgcttcagcgtgccaccctggttcagacctttggacaaaagaaccatgtctgcttgaaggacggctcgatcaccattccgccatatgcacccccacagaaaatgcaggctcatcttattcccccagacacccctcggtctatcttggtatatttccgtggtctgttctacgataccagcaatgatcctgagggtggatactatgcaagaggtgcccgcgcgtcggtttgggagaatttcaagaacaacccgctgtttgacatctcaaccgatcacccacccacgtactacgaagatatgcagagatctgtgttctgcttgtgcccattgggctgggctccatggagccccagactggtggaagctgtggatttcggttgtattccggtgatcattgcagatgacattgacctccccttt

SEQ ID NO: 388547 - DNA, 531 bp, Oryza sativa
ggtcaccagaaaacaattacttcactttcaaaatctgcagattggtcacatttcctaacaggctccttggataagtctgctaagctatgggatacaagaactctgaccctgatcaagacatatgtcaccgagcgacctgttaatgctgttgacatttctcctcttcttgaccatgtggttatcggaggtggtcaagatgcgatgaatgtgactatgacagatcgtcgtgcgggaaaatttgaagcgaaattctttcacaagattttgcaagaggaaattggtggtgttaaaggccattttggaccaattaacgcgctggcatttaatcctgatggacggaggtaatattcttaatacatgtgtaatattatatgaatgctatatttatgttctaccaccgcacttatgttctcgattagctttttgtttcatattaccttgtgtgttttctgctcaatgattaagccatgttaatccatggcaatatgcgctattctgaatcatattaagatgtcatacacattatgagag

SEQ ID NO: 388548 - DNA, 625 bp, Oryza sativa
ctcctcttcttgaccatgtggttattggaggtggtcaagatgcgatgaatgtgactatgacagatcgtcgtgcaggaaaatttgaagcgaaattttttcacaagattttgcaagaggaaattggtggtgttaaaggccattttggaccaattaacgcgctggcatttaatcctgatgggcggagttttcgagtggtggtgaagatggatatgtaaggctgcaccattttgattctgactacttcaacatcaagagttaaacctagaagttctgaaactctgaggctgcacttgagaaaggccaaaggtataccttctggttgggcattgttgtttaatctccatcaatctccgtcgtgtggagagtctcaggtgcagtggtttagcaactgatggagtacttgtcggactttcttgttgcactggacatccagctttatagatgcttgagagattttgtacattcagcaatcgagggctccttatactgcaaaactagcttaatttgcttttcatcattcttggttcacttcttccatatatcaagttttgggcagatgatttgtctatacgaaggtgtggttcggttcacgttctaatcatgtgcatatgcctcaacttgggtg

SEQ ID NO: 388549 - DNA, 803 bp, Oryza sativa
ccacgcgtccgaggaaacttaacatttcgtgcttccaagatagtaaaaaagcaaacactggtatgctcgattcttttgagccacaagcctggacaaattctagatgctccaatggtagtccagaatgggatgccaataagattaattctaatttattcactgatggtcctttacttgggagcaaggagtccttagcttatcttgatcatctagctgctagtgcaaaattagcacattctccactctccttgtccccgcttagccctaaatttatgaacagaactaaggctacaggagctcaatgccgtacaatgagagatattgaacatcattttctagattcaagggaaaaagggggacccgatggaattagaatgctgagtgtgctccaagaaactaacatattacatgatgaatacaatgtcatgacccctaaaagaagttcatgcagaagatatcaaatctgggggtcctgaatccacccctacttctccccggggttggttatggtcggagtttgagtctcccagtacgacggtcactagttggctcctttgaggagtcccttctatctggccggctttcttatggaaaagaacaatcagataattgatggattcttagctgttctaaatattactggtggaaacttctctcctccaactcagaagctgccgttcgcagtaacaagcattgacgaggatagctccttattgcactattcttctattgatcttgctgggaggtcgtcagcaactaactgtagaaacccaaaactcgaaagaagcttaagccattaatga

SEQ ID NO: 388550 - DNA, 772 bp, Oryza sativa
tctgtgaagatcacttttcctgtttccctcaagcagcctggtccccggaatggagccatccagtgcttcattaaaagggataaatctacccaaacttacaacctatatctatgtcttagctcagctgtgctcgttgaaagtggcaagttccttttatcggcgaaaagatactcccgtgcaacctgtacagaatatacaatatttatgagtgctgacaatacatctaggtcaagcaacatgtacattggaaaattgaggtcaaatcttctcggaacaaagtttgtaatatatgatacccaacctccatgcaacacagccaatgtttcacagtcagggaaaacaagccgtaggttctactccaggaaggtgtcgccaaagaacccttccagcacctacagcatagctcaagtttcatatgaactgaatgtcttggggactcggggtcctaggcggatgaactgtgtgatgcactcaatccctgcctcatcgcttgaggctggtgggcactgtcccatgcccagccagacagtgtgcttgcacgctctcttgatgagtcatttggcagcatctccttttccaagtcatccattatggaccgctctatccgtttcagcagtagcagatattctgacatctcagtaggtggccccatggtcggaggccaggcattgggtgacagtgatgagtccaaggagaggccattgattctccgtaacaaggccccaagatggcacgagcagttgcagtgctggtgcctcaacttcaagggcag

SEQ ID NO: 388551 - DNA, 1441 bp, Oryza sativa
tccttattggcaatatcttttaatcattaatgggcaggaaaaagggtaggaataggttggcaaaacaggaactggtaaatctagcatgctgaatgctctgttccgtattgtggaactggaacgagggagaatattggttgatgattgtgacacttctaaatttggaatttgggacctacgaaaagtactaggaattataccacaggcacctgtcctattttcaggttctgttcgatttaatctggatccttttaatgagcacaatgatgcggatctctgggaagcgcttgaaagggctcatctaaaagatgtcataaggaggaatgctctgggactagatgctgaggtctctgaggctggtgaaaattttagcgttggacagcggcagctactgagtttagctcgtgcattgctgcggagggcaaagatacttgttcttgatgaggcaacagcagctgttgatgttcgaacagatgctcttatacagaagacaatcagggaagaattcaagagttgtacaatgcttataattgctcaccgcctgaacactgttattgactgtgacaggttgcttattctaagtgctgggaaggttttggagttcgactctcctgagaatcttttgagcaatgagcacagtgctttctccaagatggttcagagtacaggacctagcaatgcagagtacctgaagactcttgtatttggggatggtgaggagagggtgcgaaaggaagaaagcaagatgcaagatatccagaggaagtgggtagcatctaaccgatgggctgttgctgcgcagtttgcgcttgccgctagccttgcctcttcacacagtgaccttcttgcactggaggctgctgagggaaacaacatcctcaggaaaacaaaggatgcagtaatcactctacagaatgtcctcgaagggaagcacaacaccgaaattgatgatacactcgctcagtatgaggttccatctgataggtggtggtcatcgctatacaaagtcatggaaggacttgccatgatgagccgattgggtcgcaaccgtctacagcaaccaagttataattttgaaaacaacagttctattgactgggaccaaatgtagatgtgcaagcatgactgatccctgaagcccagctgtaggcttttccagcaggtgttaattcctggagacatgtaaattgtcaccagcacattggcgtgcatgtcgtaagtagatttaccgtcctgactccctccctaaaggtgaataacaggggagtttttctgttcttttttgcaacagcatgaccatattcttgttgtactgccgtcctcaaggacatcgtctgttgtgcaaaatcttattagcattgtacctgaaaattgaaattttgatggtcttgtgccaatgctagtgttctcttcaaaaatccagtgaatgtgtcaattaatt

SEQ ID NO: 388552 - DNA, 633 bp, Oryza sativa
ccacgcgtccggggaaacaacatcctcaggaaaacaaaggatgcagtaatcactctacagaatgtcctcgaagggaagcacaacaccgaaattgatgatacactcgctcagtatgaggttccatctgataggtggtggtcatcgctatacaaagtcatggaaggacttgccatgatgagccgattgggtcgcaaccgtctacagcaaccaagttataattttgaaaacaacagttctattgactgggaccaaatgtagatgtgcaagcatgactgatccctgaagccctgttgcagagtagatttggagctgtaggcttttccagcaggtgttaattcctggagacatgtaaattgtcaccagcacattggcgtgcatgtcgtaagtagatttaccgtcctgactccctccctaaaggtgaataacaggggagtttttctgttcttttttgcaacagcatgaccatattcttgttgtactgccgtcctcaaggacatcgtctgttgtgcaaaatcttattagcattgtacctgaaaattgaaattttgatggtcttgtgccaatgctagtgttctcttcaaaaatccaatgaatgtgtcaattaattaattaaaattatattaatttataatg

SEQ ID NO: 388553 - DNA, 850 bp, Oryza sativa
  unsure (1)..(850): unsure at all n locations
aaaaaggtgttgggcgtcaaaatggaatgaaagagcatattttagcactcgtaaggtgaagcttgatcatgactacctttccatggctggacttgtacaagaaattgtcaatgcagactatgcctttgtcattcatactactaacccatcatcgggagattcgtctgagatatatgctgaagtggtgaaagggcttggagaaacacttgtaggagcctatcctggtcgcgccatgagctttgtatgtaagaaaaacgaccttgactctcccaaggtactgggtttcccaagcaagccaattggtctcttcataaagagatcaatcatctttcgttcagattccaacggtgaggatttaggagggtatgctggagcaggactgtatgatagtgtccctatggatgaggaagatgaagtcatactcgactacaccaccgaccccctcattacagatcagggattccaaaaatctatcctctcgagcattgcacgggctggtcatgccattgaggagctttatgggtccccacaggatgttgagggtgcagtgaaggaagggaagctatacgtagtacagacaagaccacagatgtaatctatatgtatattttatagccaagtcaatcaggcaatgttgtagagtaagatatacgggccgtgggacatgtataacacgttacgccctttttttttattatttgctttcatactcacaatacactaatttatagggcttattttatcgccaattagtgtaatctgactatgatcataaataagcctcctaggctactgaaaaccattaaaggttattttgatcnnnnnnnnnnnnnnnnnnnnnnnnnnnnnn

SEQ ID NO: 388554 - DNA, 433 bp, Oryza sativa
ccacgcgtccgctggtgatgaaacagaaaaggctccattcagcttcttcgaccggaacgggaagtatatcgagtgccttctttctgttaacagaaaagtaaatgcagatggtgtcatcactggagtattttgtttcattcaagttcctagtcatgagctgcaacatgcactacatgtgcagcaagcctcacagcagaatgcactaacaaagttgaaagcttactcctacatgagacatgcaatcaacaaccctctctcaggtatgctttactctaggaaagcactgaagaacacaggtctgaatgaagagcagatgaaggaggtcaatgttgcagatagttgtcaccgccagctgaataaaatactttctgacttggatcaagatagcgtcatgaacaagtctagttgcttggatttggagatggttgagttt

SEQ ID NO: 388555 - DNA, 656 bp, Oryza sativa
ccacgcgtccgcccacgcgtccgttttttttttaaccgcgagagcgaggtgttattaccgctcctctgtgccgtttttcaccgcaccaagttttaaaccctctccgtgaaccctcacgaatggagggtccttattaaatttaccacaacaaatcaataaattaccacgccaccaattcctttttttttgcttttaacactagctaagaggagacgcgagatgggagagaccactgtaattaacacaagaacgaatcaagaaatggatcgatgctactagctttttcttgctaggaacatccagcgacgaacgatcgatgggcatgcatgcagcttgaaatgggcgaatttttctttcttggcatggagatgtatagctgctagcttgcatgaggaatcaatggagaaatatgccggaggaggaagagaattcttgaggttttaggtttttgagctttttgatggtgttgagatatggacgagccatggaggaggcgacaggtaggtagatacaaatggtacaagagatggaggaggaagaagaagaagaagccattgacgcgcatggaggtatgcatgtgtaggaaggagagagagtcaccggatggatggatggatcactggaccattgccaagaaagatccggtggtcgtcgtt

SEQ ID NO: 388556 - DNA, 731 bp, Oryza sativa
  unsure (1)..(731): unsure at all n locations
ccacgcgtaacgcgtgcgagattttccccatcgaaatctcgtcgcttcccccgggttcgattcgagtcttctctctcgcagcacaaagatggacgcaaacagacgccaaagtggaatccagcaattgttggctgcagagcaagaggctcagcaaatagtaaatgctgctagggctgcaaaatcggcaaggcttaggcaagcaaaagaggaggctgagagggaaatagctgaataccgtgcccagatggaggctgaatttcagaggaaggttgcagagagtagcggtgactctggtgcaaatgtcaagcgtcttgagcaggagacagcggaaaaaatcgcacaactcaagcagcaggctgcaagtatctcccctgaagtgattcagatgcttctgaggcatgtcaccactgtgaagaactaagggttgatggcttgctgctaggcgatttgccatacatctgatggcaaacttgtactgtttattttttgagagggtggtaagaataacttcgtctcttctagctgtaattccgtgttccgaataacggaataaactgcttctgttcatcagcagccatgtttcgtactttgaaaacctcggttcctgtctggtaaatattatcctttcatgtatcatttgaataaaataatgggagattctttttgtttattctcaaaaaaaaaaaaaggggcggccgcaccgcgtnggagctccagcttttgtcccttag

SEQ ID NO: 388557 - DNA, 512 bp, Oryza sativa
ctctcctctcctcctccccttccaccccacgcgcccggcacccacccacgcgccgcgccctaaccctaacccccacccgtcccctctcgctcgccatgtccgagcccgcgtcgcccccaccggccatgcccgaggacgccgcgccgccgcagccgcagccggagccggcggttccagcgggggaggaggccgccccgtctctggagaggaaggaggagttgctgccggtggaggagaagatctcggaattagatgaatcacagtcacagcttatggggagacttcggggactcaaggaggatttgctgaattggaggagcagtttagatacacaagtgacaaaatacaaaagcgaactctctgatatcaaaactgcgctgaatagcgaaattgaacagctgagatcagattttcaagaattgaggaccacccttaagaagcagcaggaagatgtatcacatagtttgaagaatttggggctacaagatgctactgacaatgatgggaacaaa

SEQ ID NO: 388558 - DNA, 402 bp, Oryza sativa
  unsure (1)..(402): unsure at all n locations
tggacgctctgctccgacttccgagcaaagccaagttgctcaccgactcacccgtagagctagctagccatggctgttgccgcaagagccgccgccgtggcgtgcctcctggtcgtaggcctcgcggccgtggcgggggtcgacggcgccacggcgagctccccggccccggcgccggccgtggactgcacggcggaggcgctgaagttggcggactgcctggactacgtgaccccggggaagacggcgccgagccggccgtcgaagctgtgctgcggggaggtgaagggcgcgctcaaggacagcgccgccgtgggctgcctgtgcgccgccttcacctccaagacgctgcccctcccgatcaacatcacccgcgccttgcacctccccgccgcctgcngg

SEQ ID NO: 388559 - DNA, 923 bp, Oryza sativa
ccacgcgtccgcccacgcgtccgccgccctctctctctctctctctctcctccgcatcaccaccaccgccgccgacgagctccggtcgccgccggcgagaggcgccgcgcgatccgggagatgccgccgctcacggggcccaagtccggggacgctctcttcggcagcgtcgagcgcgtcaacgcggagctgttcacgctcacgtatggggccatcgtgaggcagctgctcacggatctggaggaggtcgaggaggtcaacaagcagcttgatcagatgggctacaacattggaactcggttggttgatgagttcctggccaaatcaaatgtatcaaggtgtgttgacttcaaggagactgccgatgtcattgcaaagcttggattcaaaatgttcttgggtgtgactgcaactgtcaccaattgggatgctgagggtacaagctgcagctttgtattggaggacaatcctcttgtagactttgttgaacttcctgatacttgccaaggtcttcagtactgcaatgtgctaagtggagttattaggggtgcactggaaatggtgtccatgaagaccgaggttacatgggtccgtgatatgcttcgtggggatgatgcctacgagatgcgagtgaagcttaccaagcaagtcccagaggaatacccctacaaggatgatgactgacttgacaatttcgtgggtagtttctcagttctcacatgctgcctgtttgttcgtctggatttcccttcttttctttcctatgtgactctggttctggatcgacttggctggacgctacatgagatagctgtgcattatattctacacttgaccttttcacggcagcatcaagtaggtatggaattaattcacttcattgtccttaagattttaacatgctgatcaagtatgttacccgc

SEQ ID NO: 388560 - DNA, 1166 bp, Oryza sativa
  unsure (1)..(1166): unsure at all n locations
accgccacctccggtgccatgaacaagtacccgctcctccgccgacgccgcaggctgttcgtcatagccgtggactgctacggcgacgatggcagcgccagcaagaggatgctgcaggtgatccaggaggtgttcagggctgtccggtcggactcccagatgtccaggatctccgggttcgcgctgtcgacggcgatgccgctgccggagacgctcaagcttctgcagctgggcaagatcccaccgaccgacttcgacgcgctcatctgcggcagcggcagcgaggtgtactaccccagcacggcgcagtgtgtggacgccggggggaggctgcgccccgaccaggactacctgctgcacatcaaccaccggtggtctcacgacggcgccaagcagaccattgccaagctcgcgcacgacggatccggcaccaatgtcgaaccggacgtggagtcctgcaacccccactgtgtctccttcttcatcaaagaccccaataaggtgaggacgatcgatgagatgcgggagaggatgaggatgcgtggcctccgatgccatctcatgtactgcaggaatgcaacaaggcttcaagttgttcctcttctagcatcgaggtcacaagcactcaggtatcttttcgtacgctggggcctgtctgtgggaaacatgtatctgatcgtcggggagcacggcgacaccgatcacgaggagatgctgtcagggttacacaagacggtgatcatccgcggcgtcaccgagaagggctcggagcagctggtgaggagctcccgccctcgcctccgggaagatgttgtcccatccgagagccccttgattgctttcacaaagggtgatctgaaggccgatgagatcatgcgtgctctcaaggaggtcaccaaggctgccagtggcatgtaaattggttgcctgctgggaagcctaatattactctgaaagcctggaagaatcaggagtgccagcttgatgaagtctcctggctctttaactgaaagacaagactctttttctctccttaatttacagcataatcttatggaccactaccacgaacttaccttgcagtgagaaataattatgacactgctgatgctactgttggctcaaatgtttatgagctgattcagntatatgtattttttctttta

SEQ ID NO: 388561 - DNA, 417 bp, Oryza sativa
  unsure (1)..(417): unsure at all n locations
ccacgcgtccgatgggatgccactacttagaagctacgaaatcactttatagcatggcaaatgcatagtcaaaatcttcatcaggttggttatactgttaatttaaagcatggcattgatcactagcatttgtttgcagccgtcctctcttcccagctgacccagatgatcgccagctctatcctgtcggcttcgtcttactggatgtcatcgaccctaccacctactgcctctaagcctgtcagttccatcaaggttttctttgtctcctcttcctattctctatctgtgtgatggaataggacgaacaggttcagtaaaggggtcattttctatgcccgcgctgtcgagagctgtgacgcttgaagtggcggngtgatgctttgtgcttcttgaactctcgctatgtgtgcaaaa

SEQ ID NO: 388562 - DNA, 543 bp, Oryza sativa
cccaacaagcaaccctaatccatccatggcggttaatacttcgcgcgcatagatactaatcccatccgcgcgcggcctcaacatctcaacctccggccagcctcgcaatcctgctgctatctcggcggcggggaggaggtgatgagatcttcgggagcgcgtctcgcccggtcctaagatgcttgccggcggaggaagcagagttagcggcggcggcggcggcttcaacctcgcctcctacaagtacaaggaccccctcctcggacgcggcggccggagcttcctgttcggcaacacctggttcctcctctccacctacccggcgcgcctcctccacacagcggaccgccgcgcccccgccgccttcttcgcagccatcaaccggactccctgcgtgcgcacgcactgcacggggcagagcttgctgcagaggggcattgttatggctgcctgcggctatgcgtttcgacgagctgagctgggcgccgccaagcgccaaccttggaaggattcatctgtagggacccggatcttatgcctcgt

SEQ ID NO: 388563 - DNA, 573 bp, Oryza sativa
  unsure (1)..(573): unsure at all n locations
aggatttcctgaagaacagagacaatattgctgcattctgggacaaacttacgttggatcaggccaaaacaaattttttcccttgggcagatgtggttatagngggtgtcactggtccttccattttagcagcactgtccacatggatgtgtaagccggggtatgcttcattaccgctgccatatgccagagctggcaatcaacttctggacctaattgaaacaacagcttcaaggttacctgtatcatcgaatgaactatttagcatgcttgacgaagcaagtgagaatacgtttctctctactaacccaaccgcctgtatacaaaagtttatatttaacggggaggctgacaaagttgcacctgagttgaaaaatgctgttgcatgcactagttatatgcttgaacaaacactggtcgaagcatggtctgctgataaggctgctgaagcattaagatgccagaagttgctcgtggaggaagaggaagctgctcagaaaaggcaagctgaactgatagaaaggatacggatgaagaaactgaggctgaaagaacagagattgactgacttgt

SEQ ID NO: 388564 - DNA, 455 bp, Oryza sativa
ccacgcgtccgcccacgcgtccgcccacgcgtccgcccacgcgtccgccacgcggccgggggtgagttcaattatcgatccgactatggaggcagaggcgctggtagaggtggttcatcacgtggtggtgatgttggctaccagcgggttgaccactctgctggtcgtgctgctcgggcgccatcgggcactagtgccgttgcaaagtgagcgagttagttgctatgcctcggttgctatgcgtcggtgaaaaagtttgatattttcgtgggttggaattatcaaccattcgggaagagggtatgtgttgagttgggtttatgtgagagattatcagcaaaaatcgggtcataaatggaagcttcccttgttttgtggcaagggagagcagtggtgatattggtttactaattgtagcatatacgtctattcagaatttcagatgtagtcctggt

SEQ ID NO: 388565 - DNA, 610 bp, Oryza sativa
tcatctcatgcctcactcgcctagaacccctcctcctcctcccgatctccgaggcaatcctcctcgaattccccgcgccccgatctccccctgacgccaccctcctcctccgccccggatcgccccgcccgatctcgccgcggggtcgaatttccccttctcttgtctccgatcagggccgcctcgatcgaaggcggcgccgcgccgaccatcccaccttgtttggttgtaatttcttcttgtcgcgtgaggaggggggcgtggcggcgggggagagcgcgtgagcgggcgggagatgggggcgccgaagcagaggtggacggcggaggaggaggccgcgctcaaggcccgcgtggcgaagcacgggacggggaagtggaggaccatcctccgcgacccggaattcaccgcgctcctgcggctgagatccaatgttgacctcaaggataagtggcgcaacttgagtgtcactgctggaggatatggctcaagagagagggcaagggtagctttgaagggaggcaagcgagggcctaaggcccttgctgaaccgatggatgccgacgaaaagaaccctgacattgatgataatgcaatcattgatgcacaa

SEQ ID NO: 388566 - DNA, 653 bp, Oryza sativa
ccacgcgtccgccacgcgtccgccacgcgtccgctaggaataatagaactacatactgctatgattttccactggcatttgaaactgcagtgaggaagtcatggtcctctagtacctctggtgcttctaaaggtgttgaaaatgcccaatgttatgttaaagctacagagttggtatttgcggacaaacatgggtcatggggcactcctttagttcaaatggaccggcctgctgggctcaatgacattggtatggtagcttggaccttgaagatgtccactcctgaatttcctagtggtagggagattattgttgttgcaaatgatattacgttcagagctggatcatttggcccaagggaagatgcattttttgaagctgttaccaacctagcctgtgagaagaaacttcctcttatttatttggcagcaaattctggtgctcgaattggcatagcagatgaagtgaaatcttgcttccgtgttgcgtggtctgatgatggcagccctgaacgtgggtttcagtacatttatctaagcgaagaagactatgctcgtattggcacttctgtcatagcacataagatgcagctagacagtggtgaaattaggtggggtattgattctgttgtgggcaaggaagatggacttggt

SEQ ID NO: 388567 - DNA, 935 bp, Oryza sativa
gctcttacctgacatgtaataagcgagctgaccaacaaacccaaccccgacccgcgccgccgcccgccagcgaggtcgtcgccggcgtctaagctctcattcatggcggcggaggcggcctccggtggcggtggtgggtaccggatgctgccgcacgcggggttgccgatcggtttccggttccgacccaccgacgaggagctcctgctccactacctccgccgcaaggtcatgtcgcgccccctccccgccgacgtcatccccgtcgccgacctcgcccgcctccatccatgggaccttccaggcgagggagacggcgagaggtacttcttccacctgccggcgacgagctgctggcggaggggcggcggcgggagcaaggcgggcggcggcggcggcgcgtggagggcgtccgggaaggagaagctcgtcgtcgcgccgcgctgcggcaagcggcccgtcggcgccaagcggacgctcgtcttcttccgccgcggcggcgcccgcaccgactgggccatgcacgagtaccgcctcctccccgccgacgaccatccgccggaggccaacgacgtctgggtggtctgccgcgtattcaagaagaccaccacgctggctcaccgccgttcgccgccgtccatccgtggcgcgccacgccggcgagccgccgccgccgacgacgacgacatgccgtcctcgccgtcgtcctgcgtgacggacggcggcgacgcgggggaggagggagaagagagcagcagctgcagcgtcgtcgcttctaattgtccatgagatgatcagatgagagagggagaggttttaccgtgttagtgtttgactaggccgttaattaccatgctttcatgtcctaatcagcgcccttcttttgctctactaatgtcttttaattaattacccagttgttattcctaacccaa

SEQ ID NO: 388568 - DNA, 621 bp, Oryza sativa
atagataagataagatttcaatctccatgtttgggagatgcttactcacgtagccgtaggaccattttactttacacgagctaattacaatttacaatttgtcaacacgccgattttattctatcactacgaattatactgagagtatctagctatatgcacaggagaggacgaacacgaagagggagagagagaggaggaaaggatcgaatttaaaacgggtgatagctccgccgcaacccactgacgttggcgaacaacccgacgagctcttgcttgtagggaagatacgatctccgacggccgccgctgccgcgcgccgccgcccttgctgtaatagctccagccgtggcggccggcgtcgcccttgccgacgctgccgccgccgtttgcaccctcgcggccccggggcgggtgaggcgacggggcgccagccgccgggggcgttgaggaacacgaacttatacttgccgtggctgatgatactgctgtcgggccgtgaaaaagattcaacacacgacagaaacaaatccactatggcgtttacgtcaagcaatacgtagagcaactgccaatataggagttaaaacaagacgtaataaaaaaggatcgacgcgggaa

SEQ ID NO: 388569 - DNA, 554 bp, Oryza sativa
ttgacgcgtgggccgctcctctctctctctctctctctctcttttcctcgggaggtcgcccgccgcctcgcctgcgccgatctccatcgaactcggcgagcagccgaggcggacctgctgcctccttccgccgcaagcatcctcgccgccggatcataatattgctgattttgtatgatttgattcttgttgggtgagcccaagatgtctggaaatgacgataagtctcaggctgcagctgagagaataaaagcacaggccttatctgctgccaagggattgagcagaactcaagccgagcgagctgctgcagccgctgcccgcaatgtcaatgcttatgggcagaaagaagagggaccttcgcgctggcaggagaggaaggaggccaagagacagatgtatctgatgagtacagagaaggctgtgatactgggagtgaaaccaaaagctgcgcaaacttcttcttcttctggtggcgcatatacccagtgccagaagtgtttttagcctgggcactggacatacgagtgcaagaacgaacgggtctacatttc

SEQ ID NO: 388570 - DNA, 705 bp, Oryza sativa
gctccagttgcagagaaggggaagctgaggtcctgggttggtccaaatgggcaatactatcgtgagctgccttgccctagctgtcgaggtagaggatacactccttgcaaacagtgtgggatagacagatccagtttggactgccctatgtgcaatggcaagggcattagggagtgtgtgcaatgtgctggagagtgtgttatatggcaagaatctattgatgagcaaccatgggagaaaagttcgttccagttctcccttgaaagtaaaagaggatgatgaagtcgacaaactgggagataaagattaacacatcaaaaagatcaaggcgtacttacccatctccatcccctgaagttgccctgaagtttagcagttctttaagaagtctgaatgctaaaacaggactgtttactaagcatatgaagattatacaccaagaccccaaattgcatgcacaaagggttgctgcaatcaaaaaaacaaaaggtactgctgctgcaagaaagcatgcatctgaaactcaaaaggcattcttcagcaatcccgagaatcggcttaagagaagcattgccatgaaaggggtgaaattcttctgcagcaaatgtgggcaagaaggtcataggagcttctattgcccaacagtgagagaaatttcaagcagagcgcatttcagatgccgattatgtgggggaaagggtcata

SEQ ID NO: 388571 - DNA, 761 bp, Oryza sativa
gaccacaccagaagttcagaggcgagggtttcccacccgcgagaagtcggcgctcccctcttcctcctcctccctcctcctcggtgagccagtcatccaagctctgtcaagatgtctgacagccatgaaactgataggaacattgagatctggaagattaagaagctaatcaaggctctggagtcagctagaggaaatggcacaagcatgatctctcttattatgcctccacgtgaccagattgcgcgagtggctaagatgttgggtgatgaatatggtaccgcctcaaacatcaagagtagagtcaatcgtcagtctgttttggctgccattacctcagctcagcagaggctgaagctctataacaaagttcctccaaatggattggttctctacactggaaccattgttactgaagatgggaaggaaaagaaggttaccattgattttgaacccttcaagcctatcaatgtatcactgtatctttgtgataacaagttccacactgaagctttgaatgagctcttggaatctgatgacaagtttgggttcattgttatggatggtaatggtactctttttggcacactaagtggcaacacacgtgaggtgcttcacaaattcactgttgatctcccaaagaagcatggtagaggaggacaatcttgctttgcgttctgctcgtcttcggatggagaaacgccataattatgtccggaaaacagctgagcttgctactcagttcttcattaatcctgcta

SEQ ID NO: 388572 - DNA, 811 bp, Oryza sativa
  unsure (1)..(811): unsure at all n locations
cttcatccttgttcctggtgcaaggctcctaaattccaaactatagttccgtgcttccgtttcctagtggttttgtccacaagtggaactatgcagaagtgtgaagaaaacaagcagtcaggtagcagtgtagcacttgtcttccgcggcactaccacaatccatcaccagcgccaccttcccagctcccaagtcccaagtagccgcaataatggtaatcacggctctgcagcttctccctccaatccttggccttccggcgacggcgagaaatggctacgccgtcagaaggccacggatgatgactgtgacttgctgcaggcacaaccaggcaaccactgtacatgaatcaaggctaacaagcagtttatcccgtagagatgcactgtcatacatgtcgtctgcgttcatagcaacgcttctggtggctggtcctgcagaagcaagaacctccaggcaagagaacaagagaaaagtaagggagaagctggagaagctccgggagaaggcactaggcccagatgataaaaatggagccatccgtaagaaggaatctttggcgaacttgttgattcctcctaaattggtcgaggctaccatttgaaaagccattgtatcgatgtgaacttatattcagacgttaaggaacaataatatggaagtctgaatatatggtgctcctctgaactgttgttgccactcgccatcactcgtgttgaatttgatactagttggnntaatccattnaanaaaanaanggnggccnccccgntgggttccatttttttccntttagtntggtnnttcnggt

SEQ ID NO: 388573 - DNA, 809 bp, Oryza sativa
ccacgcgtccgccacgcgtccgcaccatgaatatgctacaccctttggcttgacttcagaatatgcccaccctgctgaaattttgttccttgggttcgccacaattgttggtccggccctcactggtccgcacttgttcactctatggctgtggatggtgttgagggtattggagacagttgaagctcacagtggataccatttcccatggagcccatcaaatttcttgccactgtatggaggctccgactttcatgactatcatcaccgtgtgctctacaccaaatcaggaaactacgcctctacttttgtttacatggactggctgtttggcacggacaaggattaccgcaatgccaaggctatcgaggagaaagacgggaagcatttgtaaattgtgggggctactctctttctctttgtccaaatcatcgaaacaagggtttgacatctcgcagtggtgatagcattgtgttcatgggaggaaataggtgtcctagccacaggtatctatctcctgagatgatcctacagtttagattttctttccccaaattcactatactatcatcatgagacctttgtgtttctggaggccaccatgatgtaatttgtcataagcttaatttgatgcgtgctattttgtggttcgcttggacgggggtacatgccatgacagatgtgaactattcgaatcataaagttgtcagattagtgagttaacgttgagatgaggtttactggttaaacgaaaggaatgtgctaagtgattaggctaaacaatgttttcaaactcacctaccatgagt

SEQ ID NO: 388574 - DNA, 405 bp, Oryza sativa
  unsure (1)..(405): unsure at all n locations
ccacgcgtccgcggacgcgtgggccgccgggaacaacgcnaggagcgaccggtcgatggtggtcgacgacgacgcggcgtcgcggccggatcacgaggagaagagccggagcagcaacgagctcgcggcgatgcaggcggagctgggccgcatgaacgaggagaaccagcggctccgggggatgctgacccaggtgaccaccagctaccaggcgctgcagatgcatctcgtcgcgctcatgcagcaaaggcctcaaatgatgcagcctccgacccagccggagccacctccgcctcaccaggatggcaaggccgagggcgcggtcgtgccgaggcaattcctcgatctgggcccgtcctccggcgccggcggcgaggcggcggaggagccgtccaactcgtcgac

SEQ ID NO: 388575 - DNA, 496 bp, Oryza sativa
ccacgcgtccgacctattgtgcctggagattatagtgacttggagctgaaaccagttggactattagaagtaaaacttgtggaagctagggacttgacgaacaaggatcttgtggggaagtctgacccttttgctgtgttatacattcggccattgcaagataaaatgaagaaaagcaaaacaataaataatgatttgaaccccatctggaatgagcactacgaatttgtggtcgaggacacatctacccagcgcttgactgtgaaaatttatgatgatgaaggactccaggcatctgagcttattggctgtgctagagtggacttgtctgatcttcagcctggaaaagtcaaagaagtttggttggaccttgtcaaggacctggaaatccagcgggataagaaacgtcgcgggcaggtacacctggagctcctgtattacccttttggtaaacaggaggggttccatccttttgcagtcagatcagtaactcttt

SEQ ID NO: 388576 - DNA, 611 bp, Oryza sativa
agcgtccgaatgatcctatattcctacaccatgcagatagtatccttccacagccattactcatatactggtttagagtattcttgacttgtcttcctcctccagaggatatgattgttcagggttagcggcgttgcttgtacattgtcccaaatttgagggattatacactgcacagggattaggggaggatttgcatgacaagggaatttggagagtatccagttgaccacatctaaaagctgtcttacatgtgatctttttctttagtgctacattgatacatttttattgcttcttaatgcaaccgacatgaacagggaaccttgaataagtgccatagctgtggctcactaatataactggcatatgatccatgacagcttgaaatataagtgtgaaggtggtggcaacactagcttttggatgcaataactttcaggatatgcgacattgatcccactaaccagatgatgccttctctttcttctctttattttttttcagggcacccaaggcagctacgatgatactaagccttggcctagacgacaatggctcatcgctcaccgtatgatgctgtagcaaatctatatgcccgactaatctct

SEQ ID NO: 388577 - DNA, 437 bp, Oryza sativa
tgaaggtttaacacgctccttagcaaaggagctgcctcctggattggcagcaattgcccttagccctggtgttgtgaatactgacatgcttaattcatgcttcggaagctcggcctcattataccaatcaactgaacaatgggcacccaaggcagctacgatgatactaagccttggcctagacgacaatggctcatcgctcaccgtatgatgctgtagcaaatctatatgccgaactaatctctgatgtattgagttgtagtccttaactttgaactgttgtgcaacattatgttgtagttagatcgaatcgacagtgcgctaatggctgtagctgtgcgtactgctggttcgctatctcacagtgattctgtaccgtatattgatgatgatgatgaaactgtgaatgagtattgatggcacgcgttatttctccc

SEQ ID NO: 388578 - DNA, 473 bp, Oryza sativa
  unsure (1)..(473): unsure at all n locations
ccacgcgtccgcacgcacgcgcctccactccgattactcaccgccggaacggcgaatggcagccccgcggcggccggcggcggcgaaggcgacggaatggaggaggggcggggaggacgagccggtggatggcggctgacgggagcaagcggtggggggagacgttcttcctgctctacacgcccttctggctcacgctctgcctcggcgtcgtcgtccccttcaagctctacgagaggttcacggagctggagtacctagttgttgggttggtgtccacaagtgcctgccttcgtcatcccgctcttcctcgtaggcaaggcagatagtgttagaaggttgaaagatccggtatttgggttaaggctaatatttggattataattttcagctatgttgggtaattacttttggacgcattacttctttcacagttctttggtgcatcatacactttcccatcatgganggat

SEQ ID NO: 388579 - DNA, 611 bp, Oryza sativa
aacccacacgacccacccacgcctaacagagaggcagacgccctcacaaactcatgcaaaacagagctggcaaggcagattttgttcagtttcatcgtcaagtcagtacatgatagcttaggttccactggagctgaatcggacagaaaaccaagtggaccagacgaatctggtaatgcacagagcagcaacaacataaacaagagtccgtcaggtcgcaaagagcttgacaaacagcagaaggccaccgtggtacctaagagtgagaaggatacagaaggatttacagtagtttcaaaacgtagaagaagcaagcagcactttgtgcatcccatacatggtctctattcccagcagtcaatttgcacttctgtcagctaaaggtcccggtagatctctttttgggagtcgccatattttggaagaaaggtatcgcttaattacttagcttagacgcttggtagcaaaagtcttaccctatccagatgatcgagagcatgtagtgaaactgtacaaagctttccgcaatgtcttttgtgtaataaattttgtaattttggggtagcagccgcatcagcgctgaataaaatatatttgtgtcatgtctagtt

SEQ ID NO: 388580 - DNA, 892 bp, Oryza sativa
cctcctctccaccttaatttcctctctctttctgttaattgagtgaattggtgttgctgcttcttcctcctccgatcaatcgatcatctcccatcggcggtggcagcagacccgatctttctgttaattcagaagatggaggggtacgacgagcgtgagttctggcagttcagcgaccagctccgcctccacaacttctccagcctctccatcgccgactccatctggtcctccccctcgcctgccgccgtcgatcatagcagcaacaagctcgccctcgccaacaacagcaacaacaacgccaccgccaagacctacttcaacaagtccgtcggcaggccggccaacaacaacttcaacttcaactacaacagcaacagcgtcgtcgtagatgcgttcaacgggaagaagaaggccgctgtcgacgctcctgctggaggaggaggaggaggcaggaacaacaacaagaagaacagcagcagcaacgacaacaagatgagcagcaggttgaagaagagccagctgccggcgtcggagtcggtgccaaaggaggaggcgatcgggggatacatattcgtgtgcaacaacgagacgatggaggagaatctcaagaggcagctgttcggcctgccatccaggtacagggactcggtgagggccatcaggcccggcctcccgctcttcctctacaactactccacccaccagcttcacggcatcttcgaggccaccagcttcggcggatccaacatcgatcccgccgcttgggaggacagcaagtgccccggcggcgagtccaggttcccagcgcaggttcgggtggccacgcgcaagatctgtgagccgctggaggaggacgccttagggcccgtgctgcaccactacgacggcc

SEQ ID NO: 388581 - DNA, 842 bp, Oryza sativa
ccacgcgtccgcccacgcgtccgcccacgcgtccgcttggtcgtctcgtcgtcatcgcctcgtcgcctcatctcgatctcgtcgattctatccgagcagtagactagggtttttgctgctcgagcggagagcagatggggaaggactccaagccgaaggacaaggggaagggcaagcaggctgccggctcgtccggcggcgatgacgccggcggcggcggcaagggaggcaagggcaagggcggcaagtccgccgacggcctcggcacctgcacctacgtcaaagctaggcacgtactgtgcgagaagcaagggaagatcaatgaagcttacaagaagttgcaggatggctggttggacaacggggacaaggtccctcctgccgagtttgcaaagatagcccaagaatactctgaatgtccatctggaaagaaaggtggagatcttggatggttcccgcgtggaaaaatggctggcccttttcaggatgttgcatttagcacacctgtgggagctactagcgcaccatttaagtcaacgcatgggtaccacttcatcctctgtgaaggaaggaagaactgatcagtctgcttcaggttggaacagaagcacctcagtctatacaagatgcagatgcctcgtgtctctgtcaacttaataagcactgaatgacgggcatccatattctatgtttagcctttctaatgctctctgaaagagtcttgaaaaactgtgctttctgtaagtaacctgtggtgtcaagcatgacatctatttgggatatgctgagatttagcatttgtctgtgtctcttatctaattggcatcttgttagctattgtt

SEQ ID NO: 388582 - DNA, 1000 bp, Oryza sativa
ctcaaagctcgttcccatgtcattgtcatgggtgctacaaaccggcccaacagcattgatcctgctcttcggaggtttggaaggtttgaccgggagattgacattggtgtccctgatgaagttgggcggcttgaagttcttcggattcacaccaaaaacatgaagctggctgaagatgttgacctggaacacattgccaaagacactcatgggtatgtgggtgctgatcttgctgctctttgcactgaggctgctctccaatgcatccgtgagaagatggatattatagatcttgaggatgagaccatagatgctgagatacttaactcgatggctgttacaaatgatcacttcaagactgcactagggacaagcaacccgtctgctctccgtgaaactgttgttgaagttccaaatgtctcttgggaggatattggtggactggagaatgtcaaacgggagctgcaggagactgtccaatatccagtggagcatcctgagaaatttgagaagtttggcatgtctccgtccaaaggtgttctgttctatggccctcctggctgtggtaagactttgttggccaaggcaattgctaacgagtgccaggctaacttcattagtgtcaagggacctgagctgcttaccatgtggtttggtgagagtgaggccaatgtgcgtgagatttttgacaaggctaggcagtcagctccttgtgtcctcttctttgatgagcttgactcaattgctacccagagaggaagcagtgttggtgatgccggaggtgctgctgatagagtgctgaaccagctgttgactgagatggacggcatgaacgcgaagaaaaccgtgttcattattggtgctactaacaggccagatatcattgaccctgccttgctaaggccagggcgtcttgatcagcttatctacattcctctgcctgatgatcaatctaggctccaaattttcaaagcttgcctcaggaagtcccctgtggcga

SEQ ID NO: 388583 - DNA, 1631 bp, Oryza sativa
tcgctctcctcctcctcctccatccattcccctcctcctcctcctcctcccatgcatgggaggccgtcgaggccattagcttcctcctcgtcgtcgtcgtcgtcccgcgtcttctccttcttcttggcgccgcgggttttcttgttcttggtggtggtggtggtcgtcgtcttcttgccgggtcggtcgtcttgctggtggctggagggcacggaggagttggaggaggagatggggtttgccggggactgctcgccggtcagcggtggcgggctcagtgaaaacggcaagttcagttatgggtatgcaagtgctcctgggaaaagggcttcaatggaggatttctacgagacgagaatcgatggtgttgatggagagaccattggattatttggcgtattcgacggccatggcggagctcgagcggctgaatatgtcaagcagcaccttttcagcaatttaattaagcatccaaagttcatcagtgatatcaagtccgctatcgctgaaacgtacaaccatacagattcagaatttctgaaagccgaaagtagtcacactagggatgctggctcaactgcctcaacagctattcttgtaggcgatcgcttgctggttgctaatgttggagattctagagcagttgtttggagaggcggggatgcaattgcagtttcaagggatcacaaacccgaccagtcagatgagagacaaagaattgaggacgctgggggcttcgtgatgtgggctgggacgtggcgtgttggtggtgttcttgctgtttctcgagcatttggtgataagctattgaagcagtatgtagttgctgatccagagatcaaggaggagattgtcgatagctcccttgagttcctcatccttgctagcgatggactttgggatgttgtaagtaacaaggaagctgttgacatggtgaggcctattcaggatcccgaacaggcagcgaagaggcttctccaggaggcgtaccaaaggggtagcgccgataacatcaccgttgttattgtccgctttttggagggaacaacgactggtggtggaccaagtagggaggccgccagcgaccaaaactcatagtttctcccaggcagcagcatggcttgttcctgtctgtcatatctgatgctcaaggtagacgattacagtggcggcaccacccaccatgctgccaagaactgacccggcccgaatttcgtcctcgctttcatgctcctggctgaccttaggtggtgatggtggtggtaatgtaggagcagaatggcgatggggccagtgttgttacatatgatatgatcgaaggtgtatcgtgtcttatatataactttgcaatgtagattctatgcttgtgttccatgctaggtctttttttttcttttttagcatcaaatgcatgtaatagaagtaaatttaaacgatttgaacgaagttatacactgcagtatgtaacgaaatctttgcgtttgtatttctgatgccatgagcattatgatttctcataaactccgagggtcaaaactccaaaatctgtctggttttgtggttatgcatcagcaggcaagcttgtatcaatacctctccttgcttgtggtcattgtggatttgtagggaag

SEQ ID NO: 388584 - DNA, 435 bp, Oryza sativa
ttcttttcctgctcctccatccattcccctcctcctccttctcctcccatgcatgggaggccgccgaggccattagcttcctcctcgtcgtcgtcgtcgtcccgcgtcttctccttcttcttggcgccgcgggttttcttgttcttggtggtggtggtggtcgtcgccttcttgccgggtcggtcgtctcgctggtggctggagggccacggaggagttggaggaggagatggggtttgccggggactgctcgccgggcagcggcggcggcctcaggtgcgttccttcgctcgatcttgggccttcttgacttgaccctcttttgggctgccgcggcctcctgttagggggaagatccaagaggaggaggaggaggaggagacggacgacaagtttttcatggcgcggtcaggggctttgcgcatgatttgattg

SEQ ID NO: 388585 - DNA, 459 bp, Oryza sativa
gagccccatctgtttcctcgcctccgggggtgcccccttagaaaggtttccccatttgttcgtgacctttgcaagaagcatggcctgccttatgcccccgcctcgttctggcaggctattgtgttcccatggaagccattgagggctgctgcattgcagcccaggaaagcccctagtggtgctgccccaaagaatttggtttggcaagctgtgaacactcatggatgaattggagcctgaggcaactgcttgtgtgcatgcaatcgcctcaatgcttcttaattgtgtagggagattgatctttttacctttacccgttggagttggatcggatttttcgtgttggcaagtgtcttgtcttttgcagctgaagagtgggtttatgcttcaattgtctacctgttcttcatgtattagattgaccgattctttgcattaattaaaaaaaaaaatgggcgg

SEQ ID NO: 388586 - DNA, 527 bp, Oryza sativa
caagaagcctgctcaaagctcaggaaacactatatttattaaaggctttgatacttctcttgacatacaccagatccggaattcccttgaagaacattttggctcgtgtggagagattacacgggtttcaattccaaaggattatgaaaccggtgcaagcaaagggatggcgtacatggattttgcggacaacggttccttgtcgaaagcatacgaactgaatggatctgacctcggtggatacagcttgtatgttgatgaagcgaggcctaggcccgataacaacagagagggtggcttcagcggtggaagagactttaacagcagtgggagaggaggaagacgtggtggacgtggtgatggtagccgtgggcgcggtgaccgtggacgtggtagaggctttggtaggggtgacaggggccatggtggacggggtacaccgttcaagcagagcgctggtacacctagtgcaggaaagaagacaacattcggtgacgacgactagacgaacaatttgagccgatttt

SEQ ID NO: 388587 - DNA, 535 bp, Oryza sativa
  unsure (1)..(535): unsure at all n locations
ccacgcgtccggcaagaaattgacacaaatagcatgaccatagtcaatgcctcaactatctcaagtccattcgcttcgttttctttcagtgccactgcttcttttgatgtacagagtccatcaaggatagaggtccaattcaaagagggaagctttcagccaccgaagatatcatcatcggtagacctacctgcagaggttgatatatttgggcagaagatcagcttgggcccagtccagcaggtgctgaaccctctgcagcaagcctttgcaagtattgcaggatccatttctgggcagccacccctcaagttacccatccctggcaacaacagggcccggtcttggctgctgacgacctacctagacaaggacctcaggatctccagaggtgatggaggtctcttcattcttgtcaaagagggtagccctctactagatcaattatagatataatatcatgtaacagattactacgataaagctacacatnntttacccnnnnnnnnnnnnnnnnnnnnnnnnnnnnnnnnnn

SEQ ID NO: 388588 - DNA, 443 bp, Oryza sativa
ggccaccaatcctcttcttcctctccggccgcctccttcctcaccatggcgctcgcgctgcgctgccccgccgctgcctcgccgtcgccagccaagagcaccttcccgccctcctcctccccgccggcgtcgaggctcccgaggaggccgcccgccagctgcaggtgctactactacggcgacggcgggggcttccgcaagaactacgaccacatccccaagcagttccgcgaggagaacctcaaagatggcctgatggataattacaagaatgttcctcaattcctttatggcttaagccctgctcagatcgaaatgtttatgaacgatgataatccatatgatcggcaatcacagagagttacagaggaaagcatttctgcttctaggagctatgatgaatttggcatgtacaacttgttccgtctgcatgaaggccctgc

SEQ ID NO: 388589 - DNA, 495 bp, Oryza sativa
ccacgcgtccggaaattgctttatgcgatcctagaaggccgtggatcatttgatctatcatgagttgatgataactaacatacagggctcaccattgaatgccctatcaattttatccagaattagtttctttgttgcccgtgtgacataataggttgaggctaccagccgctgtggacaaagcttgaaggacagagtctcccttcagacacagtgaaatcaagttccatatatgtggcgtgggcagcctcgcgagcaccgagaagaggagctctatcctttgccgtacatgtaaataaagaaaataaaagaaagggggcaatagtagtttagcatatttgtcgaaagaaggattgattcgttggtgaaatccctttgcctgtgtatctggaatgttattactttgctattattatgttgttaaccatcatgtgtacatgtgtgatcgataatatcgtactgtttttgtactaataaatgtggtgtagtgctagt

SEQ ID NO: 388590 - DNA, 971 bp, Oryza sativa
  unsure (1)..(971): unsure at all n locations
ccacgcgtccgctcgatctctgcctcctccccccaccgccggagaaggtcgccgccggcgagcgagcgcgcccgccggagttgtagccgcctctctcccccccgcggcagcctgacgccttcacgcagcgtgatctccttccccccctaccgctggcggggatccgtgctctgtcggtcggttcagttggtggactggtgaactgaaacttattgcttggtgctagtgtgatggcgtacgagattagcgagatcaaaaaaattggcataggcctggtgggctttggcatcctattctcattctttggcgttatccttttctttgataggggcttgttggcgttgggtaatattttcttcttgactggaatcggcttgttgcttggttggcaatctatgtggcagcttttcacaaagaaggcaaacattaagggatctgttcctttcttccttggtctgtttcttctctttgtccgatggcctgttgctggcataataatggagctatatggatcttttgttctcttcagtggttatggacctcctatccaggccttcctataccagattccagtcattggatggattctgcaatacccattccagctgtttggtcagttcaggcgtaaacgtgcatgacaactcacggcagaaattacccttcgtacgggagcatattttgtgatgttaatacggaaacctgctgtgtaccatctgccacgatgcagtttaattcttgtgtgcatattcatactttcgcctttctaatctggagtttatctggcttttgctcattttgctaactggcagtagtttagtgttcatatatagacgatgtagaggcttcaaatgattgttgctagaaatttgggatctgggtttagcaaaacatgtggatcttttagcctatttctaacaaattgtgagccagtaactattgcttgnnnnnnnnnnnnnnnnnnnnnnnnnnnn

SEQ ID NO: 388591 - DNA, 673 bp, Oryza sativa
  unsure (1)..(673): unsure at all n locations
ccacgcgtccgcgaggccaagaagacgtggtagcagagtctgacaagagcacgtctcgagcagatggaactgcggcggcggcggcggcggcggcgccgctgccgcctgtgtccagccagcggctgcggtggtgggcggtggtccttgccaacatcgtgttcgtcctcggcgggcagagcgtggccacgctcctcggccggatttactacgaccagggcggcggcagcttgtggctggcgacggtggtgcagtcctgcggcgcgccgctcgccgtcccactgctgctctacttccggcggccagaggctccccggtggcacgtccgccgctgctcaagatcgctgccatctacgccggccttggcgtcctcctcgccggcgacaacctgatgtactcctacgcgctcctctacctgccgctgtcgacgtactccctcgtctgcgccacccagctctgcttcaacgacgtcttctcctacttcctcaacaaggagaggttcaccgcgctcgtgctcaactccgtcgtgctgctcaccttcttcggccgcggtcgtcggcgtgagcaactcctcggaggagaccaacagcagcgtcccggaggcaaagttcgcggtggggttcgtcctggcggtgtcggcgtcggcggcgntcgcctgatcctgtccttatgaagt

SEQ ID NO: 388592 - DNA, 582 bp, Oryza sativa
cgcagaaaagtcacaagatataccatcaagaccattgatgatgacaccccaagaaaagattgaaaagcttaggcgtcgacagcaaatgcaagcactgatagctattcagcagcagcagcagcagtttggtcaagatggttctggcagcgataccatggtacctcaagcgtactcaccaaagagcaaaaatccagattccttagggagttctgttgtcatagatgataatgcaaataaagttttctcactagagctgattccaactggccatgaagagattcagaagagttctgggattcctgatgacccctttatagaagaaaaaatatattatcagcttcaagatgctcttgcgaagttggataccagaactccgcgttgtattcgagacagtttactccgtttggcccatagtgtctcagagagacaaattactagtgacagaagtagtgctaaccagagttataaagatgatgatgaagtttcagaagacacatctaaaagaagatctccagcaagtgaagcagaaacaaacacaaatccaatcgaccgcattgtggcacatttactgtttcataagcc

SEQ ID NO: 388593 - DNA, 465 bp, Oryza sativa
ccacgcgtccgatagaatggacctgcttagagctgttattacgggaccagcaggcactccctatcatgatggtctcttcttctttgacatttacttccctcctcattatccccgtgtgcccccactggtgaactatcgggctggtggggtgcggcttatatccaaacttctatgcttgcgggaaggtgtgccttagcctgttgaacacctcgtctggtagtggatgtgagagggggagtccttcaaactcaacaatgctacaagtcctggtctcagttcaggctttggtgttgaatgccaaaccttatttcaatgagcctggatatgccatgcatgctaatacacctcatggcgagaagagttcattaacttataatgaagatactttcctgctatcctgcaagacaatgctatattctctgcgaaatccaccaaagctttttgaggttttatcgccggtcattt

SEQ ID NO: 388594 - DNA, 587 bp, Oryza sativa
  unsure (1)..(587): unsure at all n locations
gtcatcanctagttatcactgcaaaggacattcctaccggtggagaaaatattggatcatgcttcccaatgcttggagatgaagcgcttttcgttcatcctgtttctgaatttgccggccagaatattggtgttgtgattgctgaaacacaaaagtatgcctatatggcggcgaagcaagctgggatcgattatagtcccgaaaatctccagccaccaattctgacaatagaagatgctggccagcataacagctacttcccaggtcccccatttttagctcctacgccaattggtgacttcaaccaagctatgtctgaagctgatcacaagatcatagatggggaggtgaaacttgaatcccagtactatttctacatggagacacagacggccttagctatccctgatgaagataactgtataaccctctatgtgtcggcgcaactacctgagattactcaaaatactgttgcgaggtgccttggcattccatatcacaatgtccgtatcatcaccagaagagttggaggaggttttggtggaaaggcaatgaaagcaattcatgttgccgctgcatgttgctgt

SEQ ID NO: 388595 - DNA, 630 bp, Oryza sativa
ccacgcgatccctcccctccaccgtctccgcctctctcgctcgcgccgccggccgccggcgatcctcccgccggagcacgctcgcctgacctggctgcctccgccgcttcgaatcgaagcccgcagctccccctccctctcttcctctccagacagtcccctactcccctctgctgcactggacttggggtggggtggagcgggagatccatccaagatagctcggagtgagtgatttccccttttttctgaaggttgtagaagcttggaggatgccgaggcgggagggtggtcgctctcgctccgccgcctacctcgtcctcttcgcttcctgccttttagctgttgcggcggcatcacaccaggaatttcatgaagctgctggatccagaactcttcttatgtcacatgaacacacaaatcaagtgcattgctcaagggaaaagaggccgtgcagcttggaaagctattgatgagtatttgatcccctttgtggaaaaagagaaatatgaactcccaagcaaatgtagacttatcctggtaatgacatggtttgggaaaccggagcagcataacattcactttgatataaatgaatggcgctgtgggtttctgtcaagaaaggccttc

SEQ ID NO: 388596 - DNA, 411 bp, Oryza sativa
ccacgcgttcggccacgcgttcggccacgcgttcgaccggcaccggtcggcatggctgcggtcgccaacgaccggcacaaccctccccctccttccctcccctcatgccttcgccgtgcccgcaatgggctcgctgcccttcctccggcgccgaatgcgctcccgtcgcctcgccgctgtccagcaggatgcggccgtctggacccccgcccccgtctcctccttcggcccagccaccgccgacggctcgctcgtccacttctccgtggacctctccgacgctaccgacctcgccgcatcctacaccacgccggggcagtatctcctaatccgcgtccccggcgaggatgagctcaaaccggcgttcatggccatcggctcgccgccttggggtgccgcgttcgagttctt

SEQ ID NO: 388597 - DNA, 476 bp, Oryza sativa
ccacgcgtccgaaaacatggaccccaatgaacgtcacgactttaaaagctccacggtaccgactgtgacatattatacccacagatgacgatgaaatttggtggagcttttggtgaagaaaaagcaattggaggacgagaagcagggaatgattccatcgaatgtttgaagcatttgttttggttttctgttttcagatttcttgcaagcaaatttaaccatagcatcacaaatgcctagcccttcgatggaaatttagatgttttagtagtttaaagtgcagctataccttttcattgtatttgatttgcgcaagtaccagaactacctgaacaagtggaactctcattattaggagttttgttgtaattatgcccaaagacaaatgattgtgctataactatcactactagcaaatgtggtagtttgtgtctgatgacttttgctacagatattaatgaacattgattttcact

SEQ ID NO: 388598 - DNA, 877 bp, Oryza sativa
ccacgcgtccgcgctgctcaacctctcgctcgaggagcggaaccggtcggccatcacggcggcgggggccatcaagccgctcgtgtacgcgctgcggacgggcaccgcgtcggccaagcagaacgccgcgtgcgcgctgctcagcctctcgggcatcgaggagaaccgcgccaccatcggcgcgtgcggcgccatccctcccctcgtcgcgctgctctccgcgggctccacccgcggcaagaaggacgcgctcaccacgctctaccggctctgctcggcgcgccggaacaaggagcgcgcggtcagcgccggcgccgtcgtgccgctcatccacctcgtcggcgagcgtggcagcgggacgtcggagaaaggcaatggtggtcctcgccagcctcgcgggcatcgtcgagggccgcgacgccgtggtggaggctggcgggataccggcgcttgtcgagaccatcgaggacggcccggcgagggagagggagttcgccgtggtggcgctgctgcagctctgctccgagtgcccccgcaaccgcgcgcttcttgtccgtgagggcgccatcccaccgcttgtcgcgctctcgcagtccggctctgcccgtgccaagcacaaggctgaaactttgcttgggtatctccgcgagcaacggcaaggaggtggtggctgcagggttgaacccgtggcagcttcgagcttggccaggtaatgctgtaatcatgtggtcgcagtatgcttcgctcttatttaacctcgtgtgctctgttcttggagaatggagtagctgtgtaaggaggggtagagatgatcatctgtaaataacggttgatggctttggtttggtaatgtccccacaaatgtggtttgcgagtg

SEQ ID NO: 388599 - DNA, 636 bp, Oryza sativa
ccacgcgtccgatctttttgacccatcgaaagatatgctatcacatcctggcgttgcaaggccacctgcaaaaggtaggggcctgaacaaactacttactggctattggcctacaattacaaaccaagagctacagctaatctctggagattcaaattccaccatcctccccctgttcgagaaggttctaagcgccagtgatgcaggccccatagggcgccttgttctaccaaaagcctgtgcggaggcatattcccctccaatttctcagccagaaggtcgtcctttgacaattcaagacgcaaaaggcaaagaatggcattttcagttcagattctggccaaataacaacagcagaatgtatgtcttggagggggttacaccatgcatacaatcattacaattacaggctggtgatacagtgacttttagtcggatagaacctggagggaaacttgttatgggcttccggaaggccacaaacactgtcagtttgccagactcacagatttcagctattgccaacggttccattcttggggatacattattttctagtacaaatgagaatttagcaatagtaagtggttatttagggattcttcagtcaataaagggggctgcagatcttcatac

SEQ ID NO: 388600 - DNA, 591 bp, Oryza sativa
ccacgcgtccgctccagtctgggattgaactcatggggaaacatgtcactgtgccggggagaagcaaagttgttgggttgcccacttctttacttttacagagacaccatgccactgttagtattatccatgctttcacaacaaatccagaagagattacccgtcaatctgatattgtgatctcagctgctggagtggccaatcttgtaagaggaagctggttgaagaaaggtgcagttgtgatcgatgttggaacaaacccaattgaggatccaaccagtgattacggctatcgattaactggagatgtctgcttcgaagaagctgtgaagttggcctctgctataactccagttcctggtggtgtgggaccggtgaccattgcgatgcttcttgcgaatacacttgactcagcgaaactagcttacggcttagctactgaatcccctgaattgtaatcttgcttcactttgcctttgtaaattacttttttttcccctttttatcgctcgttgctctcacttttggctgtttgagagctgggatgtaagtgtaacatacattttgctgaataaatattgtatgattagc

SEQ ID NO: 388601 - DNA, 1186 bp, Oryza sativa
cttagaacgtgaagaacattcttatgattcctacgatttctgatgttagcacagtggaggaatggagggtggtagccaaagatattgtggcacgaaaaggagaattaggttaccgtgctacaattgttgattggcctggtctgggttattcagacaggccatcactgaactacaatgctgatgtgatggagaattttctggttcagttaattaattcaccaaatagtcctgtggcaaatacagatgatgaagtggtagtagttggaggaggtcatgcagcaacaattgcagtccgtgcggctgggaagggccttataaggccatctggcattgctgcagttgcacctacttgggctggaccccttcccattgtatttggccgaggttctgatatggagacaaggtatgggcttcggcgagggaccctcagggccccggctattggctggatgatgtacaatgttctggggagcaacgagaagtccatccaagtcccagtacaagtctcacgtttatgccaaccctgagaacgtgactccaaatatcgtggaaagtcgctacgagttaaccaaaaggaaaggtgcacggtttgtcccggctgcattcttgacaggccttcttgaccctgtccaaacaagggaagaattccttcagctgtttgccaagttggacggtgacgctccagttctggttgcatcgaccgtgaatgccccgaagaggtcgaaggctgagatggcggctcccgcacgcgccaaaggcgtcgaacaaaattcgtggaggttccaggtgcccttctgccgcaggaggaattcccatcaccagtcgcggaggaactctacagctttctgaaggaatcattctcgtcaggtagatgaatgtgcagttacgacaactacggcagggtcaaattcaacaacatcctatactcatactgtactagagcttgtagtaacagaagcagcagcatcattcctgtctgggtgccacatttccaagcttggcaaaccaaccacaattccatatatacagagagtgtgtgcaaagcatattgccctgatcaataattgcagctcaccatcatgctcctcagcttatggtggttccgcggttgcccgaatctctgttctattccctgacccctctcatccatggaaggaagtacagcccacacatccatgacatttgg

SEQ ID NO: 388602 - DNA, 1073 bp, Oryza sativa
tagttgttaatattattatcttcatcctgggtcccacacgcataggcagagagcaatcataacttgggtcaaagcgattaaccagccgaagcaaacaccaacaccaaaaaggggaaagcaagcaaatcgcaagcaatcgcgcggcgtcgccgactcgccggcgggaattccaccgacgagcaatccagccccccaatcccgccgccgcaccaccgcgcatacgatccgccaggaaggaaggaatggcgtcgtcttcggatccatgggtgagggagtacagcgaggcgtccaggctcgcggatgacgtcacctccatgatcgccgataggggttcgctcccgcagtcggggccggagatcatgcgccacacctcggccattcggaggaagataaccatcctcgggactaggctcgatagcctcgaggcctttgcttgtccagggattccttccaagtccatcacggacaaggagttgcataagcgacaagacatgctttcaaatctgaaatctagagcaaagcagatggctacaagtttcaacatgtcaaactttgcaaacagggaggatttgcttggtcagagtaagaaagcagctgatgatatgagtagagtagctggtttggataaccaaggaatcgtttcacttccagaggccaagttatgaaagaacaagatgagggtcttgagaagctggaagagacagtactgagcacaaaacatattgctctagcagtcaatgaagaacttaccctgcatacaagattgattgatgatttggatgattatgttgatgttacaaactcacgtcttcagcgcgtgcaaaagaggcttgctattctgaataagcgcgtcaaaggtggctgctcgtgcatggccctgctgatatctgtcgttgctatagtgtttcttgcggtcattgcttggcttctcatcaagcacctgtaacctgtgtctaactcaaatcagtttgaaatgtgcagtctttcaaagatgtggatgctcccatctaaaaaaaaaagaattaaccaaaaaataatctaacaacgagacactttaaaaaaacatgaaaatt

SEQ ID NO: 388603 - DNA, 819 bp, Oryza sativa
agaacatgatctgcgtcttcgagcgctacgccggcgacatcgcgtggcgacactccgagagccccatcaccggcatggacataagggagtcgcggccgaaggtgacgctggtggcgcgcatggcggcgtcggtggccaactacgactatatcgtcgactgggagttccagatggacggcctcgttcgcatcaaggttgggctaagtgggatcctcatggtgaagggcacccagtactcccacatgaaccaggtccatcaaaatgacaatatgtacggcacccttctgtctgagaacgttattggcgtcatccatgaccactttgtcactttccggctcgacatggacattgacggcgccgacaactccttcgtcaaggtggcgatggcacgacagaacaccggcgccggcgaatcccctcgtaagagctacctgaaggctacccgacatgtcgcaaggacggagaaagatgcccaggtccgcctgaagctatatgagccatccgagttccacattgtcaaccccatgaagaagacacgagttgggaaccctgttggttataaggctgtcccagccggtactgcagctagcctgttggatccaaaggacccacctcataagaggggtgcattcacaaataatcagatttgggcagacaccctacaacaaaacagaggaatgggctggtggtctatttgtctaccatagcaaaggggaagacacacttgcatcttggtccgaaagggaccgtccgatcgaaaacaaggacctgatgctgtggtacacgctggggtttcaccatgtaccgtgccaggaggac

SEQ ID NO: 388604 - DNA, 1677 bp, Oryza sativa
  unsure (1)..(1677): unsure at all n locations
gcttgatgaggtcgtcagtgtttggaagagtataaagcagaaggctcagaaagaccaggctgaagcaggaaaatcagataacaaagaagcngaggggggttcgaaaggtgagggggtatcttccaacccacaggagtctactgccaatgctgcaccagagatttctgctgctgagaaacaagagctccagaataagatggcaaaacttatggccatgttggatgaggtggaccgaaagtacaaacactattatcatcaaatgcaaattgtagtctcatcttttgatatggttgctgggtctggagctgccaagccttatactgcagtggcccttcagacaatctcaaaacatttcagatgtctgaaagatgctatcaacgatcagatcaatgttatccggaagaaactcggagaggaggagagttcatctggcaaagagggaaaattaacgcgcctccgttatattgaccagcaattaagacaacagcgcgctttccagcagtatggtttgttacagcaaaatgcttggaggccacagaggggactgcccgaaaactcagtttcaattcttcgtgcttggctttttgaacacttccttcacccgtatccaaaagattcagaaaagctgatgctagcgagacaaactggcttaacaagaagtcagatttcaaattggttcataaatgcccgtgtccgcctgtggaaaccgatgatcgaagacatgtataaagaagagattggggaggcggatctcgactcgaactcctcctccgacaacgtaccaaggagcaaggacaaaatagcaacatctgaagataaggaagatctgaaaagctctatgagccagacttatcaaccaagccaattaggtgaatccaaagccaacatcgggatgatgagccttggtggggcaccagccggcttccacaacgaaggcaaccaggatgacagcttcatgaacctaatgctgaaggaccaaaggccgggcgaagccgaaggcagcctcctccatgatgccgtcgcccatcattccgatgagaacgctcggttcatggcttaccatttgtcggggctcggaagatacgggaacagcaatgtgtcattgacacttggcttacagcatcctgacaacaggctttcggtacagaacactcatcagccaggtttcgccggtgctggagaagaaatttacaactccaccgcttctctcggtgtcgctgcagcttcctcttcggactacgaatccacgaaccaaatagatcaaaggcaacggttcgaaccatcgcctctaatgcatgattttgtggcctaagatgctcaaaataccaaaaatacatggaggcaagatttgcctggggggagcatttgtaatttgtagtgccagaataacatgcctcagaaagcatggaaattgttagctgtagttgcatttggtacagaagaggggggtatagcatgaaatgtaatataattaagtttagcaggtgggggtttatagggggtaaagaatcctgtaaaaatggaatacatcatacatgtaaaagattatgattttcagaaccattctgtaaaaaaaaacacacctgtaatgactacttatcatccaggtatatgttgttcagcctattgacnnnnnnnnnnnnnnnnnnnnnnnnnnnnnnnnnnnnnnnnnnnnnn

SEQ ID NO: 388605 - DNA, 1056 bp, Oryza sativa
tggaatcgaccatcaaattgctcaactaggaccagagcttgcatctactcttgtaattgttatttctaagagtggaggcacacctgaaacccggaatggtctgcttgaagtgcaaaaagccttccgagatgctgggctggatttctcgaaacagggagttgcagttactcaagaaaattctctgttagacaacactgccagaatagagggatggttagctagatttcccatgtttgactgggttggtggaagaacatcagaaatgtcagctgtcggattgcttccagctgcattacagggtatcgatatcaaagaaatgttagttggcgcaacactaatggatgaggaaaccaggaatactgtggttaaggaaaatccaccagccttacttgctttgcgctggtattgggcatcggaaggaataggaaatacggatatggttgtactcccgtacaaggatagtttgctacttttgagtagatatttgcaacagcttgtcatggaatctcttgggaaagaatttgacctgggtggcaatcgggttaatcaaggtctaactgtgcatggcaacaaaggaagcaccgatcagcatgcctacattcagcagctgagagaaggtgtacacaacttcttcgttacttttattgaggttttgcgtgataggcctcctggtcatgattgggagcttgaacctggagttacatgtggtgactatttgttcgggatgttgcagggaacccgttctgctctttattctaatgaccgagaatccatctccgttactgtgcaagaagttactcctagggctgttggagcgctggttgctctatatgaacgtgctgtggggatttatgcttctttagtaaatatcaatgcctatcatcagcctggtgttgaggctgggaaaaaggcagcacgtgaagtgttggcacttcagaagagggtgctgactgttctgaatgaggccagctgcaaggatcctgccgagccgttgacgctggatcaaatagcagagcgctgtcattgccctgaagatattgagatgatatacaaaat

SEQ ID NO: 388606 - DNA, 727 bp, Oryza sativa
ccacgcgtccgcaacaatgttgatgcttttggtatatctgttgagacatgcctaactgctctagctaccaatccaaatttcacaggtatagctatcgtgcgcacatattcaccagatcattatgaaggtggggcttggaataccggtggatcatgcactggaaagactaagcccttggatgtggtggtgaggaatggattcacggacaccatgtatggaaagcaggtttcagggttcacaaaagcagtgcagaattctgcgaaacagtgggcccaggtggaaatcggcgggcatcactgagccctttgccctgaggcctgatgggcatcctggtccatatagaagtactgacccaaacaagaagacgcaaagaggtccagatggaaggcctccacctcaggattgcctacattggtgcatgccaggacctgtagatacatggaatgagatgttgctagagaccatacgaagagagttcgagggagtgagaagctgaataaaaacactcattggctgctcgatttctatcatgggatacgacctgcaaaaactaattaagcttctagcattggtgtatacctcattacatatcgtgttgttggtctaccacagatctgatggaaatatagcttaaggagggacaaaaaaacaaattgtaggcatgtatgtcaacagtcgggatagaagtacagaggggtagacagttagagagagaggttatgatgga

SEQ ID NO: 388607 - DNA, 1776 bp, Oryza sativa
  unsure (1)..(1776): unsure at all n locations
gcccgcacccncacacacatcgctcggtcgaaggaggaggttctagaaacttctggaagcggcggaggtgtggggagagagagagagagagagagagagagagagaggcagagagccatggcgcggaagaagatccgggagtacgactccaagcgcctcctaagggagcacctcaagcgcctcgccgccatcgacctccacatcctctccgcccaggtcacggaatcaactgatttcacagagctcgtcaaccaagagccatggctctcgtctatgaagttggttgtgaaacccgacatgctgtttggcaaacgtgggaagagtggccttgtggccctcaacctagatcttgctcaagtccgccaattcgtcaaagagcggttgggagttgaggttgagatgggtggctgcaaggctcctattacaacattcatagttgagccatttgttccacatgatcaagagtactatctttctattgtatcagagaggcttggttccaccattagcttctcggagtgtggaggtattgagatcgaggagaactgggataaggtcaagacagtttttcttcccaccgagaaagcaatgacacctgatgcgtgtgctccattgattgccaccctaccgttagaggttcggacaaaaataggtgatttcatcagaggtgtatattctgttttccaagacttggatttctcattccttgagatgaatccgttcaccatggtgaatggggaaccatatcctctagacatgagaggagaattggacgacacagctgcctttaagaactttaagaagtggggaaacattcagttccctctgcctttcggaagagtcctcagcccctctgaaagctttatccatgaactggatgagaagacaagctcatcgctcaaattcacagtcctgaacccgaaagggcgcatttggacaatggttgcaggtggtggtgctagtgtcatatatgctgatactgttggagatttgggatatgcgtcagagcttggaaattatgcagaatacagcggcgctcccaacgaggaggaggttctgcagtatgctagagtggttttggattgtgccactgctgatcctgatggccgtaagagagctcttctcattggaggtggtatagcgaacttcactgatgtcgctgctacattcagtggcatcattcgagctttaagagagaaggaatccaaattgaaggctgcacggatgaacatttacgttcggagaggtggtccaaactaccaaactggccttgccaaaatgcgtacactaggtgcagaacttggtgttccaattgaggtatatggaccagaggcaacaatgactggaatctgcaagcaagccattgattgcatcatggctgaagcataattcagacaactatttgcgctgttcccagcttgagtccattttgtttcagaaattgtcagtgtgaggtgttgcctttctctctgagggaatgtgtgctgttgttggtgtaaaacaaaacaaagaaagatcgtattgttagaataaactacatctgtaagtttgtaacgtaattacgcaataatgttaatgtttgtttctagttctgaattctctgtgccttggttggtggccttatccaccaaactcaaagagggttcttgattttgtcatgtatgagagacagtgaaatggagggcttagtgacaggaactgcgttgttgtggcttgattattgatgtagtcatatggtcatatattcatatacttcattctttttgccgggccttt

SEQ ID NO: 388608 - DNA, 1519 bp, Oryza sativa
gcctgcggtacggtccggatcccggtcgccccacgcgtccgcccatgcgtccgcggacgcgtgggcggcgtcgccggaaacctggatggcccgggcctcatcggctccggcaagctcgccttcggcgccaccaaggccgaccgctacaacagcgtcaacctccccgtcgacaacaacaacaacaacaagtcctacggcggcgccgccaagatcaacaacaacaacgtcaacgccttcgggttcaacaagatggggggttacaacaacagcagcaacggcggcggcaactacggcggcaacggcggcgacgtgaagagctacttcaacaagtcggtcgggaggccggcgagcaacaacaacaacaacaatagtaacggcggtggcgggtactacggcaagaagggcggcgacggcgccggcgggaagaagaagcacgccaagaacagcgacacggcgcgcaggcgtcggacaagaggttcaagacgctgccggcgtcggaggcgctcccccgggacgaggccatcggcggctacatcttcgtctgcaacaacgacaccatggaggaaaacctcaagaggcagctcttcgggcttccatcgagatacagggattcagtgagggcgatcaggccagggctgcccctcttcctctacaactactccacccaccagctccacggcatcttcgaggctgcgagctttggcggaacaaacatcgatccgacggcgtgggaggacaagaagtgccccggcgagtcgcgcttccctgcacaggtgaaggttgcgacgaggaagatctatgacccgctggaggaggacgccttccggccgatcctccaccactacgacggccccaagttcaggctggagctcagcgtcgccgaggcgctctcccttcttgacatctttgcagacaaggatgacgcctgaggctactgcttccctgctgctgcttgctgaagaatatcaggggactgccggtgaaggacacaagtaataaagattcgacgtgtatccgttgtgagatatacatacataaatacataaatacaagtagtaagtaattaacggtgtgtgctgatgaatttggaacgattagtacaatttctgagggggtttcccatctcgcgggctaagagatgatgcgtcccattgtattttttttaatcatgtgcgatgatgatgacttcagtctgcagaggattagcccctttgttgttgtaatatttatacacacgttatttgcttctggacggccagccatgtataatactttgagacctctttctgtttctcctgttgtaaaatcttttgacagaataaacagccatagtctctccagaggcgagtacttcacttttacaaaaaataaaaaaaaaaagaaagaaagaaaaaaaaaaggggcggacgcaaaaaaaaggccaaagcttacgaaggatggaatgcaaaggtaagcgctcttctaaagtgccagcgaaacataaattgagtggagagtggtatacaatgtgggggggggg

SEQ ID NO: 388609 - DNA, 576 bp, Oryza sativa
cccacgcgtccgccctagccaagcagcacgagcacacgagaaaacaagagaaaaaaagcagcagcggccatggagggatacgaccgcgagttctaccagttcagcgaccagctgcggctgcagacggcgagcttctccggcctctccctcggcgactccatctggtcctccccctccgaccgccgcaacgagccggccttcgacggcgagtaccaccacttctcctccccctcccccgccaagaacgccatcgccaacatcaacggcgtcgccggaaacctggatggcccgggcctcatcggctccggcaagctcgccttcggcgccaccaaggccgaccgctacaacagcgtcaacctccccgtcgacaacaacaacaacaacaagtcctacggcggcgccgccaagatcaacaacaacaacgtcaacgccttcgggttcaacaagatggggggttacaacaacagcagcaacggcggcggcaactacggcggcaacggcggcgacgtgaagagctacttcaacaagtctggtcggaggctcgggagcaacaacaacaacaacaatagtaacggc

SEQ ID NO: 388610 - DNA, 673 bp, Oryza sativa
  unsure (1)..(673): unsure at all n locations
cgctccatcccatttccccacctcgattactcgattgcgccggttttaggctcccttctctctccagtctccacctcttcggccgttgggcgccatggcggccatcttcccccacctcgcctcgactcttccgcttctccgggctgtccgaacccctcgccggcttccgcctgctgtctccgccgtccctccccgagccgcccgcgtcgtcctccgtggattcaggcttcctgatccagctgcaagaaaatttctctgtttcgaggattcaataggcttgcagacggagcaccagaagccagattctactagcactggtgcaaaacagaacagctcaagtgatgataactcaagctcaacagatggcccacccgtcctaactattttggctggtatcattgtgttccttctagtcttgtgggttatcggatcgctcttcacctggattgctggtttggtctttggcgctgcaaaatcttagaagttcaaattttaggataattctgcacctttttagttgtacatacttcggtccaattgtatgccaatcttggataaattgcacttgatggtttcattcttaagtgttgaacaactgcttcatggtgttgtaccattgtttccagctgtgccttgggtattgccttttcatatgtcatttcgannnnnnnnn

SEQ ID NO: 388611 - DNA, 745 bp, Oryza sativa
ctggactgcaaaacagtggtggttccacttcctctcgctctgatggaagtgaatatgatattgtaccaaaatcatattcctctaccccacgcaacttcccaagtcgtcgatcattcctgtcaaagccaatccatccgctctcctctgcagagcatgcactagaagggcaagaaactgatagccctgttgccaatgcaagcaccagcagtcctatgccctcggagttcaaggcaataggggatgatccgcccgtcaggtctgatggactacgcctacgccagtggcagtcatggcggagtcagcaaactggagtgccgcaagtagcatggatcttaccgatttatcagaacgacatgatgctgaacgctctggaccactgcgttccaataacataatggatagaacaaggtgcgacctttgcgagaggctcttgtccaagagatcgccctggggctcccgccgaatcgtccgtactggagatctgcctgttgctggtgtgcttccctgctgccatgtctaccatgccgagtgcttggagcgaaccactcccaaggggcagaagcatgaccctccttgccctgcctgcgataggctgtccggcaaagacaccgagcagtggtcgatctgcaggctaagaaacggattcccgagtctaaggtcacttggggaaggcccttccagggtctggagctgtgcccaagctggagactgcgtggctggcgctgtccagataccaagagcaagc

SEQ ID NO: 388612 - DNA, 898 bp, Oryza sativa
ttcgcctcctctcggctctcgctctgcgccacaggcccacagcgccggccgtcgcccatcggcggcgtcgggtccctctccctcctgcagtcctgctcgagctcgacgacgacgacgagtctatgcctcaagccctaaacagctcctcataggaccacccaacgaatcgatcctagagccgccactgcatcgtctcctcgtccgccgccgccgccatgtgggcgctccgccgcgcgggcaaccccctcagggtccgtgcccaccaagctttgagtgcccgtggttgtgcaaaccttgaagtaattctaaatgcagatgcaaagaatgtggaagagcatcatgagggggactgtcagaaattggattgctgtcctccacccaaagccattggtctgccaaccatcattctcatcaggccgtttcatgtggagtaggggtttctcttctcaggcacggggcaagttctggtgataagcaggatgagttggaggaagggttttctgatctgggggtccccccgggagctcataaaaaggatttagatttgacatccgatgagagttctgatgaggacaccattgatgcaattggcttgtctgaagtggaggctgatgcaaaacctgaggagccgataaagaagtcacaatccactcttcttaaggctttgctggaatctccaagggttgatgtcgctggagcattgaaaaaatggcttaatgatggcaatacattggatagaagtgagctcttttatgtccttcttattcttcggaggcggaagctctacatcaaagccttgcagcttctggagtatgttgaagaatccaaactaattgatcttggagaacgtgattatgcttcacgcgtggatttggtagctaaaacccacagtatttac

SEQ ID NO: 388613 - DNA, 462 bp, Oryza sativa
  unsure (1)..(462): unsure at all n locations
cacgactcttccgccgacgaattcccccgcttccccatttcggctcgcggtgagtttttggtagtttagtttgatacaccacttcgtttgataccctcggcgaccgcgcggcgccagcgggcgcatccatggcggcggcgggatccataggcgtgtacagggcggtgttcgcggcgctgggcgctctcatgctgggcaccctggtgtacacctgcgtcaccgacggctcgccgtttcgcctcgagctgctcaccccgtggttggtggcaacactgattgatttttatgtcaatgtgactgcgatttcgacttgggttatctacaaggaagtaaattggattagttctttcttttgggtaggtctgttgtactgttttggcagtattgctacatgtgcttatgttggtgtgaagttttttgaataaaacttccggaccttanaagatccacttgatctttaat

SEQ ID NO: 388614 - DNA, 666 bp, Oryza sativa
  unsure (1)..(666): unsure at all n locations
ccacgcgtccgtgcaggttcttacaaaaccaaagaatgccctaggcaggcagtatacaaagttgtttgaaatgaatgatgtcaagttgcattttactgagaaggctttacggcttatttccaaaagagcaatagcgaagaacactggagctcgaggtttaaggtcaatattagaaagtttattgactgaatccatgtgcgagattccagaaatacgaactggaaaagacaaaatagacgcggttgttgttgacgaagactctgttggatctacaaatcagcatggttctggagccaagattctttgtggagaaggagcattggacctttacttggatgaacataataaagaatcaacgctacgacggtcggagaaggtggatggagaacctgacattgatacagaagccccttctagagtggccagcatgtacggattcctgacaacagtaattatgtatataacttgttatcggccatgtaactgtagccaattcaaatgtaaagtcatcctcctcatacattcatgtataaggtccatgtcgggggtgcaatttctcttggcgatcaaaaccttccctttctgtgacatttttttaaaaagaaaaggtaaaggggaatagattctcatggccatgatgnnnnnnnnnnnnnnnnnnnnnnnnnn

SEQ ID NO: 388615 - DNA, 967 bp, Oryza sativa
ccacgcgtccgcggacgcgtggtcggacgcgtgggcggacgcgtgggcgagttccagccatggcagcagacaagggagtgaaggtgttcggcatgtgggcgagccccatggcgatccgtgtggagtgggcgctccggctcaagggcgtcgactacgagtacgtcgacgaggacctcgccaacaagagcgaggcgctgctccggcacaacccggtgaccaagaaggtgcccgtgctggtccacgacggcaagcctctcgccgagtccaccgtcatcgtcgagtacatcgacgaggcctggaagcacggctaccccatcatgccctccgaccccttcgaccgtgctcaggcgaggttctgggccaggttcgctgaagagaagtgcaacgctgctctgtacccgatcttcatgacgaccggagaggagcagagaaagctggtgcacgaggcccagcagtgcctgaagacgctggagacggccctggaggggaaagaagttcttcggcggcgacgccttcggctaccttgacatcgtcaccgggtggttcgcctactggctgccggtcatcgaggaagcctgcggcgtcgaagtcgtcaccgacgaggcgctgcccctgatgaaggcctggttcgaccgggtcctcgccgtcgacgccgtgaaggcggtcctgccgccgagggacaagctcgtcgcgctcaacaaggctcgccgtgagcagatcctctcggcgtagagagcacggtcacttcagctccccagctagtacgtttcatctccatggtccatggttaaacaataagttcgtcacaagcacattgtgcagaagtagtagatgctcgaagcatgatccgtcttagagagacaaacttaatgctctatgatatgttatccagtgtacaatattgcctacttaattatttcctcaagaggaaaaatacagtacagttttgtaaaaaaaaaaaaaaaaa

SEQ ID NO: 388616 - DNA, 908 bp, Oryza sativa
  unsure (1)..(908): unsure at all n locations
cgggttcctcgacctctcgccgccgtcgtcccgcgcgcttggaggtcggcctgctcgacggttgtcgccatgatcatccccaagaagaaccggaatgagatctgcaagtacctcttccaagagggggttttgtacgccaagaaggactacaatttggcaaaacacccacagattgatgtgccaaaccttcaggtcatcaagctcatgcagagcttcaagtccaaggagtatgtcagggagaccttctcctggcagtactactactggtacctcactaatgatggcattgagcacctgaggaattaccttaacttgccgtctgagattgtacctgctacactcaagaagtctgcaaggccaccaggccgcccatttggctctggcccccctggtgatcgcccaaggggcccacctcggttcgaaggggacagaccaaggtttggagaccgggatggctaccgtggtggacctcgtggtgcgcctggtgattttggtggtgagaagggtggtgctcctgcagaattccagccatcattcaggagttctggtggtagacctggctttggacgcggtggcggcggtggtttcggtgctggtccaacctcttcctccatggagtgaaaggagctcaggattcttgtcgcaggagacattttagtattcaagttttgcagtggtgtttgcagtagagatcaatgcgtagcacctatgttgaaaccttaagagatgcaagtgtaattctcctggtgttgatggcttgagagtttatcccaaaccctctgtagaagccaatgccaatggaaatatcgttcagctactcagcaatcaagtttttcctccccnatttntnccnnnnnnnnnnnnnnnnnnnnnnnnnnnnnnnnnnnnnnnnnnnnnnnnnnnnnnnn

SEQ ID NO: 388617 - DNA, 729 bp, Oryza sativa
  unsure (1)..(729): unsure at all n locations
cggagccaagcaaaatgctcgccctccgcaaaaccctcctccacggccgcctccccgccgcgccgccggccgccgccgccgccgccatcgcgtctaggatccccgccctcctccgtcgcctctcctcttctcccggagacgggcagggcggggacgaatggggctcgtcctggtccaccggcatcaccaaggaacacttcgacggctccgacgccgcggtcggccgcccggtcacctccccgtccaagccggtctcccctgagcttgcggccgtccgggccatggacgaggaggacgagatcttccgcgccatggagcgcgacaacagggaggccaaggcgtacgtggactcgtggggcgaccggatgcgggagacgtgcgagctgctgaagcaggtgcgcgagccgggctcccggggatcctacctcaaggactcggagaagcaggagatgtaccggctgcacaaggaggaccccgagacgtacaccgtggagcgcctcgccaaggacttccgcgtcatgcggcagcgggtgcacgccatcctgtggctcaaggagatggaggaagaggaggagaggaagctgggcaagccgctcgacgactccgtcgaggtcctcctcgacagttgccccagagttttttcaatttcccatgataggggaatttcaatgttgcatcaattccttataaaacttgattttaaagttatnccttagggcnttggattgg

SEQ ID NO: 388618 - DNA, 845 bp, Oryza sativa
ccacgcgttgtagtgttgtgtagcagtagtccaccgctgagaagctagcaaagccagccatccattcagcgcagtactctcgggagagctagaagcgatctattctagccacaaggaggagagataaacgtatcgaaatggagcacatcgcgaggttcttctttggagtttccggcaatgtcatcgctctcttcctgttcctttcgccagttgtcaccttctggaggatcatcaagaagagatcaacggaggacttctccggcgtgccttacaacatgacacttctcaactgcctgctatctgcttggtacgggctgccgttcgtgtcaccgaacaacatcctggtgacgacgatcaacgggacggggtcggtgatcgaggccatctacgtggtgatcttcctcatcttcgcggagaggaaggccaggctgaagatgatgggtctcctgggcctcgtcacctccatcttcaccatggtggtgctcgtctccctcctggccctgcacggccagggccgcaagctcttctgcggcctcgccgccaccatctttctccatctgcatgtacgcctcgcctctctccatcatgaggctggtgatcaagacgaagagcgtggagttcatgccgttcctgctctccctgtccgtgttcctgtgcggcacctcctggttcatctacggcctgctcggccgcgaccctttcatcgcgatccccaatggatgcgggagctttctgggcttgatgcagctgatcctctacgcgatctaccggaaccacaagggggccacgccagcggcggcggccgggaagggggaccccgccgacgaggtggaggacgcgaagaa

SEQ ID NO: 388619 - DNA, 950 bp, Oryza sativa
gcctcgcctctctccatcatggtaagacagtacacaccacacaaatgatctagaatgacttacattgtgaaacggagggagcaataactaacaaaattaaccataatctgattcgctgatcaattgactccggtgtgcagaggctggtgatcaagacgaagagcgtggagttcatgccgttcctgctctccctgtccgtgttcctgtgcggcacctcctggttcatctacggcctgctcggccgcgaccctttcatcgcggtaatttactcatcgtctttcttttcgctgtcaattgctgcaagcctacaagcaacctgtcgacgttgattacagaaagctacgtaacctgacgacgagacatatgatccaatccgatcgatgctttttggttttttgtttggatctcgattgatcgtactgtctgatgggcacatgcaaaccgctgcaaaagcacagcactgcaccgcacaagcaacgctgtttgcaactcaatgccgcgaaatggccggcggcgtcggttatcctttcgatgtctcgtccaacttggcgcgcacatgttgggcgtacgtacgtactcccttcgttccatgaaaaaccaatatagaaccagatatgacgcatcgtaaattcgtggtactatgaatctggatatatatatatatatatccagatttgtagtattagaatatgccacatatttatttttcatgagacggagggagtataggagtagcagctatagccgtgcacacgaatggcacgcaaagagtttaactgacgaaattgcatcattgtgttgtacgacgtgcagatccccaatggatgcgggagctttctgggcttgatgcagctgatcctctacgcgatctaccggaaccacaagggggccacgccagcggcggcggccgggaagggggacgccgccgacgaggtggaggacgcgaagaa

SEQ ID NO: 388620 - DNA, 402 bp, Oryza sativa
  unsure (1)..(402): unsure at all n locations
naagctcaaggcggacaagacaccgacgaggtctacgcgcaggtcatgctcatgccggagcccgagcaaaatgagatggcggtggagaagacgactcctacgtccggccctgtgcaggcaaggccgccggtgaggtccttctgcaagacgctcaccgcgtctgacaccagcacgcacggcggcttctctgtactccgccgccacgctgatgagtgcctccctcccctggatatgacccagtcgccacccacacaggagctcgtgcgccaaggatcttgcacagcatgggactggcgcttccgtcacatctttcgcgggcaaccgaggaggcatctccttcagagtggttggagtgtgtttgtcagttccaaaaggcttgttgctggggatgctttcattttc

SEQ ID NO: 388621 - DNA, 578 bp, Oryza sativa
ccacgcgtccggccgcttttacattattgtcttgagctctgttttggcaattggcaatttggcatgtatattggtcttgtgcttggatttttgaagtatgggcttgggctctgtttccgtatgggatacattgggggtgaaggtgccgttcgtgttctacaatatttgtatattttgtctaagaagagtttagaaactgacatgagtacatgactaagaacttttcacaattcgtgcccttccctaatccccaataaatgagtgacgcctgttggtaatgaaactgtcatctcgtccatacatcagtggcaagtatctaacctacctaggatgatgtcaacgaatgcatacatggtgtatgaagttgtaggcatttaatactacatgaatgcacaaagtaaacatcattacaatcattgatcaatttacatacttattgatgtttcacttatatctgtcctgatattatgatagttatctttctgttttcctacttctgaaagcaaacctatttgaaacggatgaatgggtgattcctgtgttgccttccagagttttttgcttcaacttaaccattg

SEQ ID NO: 388622 - DNA, 559 bp, Oryza sativa
tgctaagaagtagttcctcggcaaccaggatctgaggaaggagctggacgacgttgacaacctcaccgaggaacggctggacgaggtgctggccagcttcctgaaagacttcgaggccggcgagctggaggcgcacggatggccgatggggccggcggcgtacaaggtggccaaggtggccatgaacgcgtacacgaggatctcggcgaggaagcacccagcgctgcgcatcaactgcgcgcacccaggctacgtcaagacggacctgaccatcaactcggggttcctgacgcccgaggagggcgcgaggaacgtcgtgacggtggccctgctgccggacggcgggccaaccggcgcgttcttcgacgagggcaaggaggcgtcgttcgtgtgatgacggcgaggcccaagaaattgaagaacatggtgcttgatcttgggccagcgttagcgcagtgaagttcgggcctgaagccctgaatccaggtgttgctaaattatgaacttgttcattctgggaataagtctattttacttctgattgaaaaaaaaaaaaaaa

SEQ ID NO: 388623 - DNA, 830 bp, Oryza sativa
  unsure (1)..(830): unsure at all n locations
ccacgcgtccggaagctggaccctttaagaaaagacgtgacagggtttcctaatcccagaagtctggaaatttacttgctacaattgtttcatgagaacattcttaggaaggtcagggagaaatcccttaacattggtcgctaccaaagtcctgctcaggttgcaggtgatgattatggcctgctaggtcatttctgcttgacagtggctcacaggatattttctaacagagtactcgtggagcttgagagtgtggtcagcagggttccatatctccatttgcgttctcttcctacttggcattctcgaacttcctcctggtctctatgcttgaaagttcctcagcctatccttgctgcagatcggattgcaaagccttctgataaccatgaacttaagtacaaatccaggtcacagttcaatactaaggtgatcgtgaaagatagccaaattagtctaatgggtgaaggctccccaagcattgctggatcattgactgggaagccctccgatggatatttggtaaatagctacaattgtgacttggaggacctcccaacaatgcttctgcagcaggttgctagtcaagtaatccactggcttcatgaagaagcattggttctcggtatgaatgtgactagagatttcctgtgcctttactttgatcttgagcaangtgaaacgcttggcctggtggcgaatgttgacccggacgacacctgtggatgcatttcttggtaccttactattgatcacccaacggaggatgggaagatgtcagcagatagtcnggantttganaancgtagtttttgggctatgtttctctt

SEQ ID NO: 388624 - DNA, 761 bp, Oryza sativa
  unsure (1)..(761): unsure at all n locations
ggtcgacccacgcgtccgtgcatttttataagcagctcatctagtagccgcttcttgcattcttcttcttctcctaggacagtgccatccaagtatccaacgaacgcaagatggctctggttgctcaggcctccaccatcgcgcagttcgccggagtggacgcctacggcctgatcaagatgatcgccgaggcggcgcagacggtgcggcgcaacagggcgacgtgcctgcagctcgcgcggcgcctcaagatgatcggagatcttctcaagcagctccacggtgcgcagctgatgcagcagccggagacgaggaacccggtggagcagctggaggagacgctccggcgagcgtacctgctcgtccggtcatgccagggccggagctacgtgtaccgctgcttcatgggaggccggcacgccgacgagctcagggaagtgcagagtgagatcgccttctacctccagctcttccctctcgtcagctatgtcgatgctacactcaactgggtgagacatctgaataaagccgatccatcctgcaaagaggcacctttggtaagaccatattttgtgccatttgtgattctctcatgggatggatcgtgcttagcagttgttcagaaagtacaccttggtatagtgtacacatggttatatatctcttaccttaatatctactcaaatatctggcagatctttcatgtgtctgcagggagttaaattgntgcttagctggacatttnacttttttgggataat

SEQ ID NO: 388625 - DNA, 528 bp, Oryza sativa
ccacgcgtccgaacactcttacgcaataaccagggaaaatactattctaaagaaagccgttgcaattcagcacgagcgccaaaaggagcatgatgggagaaaccaggagattcagcaactcaagcagctggttgctcagtcccaagagcaaattagaagcctggaggtaaacaactatgcactgtccatgcatcttaggcaagctcagcaagccaactcgattccagggcacttccatcgggacatcttctgaataacttcatacctaaaccggaggtttccatagaatgagatatcgttcacccaacaattaagggcagagttcttgttcttggcttatatccaatatattgccaagttataaacatagtttaatgtatgttgtagacctgtgtgtacatgcttgtcttgcgttgggctgttggcccccctaagatgggattgtgtgcgagcaagcgcaaagaaagcttagttcattcgaacggcagacagaatatgatcaagttagaaaagaaaaaaaaaaaaaaa

SEQ ID NO: 388626 - DNA, 617 bp, Oryza sativa
ccacgcgtccgcccacgcgtccgaaagaaacagccggaacctcctgttgtgacactcgatgatctcttcaggaagacacattcttctcctaggatttattaccttcctttatcagaagaggaagtggcagccaagcttgcttcacagggcaaaggcaagagagaatgaggagctgtagcctctttttttcttgtcgccagtatgggggcatgtggaggtatgtagtggttacatacttgcatgtgtacgctgcaggttgtagggctgagagcctgagatctttcttcctaactttccaggaaaaatggtgtattacagctcagcagctggctcttgcagttcatttgaaataacaggaggcggcgactgctgttaggtattttgctgcaagagagagtagctgtaggctagtgtagaagcagcaaatgtattttctacagaaggaatgttttttgttctatcactgtctagtgtgttgcgtctaactcttgttacttggaacgtctgacgtctgagattatggttggtttaaacaatcgggtatggttgcgacttgtgactcctgttataatttaattgcgaggatagttattgtcccattggccattttgcttggt

SEQ ID NO: 388627 - DNA, 493 bp, Oryza sativa
ccacgcgtccgcccacgcgtccggccacgccgcagccgcacaagacttgatcctcttcttcttcttcttcttgctccaggctccagtggcgatggcgaccatgctctgctccttcacgcccgccaccagggctccgctccttcgcacttcctcctcctcttcctctctcggcttcgccacctcgcaactcgccggcctcagcctcggcctctccgccgcagccaccaccgcgccctccgccgccggtcccaagctccaccccatcctcgcgcgccggatatgccccttcacggacaagaagaccaacagggcgaacaaggtgtccttctcaaaccacaagacgaagaagcagcagtttgtgaacctgcagtacaagaagctcgtggtgggaggaggcaagcgcttcgtcaagctgcgtctctccaccaaagccctcaagaccatcgagaagcatggcctcgacgccgtcgccaaaaaggccggcatcgacctc

SEQ ID NO: 388628 - DNA, 893 bp, Oryza sativa
  unsure (1)..(893): unsure at all n locations
ccacgcgtccgcccacgcgtccgtccgacagagtcgagacgacgtcggtgctcaagggcttgtcgagcactcatgttgagctccaggaccctttagaccatgatcttatgatgcacatcgactccacgttacagaagaaagagaagaggctgaaggatctcctgaggaccggcaactgcatagtgaagaagttcaagaagcccaaggaggacaccttgaaccagagcctcttcttctcgcaggtcgacatgcggctcgtggcacgggtcctgcggatgccgaggatcaccagcgagcagctgcagtggtgcaaggcgaagctggacaagatcgcacttgtagataggaggatccacagggaggcttcatttttgttgttcccctgttgagaatacatatataaatacacatgcttcttttgttcatttttcccccctccataaatcatctccaccatgtaatccacggcttgtagatttttcttaaccttttagtaatccaggtctctttacacatgtccagtaaattacaaattgtaacatggtaaaacagctcataaaccacagagtccacacggtacagtacttacagtaccctagctagaaaatcagagtgtaataaatcagcatttcctctcaagaggaaacatctacctcagaatgcacagatttctactacatctgaagatgaactgtgttcatgtaaaaaaaaaaaaaaaaaactcgaggggggggccggtacccaattcgccctatagtgagtcgtattacaattcactggccgtcgttttacaacgtcgtgactgggaaaacctggcgttacccaacttaatcgccttgcagcacatcccctttcnccagctngggttataaccaaaaaggccgcaccgatcn

SEQ ID NO: 388629 - DNA, 367 bp, Oryza sativa
  unsure (1)..(367): unsure at all n locations
ccccatgtgggcagcgcgacncacgagacgcgcacggccatggccgacctggtgctcggcaacctggaggcccatgtcgccggcaagccgctgctgacgcaggtggtgtgagctaattgagtgactggatgattctgatttgattgattccaaagcaggtgcaattcgacaaaatgtagtatgtactgtttcaggatgtgaaaaatctgttttccctttttgtaaacacggtcggtctgggacgatccagtaataacgatttaatatttgtcattggaaatgtgaaaagtgtgttgggttgaaacggaacatactagtattactatactggccatgttctcgaaagcaacccctgcaagtaatgcat

SEQ ID NO: 388630 - DNA, 322 bp, Oryza sativa
ccacgcgtccgcggacgcgtgggcggacgcgtgggatccagcagaatctagttagttaattaaggagtagtgtgctaactacgacttggaagaagaagaagaagaagaagaagaagaagaagaagcagcagctgagctcgatcagctcgtcaatggcgatgaagaagccagatcagccagctcttgatcttcccagtagcctctccactgtctcctactgctgcggggcgtgcgggtacgacctgaagctgagctcgtcggcgagggacacggccggggatggtcgtcgccggcggcggcgggggataccggaagcggcggg

SEQ ID NO: 388631 - DNA, 494 bp, Oryza sativa
ccacgcgtccgcgaatggatacgagaagaagtcgagacgtctgatgggagggccagggagagggtgcagtctgttgtccttgacatgtcaaatgtggtaaacattgacacttcagggatttcggccttggaagagatacacatggagctggcatctcttagcatacagatggccattgccggcccaggatggcaagcgatccagaagatgaaattggcaggtgtggttgaccaggtaggaggagactggatatttttgacagtaggtgaagcggttgaagcctgtgtaactatgcaaaagggcactgctctggaatgctgaggtgtgtgtgttagtagtacttagtaggattaacaccatattaagacataagtgatgctgcttagtgctttgcatccagccattcaatattccagagtgaacaatgtctatagaagttagaaaaatgctctgcaggcagtaagcatcgaagacatgttactgcgataacaact

SEQ ID NO: 388632 - DNA, 1207 bp, Oryza sativa
ccacgcgtccgctcatgttcaagatgtttacccagtttcacaatttcatggaggtagagtgcctccctgttgtttacccacctgagatcaagcaagagaatgcccttcattttgcagagaacactagctatgctatggcacatgcacttaatgttattccaacctcttattcatatggggattcaatgatcatggctcgagcagtggaagatggaaaggtgaactgctcaaattatatggtggagatggcttgggtaaaagaaacatatggtgtgagcacatcagaagcaatggcactcttggaagactttttgtgtatgagcccagacaaggacggacgtgtgaatgcgcaagatttttgggctcattttggccttaattgcacccctctttgcaagaagatatttcagtacttcgattttgaagccaaggaatccatcacattccgtcagttcttggattggatgtgcgcacctccaggaagcagccatcgtttcaggacgcctgcgaaaccgcgtttgagaggtgtaggaatcccctaacatctcacatcggcagggagcagctcgccgatgtcctgcggtcaagcatgcttgagctgatgaccgataatgggatgatgaagctgttcaagacgttggacgtcgacgatgacgacggaatcagcaaggatgacctgatggcatcccttaggaagctccccttcatgatcgcgctcttcgcgcgccggatcaacggggaagtctacatcgagatagtttgatcgactggattgatcgcaggggagagcaaaaatggtggatgggagtttgtaacgcggtgggagacgacagacctccgtttgtttttagagggatggtttccaaccgcttcaccgtccatgtagctttctcaggcgtgttggactaaagtggctaaccggtatagtgctcaattttgtttcatatcgtaaaaatatatatttatatccatagaaaagctgtcgcgtgatggcacgctggattgtgcaatgtggatatgataccgtacaacattggtccaactgggcgtgcacatagaaactctctttttggtttggtttggtttggctaactggatggatgattacaaactcctttttggctaactggatggaagtatctgtttcgtatcgtccatcccaatatcaatcaatatatgtctttaatttcaaaaaaaaaaaaaaaaa

SEQ ID NO: 388633 - DNA, 891 bp, Oryza sativa
  unsure (1)..(891): unsure at all n locations
cttattttccgatgcatatctgaatggactaagagctacctttcttagatcaagccacttaggggtcatcccttttcactctctatgtggtgatacaccagaaattgaaaagaaagctagctctgaggacggcagtgatggatttaggctcaacgaagatggtgccttggccacaggaaaggcagcggcaacaagggagctgttagggcttccgctagctgaacttgaacgccgttgcagacataatggcctctcgctatgtggtggtaaagagatgatggttgccaggttgcttagcttggaagaggctgagaaggaacgagtatatgagaaggacgcgggcattaaatatggacaaggagaatcgcatagaactggaagagatgacattgctgtggaatgctcgtaatgcttctagacctggagaaggtactgataagtggtgaatcagacatgttgggtctctctcattatgctatggaagcagggtacanacgctctaatgaatccacacccgctgaacctgttccaagcaagaagccaaaagttgaccctgttttgcccgcttcaaaatggagtcgagaggatgatgtcagcgatgatgaagatagaaaaggtggcagaggcttaggattaagctattcatctggtagcgatattgctggtgattctgggaaagctgatgccacagaagttaggactggtcactccaatcatcacccggataccattcttggtgaaaagccttaaaaggagtttaggccgattggaattgctggtattccatatccggaatcttttggggggaaagggttggcaaaccccaaaaaaaattgaaaaaaaggtggccagcccccgtaggcgttttaagcctgaatttggttaatcatt

SEQ ID NO: 388634 - DNA, 699 bp, Oryza sativa
cggacgcgtagacggacgcgtgggcggacgcgtggtcggactcgtgggcggacgcgtgggcggtgcggctcggagatagttgcaaacctttctacggtctacaaagacctcagctttcctacctccactgcttgtttcttacacaaagcccattcctttttctctcgttcttctcccctcccttctttttccacccactcgaattctcccttcacattctagttctagctccgcacctttgctgcgcgcgcggatttggttcagggtttggaaatggcaatagacgatgaatcgccgctcagaatcaataccaccagaggcggcgccatgggaggaggaggggagtgcgacggggcggagaaccagcggtggccgccatggctgaagccgctgctggcgacgagcttcttcggccaatgcaagctgcacgcggactcgcacaagagcgagtgcaacatgtactgcctcgactgcatgaacggcgcgctctgctcgcagtgcctctcctaccaccgcgaccaccacgccatccagatacggaggtcctcctaccacgacgtgattccgggtgtcggagatacaagaaaagtgcttggacatcaccggcgtgcagacgtacatcattcaacacgcgcgcgcgtcgtgtttctcacgagcgcccccagccgaggcccggcagggcgtcaccacacctgcgag

SEQ ID NO: 388635 - DNA, 518 bp, Oryza sativa
  unsure (1)..(518): unsure at all n locations
ttaagacttcacactacatacattcagaagtgctttctttcgcttcgagcctcttcctctcttttctctcgtctcttccatccacattcttctctctctctcgattgcttcgcactgggaatggcgatagaccatgcgtcccctttctcgctgaagaacagaggcgacatgggaggaagggggtatgaggaggaagaggtggagaaccagcggtggccgccgtggctgaagccgctgctgtcgacgagcttcttcgtgcaatgcaggatccacgccgacgcgcacaagagcgagtgcaacatgtactgcctcgactgcatgaacggcgcgctctgctccctctgcctctcccaccaccgngaccaccacgccatccagatacggagggtcgtcgtaccacgacgtgatccgggtgtcggagatacagaaggtgctggacatcaccggcgtgcagacgtacatcatcaacagcgcccgcgtggtgttcctcaacgagcgcccccagccgaggcccggca

SEQ ID NO: 388636 - DNA, 566 bp, Oryza sativa
  unsure (1)..(566): unsure at all n locations
ggagntnngngnagcgncagggncgnnacgtntgggnaacatccgccacacaaagcaacccgttatttgtcgtgtggaatttgaggatggtgaatctttgattgcgctcccctgcaagcattcataccatcctgagtgcataaaccaatggcttcaaataaataaggtttgcccgatgtgcagcgcggaagtttccacatcggacagcaaccaggcatgaccaatctttgctgccattatggggcttgatgggagcaaatagcgggcatcatatggtcgcatcttgtaatgttggggagaaggcagataaaactttcggacacatgcgagggaccagcactatgatcttttgcgttcttcagtcctctcctggcttagctccactgtactctgtttgcccgtgccgctatgctctgcattccctgtgggggcctcatggctgttgtatgatccataaatgtacaatggttatattattatattatatattgctagccattctttttactaaaaaaaaaaaaaaaaaaaaagggggggccgcaccggggtgggggttccannnnnnn

SEQ ID NO: 388637 - DNA, 705 bp, Oryza sativa
  unsure (1)..(705): unsure at all n locations
ctgcaagcgatttaagttggntaacgccagggttttcccagtcacnacgttgtaanacgacggccagtgagcgcgcntaatacgactcactatagggcgaattgggtaccgggccccccntcgaggtcgacccacgcgtccgcccacgcntccgcttgccaagcatggtccggacaggtgtggcctcggcccggcgaaggggctcgaggagtcggagctcatggcgttggccataaacagggacctgaacttcacctacacaccaaaccaagaccttgtcccaattgcagacgccctcctgaaggaagctgctgcacctggaggtccatggctgccattgcccgcaacggcgacgcagctgttcattcagggatctgagaattcgctgttgtcatctggaagatagccggtggttcgacggcaagattggcttcaatttgtacatatttttccgcttgttctagcctgatgttatgacatgctgatgcgcaggctcatgatttttgtttatgagcctgctgagtgctggaggcatgaaattccttgcctgacggacctgtatgcgtgatgcacgtctgcatcgaaaattgaacatgctagattcattcatgattgaatcccgtaatccctgtagtattcaggtcttgaaagctttgagttctgaatgagtgtacttggttgtgtcgaaaaaaaaaaaaaaaaaaa

SEQ ID NO: 388638 - DNA, 843 bp, Oryza sativa
  unsure (1)..(843): unsure at all n locations
ccacgcgtccgtgggaaggccatgaggtggtgggagaagtgcctgcagcccaacatgagggagatcgagtcggcgcaagacctcgccgactccctcctcaacgccggcgacaagctcgtcgtcgtcgacttcttctccccgggctgcggtggctgccgcgccctacaccccaagattgctcaactagccgagaagaacccggaggtgctgttcttgcaagtgaactacgagaagcacaagtcaatgtgctacagcctccatgttcatgttctgccattcttcaggttctacaggggagctcagggccgtgtcagcagcttcagctgcacaaacgcaactatcaagaagttcaaggatgcacttgccaagcatggtccggacaggtgtggcctcggcccggcgaaggggctcgaggagtcggagctcatggcgttggccataaacagggacctgaacttcacctacacaccaaaccaagaccttgtcccaattgcagacgccctcctgaaggaagctgctgcncctggaggtccatggctgccattgcccgcaacggcgacgcagctgttcattcagggatctgagaattcgctgttgtcatctggaagatagccggtggttcgacggcaagattggcttcaatttgtacatatttttccgcttgttctagcctgatgttatgacatgctgatgcgcaggctcatgatttttgtttatgagcctgctgagtgctggaggcatgaaattccttgcctgacggacctgtatgcgtgatgcacgtctgcatcgaaaattgaacatgctngattcattcatgattgnnnnnnnnnnnnnnnnnnnnnn

SEQ ID NO: 388639 - DNA, 711 bp, Oryza sativa
  unsure (1)..(711): unsure at all n locations
cggattcccggtcgacccacgcgtccgcggacgcgtgggcggacgcgtgggaaatttttttagcttggcttcgtatatgaaagaagaggaaggtctcgaagggttagtataccctccaatctccagaatacgtgatatccaccaaggaggtggcagcagcagttgtgaaggaagctgttgcagaggatctagctgagggatatcgtgacatggatgcacgtgaacttgcaagactcagtgaggaagaaacagttggagtatgtccagcagaacatgtggagtccaggttatccaacaatagtgttcaagaaagactagagctttaatgtccacgtattctattgctcatgcccaattctctgaaggctgcagtttggatctttcaaaatactggcgcttctgttatgagaatccaatatattggtttcatgcaacctcaagtgttagtacacaatattgtcttgattttaaaatggatctaatactgtttggaagtgtatagtaggctccctaggtcgaatgtcgactttgcattttatatccacaactattaggtgcgcaacaattgggacctgtgtgccaattctacacagatgactataacttgtatttatgtttgaacacatcaatcaatagaagcctcaggtttactggtggcagtctgttcttgctgccgtcnctgttnnnnnnnnnnnnnnnnnnnnnnnnnnn

SEQ ID NO: 388640 - DNA, 651 bp, Oryza sativa
tgttgtgttgattccggagtttacgatgatggggggactaggcttaaggctgggatcaaggacactaactcgctgctggaactctactatccggtgggagggttgctcagcatcaaggaacaaggccacaatgttgttttacctgatgcagataacacatttcacgcaattaaggcacttagccaaagcgacggaagatggcgttatgacactaacagcgctgaatcgagcacgtttgctgctggtatcgcactagaagcattgtctgcagttatttcactggcagattcggaagttgactcatccatgatagctgtggtgaaaaatgacattgtgaagctatttgacacgatcaagagctatgatgatgggacattttactttgacgagaagcatgttgatgctgccgaatacaagggccctataacaacatctgcttcagtagtaaggggtgtcacctcttttgcagctgttgcttctgggaaattgaatatccctggtgagaaaatactgggtttggcgaagttttttcttggtttagggctaccaggtagcgcaaaggatttccttaaccagattgagttattatcattcttggaaaacaattgggttatttgttcctttggtccttttactttctttcattgttat

SEQ ID NO: 388641 - DNA, 991 bp, Oryza sativa
ctcacgcgtccggtatctgacagcaatacatgaaatcctagaaaagacgggctacaaggaggatgagggaacagcaaatgagctctcatttcagacgtggaccaattaaatgcaatgatacattgaactcaaagaagaagggtgacaatgcttttcgacaaaaggacttctcttgtgcaattgactgttattctcagttcattgaagttggtacgatggtttctccgaccatttatgcgctgagttgcctgtcatatctgatgaatgacaaggcagaacaagctctcagtgatgcgatgcaagcgctagtaatatctccaacatggccaactgcattttatcttcaggctgctgctctgctttctttaggcatggagaatgaagctcaagaagcaatcaaggatggttgtgcccatgagacaagtagcagcagtggacattgaatatgactgaacaaatttgtagttcagaaaatgcacataacttcaggtgttttggtgtgaacaatcattggacatggaagcagctgttgttcatttgtcaatttggctaggggtttctttaaccttgttctgatttgcacgtgcggaaggtcgtccctcgtccatatgttcatgtaggatgtatatatggaagaaagcgacagcagaggccctgaaagagattgcaaagacattgaaggtgaataagtcctgcagacacgacattgatgggggaagggcaaaacttggtcttggttcctcctacccaagaaaatgggaaaacgaaaaaaaaaaagggattgttatcaaaaggcgttgttgatgtacatgtcaatcttgctggtaggcgtgtaaacttgtacagcaagcgttgtgttttctccaggtcatttttcttttctttttggttttgtttcatatgtgttagcccccattggtatattctagagaaaatcgtggaattcttgtcaggcggaaattggcagtgttgaagggcttggttcatttgc

SEQ ID NO: 388642 - DNA, 705 bp, Oryza sativa
ccacgcgtccgggggactggagaggcatctccaagaactttgtgaccagcaggacggcgactcaggtggccagccacgcccagaagtacttcctccggcagaccaaccctggcaaaaagaagcgccgggccagcctctttgatgttgttgctgagtgcagtgatgatcagcttccaagtcctcagagtgttggaactaagcctcctacccaggatataattcatacagatcgcggcgatgtcccgatactaagctatccagttgctagaggctttagaggcgatggcgtgcaggttgatgaactaactgaatatgtgaagagattaaaggccgccgaggacatgtcgctctccatgatctctggactggaaatggcatcatcatccatcagcagtctagagctcagtatcgcgcctcctcattgcgcgatcgaggcggccatcaaggtgctgtgatccagacgcaattctccaccgaaggaatctggatcggcttcagctactgttcttcgtcgccgctgttgttgtttgttgttgttgtttttttttttttttgcgggggttgtttgttgttgttgttgttgtagttgtcatgctaactttgtatttgggtcatgtggcgtttctttcagcagtcttatataatacagtgagaatgtccggtcccttccgagacatgtttaaaaaaaattaataaatggggcgg

SEQ ID NO: 388643 - DNA, 655 bp, Oryza sativa
  unsure (1)..(655): unsure at all n locations
ccacgcgtccgtgatgcttcaggaactcctcctgtatatcattttcccttttattacccagggatgatggaccacggtatgacacatcctccggtgcaaaatttccaagggaacataaacaacgctcaagtgcatacaccacaaacgttgctccctcagtataatatttatccccaatgtcatggtgtatctatgatgccaccatttcagtataatcctgctggtatgagcattcaatcaaatcaactgccaacacaaaatatgtggccacaggcatcaagcacaccaatgcccgaggaaacatgtagtcggtctgaacggagagctgcagcacttgccaaattcaggctgaaaaggaaggaacgttgttttgacaagaaggtgaggtacgtgaataggaagaaacttgctgaaacaaggccgaggtgcgagggcatttgtttagacagggcaactatacggttttaccagcactggagatgttccccgagatgagatntgntccatccnccngggggtanantggttcttnccagggagttnaaggttnccanatggaaaatgggtccgtgtncgccncttgaccnttggnggaaatttcnggttaaaggaaacccccngggnggtngaaagtttaacgccccnggggggggaa

SEQ ID NO: 388644 - DNA, 524 bp, Oryza sativa
  unsure (1)..(524): unsure at all n locations
tnnnnntatgagcanncantcaaatcaactgccaacacnaaatatgtnnnnacaggcatcaagcacaccaatgcccgaggaaacatgtagtcggnctgaacggagagctgcagcacttgccaaattcaggctgaaaaggaaggaacgttgttttgacaagaaggtgaggttcgtgaataggaagaaacttgctgaaacaaggccgagggtgcgagggcaatttgttagacaggcaaactatacagatataaccagcactggagatgatatctcacaagatgaagatgatgatccatcctccagggaggtagagatggtttcttctccagagtagcttgaaaggttttcctatatgtaaaatacagtgctgatgattactgctcactttgcaactcattagatgtaggcaatacatttcttctgcttttaactaggcaatacatgcactcgcttacacacaatacatgctttttgtaccccaggaacttgcggcatatccatcaatgctactatggaccattttg

SEQ ID NO: 388645 - DNA, 694 bp, Oryza sativa
cactaatcacactgaattaacaccgtacttacggttgatgagcatgatttgagcaagcagcatcgattctacggggagtcgaagccgttcggcaacgagtcgaacagctcgccggagaagctggggtacctgacgtcgacgcaagcgctcgccgacttcgccgtcctcatcaccagcctcaagcacaacctctccgccgtctcctcccccgtcgtcgtcttcggtggctcctacggcggcatgttggcttcatggttcaggctaaagtatccccatgtcaccattggcgccgcccccgcctccgctccgatcctgcagttcgactacataactccatggagcagcttctacgaggccgtctcgcaagattacaagtctgaaagcttcaattgcttcagtgttatcaaggcagcttgggatttgatagatgagaggggatccactggtgccaggctcttacagcttaacaaaaccttcaaagcctgcaaatgtgcaagaacattcacgggtttccttcaggagccaacattggtggcaaaactttcgcagcggggagtctgtactacaattacacaagagatcaaacatgctttcagttagaggatggagaagacccccatggccttagtggttggggatggcaggcctgcacagaaatggtcatgccgatgacgatttcgaacgagagcatgtt

SEQ ID NO: 388646 - DNA, 822 bp, Oryza sativa
  unsure (1)..(822): unsure at all n locations
gccccgggtcgccacgccgtcggctcccncggcgccgtccgagggatcgatacagctctactcgcagatcgagagggtgatcacggaggcggcgaagagtcccgggagggctggggttcgaccggtgattggaccgagatcgagggagcgtgggtgctgaagcctaaatcacaggagccctcgttcgttgttcacttcgttggtgggatttttgttggagctgctcctcagatcacttatcgtttcttccttgaacgacttgcagacaagggagctttggtgatcgcaacgccatatgctagcggctttgatcatttcttcatcgcagatgaagtttcaatttaagtttgacaggtgcttaagaaacatggttgaacctgtaaatgaccttcccacatttggtgttgggcattctttgggatctgtgatccaccttctcattggatcaagatacgctgtgcagcgaagtggaaatatattgatggcctttaacaataaggaagcaagcttggcagttccattattttcgcctgtaattgttcccatggcacagagttttgggccaatatcttcccagttgacatcatatccaacacttcgttttggggcggaagcagccattaagcaacttgagaatcttagccctcctgttgttaagcagctcctgccattagttcagcaacttcctccactgtatatggatttagtaaaaggccgagaagaattcgttccaaagccagaagagacacgtcggctggtaaaatcctactatgggatttctcgaaacctcttgataaaagtcaaagatgatcaaattgatga

SEQ ID NO: 388647 - DNA, 516 bp, Oryza sativa
ggaagaggagaaggcagcctcgcccgtctcccggcacatcatgccgcatctcctcaacatatacggatcgtgcgcgacccccccggccgtcgagatttacgcggcgcatgccacattcgaggacccgcttatgcgagctcatggggttaagcagatcaaatcggccttctacacactccccaagttattcggtgaatccaaaatcgtggagtacacaattacagaaaacgaaaccgcgcccggaaaagtcgagatactgatcgacaacaagcagcactacaagttcctgggcagggccatcgacctggcgtcgctcatcacgctcgacgtcgaggacggcaaggttgtgaagcaccaagactggtgggacaagaagcctctcaagaacagggacacggtgagcttccccggggtcggccggctggcggaggcgacccgccgcggcgccatgctgctcacttacgctctcatgggctgcggcaaggacccataagccatcgccttcgacagccctac

SEQ ID NO: 388648 - DNA, 670 bp, Oryza sativa
  unsure (1)..(670): unsure at all n locations
ccacgcgtccgcccacgcgtccggcgagaggagagaaacaactccatcaagctttctccccggagaggtgagcgatctggagtcggatctggctggaagacaaaagcccaagcgttcactaacttctgcggcaacagcctcagcacagcaagccacgcggccgaagattccgccggccgccgagatcgaggcgttcttcgcggcggccgaggaggctgaggccaagcgcttcgccgccaagtacaacttcgacgtcgttcgcggcgtgcccctcgacgccggtcggttcgagtggactccggtggtcagcagccgaagctgaagcgagcgtgcagattaagcggaagctagaaaggnnggtancaggggggcgccgtgtagaaagggaaggcgagctagagagaggagaagaagaagaagaaaagatgctcatccaaagggaataaactggaaaagtgggagactacaaaaaaagaagcattatagcctaacaaccaccgattcgactcttttttctttcacattttctttgcatttttactcttactgtgtactagaaagtagtagcagtagtaaactagtaattcgtcccagtatttatcagaggtttatctcgataggaatagatatattatccnctnnnnnnnnnnnnnnnnnnnnnnnnnnnnnn

SEQ ID NO: 388649 - DNA, 1194 bp, Oryza sativa
  unsure (1)..(1194): unsure at all n locations
cgtctctctctccccaacctactctcttctcctgcagtccagctctcggttccttgctcctccaagtctccgtcggatccatcctcccctaccccgcgaaaccctagcctcccgagcccctcgccgccggcggagtggcgacggcttgatcggccctggacacccgccccgcctcgcctcgcctctgcctctccccgctccccccgcgcatctgatgttcctctcccgcatcgtcctccgcgacctggactccatcgactcccccgccgcctccatggcgtcctccaagaagctggtgacccgcgacgagtgggagcggaagctccgcgacgtcaagatccgcaaggaggacatgaaccgcctcgtcatgaacttcctcgtcaccgagggcttcgtcgacgctgcggacaagttccgcgtcgagtcccgcacccaaccggatattgacctggccaccatcacggatcggatggaggtgaagagagcggtgcaatcagggaatgttcaggaggccatcgagaagattaacgatcttaatcccacgattctggacacaaatccccaactgtactttcatctgcaacaacagaagctaatagaattgattcgtgcgggaaaaataaatgaagctttggagtttgcacaagaagaactcgctccaagaggcgaagaaaatcaagtctttcttgaagaaatagagaaaactgtagcacttttggtttttgaagatataaagaactgtccatatggggaactattggatgtttcccaacgattgaagaccgcaagtgaagttaatgctgccattcttacaagccaaagtcatgagaaagatccaaagctccctagccttctaaagatgttaatttggactcaaaaccaactggacgaaaaggcagcatatccacgaatcaacaatttctccactgccgcacttgaagatccagcgatttgaggccgctcgggaggggatggctaaagaatgtaggcaccataccatgactgttttcacacattgtacttcctggatctgttgtgctcttcacctgcaaggctgcaacagtgaatccagtgctttcttcggtctttgatctcaaatgcaaaaaacgtggaatcagaaaaaaaaatccgctcgtgttgtacatgatggtagaaatgttcatcacattntaatctgtgaaaaatgttcgattt

SEQ ID NO: 388650 - DNA, 782 bp, Oryza sativa
ccacgcgtccggtccctgggattggtcacaggatcaagagcagagacaacagagataagagagtgcagcttctacagaaatatgcccacacacatttcccttctgtcaaatacatggagtatgctgtccaggttgagacctacaccctgtcaaaagccaacaatttggttctgaacgtcgatggtgcgattgggtcgcttttcttggatcttctttctggcagtggaatgttcagcaaacaagaaatcgatgagattgttgagattggttaccttaatggactctttgtgcttgcgcgttcaattggtctcatcgggcacacctttgaccagaagaggctcaagcaaccactctaccgccacccatgggaagatgtcctctacaccaagtgaagaactcggtgttcttaatattacctagatattccagctttgtacacacttcaaaaggtcaagcgaaattgcataaaagtgaacgccgatgaaactagggggagaagaatggggtcaccggtgaccgctgttgttgcgtgtttcaagttagttgcaaattgagatctgttcctgatttttgtcaaagcaagaaccattaggacaacatgggggatattggaaatttactgtatcatcgtgtactatcgattctctcaacgaaaaaaaaaatctagtctgatgctaatgtgttccccggtcgtggaaagtgttgtaatgtttgtgattgtcaatgtgccccttcgataggcatcatttttgctattaaaaataaaataaaatttgcatgtc

SEQ ID NO: 388651 - DNA, 380 bp, Oryza sativa
ccacgcgtccggcttgctgaagagatcggttcattccacttggatgtaccaattgatagtatagtatctgcgttgctttctttgtttgaaagattgactgggaaacgcccacggtacaaggttgattgggggttccaatactgagaatctgggattgcaaaatattcaagctcgaatcaggatggtactagcctttatgatggcgtcacttatgccatgggttcataacaaatccgggttctatcttgttctgggaagttcaaatgtggatgaaggattgcgtggttatttgacggaatatgactgcagctcggcggatgtgaatccccattggaagtgtaagttagcaggacctccggtctttcctgcgatgggcagca

SEQ ID NO: 388652 - DNA, 508 bp, Oryza sativa
  unsure (1)..(508): unsure at all n locations
tgttgaggagngcgaaatagattgacatcttatagaccatttttggatacataaggaggtcaagcatgactggggcggatgttctaacgtttcctgtctgcacagaaatttgtgaactgcactaattttgggagccaaatgataggttggcaaatgtgtgtgggaaactagtccatcatgcgtttcactatcaaatgaagtgaaagctttcttggaatgagtttatggccagccatgaagtgatggtcgtccgcaagtgcttttctcgatcaaaataatgggttgttttgagggcgatggtctttttgatgagagngngggagagggggtggaggttccatggcttcaacaccttatgtgtgagccatttttgagatagtcttttagtggcatttgctgttgtgaatgtaatcttggaaactgtacaaaaaggatgactgatagatggaaaacattgtcctgagctatcttgtgccnattctttgagnncttgaaaaaaaaaaaaaaa

SEQ ID NO: 388653 - DNA, 616 bp, Oryza sativa
  unsure (1)..(616): unsure at all n locations
cgcatttcatcaatggtatagggagctccgtttcagatttggggaagcacagaacttgtccatgtttgaggatggcaccgttgtgtcaaagtccgaggaggctggatttacttactgttaaagatgatgagaggcctcctgtgatttacctgtaggatcatgtgagaatacaccaatctgcaggcggaaaaaaaaagttcagattgtcgaagcaaagctgactggacaccatgccaattgctattgtttactgcacaatcaaggagatttttggctgattctactaaatttctgtttggtaaagattaaggagtgcttgaacaaggttgcctagacggtgtttttcctcgctcatcctgaaagccctgatcctgaaggttcattccttctattactgacatcataactgaaagcttgcaacagtttatgtgtcatattaatgccattgctcaggtactttcagtgnacatgaaagcttactcataaggaatcaaaccaattgtgaagatagcaggnatggagtccaaatggatcggcgtttgaagaangcgccccatttcgngacataactnatattgcttcaggcaacactaagcgtacgcttgagctgtgtttc

SEQ ID NO: 388654 - DNA, 636 bp, Oryza sativa
agttaatgtgttgaaactatgcttgattgctaattatatacttttagttttgccggatgtcatatgtgatgcttctgagggagcctaatgtacagcttgagattatttactcttaacctgatgcgctcatatgtgatgctcctggaggatatttatataaatcgatgtcgtcttctcaaattataatttactgtttttaataatttgtactggcatatcaaattactgtttttaataatttgtactggcatatcaaattaactgatgtttttaataatttgtactgatatatcaaaatcactgttgttacgcttcatggctcataataaatcgctggtgcattgatatctacatgttttcacatttgctatttacagctcaggtactttcagtgaacatgaagcttactcataaggaatcaaaccaattgtgaagatagcaggtactctgagaattgacagagatgagagtctggctaaatagtcagccatgtgaaatgccttaatgaactctgtatttcgatagatgagatagctcatttaggcagtacatacatgacgtgggttcttcgatccattcaaactctagtgctgatccatttatagatatttctcccttgcatatgctctttgcatt

SEQ ID NO: 388655 - DNA, 582 bp, Oryza sativa
aaaatgagaccaattatctgaatttgcatctctctctctctcccttgattttacacaattccccaagtcaagatccgtctcttctgctgctttgctttatatacaccccattagtccactccaccaccccatagtatattctctcctcacttaaactaatcatctctctctctctctccccctccaaattgtcaatctcatttctgaactcatgttcagggttgaccttgcaaaatagcagtagctactattcatccaggaataggagttgcaggggaggcatgaggctgattgggagaggaaagagttccaaggccaagaagggctcttcaactccattgcaatccaaggaggaggttgctgcaaatgtgggagactggttgctgttgggtccaacaacaggcaagtggcacctgatgataacatgcccctgggagaagctggctatgctagcagcagagatgaggttttctttgaagcttgcccttggttagagtctgactgcgaggatgaattctacagtatcaatggagatggcacccctgcaagatcattcaaaacgaactccagcaaccatgcgat

SEQ ID NO: 388656 - DNA, 551 bp, Oryza sativa
ccacgcgtccgcgacctctcatggcccgatcatgggcgtcttgtacatctccactgccaagattgcatggtgcagtgacagtcctgtggcgtatgtcaccgaggataatgggaaccaatcttccatctacaaggtagttgtacccgttgctcagctaagatcagtcactcctacggccggccagcagaacccagcagagaggtacatccaggtggtttctgtcgacaaccatgacttctggttcatgggcttcgtcaactacgacggtgccgtgaagagcctccaggaggccgttcgtggcggcaaggcttcacttcaccatcacatgtattttttgtgaacatcgccgttacatgtattgatctgtccgtcgttcgtcatgcatcactgggaattcgcatgtgtcggtgtgttaaattgtctgtacagatcgctccccttgctgtgtatattggctgaaatttgtgttgcatatgcattcatgtattgtatgtagtgtgtggactagatgtgtacaaatactggattgattgttggcttgatgctcccct

SEQ ID NO: 388657 - DNA, 903 bp, Oryza sativa
ccacgcgtccgttttgctgttgtccggcttcctattctagctaattcttcactaaaccctcagcattagtgctcgaaataaactgctcctgaagttattcagggggaagtcatacccaattaatttaaagcactcgtcttgaaatccacattagaaattcatgtatgtcagtaaaaaatcacaattgcaccttgatacatttgcagtgttcggacccctgggttgttgctggttagctccacttatctatttaccatttccttccgtcctagactcatatcctgcttctcattcaacgctgttaaaaactaaggtggcattcaaacaagggtcttgacattttcctagccttgagcaagcacacatttttttccctgtgatttgagcttaagacccgtgaatgtaatgctctcgttttttttgttccttgaaacacaaaaggctcggatgataagcctgaggctgcaccttacaccagtgaagaactcatcaaagtacctgaaggacatttctgagaagacggaaaccgagagatgaagcataacgatgtagagtactactgtattaagactgacgcaagaacacgctgtgggaggttggaaagagcggattatgatttttaatttggtgagctgggtatgcctgggtttgggtagggaggagtgatttgaggatctggtcagctgtggatgcatatgtgtagtgttgctttgctgtgtagtagatcgactggtaataggaatggacggacagactgaaaggtgatcgtccctctcttcctccgacctcttgttttgctatggatgatactagagcgagattgtacgggttcacggatgggatagcagctggggaccaatgcgtaattaattttaattaactggaagttcggggactttttta

SEQ ID NO: 388658 - DNA, 558 bp, Oryza sativa
  unsure (1)..(558): unsure at all n locations
gaagggggatgtgctgcaagggattaagttgggnaacgccaggttttcccagtcangacgttgtaaaacgacggcccagtgaattgtaatacgactcactatagggcgaattgggtaccgggccccccccagcttgtgctgttgcagaaattagtcgagtccttagacctgggggcgttttcgttgcttccactttcgttgcagatattcttccaccagctgtacnggtattgaggataggacgcccgtacatcagccaatttaccggcagtaatatcttcttatcagaagcggagttcgaagatctttgcagagcgtgtgggcttattgatttcaagtttgtcagaaatggattctatataatgttctcagctactaaagcaagctaattgatcaactggacagtcctctcaaccttgtcctgaaaatcattgattatgcactgattctccgcgccctttctagttggactaatagttttacctgagggaaatgtgccatggtatagtgagtgcgggcacatagtttgctttattcgacgggctccgcnacccnaga

SEQ ID NO: 388659 - DNA, 467 bp, Oryza sativa
  unsure (1)..(467): unsure at all n locations
ccacgcgtccgatgggttttgtttctaaaaaagaatttgatgagattgtggaacagttgaagaaaaagaagggtttggatggtactgttggcgacataagcttggatgatattaggttatttgccaaggagatagttgagatggagatagagaggcatgcagcagatggccttggaatggtggattatgcattagcatctggtgggggtgaagtggttaagcattcggaagcttgcaggaatgctaagagctttatgcctagtcagtaatagttcgcctgaacaagctaagaaaatgctggagccaagttttggccagcctggagagtgctttgcactacaaggaagtagtggttatgtggagatcaagctgaggacaggaataattcctgaagcagtaagtctagagcatgtcgacaagagtntagcttatgatcgatctagtgctccgaagatttccaggtcagt

SEQ ID NO: 388660 - DNA, 523 bp, Oryza sativa
gtcgagcggttcatgaacatccccccgctccccgccggcaccgaccccgccaccggcgtcacgtccaaggacgtcgtcgtcgacccggccgtcggcctctgggcgcgcctcttcctcccgcctggcggcggtgctccccagggtaagctccccgtcgtcgtgtactaccacggcggggcctacgtcgtcggctcggccgccgacccgttcacgcactcctacctcaacggcctcgtcgccgaggctggaattctcgccgtcgcgctggagtaccgcctcgcgccggagcaccacctccccgcggcgtacgacgactcgtgggaggggctcaggctgggtggccttccacgcgaacggcggcggcggctgttgagccgtggctgctcgagcacggcgacttctcccgcgtgttctggcgggcgccagcgccggtgggaacattgagcactacgttgccgcgcgcgccggcgagcacggcggccttgggctcagcatcagggggctgttcgtcgtgcacccctac

SEQ ID NO: 388661 - DNA, 767 bp, Oryza sativa
ccacgcgtccgcccacgcgtccgcacaaaacgaacgcgaactcgagcggcgaagaagaagagagagagagataaggcggcggcagcgagatggcggtgacgatccagtccgtgaaggcgaggcagatcttcgacagccgcgggaaccccacggtggaggtggacgtgggactcagcgatggcagcttcgcgaggggcgccgtgccgagcggtgcttccaccggaatatatgaggccttggagttaagagatggaggatccgactatcttggcaaaggtgtactcaaggctgtgagcaatgtaaacactattattgggccagcactcatcggaaaggatcccactgagcaagttgacattgataacttcatggttcaacagcttgatggaacctccaacaactggggctggtgcaaacaaaagcttggagcaaatgctattcttgctgtttcacttgctgtgtgcaaagcaggagccatggtgaagaagattcccctttaccagcacattgcaaatcttgctggaaacaagactctcgtgctgcctgtacccgctttcaatgtgatcaatggaggatcccatgctggaaacaaacttgccatgcaggagttcatgatcctccctactggtgcatcctctttcaaggaggccatgaagatgggagttgaggtgtaccaccacttgaagagtataatcaagaaaaagtatggccaagatgccacaaatgtgggggatgaaggtggctttgctcctaacattcaggaaaac

SEQ ID NO: 388662 - DNA, 627 bp, Oryza sativa
ccacgcgtccggcggcgcaggcgtgggtgcaggcgctgaaggccagcgagaaggaggccgcggcgcgcgccgaggcggcggagcgggaggtgagggagatggaggccagggcggcgcaggtggcggcggaggcggagaagacggcggcggagcagaaggagctggagcaggagctgtacgacctgaacgcggcggcggagagggacggcctgcagtgcgcgtacccgcggcggcggtcgagcagggtgtcggcgacgtcgaggaggtccaagccccggcggtcgtcggtgtccgcgggcgcatggaacccgcgctcgccggcggtcaccatcatgaggaagaggaaggtgatgcccaacctcctgtagctgatcaagaatataagaggcggcaaaaagaacatcaactgatcgagctgcgtagattgtcatgaccgctcgcgacgctgcgaccgtttttcttgttctgatttccggcggcgcagcacaagaatgttttgatcatcagtttcgcgggattaatggcactgatactgtatacttgggctagatgtaagtacatattaagctggccatccgttcactacataatgtaacctgcacgttcctaataaaattaattatcttt

SEQ ID NO: 388663 - DNA, 800 bp, Oryza sativa
  unsure (1)..(800): unsure at all n locations
gtgctctctctctctctctctcggtgtttccccttcggccttctcgtccgccccttctctcctccaccatccgcctcaccggcgtacggctccgacgagatggccgccccgctccggcggagctcccctccctggggcgcacgctcctctcgccgtcccccgcgcccgcgcggatgctctccgcggcggcgtccgacgccctcgtcgagatcaagccaggcgagatcggcatggtctccggcatccccgaggagcacctccgccgcaaggttgtaatatattcacccgctaggactgcatctcagcagggttcaggcaaagtcgggaggtggaaaatcaactttgtgtcaacccaaaagtgggagaacccattaatgggatggacatctactggagatccatatgctaatgttggtgaagcagggcttacgtttgacagtgcagattcagcaaaggcatttgctgaaaagcatggatgggattatgtggttaggaaacgccatacacctcttttgaaggccaaatcttatgcagagaacttcaagtggaggggtcccccgaaggcagagcaagcctgagcactaatcttgcatgctacattgctagcaggacatgcgcaagatggtgtttacccccatatgtgttgtttttggtttctccaatctgttgtgcgagtgtgggcttagaccgttcctcaaccaactctcaattataataagcgtgcactgtgatcaaatagaatgatttcctgtgtactaaaattgtttaccnnnnnnnnnnnnnnnnnnnnnnnnnnnnnn

SEQ ID NO: 388664 - DNA, 959 bp, Oryza sativa
acgagctgatggggcagtgcgagatgggcacgttcaaggcgtccggccccggcggccagcaccgcaacaagcgcgagtccgccgtccgcctccgccaccgccccactggcatcatcgcccaggctgtggaggatagatcacagcatatgaatcgagcatctgccttgtctcggcttcgaaccttgattgctctcaaagtcagaaagccgataaacctcgaggactacactcctccagttgagcttcttcagatattcccccctgaagtctacaatcccggggaaaggatattggcccccaaattggtccaaataactcgaaatccgccccagggatgcaagctttactagatcttcttttttgctggttgaaggctcagttgtcagaagcagcaaaccttttcggccctaagcactggtgcttgtgtcaaggttgattctatcagatgattcacttcgagcagctgcaaatgaactgcgagctgccaagggtctgaagccacttagatgatagaggattgcctgcataatgttctcatcatcaatggcgccgccgcaggttcccaaatggcatatcatataatataactcatgaaggcagtcttgggtgtttgtcacgatttccctttcgtgcaaggaaaaatactcaggattgtcttaggtgggaccggtaccagctctggatgttacaagaccctatctatggcttcattctgttatacataggccttatcattcacaactcaagaaccatcctttttcagatggatctgcctaacatgtcaccctaaggatgaattcagttgtaattagcacatgaacctacattgtaatttccatgtattgccattgcttgatgctgtcttgaacaaatgagccatttgttgtatgtagtatgaactcaacaaaaactcttccgtatcgaaagaatgttacatacaggtcaaaaaaaaaaaaaaa

SEQ ID NO: 388665 - DNA, 692 bp, Oryza sativa
aaataagtccagtgctccaatagatgagagtaatgcacaagatattgttacagagaaggtgctcaagaaaagaacattcagggtcccgttaaaggttgtggaaaagatggctggtgctggatcaattctttcgaaggagttgtattctgaagcaaaaactaggttagaggcgcttgataagaaggatgctgaaaggaggagaactgctgaactgaaaaataacctggagtcttacatatactctatgaaggagaagctggaagagaacacagaaattttgaccgtctcaactgaacaggagagggaatcttttgcagagaaacttaatgaggtacaagattggttgtatatggatggtgaaagatgctcaagcaaatgaattcaaggaacgccttgaccaacttaaggccatcggtgacccaattcttttcagattgagtgagctaaaagcccggccaacggcttgtgaaaatgctagattgtatcttgctgagttgcaaaagattgttaagaactgggactcgaacaaaccgtggcttccaaaaaagagggtagatgaggttgtaagtgaagcagagaaagtaaaaacttggttggaggagaaggaagccatacagaaaagcacccctgtctacagtccacctgctttcacatctgaagaagtctacgaaaaagttctggacctacaagat

SEQ ID NO: 388666 - DNA, 665 bp, Oryza sativa
ccacgcgtccgcccacgcgtccgatagtgcaagcttgttcaagcaatatttgagttgccatctgttgtattttttttgtttcattaggagactatgaagagttgcccaatgtgtgagatgtatgtagcttcaagggcctgtttttcaggtttgaacctacttggggtcctacattgtaatgagttatatgggctttttaaactgaagtctactattaagtagctcatgattttttgaattgtaactcgcttttgtagccatagtcttgtatgtaagagaagatattttagatggtaatagaatgtgacctatgatgcagtgcccaaaatgtgagatgtacgtttctccaagtccctgttagtcagggagaacctacttgcgggggcctacattataatgagattaatgggctgttactgaggtctgaacctacttgttggtactcctatttgttacaagtttttactgagcattattacttgatagagatgtattcaaacttatgttcatgttttttgcgaatgatgatattggctgcaaaatggatgccctgtggactcaagtccctggttcagggagaacctacttggcaaatcagtggataacatgacatcaacagataaatctgatgcatttgatattctggtgaattttttaagtcatag

SEQ ID NO: 388667 - DNA, 772 bp, Oryza sativa
  unsure (1)..(772): unsure at all n locations
tgctttccattcctactcctcttcctccctctcctctcctctcctctccgccgctgccgctgctgctgcgtgctcctctcatccccgtctcttccccctccgcgcgcgccgcccactcgctgggaggaggaggaagaggagaccttccccggaattcgtgctcgccggatcgggctcgccgcaatccatgtcggaggaagcaggtcgtcccttgcccaagtttggtgaatgggatgtcaacgacccagcgtccgctgatggattcacagtgatattcaacaaagccagagatgagaaaaagggtgggaatgggcaagatactgattcaccctgcaaagaaactaggactgagagggtggaatcatatgcccccaagacaaactcgaagaaatggttttgctgcgtgacatccagtcctacacaatcttgatgaaaacgagttccatgggttgcaaaattactatcctttaattttgctatatacatactatccataagaccttttagagatgcccagactctactgcggtgctagattgggcatctcttaaaactttgaggtgtgtgtatgtatgtgtgagggttatcagatgcacattcggataaatgaacttctgattgtaattctagccttccgtcctgtgacattctgtgatgtagtcgttattcagtgatataatgaatctcacctattgatataatagagagngnnnnnnnnnnnnnnnnnnnnnnnnnnnnnnnnnnnnnnnnnnnnnnnnnnnnnnnnnnnnnn

SEQ ID NO: 388668 - DNA, 605 bp, Oryza sativa
  unsure (1)..(605): unsure at all n locations
aaagtgcgtgaagatcacacctgctcgagncgagcatatcanacactacaagtgcccagattgcggcaacaagagggcaagggcatagagncaagcacaaacaagcagcagtcggaacggaaaccagnnnnaaatcntngagatgtctgcagatatggcctagctttgtagcccgtaggcttggttttccatttcaaatcaaaacactgttaatttaatcgtgccccagctgttcgtgttgctctgactttaattgtgcttaaaactcttggtcgctgtagtaatattagcttcatttccctggtgcggctgcctctgcagacatatgtcaaagacgttcttgaattgaaggactctctgaccattgtttcttcactgcctagtttcattctagttcttgatcttggcttctttcttgactgctatcctctttctaattcttagccaatatttgaacttgtttgaagtttatattggtcaattgaaggtggtatgaccttatgagcagttgaccaccaggttagatgtaaattttcgcagcattggatgaatgacatatgaagtatgcagtaaacatgtcacanaaaaaaaaagatagacactac

SEQ ID NO: 388669 - DNA, 831 bp, Oryza sativa
  unsure (1)..(831): unsure at all n locations
ccacgcgtccggaaacaccaaagtaccttatcctgaaaaggacggcaaactatgagattaggagttatccaccattcttaataggtgaagcaaaaggagataaactaaccggatcatcaggttttaataatgtaactgggtatatttttggcaagaatgcttcttcagaaacgattgcaatgactacacctgtcttcactcaggcttctgatgacaaactctcagatgtatccatccagatagttttgccgatgaacaaagacttggacagcttaccagctccaaacacggaagctgtcaacttgcgaaaggtagaaggtggcattgctgcagtgaaaaaattcagtgggagaccaaaagaggaaattgtgatccagaaagaaaaggagctgcgctcccaattactcaaagatgtgttgaagcctcaacatggttgtttgcttgcacgctacaatgatcctagaacacagagctttataatgaggaatgaggtgctgatatggttaaacgacttcacgctggagtagtagtcttcactgtctacaacacatttctgcaacatatagacacttagcattggagctttcggagcatcatagcaaggtgaaaaaaattaggaagatgcatggatgaaatgataggagaatgtaaataccgaaaaggtcactatattacatggtaattctagtccatatgaaaaatgtttgtgtataacaaaagtgaaatgaacaaaatgaaactgtttagaacaaaaggaataacccccacctagccaccctcattcccagtgacaaaaaaaaaaaaaaannnnnnnnnnnnnnnnnnnnnnnn

SEQ ID NO: 388670 - DNA, 746 bp, Oryza sativa
ttcatcccttcaccacagcgggcgccggcgagcggcgaggctgggccggcgagcggcgaggccgggccggatctcgccgccgcccaccgcttgacctccctccgtggcgctgcctccagccaaatctctaaaagctcgggaagaaattaacaaaaccggcaatggacgtcgatttttggggagtggtaattgagccgtgcaataagaaggagatcttttgtcctgaggataccctgtatcatctaacatcggtagcccttgatgaggcttacgggctaaaagactccaatgtgaaagtatttgtcgaagttaatgatgagaagtttgcgattgggacgctttcctccaaaaggcacccgcatatcaaggttgacttctgtgtcaagaagaactttcaactattccacacctcactaatcagcaaagttgccttttgtggctatcaagtaaagaatttgggaaaattcactgattctgaaggtgatgaatctgatgaggaggttccaccagataatatgatcaaagaagcacagaaaagtaaacttcctgcaaagtctgctacagttgcatccgccatgcaaaaggcttttgtaaaggaaatagagcactatgagaaatcaaaagctgatgatgacaacaatgaacgataccgtgatatttcagtagttggtgaatctactggtaatgaggattcaagtgatgatgctgattatgaaggtaagagttctgatgaagaagagactact

SEQ ID NO: 388671 - DNA, 683 bp, Oryza sativa
  unsure (1)..(683): unsure at all n locations
ccacgcgtccgcggacgcgtgggccaattgttgaggaaatgtggaaggatcctgccatacaagcaacatataaaagaaaagacgaattgcattttctccctgatgttgccgaatatttcttgagcagggccattgaagtatcaagtaatgagtatgaaccttcagagaaagatataatatatgctgaaggagtaacacaagggaatggattagccttcattgagtttactctggatgaccgtagccctatgtcagaaatgtacactgacaatcatgagcctcactctcagacactaaacaaatatcagctgattagagtaagtgccaagggaatgaatgagggatgcaagtgggtggaaatgtttgaggatgtcagcatggtaatattctcggtagcactcagtgactatgaccagctgggggccccttcaagtggtggcaacagtccccttgtgaataagatgatccaaagcagggacttgtttgaggctacaatcaggcaaccatgtttccgcgacatgccatttgttcttgtgctcaacaagttcgacctcttcgaggagaaaatcgggcgcgtnccgctctccacctgcgagtggttcagcgacttctgccctctccggactcaccacaacaatcagtcgctggctcaccaggcgttctactatgtcgcgatgaagttc

SEQ ID NO: 388672 - DNA, 721 bp, Oryza sativa
  unsure (1)..(721): unsure at all n locations
gctggcnaaaggggatntgctgcaagncgttaagttgggtacgccaggntttccccagtcacgacgttntaaaacgacggccantgagcgcgcgtaatacgactcactatagggcgaattgggtaccgggccccccctcgccgccgtcccccccttcctctcggctcggtcctccgctccgtgacgccgcgattccaacccccctcatcctcgcctccggtccccagtctccgacgccacgagatggccgagattgagataaaaacagcacctgctgatttccgctttcctacaacaaaccaaaccaggcattgtttcacacgctatattgagtaccacaggtgtgtgaatgccaaaggggaagcaactgctgactgtgagaaatttgccaagtactaccggtctctctgcccagcagaatgggttgagaagtggaatgaacagagggagaatgggacatttgcaggaccactctaaatctcctgtttgagagtcttctcagatcagtccactgcccttcgtcggtgtcactgctatcatctggtttgaatttatgctgctgcttttgttcttcaagcttgtgttgcaaagcaagagatccttttatatgtgttgcactaataatttagcatggttgcttgacatgatgtttcacagatctgtttattcacatgattttattcaaatataagcattttgatacttaaaaaaaaaaaaaaaa

SEQ ID NO: 388673 - DNA, 861 bp, Oryza sativa
  unsure (1)..(861): unsure at all n locations
ccgggncgacccacgcgtccggcttccaactctgcgcactcttgtttcaaaaataaacagcacgtttagtcgtaactttcaagaaatggctgttgctggagaagtttcacttgatgaacatggtcttgattttgagcaatatggcatccttataaaggtcaagtttaggcaaacaggtcagttgcaggtgttgagcgctcatcaccaatctggaggggagcgatcagtttcaaccatcctgtaccttgtatcacttcaagatcttaccaactgcccctttcgggtcgttgatgagataaatcaaggaatggatcccataaacgagaggaagatgttccagcagcttgtgagagcagccagtcagccaaacactccacagtgcttcctcctgacgcccaagttgctgcctgatttggaatatagtgatgcatgcagcatcctaaatatcatgaatggcccatggattgagaagccagctaaagcctggagcaccggtgattgctggagaacagtaatgagcgtgagtgggcactgatggtcaaatacggatttgagtactgcacttcgcaagcgattcttcaaaagtcaatcgttttacgcggaagcttcagggtattcaatgtgatctttgcttgtaccccatgtagataaattaagtccaaaaaccagaagctccaatgtgctggactgctagccagctgccttttgtgctttgtttattgcagtngtggtttaaacagctactggctgacccttcggcatgtcgttaactcagggacttcataggncaaagtggcgctaaaatcgtgacatgttcccaccagggtttatcgtttgatggnnnnnnnnnnnnnnnnnnnn

SEQ ID NO: 388674 - DNA, 1307 bp, Oryza sativa
ccacgcgtccgagcaaactctctctgtttgaagccacggagaaaaagcttgggtgatttcttggaagcgaagagtgaggggagaagaagaagaagaagaagaagaagaggggggaggaggaggagcagcatggctgagcacaaggaggagcagtcggtgatggagaagctctccgagaagctgcacggcgactcctcgtcgtcttcctcggactcggacgacgacaagaagggttcctcctcgtcgtcggcggcggcggccatgaaggccaagatctaccgcctcttcggccgcgagaggcccgtccactccgtcctcggcggcggcaagcctgctgatctcgtgctatggaggaacaagaagatctccggtggggtgctcgccggagccacggccatctggctactcttcgagatcatggagtaccacctcctcaccttggtgtgccactgcctcattctctccctggctgtcctcttcctctggtccaatgcctccactttcatccacaagtcccctccaaacattcctgaggtgaaaattccagaggacttgacagtaaacattgccctttctctgagatatgagatcaatagaggttttgcaaccttgagggagattggtcatggccgtgatctgaagaagttcctcattgtgatcgctggactctggattctgtcagttcttggtagcagctgtaactttttgactttgttctacatagtttttgtggcgctctacactgtgccagtactgtatgagaagtatgaggacaaggttgatgcttttggtgagaaggctgagattgaatttaagaagtactatgccctctttgaagagaaatgcctatcgaagattcccaagggtcctttgaaagataagaagcactagattagtagaaggtacctgcaatgaatcagcagccgtgttaatcactattgctcgacttttattttggaggatggttatgagtccttgtgtgtgtgtctagttgataatatatacttgcatgggcagttctagccttctagcatggctgatagttgttatgtggtggcagatggttgtggcgtgcaatcttttgtggagttgagcaatgctggctcaaatctgctgatcttttcccccctttcatgttcaactttaagcatagttactatatctggatgctagaagtattatggtactatcaatgccccaagtgaaccttgttgatatattgtttcatggctttatgtttctttaccggttttaggctagtgggatgtattctggcattactttgttttgctgatatgacatctggt

SEQ ID NO: 388675 - DNA, 734 bp, Oryza sativa
gccacttgagcaacgacttgggttttaggtcgtcgcggccgaaaaaaatatcaatctctgccccgaatccattggccgtaggccaccctgggagagaggaaggaagcatcttcctgtgcctctccttaccctcttcgtcttcttctccatctccttgtgtgctcagtagcttctcctcctacgaaaccaaccagctgccgccggtgaccgtcgatccgtcgaccgccgccgccatgagcagcgatgttcctgggtacttcgtggggcggccgatgaaccaagcggagcctgcgaaagaacagcagcagggcgccgacgagcagcggcctgctaccaacgcgcagatccctggtgactacttcgtcgggcgtccggcaaacccgcagcagccgccgtcgcaacctccgcgggcgcaggagagatcgagcttcttggccaaatgctgcccatgcctcgacagccgagctgagggatagacgaacaagtgcggcggcgggcgtgaccgtaaattcgatgggaaaattgaagcaaatttgcttggagtgataaggctcggatctgtgtttgtgttgcaagttttgctaatagatgtttgtaactgaaggttgcttctattcatttgtataccaattgttcattcgtatcatcagagtgcgaattcgatgaaattgtccattccaatccggcatgccttttctccttccttgaaatgaatattctgctccattgctggc

SEQ ID NO: 388676 - DNA, 469 bp, Oryza sativa
ccacgcgtccgcccacgcgtccggtgaaaagaagcgtgcttacctcacactggaggaacttcgccaattgccagataatacaaacacgtacaagactgttggtaaagtatttattttggagccaaaatcactcctgctgaatgagcaagaacaaaagcttaatgacagtgaaagtgcaatagcatcgatgcagacttccaaggaatatcttgagaagcagttggcagaagtggagaacaacataagagagctacttcagcaggaccctgggctggcgcgccagatcctatcaatgacagttcagtgaaaagtagtctttttctatctttgtgagtttattttgtcgaatgcaatgctagaatttgttaattcgacacaacttgcttttgctcctcctgttatgtctctggtgcttcgctgtaatcggatagtgtatatctgcattctatatgatggaatttgttagctg

SEQ ID NO: 388677 - DNA, 679 bp, Oryza sativa
  unsure (1)..(679): unsure at all n locations
gcantctaagttttataaaactagtgggggtgtgcgaaggtaggctcaagcgttgattctgctcgtttagctagcccgcctctgacgctgcattatggagggagtaggcttgtagctagcccgcctctgcacgctatatttcaaggaatcagagatccatacagacagagacgttcagccatcagacctgcagaggcaatccatccatggcatctatcgttcctgtactcctgcgcctgctgctcctgctgctcccgcttcccctgatccgagaccacctctggccgagccaccgccggccaacgccgcaggacgatgcgggtgagctccacccgatcttcctggtgcccggggcgagctgcagcgacctggaggcgcggctcaccgaggcgtaccggccgtcgacggcgcactgcggcgcgatgaaggggaagggatggtttgggctgtgggagaacaacacggagctgctggtccacgactacgcggactgctcactggagcagatgaccctggtctacgaccccgccgccaacgagtaccggaacctgcccggcgtcgagacccgggtgcccaacttcggctccgctgggtcgttcggctacaagacccctgttaaccgtctacagagagcacaatgccttggaaagctcacagactggctggaagaattgggata

SEQ ID NO: 388678 - DNA, 1273 bp, Oryza sativa
agcaaaccttatgtttcgcttctaactggaattgtcagggggggaggtgctgatgtttctatacagtggaaggatccgagttgtcacagatagcacggtttttgctatgccagaaacagcgttgggtctctttccagatattggggcttcatattttctatctcgacttcttgggttctatggagagtatgttggtcttactggtgtaaggttggatgctgctgaaatgcttgcttgtggcctagcaactcattttgtaccttcagataggctgtctttgctagaagaatcacttaaaaaggttgatacatctgatccatttgctatatgtggaattatcgatcaatattcgcaacaaccatctctgaaagaaaaaagcgctctgaataggctagaaatcatcaacaaatgcttttccaaaaaaacagtggaagaaatcatagcctctcttgaacaagaggctccaaatgttgctgatgaatggattgcttctgcaatccagtccatgaggaaggcttctcctactagtatgaaaatatccttgagatcgataagagaagggcgaacacaaactgttggtgaatgcttacgtcgagaatatagaatggtttgccatgtgatgcgtggtgacttcagtagagacttctttgagggatgcagggctatattgttggatagagatcgaaacccaaagtggatgcctccaaggttggaagaggtgcacgacgaggtggtcgaaaaatatttttccaaagtcgatgatccagagtgggaagatttggacctacctcctagacgttcccatggaaggaggcttgttcccaagctttgactgaatgaagcctctggtgaaaaactgaagcctttgttggtgcttcttaataacaaacagatcgtccccaatttgagggatatgtggagacaagcgatgaagtttataataaagctgaaacatataatactataggttaacaattttattagtagcaatttagagaagtccatctcatagtctcatgcgatgcttatattggtatcgctattgtgctttttcaaggtgtgaaggtacgcttcaagccaaagcccaactgcataacggcggcccatatgataccggtatcaggctatcctattaggctttgaagctatcttctgcttgtagattctaggtaatcttttatatatattgtataaaagaaattcataagtttgcactgtgttgttttttaagtaaggcctcgaaaaggtagatccctaaaaaaaaaaaaaaaaa

SEQ ID NO: 388679 - DNA, 611 bp, Oryza sativa
ccacgcgtccgcccacgcgtccgcccacccgtccgatcctcttcaacctctggccctctcactcctcgcgccgcgcggctgctccggccaccaaagtggcgctccgatggcggtgagagtcccttccatggagctgcaccgccccccgccgtccgtatccggtgtccgaggaaaaagctgccttcaaaagcctttccttgtccaagcaaagagattagagggattggagaaggcaaacccaaggtcacgaggaaagcaaagtttggaacaagtgaagaaaagagcaccactgatccgtgggacagtgagtccacctctaccagtaccaggtcacataactcaacctccttacgttggtaaaaaggatgcttcagagatagcaagtgagatacaaatgcatgacaaagtgagcattattcacatgaaagctgcatgtgagcttgctgctcgtgttcttgaatacgctggaactttagtgaaaccctctgtaacaacagacgaaattgataaagcagtgcacaagatgatcattgatgctggagcctatccatcccctttcggatacggagggtttccaaaagcgtgtgcacatctgtgaatgaatgcatctg

SEQ ID NO: 388680 - DNA, 749 bp, Oryza sativa
cccacgcgtccgtccacatttctcctcggaaagtcaaaggcaagaaacaccatggatgccactgccatcggcaacggcgccctgcactccaatggcgccggcgccgacaccaaagggaagccgatcaaatgcaaagcggcggtggcgcacggccccggcgaggcgctggtgatggaggaggtggaggtggcgccgccggcgaggatggaggtgcgcctcaaggtgctcttcacctctatctgccataccgacctcagcgcctggaaaggagagaacgagcttcagcgaaagtttcctcgcatattgggtcatgaggcagcaggggtggtggagagcgtgggagagggtgtggaggatcttgcccctggagatcatgttgtccccatcttcaccggcgagtgtggtgcgtgcacctactgcgagtccagcaagagcaacctatgcaaaacctaccgtgtcaacccattcaagagcaccatggtcaccgatggtggcacgaggttcaccatgatcgaccgctcctccggtgcacgcaacccggtctaccattttctcaacacttccacctttgctgagtacactgtgattgactccgcttgcgctgtcaagatcaaccctaaggctcccttggagaagatgagtctcctcagctgtggggtctccacaggagtgggagctgcatggaacactgcaaacgtctccaaggggtccacagtggcaatatttgggcttggggccattggtcttgc

SEQ ID NO: 388681 - DNA, 583 bp, Oryza sativa
  unsure (1)..(583): unsure at all n locations
tgttggtttttccccaaatcaaaaaccctcccgtcccatcccctccttgtgtagttgtgttgtttgcggcgaaaccctaggattgtctccggcggcggcggcggaaggatcatggagcgggcggcaggcggcgtgtcgtaccagcggttcccgcgggtgcggatccgcgagctgaaggacgactacgccaagttcgagctccgcgacaccgacgccagcatggccaacgccctccgccgcgtcatgatcgccgaggtccccaccgtcgccatcgacctcgtcgagatcgaggtcaactcctccgtcctcaacgacgagttcatcgcccaccgcctcggcctcatccccctcacctccgccgccgccatggccatgcgcttctcccgcgactgcgacgcctgcgacggcgacggctcctgcgagtactgctccgtcgagttccacctcgccgnccgcgccaccgactccgaccagacccccgaggtcacctccaacgacctccgctccaccgaccccaaggtctgccccgtcgaccaggctagggcctaccagcacgccctcggcgggactgaacccttcgaca

SEQ ID NO: 388682 - DNA, 927 bp, Oryza sativa
  unsure (1)..(927): unsure at all n locations
actcattgttgcaaatgctggtgattcccggtgtgtgctctcaaggaagggtcgagcttatgacctgtcaaaagatcacaagccagatcttgatgcagaaaaggagaggatactgaatgctggtggtttcattgttgctgggcgggtcaatggaagtttgaacttggcaagggcaataggggatatggaattgaagcagaatgaatttctccccagcccgagagacagattgtcactgctgaacctgaatttaaaccccagttaaactttctgaggatgatgagttcatcgttttagcatgtggatggcatatgggattgcatgtcaagtcaagaagtggtggactttgtttcacaaagaatggaacactgggggatagcctatctgctggtctgcgagaagttgcttggaccattgcttgggcaccctgttatcccggtgggtgatggctgtgaataatatgaccagtggatcatagtccaaagttccaagaagcccaagccaaagtcagcctgcctacttccaagccacaaaatcaatcctgtcctcttccagcaagaagatgcgaccaaagtgagcttcctttaaccgtcgcacctaaaccatattccagatcacgaaatctcgcattgtaaaagcctgagttcccctttcagaatttgagcccttacctttgtgaacagcgagcttgatgatggcccaagcgatccaaacaagtagcaggccgagaccgaaccatggagttccaaccggtgatagacaaaaaggatagtaagtggtgtatataagaaaagggattctattctacagtcactatagggtttgttctttctttcaactagcatctttttcttgcaccacaacctgtaatacatgccatgttgcttaatcgaactgggttgtgtgnnnnnnnnnnnnnnnnnnnnn

SEQ ID NO: 388683 - DNA, 496 bp, Oryza sativa
cgcgtccgcccacgcgtccgcccacgcgtccggtctgcgagaagttgcttgaccattgcttggcacctgtatccggtggtgatggctgtgataatatgacagtgatcatagtcaagttcaagaagccaagcaagtcagctgctacttcaagcacaaatcaatctgtctcttcagaagagatgcgaccaaacgagcttgatgatggcccaagcgatccaaacaagtagcaggccgagaccgaaccatggagttccaaccggtgatagacaaaaaggatagtaagtggtgtatataagaaaagggattctattctacagtcactatagggtttggtctttctttcaactagcatctttttcttgcaccacaacctgttatacatgccatgttgcttaatcgaaccggggtgggtgaaatggatgaattttccaaaaattttttaggtgtttgtttcatttttttcctaatattttctataatggttcttaatattttt

SEQ ID NO: 388684 - DNA, 1364 bp, Oryza sativa
  unsure (1)..(1364): unsure at all n locations
ccatcgcgtccgcccacgcgtccgttttcattttttgacaagaatgggaaatacgtgcaggccttattgactgcaaacacgaggagcagaatggatggtgaggccataggagccttctgtttcttgcagattgcaagtcctgaattacagcaagcctttgagattcagagacaccatgaaaagaagtgttatgcaaggatgaaggaattggcttacatttaccaggaaataaagaatcctctcaacggtatccgatttacaaactcgttattggagatgactgatctaaaggatgaccagaggcagtttcttgaaaccagcactgcttgtgagaaacagatgtccaaaattgttaaggatgctagcctccaaagtattgaggatggcagctctttggtgcttgagaaaggtgaattttcactaggtagtgttatgaatgctgttgtcagccaagtgatgatacaggtgagagaaagagatttacaacttattcgagatatccctgatgaaattaaagaagcctcagcatatggtgaccaatatagaattcaacaagttttatgtgactttttgctaagcatggtgaggtttgctccagctgaaaatggctgggtggagatacaggtcagaccaaatataaaacaaaattctgatggaacagacacaatgcttttcctcttcaggtttgcctgtcctggcgaaggccttcccccagagattgttcaagacatgtttagtaactcccgctggacaacccaagagggtatttggcctaagcatatgcagggagatcctaaaattgatgggtggcgangtccaatatataagggagtcggagcggantttcttccatatcgtacttgagctgccccagcctcagcaagcagcaagtagggggccaagctgatatggtgtatgctcgtcgctaacctcgcataactattcggtcaaccaggtgacctgggatcttctgatggagaacccagtgtatgagagttccagaaaccaacatttcgtccactctgatgaagcacatctgaactttggaacggcatcggtgattctcggtgtcgaggtggtccctccagtctcctgattcctggcatgcccgactgttagttcagctttggacgatgttgttctattagagttctatggcggcaaccaatgcacactgacggtcatgtaactcgtagcataggcccactatcacttggttgaagtacatatatgttctaaaagctgccatgtatataacatcggttatatatgtactacgtgcataaggagagctgtgcagctcccagggtggtattttgtagggcttcccaagcctatgacatcttattatatcatcttaacat

SEQ ID NO: 388685 - DNA, 546 bp, Oryza sativa
ccacgcgtccgagagaacaaatgactcagactgatcaagctattgaccgttcaaaaatggttgtggcacaaactattgaaactggaacacaaactgcttcagcgctatcacagcaaccagaacaaatgaagagaattggcaatgagctggatactgttcacttttcgttaaagaaggctagccagctggtgaaagagattggccgtcaggttgcaactgacaaatgcattatggcattgctttttctgattgtttggggtgtgattgcaattattgttgttaagattgtcaacccacataacaagaacatccgcgacatcccaggacttgctccgcctgctcaaaatttccagattagtaacaggagactgctgtcggtagaaattatcagaggtctatgatgactgtgcttgcaagttccatgcaggcggagttcagttcgtttcttcagagtagcttaattgcggtcataagatactacgacatgctgtaaaattcttagtgcctgtatattttattccctggtgtattagatatgaagtcagt

SEQ ID NO: 388686 - DNA, 466 bp, Oryza sativa
  unsure (1)..(466): unsure at all n locations
ccacgcgtccggatgatgaaagcggtgataatgaaggggatcttgtcatggcagctacgctggcagacccagaatctattgcgattcatgatcaggaatggttctgggatcatctcagtgggcatgaaggaagaggacttaacaagattgatgattcctatgatgtctccaattgcagaaattgaggatatttcagctgctgcttccacagtaacagtggatgccagagtgggcatatcaaccggcgtctcggctgcagatagggcaaaaacgatttttactctagcctcccctgattctaagccaactgacctcagaagaccaggccatatattccctctaaaataccgaaacggtggtgtgctaaaaagagctggacatactgaggcatccgtcgatcttggtcgcgttggctggcttgcgcctgtgtctgtcctgtcaaccgncatcanccagtggatnggtc

SEQ ID NO: 388687 - DNA, 460 bp, Oryza sativa
cggacgcgtgggcggacgcgtgggcggacgcgtgggacggaatagctgatcaattgaacaaaatatttgattcggaatggaaattattggaaaggaaatggaaagacagaaatttggtacaagagcagccatcactgaaggtatgagaggctcagcctgctgtgtaccccaaaacctgtgctacctaagggggtgactgcaggcacaaattcagctgtgagcaagacactggcaactgcattatcctccaaagtaaaaattaaattttctgtgcgaggctctgagctgacctcttccaaagacacgcccttgcaagcagttggcagaagagacggcacaattaaccaatctctcccttgcaccaaggacaatgctaagacaccaaggatacaatcaagtgaagacagatctgaatcaactggaaatgaattgcggccttgcgatgatgcttctacttcac

SEQ ID NO: 388688 - DNA, 579 bp, Oryza sativa
tataggtcttaggcctccctgagaggctgagagagagagagagagagagagagagagagagagagatttggtgttggataggagaagagagtggagacagtgggggtgagaggattggaagcatccagattctgaatctcctgcaagcctacttcctgttatcttctttgggctttcagcaagcatccattgtgatgcactggccagtggatgataaagccatcaatcaactgaaccagcatgagctcccagagtgttgttgcagtgaagcagattactgctccggacaaaatagtggaaacctgtccatccacaaaacattctgcacataagctgttcgatgttaaaccggtttttcaagggttgatagatcacattttgtcatcctccagtcagtcctcaagcatcaagattgagctgatcagatcatcaagcttgccaaatatactgccgtttcagaaaagaagctctgaacctgaacctgaaagtccactgtctcatgtttcacatcccaatggttcagagccaagttactcaaattcttcaaccttctgcacaaagttggtttcgtcggcgtcg

SEQ ID NO: 388689 - DNA, 891 bp, Oryza sativa
  unsure (1)..(891): unsure at all n locations
catattgganaagttcaggcaaagcaatttgagccgctgccctctgttgangataagttacttagnaaaatacgggataaagagccagaagtggagaacattanccaaaaggaactctgaacttgaggaccagattaaacagttggcngtggaagttggtgcgtggcagcaaaggnccaagtacaatgagagcatgataaacgcactgangtacaacttggaacaggtatgtgcccatcaaagcaaggatttcaaagaaggttgtggtgatagcgaggtggatgaccacggcatcctgttgcaatggtggtgccgccaatttgcaactaatgccgaaggagaacagacactcccaaagatttgaccgcatgtagagtctgcaagtcaagcgaggcttgcatgctattgttgccttgtcggcatctttgcctttgcaaggagtgcgaaagcaagctgagcttctgcccgctatgccagtcttcgaaaatacttggcatggagatatatatgtagaatagaatttatgtattactcgagtatcgtcccagatactgctgtgtttatacaacagtctattgttaaactgtaccactagtatggaccaacatgagatgccactggatcgaaaagaccaccatttatggtggatgtactgctgcaaatgttactttagaagtgcaagctttggactttcgattaaaaaaaattaaatacatataagaaaaaagaaaacaaacataaaaagcagaataataaaaaaaagaatgaaaatgaagaatatgaagaggagaaaactttaagaataacaaataaaaaaaatgggggggcccgtttaaaggttccaagtttacgtccccgggtttgcgaggtataagttttttttttggggcc

SEQ ID NO: 388690 - DNA, 626 bp, Oryza sativa
cacgcgtccggaaatctgaaggcaaggtgagactgactggtttaggtgcccgtgacagtctccgcttggaggctggcctctgcctgtacggcaacgacatggagcaacacatcacaccagttgaggctggtctctcatgggcaattggcaagaggaggaaagcagaaggcggcttcctgggagcagatgtgatcctcaagcagctccaggaaggcccaaagatcaggcgtgtcggtctcctctcgcaaggaccgcctcctcggagtcatagtgagattgtgagcaactccggggagaacattggtgaggttaccagtggagggttcagcccctgcttgaagaagaacatcgccatgggctacgtaaaatccggtttgcacaaggctgggacagagttcaaggttgtcgtccgtgggaagtcctacgatgccgtcgtcaccaagatgccgttcgtgccgaccaagtactacaaaccctcatagatttgtacaaaggatgctccttcggttgaaattttctcatgcaactctcttggcgctgcttgttctgcagcaccgcaactgtaacttctggaaggtctcatcttacagcgtgacattttacctttggccatctaataatatgaa

SEQ ID NO: 388691 - DNA, 920 bp, Oryza sativa
ccacgcgtccgcccacgcgtccgcggacgcgtgggctaccccaaatatcgtcggagttaaggagacaacttccagtagatctggctgaaggaaatctcaaagctcttagcctgcaagctctgggtcagggagtcgacatgcaacttggtctggcaattgatagcccaaaggccactctagcggtaaaacggcgcttagcttgcgagatggtcaaatattggcatcaaattcaggagagcattccagaaattccggtatccgatggatgggggaaaaagcatttattgcttggtaagtggaagtatgttgaagctaaggctgcagcatactatttccatggtttgattcttgacgagggaaacacagagtaatctcatggaatggcagtagctgccttgcaagcttcagaagaatttctgaaagaaagcaaaagggcttctgaagccttccatgcaacgtgcctccaacatcaaggagccccactcctttcggaacagctaagtacatgcttgacaagattccaaaagatgcttcaagcaaggtcaagatcaatcaggacctgtatacgcaagagagggtcattggaacaccgcctccattgccggattttgcgttggctctaaaacctgacgactacgatcttcctccattagatccactttggaacaaagaagacagccgtcagtagcagtatattcagcaagaatgtgaatgttgtctttcagaggttcaggctctagtataccatgtcgaagccagacgtggtacgaatgaagtgtacaaaatttgtcccaacaaattgggtgtcagcaaaatttaaacaaggcctggagataatctcaagagcattgtacaggcgaatcttattctgacaaaggaaatgctttgcaaaaaaaaaagaagaaaaaaacttaccattt

SEQ ID NO: 388692 - DNA, 1101 bp, Oryza sativa
  unsure (1)..(1101): unsure at all n locations
ggaaactgggtgggatgtgccaattcatgttgatgcagcaagtggaggatttatagcaccttttctataccctgagcttgaatgggacttcaggctaccactggtgaagagcatcaatgtcagtgggcacaagtatggccttgtgtatccaggtgttggttgggtcatttggcgaagcaaagaggatttgcctgaagaactcattttccatataaactatctggggacagaccagccgacgttcactctgaacttctccaaaggttccagccagataatcgcacagtactatcaactaatacgcctgggattcgagggatacaagaacatcatgcagaattgcatggagaacacagcaatactaagggaaggcatagaggcgactggtcgattcgaaatcctctccaaggaggccggtgtgcccttggtggcgttctcgctcaaggacagcggcaggtacaccgtgttcgacatctccgagcacctgaggaggttcggctggatcgtgccggcgtacaccatgccggccaacgccgagcacgtcgccgtcctccgcgtcgtcatcagggaggacttcagccggagcctcgccgagcggctcgtctcggacatcgtcaagatcctgcacgagctggacgcccattcggcccaggtgctgaagatctccagcgccatcgcgaagcagcaatcgggcgacgatggcgtggtcaccaagaagagcgtcctggagaccgagagggagatcttcgcgtactggagggaccaggtgaagaagaagcagaccggaatctgctagtgtggctctgtgagaaatgcttgaataacgtggcatgctcgatttgtgcatgggatggccggatcggatgggactgactggcggtgtacggacatggctgcccttgttcttatgttgaactgttgatgtagaaaaatgtgtggcctttgtatggttgtaagccatctacgtaccatggacttcagctatttggtggtttgttttcaacttttccatgtacacctggggcttgccaatctccttcctcctcttttttatctctntnattttgggnnnnnnnnnnnnnnnnnnnnnnnnnnnnnnnn

SEQ ID NO: 388693 - DNA, 889 bp, Oryza sativa
attctctctcctcctccgccaccgccatggctcgcctcctcctccccctccccatcgccgccgccgccgcctcccgcctccgcctccccgtcctctcctcctccgtggcgcggcgtgaggcgctgctcttcggggggagggtggcggcggcgagggcgccggtgaggctggcgaggagaggggtgagcgccggggcggaggcgggcgggtcgtcgtcggccgccgcggcagcgcaggtgatcgggcaggacgaggcggtggagtgggtcaagaaggaccggaggcgcatgctccatgtcgtctaccgcgtcggcgacctcgacaagacgatcaagttttacaccgagtgcttggggatgaagctgttgcgcaagcgcgacattccggaggagaggtataccaatgcttttctcgggtacgggcctgaggactcgcattttgttgtggagctcacttacaattatggtgtggaaagttatgatatcgggactgctttcggtcacttcgggattgctgtcgaggacgttgcaaaaacagtagatctcattaaagccaagggaggaacggtaacaagagaaccaggacctgtaaaaggtggaaagtctgtaattgcttttattgaagatcctgatggttacaaatttgagcttatagaaagaggtcctacacctgagcctttatgccaggtaatgcttcgagtgggagatcttgatcatgctatcaatttctatgagaaggcatttggcatggaacttttccggaaacgagacaatccccaatacaagtatactattgcaatgatgggatatggtcctgaagacaaaaatggctgtctggagttgacctacaactattgtgtcaaggcatatgataaaagaaatgcttatgc

SEQ ID NO: 388694 - DNA, 602 bp, Oryza sativa
ccacgcgtccgtgagagagctagcagggaaatatttgaagccagaaataagcatataacgaatacagtgactattgacctgcatgggcaacatgttaaacaagccatgaggcttctcaaggttcacatgatgatttgtgtgtgcatgccaaccacctttcttagagtaattactggttgtggtgtagaaggcacagggaagggaaaaataaagcgcgcggttgccgagcttgtggagaaggaaggcgttgagtggcatgaggaaaatgccgggaccatagtactaaggcttggtggcccaagggagtatcgtttccttgagcatgacagtgactctgattgagccttgggtgtctgttttgaggagactttacatagattaacggccggtctaatctatgtatctcctgtatctatctgtatttacatgtgttgtaattatggataggtgacctaggtcgtcctctgatgtagggctgtagtttctgacatacaggctctggaatagcaaggagtagagaacaggtgctgtctgatgtaatgatcgttgtaggctctgatgtaatgatcattgtaggctgctaaccttgtaaaaaaaacaaa

SEQ ID NO: 388695 - DNA, 1295 bp, Oryza sativa
cttccccttccctaggcgtaaaagaaagaaaacctcccgtctctcgtctcctccgccgccaagacgagtcgcggctgaacaggggaggggcgccgcaatctccatctggcgagcagagcaggggaggggaggggaggggatcctgagctgctatcccctcccctgcccatgctggttgttactaaacctggtcaactcccagttgagtttcttgaaccctctgctgcccagaaactggtgattggatttgattgtgaaggcgtagacctttgccgccatggtgctctctgtatcatgcagattgcatttcctgacgctgtttacttagttgatgctattgagggtgggaaagaacttattgaagcttgcaaaccagcacttgaatcagaatatgtcaccaaagttattcatgactgcaaaagggacagtgaggctctgtatttccagtttggcataaaattgcataatgtgatggatacacagatcgcttattctctgttagaggagcaggaagggaaaaagagaggatacgatgagtacatatcttttgtcagcctccttgctgatccccgatattgtggaatggcatatcctgaaaaggaagaagtccgtacccttctaaggcaggaccctaacttttggacgcataggcctttatctgaaatgatgattcgagcagccacagatgatgtccgcttccttctcagtatacatgagaaaatgatggagaagttaagcaaagtatctttatggcgtctgtcagttcgcagtgagctatactgcaggtgcttttgcataaatgacaacaagtatgcggattggccacctcttccaactgtccctgatgaaattgaacctgatgtttatgttcctgaggtggatatcctgtcagtcttggatgtgcctcctggcaaaatggggcgtgttattggcagaaaaggatcatcaataatggaagtgaaagcatcttgcaatgttgaaatccatattggtggtgcaaagggacctccagacagggtattcatcattggaccagtgcaggaagtcagaaaagctgaggctatcctccgaggccgcatgctggagttctagagcaacaacctttttgtgataccccggcttcaaactgctctcctcaatatgtcagtcttgtgtgcacaaaagggatatacagaaatgcatgtggtactgggtgcctccaggatctctgatcctagacatgataaaacagaataaaaagaattgaaaggttacctccatctgtgccagtgctccccccccaattaaaaaaacac

SEQ ID NO: 388696 - DNA, 851 bp, Oryza sativa
ccacgcgtccgcccacgcgtccgaacgaacacacacacaatcggaatcgattaagagagcaaattgtgtagtagtgttgcatatggagacaccaaagatatcgggagtagcacttgcggcagcattgccgtcgttctggccatggcgaccacgccggcggtggcgcagaactcgccgcaggacttcgtggacctccacaacgcggcgcgacggtggagggcgtcggcgaggtggtctgggacgacgccgtggcggcgtacgcggagaactacgcggcggagcgcgccggcgactgcgcgctcatccactccggcagctgggagaaggccggctacggcgagaacctcttcggaggctccggcagcgagtggacggcagcggacgccgtcaacagctgggtgggggagaaggatctgtacgactacgacagcaacagctgcctggggtcgtgggactcgtgcctccactacacgcaggtgatgtggagccgcacgacggcgatcggctgcgcccgcgtggactgcgacaacggcggcgtcttcatcacctgcaactacaaccccgccggcaacttccagggagagcgccccttcgagcgtggcctcactctctctgcttaataagttattaatacagtatttactttaactatgtatggagtatgatataaatgtgcgaaataataattacggggatcttattatatatatatgtacgttgtcgttcgaataaaagaagaaaataaatgagaaaattaattccattgtctgcaaaaaaaaaagggacagtgaggctctgtatttccagtttggcataaaattgcataatgtgatggatacacagatcgctta

SEQ ID NO: 388697 - DNA, 520 bp, Oryza sativa
  unsure (1)..(520): unsure at all n locations
ccacgcgtccgccacgcgtccgccacgcgtccgccacgcgtccgccacgcgtccgcccacgcgtccgcggacgcgtgggcttcattctccattaatttcacggtttcatctcgacatctcatcatctgttttaagttgctagctgaggaggaggagcaggtgccagcaatggcgtcgtcaaagccaatcctgtacggtgcctggttcagctcctgctctcaccgaatccggatcgttctcaatctcaaaggtgtggattatgagtacaagtcagtcaatcctcgaacagatccagactatgggaaaatcaatccaattaagtacataccagcattagtagatggagacctagttgtttctgactctctcgccattgcattgtatcttgcaagataaataccctcaacatgctctcctacctaaggttctcaaaaagaaagctcttaatcttcagattgcaaacatagtttggttcaagcatccaacctctccaagggtaatgctgtaaatnggtttgcat

SEQ ID NO: 388698 - DNA, 788 bp, Oryza sativa
  unsure (1)..(788): unsure at all n locations
cccacgcgtccgcccacgcgtccgcccacgcgtccgcccacgcgtccgcccacgcgtccgcagctaccaaatcgaacctaccaactcattcccgatcgatcgatcttaaaaaaaaactaatcgtaacttttctctctctctcctatctttagaactagcaggtagcaactgcttcgagtgtagtctggtgaacgtacgatctttcgttcgttcatcaagatgaccgtgatcgacggcgccgtcgctgccgacgccggcggcgcagcggcggcggtggtgcagccggggaacgggcagaccgtgtgcgtgaccggcgcggccgggtacatcgcgtcgtggctcgtgaagctgctgcttgagaagggctacactgtcaagggcaccgtcaggaacccagatgacccgaagaacgcgcacctgaaggcgctcgacggcgccggcgagcggctggtgctctgcaaggccgacctcctcgactacgacgccatctgccgcgccgtcgccggctgccacggcgtcttccacaccgcctcccccgtcaccgacgaccccgagcagatggtggagccggcggtgagcgggacggagtacgtgataaacgcggcggcggaggccggcacggtgcggcgggtggtgttcacgtcgtcgatcggggcggtgaccatggaccccaaccgngggcccgacgtcgtcgtcgacgagtccttgttggagcgaccttgactacttgcaaggaaaccaggaactgtaactgttaaggggaagncggtgncggagaagtcgtcgtg

SEQ ID NO: 388699 - DNA, 509 bp, Oryza sativa
ccacgcgtccgcactaacaagcaacgatgaccgtcgtcgtcgttgccgatgacgccgccgccgccgcagcggcggcgcagcagcaggaggagctgccgccggggcacggccaaacggtgtgtgtcaccggcgccgccgggtacatcgcgtcgtggctcgtcaagctgctgctggagaggggctacaccgtgaagggcacagtgagaaacccagatgacccgaagaacgcccacctgaaggcgctggacggcgccgacgagaggctggtcctctgcaaggccgacctcctcgactacgactccatccgcgccgccgtcgacggctgccacggcgtgttccacaccgcctcccccgtcaccgatgaccctgagcagatggtggagccggcggtgcgggggacggagttacgtgataaaggcggcggcggaggccggcacgggccgccggggggggttcacgtcgtccatggcgccgtcaccatggaccccaaccgcggccccgacgtggtc

SEQ ID NO: 388700 - DNA, 714 bp, Oryza sativa
ccacgcgtccgaaagatgtctggcttcttccagacaagcttctactttggctacaccttgatgttctgcctcggactaggaattctttgcggtgctgttggctatctaggatctactctctttgtgaggagaatctacagaaacatcaaatgcgactaaattgctactctgaacatcaaatgtgaccaaagggctactccgttgccgatagatcctatcagcgaagtgtgtgttgctggcgcaagtccattgtggagtaatgctcataagattctgatcaacttttggaagctatacaggaagattgtctccctttggtttaccttttctttttatgtttttcttttacttcatttttcttcttggagctggcctcataaatgtatacctcattagttcaggaattagtctcagtaccgggaaggacatttagattctcattttgtggtggcctcttttggccagtagtaggatatcattgatgaatattggtgcagtgtggatccaatccagtggctagaattgcccctcttatgaatcgctatacatccaattttggcatagccttgtagtatatgcaaactaatacattcaagttagatatatatggcctgaatgggtgaagttctatttcttcccctgcaggtactgttgaaacatgaattcgacatgattattatttagcctttggtctgagttttcatcaaaacaaaa

SEQ ID NO: 388701 - DNA, 794 bp, Oryza sativa
  unsure (1)..(794): unsure at all n locations
ccacgcgtccggatacacttcactgcactcaaaagccaaaacttagagataggttgtatctatcatctctattccctaaacatgaaggtttactacacatttgtagtatcaaataccagattaactcaaactgcagcagcttgatcccaattttgactaatctttttgctcaacctgcagacaggaggagtttgatagatcagccgctggaagagcagcaaaagcacagatgaaagctatgaaggaagctaagacatcatcaaaccaaggagaaccagttcttaagtggcagatgggatcgtaaattcttcgttggtgttgaccctgcatccttggcatgctgataatggtagacaagagcttgacagctcttgatttcagggaggattcagctgagtcattttctgatgtgtaggttttggggaagtgtgaattcccttgtcatgtgctgcacacacgttattcagatatatttgtccagcttgtgtgttggttggaacagatcatgtacatttctggagtagttttatatagtattttttttctctccttttggtacaatcgcttgggatttcggagcttgatttattttctccccccatgcaaaccatcagttcatagagaagtagaagaatagcaacactactggtactgaattctacagaaatttgtcaaatcatatcttgtataaagcacctcctgcagattcatgcagacattggtgaagctataagcctataagtctctgtaaaatagtttcagtttcttttctgcacaaaananaaaaanaaaaa

SEQ ID NO: 388702 - DNA, 684 bp, Oryza sativa
ccacgcgtccgccctggccaccttccagatcatcaccacgatcgtgttgatcccgctgtacgaccgcgcgttcgtgccggcggcgaggaggctgacggggagagagaagggcatctccgaccttctcaggatcggcggcggcctcgccatggccgcgctcgccatggccgcggcggcgctggtcgagacgaggcgcgcccgcgcggcgcacgccgggatggagccgacgagcctcctgtggcaggcgccgcagtacgtgctggtgggcgtcggcgagctgctcgccaccgtggggcagctggacttcttctacaagccaggcgccgccggccatgaagacgggtgtgcacgggcgctcgggttcatctccgtcgcggcgggggagtaacctgagctcgctcgtcgtgacggccgtgtcgtgggcgacggcgaccggcggccggccggggtggatccccgacgacctcaacgaggggcacctgatcgcttcttctggatgatggctgggctcggttgcctcaatcttgtggtgtttacgagctgtgccatgaggtacaaatccaggaaggcctgttgatacttctgggcttgtttggtaggctcgaaattccggcccatgcactctgacgggccattatgtatgggaataagtccatccgacctccaaaaaaaaaaaaaaaaaaa

SEQ ID NO: 388703 - DNA, 777 bp, Oryza sativa
ccacgcgtccgggcctccgccgccgccgcttcggcagcttgcctcctcgtctcgccggcgcaggcggcgcctgcatctatccatccatccacccacccacgccaccctcccgttccgattcggcgcacgcggctgctagacaccgcgttcctgacccgccgcgaatgtcggggacgcctcttcccccaccggcgcagccgccgccgccgccgggggccgccgggcccgatggcgcggcggcgctcccgcccccgccgggcacggacatgaccgggatctgcttccgcgaccagctctggctcaacacctacccgctcgaccgcaacctcgtcttcgactacttcgcgctctcccccttctacgacctcacctgcaacaacgagtccctccgcccgcgccaaatccaccccctcgacatgtcccacctcacgaagatgacggggatggagtacgtgctcagcgacgtgatggagccgcacctgttcgtgatccggaagcagaggcgggagagccccgagaagtccaacgccatgctcgcctactacatcctcgatggctccatctaccaggcgccccagctctgcagcgtcttcgcgtcccgcatcagtagggctatgcatcacatctcaaaagcttttactacggcatgttcaaagttggagaaaattgggcatgtgggaaacagagcctgacacagcagctttttgaatcaaagacgcagaaggaagcaatttatttgaagggagttgaaggcgggtcgaccatatcctaatgtcg

SEQ ID NO: 388704 - DNA, 645 bp, Oryza sativa
  unsure (1)..(645): unsure at all n locations
ccacgcgtccgcccacgcgtccgcccacgcgtccggtatgctcacttgaagggtaatcaaataatgaaaatgaagcaatcaggcgctgagattacagatactatactatatccagaagttgcctttacaggtgacacaaagtctgattttattcttgacccacgaaatgcagatgccctgagagcaaaagtccttataactgaggcaaccttcctagatgaccaaattgatgttgatcatgctcgggagcatggccacatgcatctctctgagataatggagcactcccaatggtttagaaacaaagccattgtactgacacatttctcaaatcgatatagtcttgaggatattagacaagctgtttccaaactacagtcaaagttatcttcaaaggttgttgcactgacggaaggcttcaaatctgactatagatagtgtctagaagtaggtcagctgtgcttctcacccttacttgcttgagaataactgagttacttacactaggaattggccattcatgaggaaaaagggacagaattaataggtttgtgctgtttggcttttgtatgtggnatttatatctcctatctttctatattagaaaataaagtttatatagcattataaaaaaaaaaaaaaaaa

SEQ ID NO: 388705 - DNA, 812 bp, Oryza sativa
ccacgcgtccggacatacagaagaagtacatgctggaggagctcctgacaagcccgagctgtggcaaacgaggttgcaagatcatagccacaacgaggaacatgcatgtcacatacaattggaacagggcagcctatcaaactggagtttctgccctgcccaaagtactggctcttctttaaagcgcatgcattcggcggcacagatgtccagtaaaaccctaggctgtgtggcagcatgaaaatcgatcgccgcgaagctgtacggatcattcttcggcgcatagatcatcgtagcgattctgaaagagaagccagatcctaaatcctggtgtacggttcttcagagagatattgcggggctgccattgttgggtgatggaactgggctacattgctgatttagtggaaattttgctgccaagtcgcctatccgtgaaggaggtcttcgtctccaagaacccattgtcctctgagacagagttggctaggctgcagggtctgtgcttgccatgtcctagctctgcccctctggccactcatagcagtgagctcagcttagcaaaagcaaccagctatgaaagagtgttgctgtgcaaggcagtgttgccattctactccttgtactacactgctaagtgtgctgtggactctgagaactgttactcaaagtttagtgttgtttagttcatttatagggttgcatcttattgcctaattcaaaaatttctgttttgttccatgtttgatgtaaccagtgctcttctcttctatacaagtactaattgaacttcgcagttctctctttgttgc

SEQ ID NO: 388706 - DNA, 954 bp, Oryza sativa
  unsure (1)..(954): unsure at all n locations
tactggtatagccatttcaaagaaggctggaatggtcccgcttcagatggaacttggaggaaaagatgcttgtnttgtgttagaggatgcagatctggatttagtggcagcaaatatagtaaaaggaggcttctcttacagtggccagaggtgcactgctgtgaaagtggtgctgatcatggaatccgttgctgatatcgtggtagagaaggtgaaggccaagttggcaaaactgacagttgggccacctgaggctgactctgatatcaccccagttgtaacagaatcctcagcaaattttattgagggtttggtcatggatgccaaggagaaaggagcaaccttttgtcaggagtacaggagagaaggcaaccttatctggccgttgctactggatcacgtccggcctgacatgaggattgcttgggaggagccatttggccctgtcttgcctgtgattaggatcaactcggtcgaggaaggcatccaccattgcaatgccagcaattttgggctgcagggatgtgtattcactaaagatatcaacaaagcgatcatgatcagcgatgcgatggagaccggaaccgttcagatcaactctgcaccggctcgaggacctgaccatttccccttccagggcttgaaggacagtgggattggatcccaggggataactaacagcataaacatgatgaccaaggtgaagagcactgtcataaacctaccatctccatcctacaccatgggctgaggtgttccatatagatgatcagatttctataaccacatgagtacaatgtagagaattcaaatgttttgtaaccacgtgagctttgtacgctatttgcaccacagttctccctgtatgttgttggctcttttacaattaagaataatgcatgttgaagtatgagtcttcctgtttgcttcaaaaaaaaaaaaaaaannnnnnnn

SEQ ID NO: 388707 - DNA, 552 bp, Oryza sativa
ccacgcgtccgttaattttcttcttgcgaatatgctgtcaatacagtaagtacaataaccaggttggacttgactctgctgaaccagagattgtaactcgatcggcaaggttaactactatcaagtcaataatctcatttgtggataagagggaggaggaggtgaagaatgctctcaagaaaaagcctaatgacagtctgcagccaaggacaggaagcacaggagaacaatctacattaccaccatgacacatttatcactgcctgactgacatattcaacaaaatgcataattttgcactgggcttgctggcagcttcagaaacccggtgatgatttgttctggttctgaaggtcaaacctgtaggagctcctcagagtattttctctgaactctgaagcatgacaggaacattctgaattgtgcccaacagttacatgtctgaatctccttccaacagctacttccaggagaagtagagcattggttgcaagttcaatttcaaactagttgagaagtttgaacctctgtcaagttgagaggccccttttt

SEQ ID NO: 388708 - DNA, 718 bp, Oryza sativa
ccacgcgtccgccgagagaaccccaaatgcaacttaggtgatcacaaagttctgctctgaaaggattgccaagtatgcttttgagtacgcgtacctcaacaacagaaagaaagtgactgccgtgcataaagcaaacatcatgaagcttgctgatggtttattcttggagtcttgccgtgaggttgcaacaaagtatcctggaattcaatataatgaaatcatcgtggacaactgttgtatgcagcttgttgctaagcctgaacaatttgatgttatggtcacgccaaatctttatggcaatctggtggctaacacggctgcaggtattgctggaggcactggtgtcatgcctggaggtaatgtgggtcaggaccatgctgtcttcgagcaaggtgcttctgcaggaaacgtcggaaacgagaacatcttagagcagaagaaagcaaaccctattgcgctgcttctatcatccgccatgatgttgaggcatttgcagttcccgtcattcgccgaccggctggagacggcggtgaagcgtgtcattgcggaaggcaagtacagaacaaaggatctaggcggcaccagcaccacccaggaagtcactgatgcagtaatcgccaatctggattagataccagccggtgcacgcctgagagattaattcttttgggggactagctcatttgtcccgactcccgattatttttgtttcgtatag

SEQ ID NO: 388709 - DNA, 360 bp, Oryza sativa
ccacgcgtgcgttcccatgatccccacgagctcacaagttagtgaactttatttccaactgttggttcagctctccatgaattggcagctgtgcgttgcgtagctcttcctgtccccttcctagcagaacagatggcggtgctgtacgtcaccttcttgaggttgattgactaaaaaccttgaaaatactccctccgtttcacaatttaagtcattctagcatttcccatattcatattgatgttaatgaatctatacatatatatatatctagattcattaacatcaatatgaatatgaaaaatgctagaatgacttacattatgaaacggaggaagtagttggcaagggaggtggatg

SEQ ID NO: 388710 - DNA, 476 bp, Oryza sativa
gttttatgggtgtgcttatgtgtgttactatttggggtttattacttaatgtatgctggttatcatgcactcggacaatacatacatcttttctaaagtgtcctagtggaaagctgttttccagagttcacggtctgcagatctgttctcttaaatgtcatataatatgttcatttatcagttacttgattacttcagatctgttccctttaggtacgtttggtgcggattacagaaatggtccatgatgcatactattctcgattgtatcttgctaaggtaaaatgacttcacatgaactactccctccatactcgtaaaggaagtcgctttggacagcaacacggtctcccaaacacaactttgacttcttgtttctataaaaatatttattggaaagtgatatatcgatacttttatgaaaggagttttcaagacccatctattcatattatttttacattttcaaaactcac

SEQ ID NO: 388711 - DNA, 825 bp, Oryza sativa
cacgcgtcgaaatgaagtatctttgcttccaattatcgcatggaaacaccaagtattatgttgctggctgcccttcggaacattcgaattccaaggccaactatttataatgtggtaaaggagatgaccgaaaggatgggatatgcggtacgtttggtgcggattacagaaatggtccatgatgcatactattctcgattgtatcttgctaagattggcaatgaagaggagactattagcttagatctcaagccatcagatgccatcaacattgctttccggtgtaaggttcctatacaagtgaataggcgtatagcgtataacaatggattgaaagttgtacaaccaacaccatctgagagctatgtaagctcagaccaattccaatacacaagacttgacaggcctgacgatcaaccttgctttgaggcccaagagtttgatttggtccgcaatatgctggtcgctgctgttgaggaacgctacaaagatgctgctccatacagaggtcagcttttcatgttccgggccaagaaaaaggacatgattttacagttcctgaagggaggggtacatactagtcccgcctgaagtgcataaagcccaacatcaaggaactttgtaaatacttacagaagaaacctatacatagatacatatacatactagaacatgattttgggggctttcaattcgtggtggcgttggttgtaaaattgacccaaaaggggcccatgtttgtccctcacgattgattttagcaaaacggtaagcaaattgctttcccccgaaaaaggacagaaaaaagaaagaaaacaaagaaaa

SEQ ID NO: 388712 - DNA, 467 bp, Oryza sativa
cgcgtccgatttatgttggacttggacgccggccgacttgaccacgctccaactcgccgcgccgccgcttgctcccgttctcgccgtcgcgagcccgggaagacgagagagtgtggccgccgccggcttcttctctagcgcgtacacctcgatgggtcaaggtctgagccagcccgcgcaggcggtggaggagccttctccgcctgccgtcgaggcggcgccgtcgtcgtcgccgtctcctgccccggcgccatcttccctcgaggcgctcgccgcagaggctatgtcatttgacgaggatggctatgagtcaattgatgtgaaggtacagatagcactggactgtccatgtgtagctgagttgaaaaatggtccttgtggaagtcaatttgttgatgcgttctcttgcttcctgaaaagcacataaaaggaaaagggatcagattgggtgaagccttttatcgcac

SEQ ID NO: 388713 - DNA, 566 bp, Oryza sativa
tgagctaccaaaacatcgacttcttgttcgtgatgagaaatatcctcatattgtgcatgtgtgataaaggagcaacgaacagtaatgaatcataagctcgttctgatctttatgacccagaagaggagatgattagaggccttacacaagtaccgtgtgaacgtgttgatgtgagcttccagaaaagtagtcaaagattggttgcgcataacaccatccaggtgaagagctattggctaaactcaggcgggcgcggacgttatcaatcacatgatggataattttatcgtctagtccctgaactgtacgtgctgctctgtaccaatattcagaggattttagcgattggcaattcaattttgcttaggtattttttttcccttgtaggttacagttctcatagataatgtgattcaattatttaggtttcactctaaatgtttctgatccccattcttcccccattaacttagttatcacatccaaagtgtatcataacttgtaccctctactgtatcagagtacaatgaagctaatagatatttcctgttgaattgtatttatcc

SEQ ID NO: 388714 - DNA, 837 bp, Oryza sativa
aatccatcggcggcggcggcgactcggctctcgcttccacgcatccatccccgcgcccccctcctctccggcgactccccggaatcgcggcgcggcgccgccctagcgtcggcgacggctaggtcttcctccccgaccccttcgtgaggtgaggaattcctatataggactacaatttaagggagaagctttcaggcttctagcaagtaataactactgatctccaatggcacaaccttcttctaagaagacgccgtcagtctatctttacatccctaatatcattggatattttaggatcatcataaacttcattgcttttgccgtatgttattccaatagggtgctctttgctatcctatacttcttcagctttttctgcgatggcttggatggttggtttgcacgaaagtttaaccaggccgcaacatttggagctgtgctggacatggtaacagatagggttagcactgcctgtttgttggcacttctctcccagttttacagacgtggcttagttttcttgatgttgcttgggttggatattacaagccattggtttcaaatgtacagttcgttcctatcaggtaagactagccacatggatgtaaaagacacaggcaattggcttctgaagttatattatggacaccgaccattcatggccttctgttgtgttgcttcggaggttctgtacatagttctttttctgttcgccgatgagaagtcaacaagcttgcttaatgtgtgcggaaaccttctgaagcaaagtcctctcactgtctttgttttcatttcaactctaggtggttgggcgttgaaacaagtgatcaatgt

SEQ ID NO: 388715 - DNA, 667 bp, Oryza sativa
cacgcgtgcgcccacgcgtccgctgcaatctgatccgctgcttgatgctgccaaatcaaacttggcaaaagttctcgcattgtccaagaaacagtagatgaacaaaagacaaaagatgccctttgactagagctttaaacatgaacagcattcataatgtagaacgtcgcaatggagccaactcagaagctgatagtacttggtggctatggacttctcacaggttcacaggtcccagcataaggaactccagcttcatatggttcccttggaatttgactaaattattgccctttgtgcagaggaccataagtccctggagttggtccgccagttgtacaagctatgagctatccatagtgccccttcactctagtgaaggctcacgttttgaagtataaaatttcattgtaacaagcatgtactaggatttcctactactgcagtacataacacctcagaagttttaggcttttagctgtaatagctgtaccagtccaagctttagctgtaaacaattacaacattagtcttgtggcaaacgatgctagatgctggctttgccattgaattcgaatccatgtaacctctgttggtttgatccgaaaacattcattaattaatgttgcaaaaactaaggtgcgacccatgcgtcttagtttttatt

SEQ ID NO: 388716 - DNA, 717 bp, Oryza sativa
tcgacccacgcgtgcgataaataatatgtcttgcatacaagtaatccgatacaatgagatatggggtgctgttggactttatacaatgatcgacgccaatgggttggcgttggcggtgaggagcacggtgacgacgcgctcgagtatatgcgtgtggaaaccagcggaagttgcaatcagcggtggcggtagtgaggaccaccgcagcgcatggttattaccatgctcattgagttacatggtggcctacttctctaccacagcggcggtgtcggcaaccagatctgagagtgattgtcggggccaaacctatggtggctcgtcgctgagctggtgtcgttcatggaggcatcgagtggaaagcggtggccagagcagaaggacctggcgtgttgcatgtgcgccagccactggcggtgcgaggccatggcaaccgtcatgctgccgctgtccaggggtggctcttctgcaggcgatgaaaagggcagtggcaacatcaatgtatcgacgaacgtaatgtgcttgctggcctagtagacatgaacacatatcactaagagggagtgaaacggtgttgacgagtagcctgcttttgggtgttggtaactcttgatctggctaaaggtgtatatgcaaagttcattgactgggatgaacaaatgttcgatcgggaaacatcacagctattagtgaagaccttggacaggttgagtacat

SEQ ID NO: 388717 - DNA, 515 bp, Oryza sativa
gactccttcatcaccactgagtacatggtaactcttgatctggctaaaggtgtatatgcaaagttcattgactgggatgaacaaatgttcgatcgggaaacatgtacgcctgctcattcagctaaatgccagatttctagatgctgtttcgcgtaacgatcctgatattgccaaatttctcatggtgatggctctttgcagtacagttgttcctatcaaaagaaatgatggtactataacataccaagcacaatcacaagacgaggaagctttggtcactgctgcatcaaaactaaatatggtgcttgcgagtaaagacagcaacactgctggttggtatatttttgttagattaagatgatatgacaatgaattgctctaactaggttgctttttcttatctcagactgatttttgcattcatttcactattttctatttctacagagatttctttcaacggttgtaagttctattatgatttgttggatattttggagtttaaaaaaaaaaaa

SEQ ID NO: 388718 - DNA, 449 bp, Oryza sativa
  unsure (1)..(449): unsure at all n locations
agcgtncgttcctatcaaaagcaatggtggtactataacataccaagcacaatcacaagacgaggaagctttggtcactgctgcatcaaaactaaatacggtgcttagatttctttcaacggttgtaagttctattatgatttgttggatattttggagtttacttccgatcgcaaaagaatgtctgctgtggtgaaggatgtccagagtgggaagatccttcttctttctaaaggagctgatgaagctattcttcctcgttgtcatcaagctggtgatggtagttgttgctcgagatcccttattctactgctgtcctgatcttgaggtgcttatcatgatttctgggatagtatttttcacgttcaagcaatatctaatacctgtagcaaatgggttgcggcttctccctggtagatcaatgctcacctatcacgcattggagtagt

SEQ ID NO: 388719 - DNA, 736 bp, Oryza sativa
  unsure (1)..(736): unsure at all n locations
acccgttttttcccccccntgggaattngnnccccccccccggggccggtncaaccttnttcaatcnnnnantncccctttctccccccaaantacccntcccaaaagatcaccttctgataantcccgcnccagcnaacctccagccgnaaactnaagttncngtggggtaaatcccgccgatgccaccatggccttagctgagttccaacgtgactgacctctacgaatgctgctaagctggaatctaaagcatgtctctgacggggccaggatcaagacgatctacccagttggtgtgaactatcttggcgccgagagccacgtttcatggaaaaatggcaaggtcgttcaagacatcactctgaagctgagcaaggttgacagtggcctgatcgtgctgcagctggagtgggttcacgtcccaggtgttaccctctgagcagtgtccgatggtcgtcgatggagctgcaggtgcagctggtctctgaatgtgatattgtagactatgcgtgtggacgttgtttgcaatgtgtacctccgatatgtgtgctgttggtttgtagtttctgcggttatatttgtactccttagtgtcaagtgtttgtgtctatcagtgtgtcacaataagaatcgacctgctgaggtcatctggaccgagatgtaaattaagaattccaggtgttccattatgttgtagaattgtccgatttgttnccaatagtaacctgcagcc

SEQ ID NO: 388720 - DNA, 387 bp, Oryza sativa
cctcccctctcgaaacgcggcttcgacatggcggcggcggcggcgcacaaggaggaggtgatcgggaagctcaacgtccgcgtggtgcggggctccaacctcatcatcgccgacccgctcacccacaccagcgacccctacgtcgtcctctcctacggcccacagaaagtgaagaccagtgtccagaagaagaattccaatcctgtctggaatgaagtactgcagctcgcagtcacaaatcctacaaagccagtaaaacttgaagttttcgatgaggataaattcacagcagatgacagcatgggcgtagctgagttcaacgtgactgacatctacgatgctgctaagctggatctaaagcatgtttctgacggggccaggttcaag

SEQ ID NO: 388721 - DNA, 898 bp, Oryza sativa
cccgcgtccgggatttgagtacgagcttgtcacatataaatggccaacatggttgcacaaacagaaagagaagcagcgaattatatgggcatacaagatcttgtttctagatgtcatatttccactttcactgaggaaggttatttttgttgacgcagatcaaattgtgagagcagacatgggagaactgtatgacatgaatctgaagggtcgtccccttgcgtatactccattctgcgataacaacaaggagatggatggctatcgattttggaagcaaggtttctggaaagatcatctgcgaggaagaccataccacatcagtgctctttatgttgttgatttggccaaatttcggcaaactgcttctggagatactctacgggtcttctatgaaacactcagcaaagaccccaatagtctctcaaatcttgatcaggatctcccaaattatgctcagcatactgtgcccatattctctctccctcaagaatggctatggtgtgaatcttggtgtggaaatgccacaaaggcaagagcaaaaaccattgatctttgcaacaacccaatgacaaaggagccaaagcttcagggtgccaaaagaattgttccagagtgggttgatcttgacagtgaagcaaggcagttcacagcacgaatcttgggagataatccggagtcaccaggaactacttccccgccatctgatacaccaaagtcagatgataaaggcgcaaaacatgatgagctatgatacaccagccgctttggaggcaaggattcttcacactgactgtagttctctggtgtcccagcagttaaaatcatattgctggttcagggggcaatgaagtgcagataccataatgtgcgaatcaatcgatgatcaataatcaat

SEQ ID NO: 388722 - DNA, 565 bp, Oryza sativa
taagctatagtagctaacagtagcagcagctgtattcttctggtcttgctctgttctcttcttcttctcacctgcgattgatcggcctctgaaaatcgatcatggaattcgggttcggcggcggcgaggtcatcacgcagggcgggtcgtcgtcgccggcgggatggattccggtgagctcgtcgtcgtcgtctagaatcggagcatctgtcgcctgtctcttggctgagctctagtggtgtcctgcctgttgctgctgcttcttcttcttccttctcctaggtgttcttcacttcttctccgttgctgagttctgccaagaaaccaaccaattttgacagcatgtgccatggaagtagctaatcttcagtgacacgaagaatggatccccagatttttgtcagactttcagttggacagcttggtctgaaactccccggtgcgaatgcgaggaaggcggcccggagcttccactgcgagatccgcctcccaggattccctgctccgatagctcctgaccctctgatcaatattcagagctcaaccttgaccacaccccatgccg

SEQ ID NO: 388723 - DNA, 1198 bp, Oryza sativa
  unsure (1)..(1198): unsure at all n locations
ctcaaacctacactgtggatgctctattaaggaagctgctttggaaagttggttacacagaaccaccactgtcaagtaacattgacaaaatggatgtgtatgatttgaaagaggaaataaagcgaatgctcaaagttagaaaatgcttgatcgtacttgatgatgtctgggaccaagaagcatactttcaaatacgtgatgcattccagaatgaccaaggaagtcgcgtaataatcacaacacggaagaatcatgtggcagctcttgcttcctcaacatgtcaccttgatctccagccattgagtgatattcatggctttgatctattctgcagaagggcattttataacattaaggaccatgagtgtcccacggaactcgtgaaagttgccaaatcttatagttgagcggtgtcagggccttccactagcaattgtgtcaataggctgcctcctgtcttcaaggatcacgggcacattatgtttggaatcaagcatacaatcaacttagaagtgagttgtcaaagaacaatcatgtccgagcaattttaaatatgagctaccatgacctgtcaggagacctaagaaactgctttttgtactgcagcctattcccggaagactacccgctctcccgtgagagccttgtgcgtctgtggattgcagaaggctttgtcctgaggaaagagaacaacacaccagaggcagtagctgagggaaatctcatggaattgatatacaggaatatgcttcaagttacagagtatgatgatctcggcagggtgaatacttgtggaatgcatgacattatgcgagacctggccctttctgctgctaaagaggagaagtttggctctgcaagtgattttggcacaatggtagagattgataagcatgttcgtcgtctgtcaacttaccgatggaaagacagtactgcaccaattctcaaacttctacgtcttcgaaccatagtatcacttgaagcattttcatcttccattgatatgttgtcctcagttttgtctcactcaagctaccttactgttctcgagcttcaagattcagaaatcactcaagttccaccatctatagggaatttgtttaanctacgtnacattggcttacggaggaccaaggttaagtcactcccagactccattgaaaagttgctgaacctccanactctggaccatgaagca

SEQ ID NO: 388724 - DNA, 467 bp, Oryza sativa
tttgtatgtagccgaggacaaccttcatctttcccaatggtgaagtttcagttaagcagaaatatttggatgaaggtgacaggattttgtcagtaaacggcatagtgaggtctcatgttctgaatggagtttgcactgcattgtacagtgacaatgagatgaacataaaatatcgttacaaggatgaagagttatcatttattccaagcctctctttaccatccaattcactatcctttgcatttaagcgccaattcactccttcagacaagttaagctaccggtaccagtttgacacaaactactggagttttatctataaacacaaggccagtaagcatgtcaagtgggaagctgggtatgaggcttgccccaaggctttggatgggcaatctctttggggtttggggttccagggggcatgacgaatgaggtgcctatgaaggctaaagttcagttgacgctta

SEQ ID NO: 388725 - DNA, 961 bp, Oryza sativa
  unsure (1)..(961): unsure at all n locations
gtcgtcgtcgtctcctcgatcgggttaccacggctgcgggctacggcgactagcttccttctctcgccgaagcgagacctcgcctcccccgaggaacctgtgtgcaataatttgttgttacctctggcatccataagatggaggtcctgagttggagaacggtgtgcctcttggttctctgcaccgtggcgttgctgcgcccggctgcggctatccgctttgtgattgacagggaagagtgtttctcgcataacgtggagtatgagggggatactgttcatgtatcgttcgtggtgatcaaggctgacaccccatggcattatagcgaggacggagtggatcttgtggttaaggatcctaatggtgctcaagtccgtgattctcgtgacaagactagtgataagtttgagttcatagttcagaagagaggcgtacatcgcttctgcttcaccaataaatccccataccatgaaactgtagattttgatgtgcatgttggccatttttcgtactttgatcagcatgcgaaagatgaacattttgctcctttgtttgaacaaatagcaaaattagatgaagcgctttacaacattcagttcgagcagcactggctagaggcccaaactgaccgacaagctatattgaacgaaaacatgagcaggagggctgtccacaaggctctattggagtcagcagcgctgattgcagctagcgtcattcaagtctatctattgcgccgcctctttgagcgcaagttggggacattccagggtctaaatactccaaaagtagcagctcctcctaatttacactctcgtcatcccaactaaagctgtaattccgaactgtattggttgctagatctgctgtttacatgctgtgggttgctgtcacatagacctttaattattatgattccattagatgttttccttgnnnnnnnnnnnnnnnnnnnnnnnnn

SEQ ID NO: 388726 - DNA, 471 bp, Oryza sativa
ccacgcgtccgggtttccacccgcgcgcgacgcgattcaggtgtagcagcagcggcagagggtgatggcggcggctgcgccggcggacgcgaaggcggaggcggccaagatggacctcctcgaggacgacgacgagttcgaggagtttgagatcgaccaagaatgggatgacaaggaggatggtgatgaggccatccagcaatgggaggatgattgggatgatgacgacgtcaatgacgacttctcgcttcagctgaggaaggagctggaggaatgcaacacccagaagatctgaactacttttttttcccagttatgtttagctgtagcacctatgctgggtcaggcacttttgtaccctttgtgccccattgctttctcatacctgcaatgttcctactatactcctacttgtgtgctgaaacctgcgatcaaatttaatttgtgaaagggttaaaaccaagttggtgg

SEQ ID NO: 388727 - DNA, 601 bp, Oryza sativa
acagaagtcatcagtgacaaaatggagaagcgatgttccattcttgcactacttggcttagtactgctgttctccaacgtgatggctggcagggagcaggcctgagacaaagccatcttttctcgcaaaggtctgaaagaagaacgcaaactagctgtcactggaacagcctcatcccttggcggtttacaagggcaatcgtcaagcaccggtgttggaggtgttagcagcaacaatgctgaaagtacaaattctgaaactggagactcttcgtcagcctacacaccgatgagtactgccaccaccacagactcccaccatgacatgtccatggatcagtatcggaagatcatccacaacagccagatggaacaaaccgtaatgaccatggattgtcccgaaggacggtaccattggtgcagcatcgtccttatacttcatggggtatcaagttatgcaacggagtataacaagagtcttttaattaatgtatatatataaactcgggtattattatatgctggacttggcttgtataaatctacctggtgccttcggctatataaacaaatatttatgcatgtgtttcgcatgcatatgt

SEQ ID NO: 388728 - DNA, 872 bp, Oryza sativa
ccacgcgtccgctcctaaaagcagcggttctgccaagaggaaaaggacaccgaccttggaagatgacaggattgtaccatataaacctgacaagctacaaaatgactcaatggttcttgaccttggccctccagctgattgggtaaagataaacgttcggagaaccaaagattgctatgaagtctatgcattggttcctggccttctgcgtgaggaggtacatgttcagtcagatcctgctggccgtttgatagttactggagagcctgagcaactagacaatccttggggtgttactccattcaagaaggttattagtttgccctcccgcattgatcctcatcaaacttcggcaggtgtcactctccatggacagctatttgtccgtgcaccattcgagcagtcaaagtaaatggtgctctacaagatgaagcgcaacatgcaaggttgcttttgtaggtgggggtttatgtgattgacttgggcctgttcatcctgatcctcgttgcaaactagttactttctgcttcattactcctgccatgttgtctattctgtattgattaattctagttaactagatggtctagttatgtatcttgtagtccgttaattgtgatatgtagcttaagtccagctctattagtttagaatgttaatagcctgatgctaaacatggtccatggttccttcctcccttttttttttctcacctaaagaaaaggtgataatttgtagcatgtagctggtgaggttattcccaatactcagttctcatactactcagaacatgaagacaagatagattcttggatgtaactgttgccttgtgcattgctgttgtatctgtataactgaaaaaaaaaaaaaaa

SEQ ID NO: 388729 - DNA, 720 bp, Oryza sativa
gaaaataaacatattaagtacttatggattccatacaccgatacagttgttgttgtccaatgcaatcctccttcaaggtggagaactccaaagtttacctcaaaatatggaaaggatgaggctatacaacatgttcgtgatctttatcatgagtcattgaagaaatatagatgcttttcagaactaaagcagaaagtaatgacccagaagtagatcagctttcattcactgaattgagggatcggttgcttaccctggatcctctagacaaagatcatgtgatcagaattaacaaagcagaagctgaatattgggaggaggtcagagggttatcgcatgggctggagtgacgaaatattaggctttgattgtggtgggcagcagtgggtttctgaaacttgcttccctgcagggaccctagcaaagcctaatatgaaggatctggattatatagaggagctgctgcagttgattgagaaggaagatatacccgcaccggcacctattgagcagcgttggactgcctgcagcaggagtcccatgagcccagcatcaagctctcaagaagatgacatattttcatgggttgggataataatgtacctcccaacgtcggatgctcgccaaaggaaggaaattacagaggaattttttaattacagaagtaagacgcaaacaaatctatgggatggttattctgcatatgaacactgggccaaa

SEQ ID NO: 388730 - DNA, 731 bp, Oryza sativa
ccacgcgtccgagcttccttcgtctctcaaagtctcgaggaacttctcaggcgaaaaaattatcccctcctttccggccccttcccttccatccccggcggcttcccagccgtcggcaagggggtaggggggggggggtgggagggggtctagttccttccttcactagtaagcttaggtttagacttctcggctatctcccgttgttgggttaatccctttttgtacagctcgaacgggtcgtccgcgtccggctccttcgtcttggttgcttctgccatggatgtcctcgtcggctttttctccggtgaagattccctatcaatcattttccaggttcaccattaacgcccgaagctaagagcacgatgggtttgcccaaaagaaggtagcgctggccacttgcttcttctccggcgagctttctgcatctatgttggtcttcttactcgtctttggcgttagctttacaagctagccatggattatcagctcctgtcgtcgttcaatgcgtcgatctggccttcgttgttgtggacatggcaaagagaaggacccgattgctttttctgtttctttctaggtccttccttgcatatttcagggttaaaatgtaatttggccatctgtcaggggtctccctgtaagacttgctgtactctcaacttgcttaataaatttctaatctgaggctgtagcctcagtttgttctaaaaaaaaaaaaaaaaaaa

SEQ ID NO: 388731 - DNA, 1164 bp, Oryza sativa
  unsure (1)..(1164): unsure at all n locations
gatatttcgaggaggagtgcttcccagctcattccgccgaggtcgtgaganctgctgagcgtggagattttttctttaaaacttttttgggtgatttgctggaatgggggatcatgttgcggtggatgttggggggctcatggcgtcccggggcgccggcgaggaggaaacgggggcgctgattgggatggtggaatgccgcatttgccaggaggaggacctcgccaagaacctcgagagcccctgcgcttgtagcggtagcctcaagtacgctcatagagaatgtgtgcaaagatggtgcaatgagaaaggagacataatctgtgaaatctgccacgtgtcatacaagcctggctatactgccccaccccaggtacatcatgatgagactactatagagatcagtagtggagattggtctatctctggcaatcggttggatttacatgatcctagaatcttggctatggctgccgctcaacaccgtttacttgaagatgagtatgatgaatatactgcaacaaacaacaatgctgctgccttttgccgctccatatttctaattctaatggctcttctactcttaaggcatacactaaccattactagtagtgatgatgaagatgacgcatctgctattttctcgttgtttcttttgagggctgctggatttttgctgccatgctatatcatggcttgggctattagtatcatgcaacgtcaaagacaaagacaggaagaagcaatgcttctaccaactgaagtggcaatcatactccaccgaaatggaaggactatgcaattcgccgtagcgccagaatctcctaccacacctcatccagaacaagggcaatagaatttgctggcaacaggcatatcttgtgagtgcatacaagataccttgagccttctacaccctgactctgtgtacactgcaagccggttgcaccagccactttcaatggccaaattgcagcaaaaaagtgttgcgtgtctatctctcgatttgcataaactttgcagctaggcttgaatgcttttgtgattggtttcagcttcttctgcacataaagagattcctttcaataaatgaatataagctaaattaacaagaaataaaaattaaaaaaaaaaaaaaaaaaaaaaactataaaaaaatatttt

SEQ ID NO: 388732 - DNA, 758 bp, Oryza sativa
  unsure (1)..(758): unsure at all n locations
ccacgcgtccggcctgctgaatcttgtgaatttttccatgatccctccatgaaatcaagtcatgaaggccaagtgaaaaaatcgttgtcagtcactcctctcggcaatgacagtggatactttctgaatataactgttctgaacaacttgcagaagacaactgagcgactttcactcccaatctcaaaagctgagtttacagttatgcgcacagcattgagtttcgcattgccgcacatcttgggctgggaccaggccttgactaatcaccagccaagtccatcaccagctagcaagcccagggtggagcgcccacacccagattcagagtgggaaaggtgaagctcccttgtaggcaccagcagcatggagggatttgaacatcatcgctaccaaaatttggatgctgttgcactttctccacgaaatcgaattaggagatatctattagattcatggagctaaagatcgaatgtcacagattgagcacaccatgaagggttgtgtttgttcaatgcatgtttgaacttcaccaggcctactagttgcaaaattctactccagttagctatgcattgcgtttgacaccttgtgccttttgaatgtgtgacttatgttatttgcaaaatggtggagtcttacaaaactactcaaacgtagttgagtggttatggctttaaaaagctaaacaaaaaacatatctgtttgttaaggctcaaactttttattccactgcatcttaaactcacattcatttn

SEQ ID NO: 388733 - DNA, 991 bp, Oryza sativa
  unsure (1)..(991): unsure at all n locations
ccacgcgtccgcccacgcgttcgggaggtgccctggactgaagaatccccactctgtgcaatgaacccctacggcagaacaaagctggtgatcgaagacatgtgccgggatctgcatgcctcagacccaaactggaagatcatactgctccgatacttcaaccctgttggagctcacccaagcgggtacattggtgaggacccctgcggcatcccaaacaacctcatgcccttcgtccagcaggtcgctgttggcaggaggccggcccttaccgtctatggaaccgactacaacaccaaggatggaactggggttcgtgactatatccatgttgttgatctagcggatggtcatatcgccgcgttaaggaagctctatgaagattctgatagaataggatgtgaggtgtacaatctgggcactggaaaggggacatctgtgctggaaatggttgcagcattcgagaaagcttctggaaagaaaattccccgcttgtatttgctggacgaaggcctggagatgccgagatcgtttacgctcaaactgccaaagctgagaaggaactgaaatggaaggcaaaatacggggtagaggagatgtgcagggacctgtggaattgggcgagcaagaacccctacgggtatggatcgccggacagtagcaactgatcccagcctgaatataggcgtccaatcctccagtagcagcagcagcagcatgacttctatacatatatatatataatcataaaggatgaagaaacaaagaattcggacttgttgagttactactactactactactaatcccatctgatggaccgcattgtatagggggcttgtaggggtccagcagcttcatcatcagtctccttagggggcctctaatataatctccatatttatgggagaataaattttgcccccgtggaagactatataatagatcatgatgattntgancaaagcgccggaatcggtatcaagttatc

SEQ ID NO: 388734 - DNA, 558 bp, Oryza sativa
tgcatggttggtaatatggaagataagtccttcacaaagaaagcactaaggggtgttcgtgctataatttgtccagctgatgatggtttcttctctgacttggacctcaagggtgtgcaacacattgttctgctatcccagctctctgtctacagaggtagcggtggtctccaagctattatgaacagcaaactgcggaaacttgctgagagggatgaagaagtggttcttgcatctgcgatcccatccacgataatcaggactggctcgatgcaaagcactcctggtggtgatagaggtttcgattttacagagggtgcagcagccaagggaagaatgagcaaagaagatgctgctacaatctgtgtggaggccctggactccattccccagacaacactcatttttgaggtggccaatggtgacgaaaaggttactgactggaaggcatggtttgctgagcggacgaaaacggtgacaagttaagtatgattgaaatgcagtaatttttttgttgggaaagaaaggattgcggtatttccaccacgaagtcgtgtg

SEQ ID NO: 388735 - DNA, 876 bp, Oryza sativa
  unsure (1)..(876): unsure at all n locations
agtnttttnggggcgagaccngtgctcnnnatngaggaagnagngcgcggcgtcaagcggcccttcttcaccacccccnacgagctcctcgaagagcgtgactacgacgagcagctccctgagaagaagcgtcggcgcgcgccggtgcaggtgcatctgctggagaggagcttcgaggaggagaacaagctggagccggagcggaagacggagctggcgcggaagctagggctgcagccgcggcaggtcgccgtgtggttccagaaccgccgcgcgcgctggaagaccaagcagctcgagcgcgacttcgaccgcctcaaggcgtcgttcgacgccctccgcgccgaccacgacgccctcctccaggacaaccaccgcctccactctcaggtcatgtcgttgaccgagaagctgcaagagaaggagacgacgaccgagggcagcgccggcgcggccgttgacgtcccgggcttgcctgcggcggccgacgtgaaggtcgccgtcccggacgccgaggaaccggcgctggaggaggcggcggcggcgttcgaggagcagcaggagcagcaggtgaaggccgaggacaggctgagcacgggcagcggcgggagcgcggtggtggacacggacgcgcaactggtggtcgggtgcggccggcagcatctcgccgccgtggacagcagcgtggagtcgtacttcccgggcggcgacgagtaccacgactgcgtgatgggccccatggaccacgccgcggtgggcatccagtcggaggaggacgacggcgccggcagcgacgagggctgcagctactacgccgacgacgccggcgttctcttcgccgaccacggtcaccaccaccaccaccaacacgcggac

SEQ ID NO: 388736 - DNA, 648 bp, Oryza sativa
  unsure (1)..(648): unsure at all n locations
tacaacantattgaggagaacattgttaagattgagctttgtactgtncttttatcaaattgttttcatgagatctntgggtccacatacgcccatgtcaactttactgccagggctgaggatgatgatcaggctaacgagagactatactttgcagagctcaagttgaatccggatcttctggcaaagaggagggaacgctttgtagagttgagccttgatccaaatattgttggatgtgctgatgatatcgagcccatgtgtgtcgtctctatacacaatcttcagggttcttgttttggtggatgccatgagatcaacaggagaattgattatgtaatgatcaggaatcaggactacgagcgttgtcacgcatgtagcgatcgtatcaagcatccatacgggacagaatttattgcagggcatgatagttccaagattccgtattacactgcaggctgatgtaataataatatgattagagctatgacttggagtattgttagaatttagactctttatttatgctttgacatctatgtgcgcgagtgatctcttctaatgcgcaaatattacctgatgaagtagccaggatctttaatgaagcctctatgggatgtctactgtaaccaggatcattaatgctct

SEQ ID NO: 388737 - DNA, 863 bp, Oryza sativa
  unsure (1)..(863): unsure at all n locations
atctttctcccccctcccctttccgtttcccacccccctcaccgccgtaatcccgacacccctcgccggcgcacgcgagaagagtagtgctatctccggggtcggaggcgcgggggacgtgtgaactgctttgcgatcgccggcggcggtgctggtggtgttccgggctaggctgcgtcggccgatcggcgggcgggcgcacgcacgcacgcgtcgccattggcggcgagcagcgcgtccccacctttgctgctccgcgcgtttgccgacgcgatggaggcggcgggctactacaactgcaagaagaacgacggcggcatctgctggggcgtctgcggcggcagcgagcatggttcaaaggcaattctgagcatgtcaaggttgaagtgtgcgcttcgggggtttgatttgagggcacttctgatcctcttgattggtgtgccagctctaatattcattatatatgttcatggccagaaggtgacttactttcttcnaccgatctgggaaaaaccgccaaagcccttcaatgtgcttcctcactactatcatgaaaatgtctcgatggcaaacctatgcaagttgcatggatggaaagtcagggaaactccacgccgtgtttttgatgctgtgcttttcagcaatgagcttgacattcttggtatcccttggcatgagcttagcccatatgtggcagaatttgtgctgctcgagtacaactcaaccttaactggcctgaaaaaggatcttcacttcaaggaaaaccgggaacgctttggatttgctgaatcacggttgacctatggtatgatcggttgtagatttgtggagggggagaacccatttctcgaggagtcatatta

SEQ ID NO: 388738 - DNA, 547 bp, Oryza sativa
gtggattctatcgggtttccctttcttcttcctcgcccacgcgcgtggcgccgccgccgcagagctcgattcagaccatggcgtcgccgtccatcccggcggctctccgccacccgcatgcccacgccgccggcctccgcctcctccgctcctcgggagacccctgcccgccctgcacccttccgtttaggttatgtggagtgccattaaaaaagggccatgtgtacgctggtgctgtatctgctaccaggagtcctggcttgggcaatgcagagaatctgcgtgagagtccaagcttgtcaaggagctggggtatgaatgggcagattggcgatgatcatgatattcttatagaatgtagggatgtgcacaaatccttcggtaacaagaaggtattgaatggcattagcttcaagattagacacggagaagccgttggaataattggtccttcgggacaggaaagtcaactgttttgagggtatggctgggctactggctccagacaagggcgatgttattatttgcgggagaaaaagacatgggc

SEQ ID NO: 388739 - DNA, 717 bp, Oryza sativa
cgccgtgttccggctagacctacgcgttacgcatataggtagctgcgagccagaggatcgtacatgtgcatgcgttaacacaaactctgtatctgccaccaagctagctaccaagtgtgaaaacggggctaatgtgtcatgtgatggtgtgggtagtactggacagacacctcccttgcagcagcacagccatagtcgagagatccactcaaatatgaatggcttcactgccttgccaaacacaattagtcaatacgcagggcaaggaccccccgcgcggccgcagttgacacatgctcaagttcttgggatgttttccggagtcaatggcagaacaaatggctttatccatgggcacccactggtggctaatagcattaaagcaccacaaaatggggatgttggaaaggtagccactaatccatcaccagatgcaggtcatgattcagaagctgcattatcacaaaccatgactagttctgctccaagtttaagtgctggtgttcaaccatcaggttccatgccaagcgaaaagttagcaaatccaaaaaagcacccggacttggcattgcagctctgaagacaattagccattgacatagttcagcttagcgccgtccttgattggaaacatgattcagaatcccagcttctcgagtccttattctccgcttctgctatgctgatggatattgtagcagcacactgagtggttct

SEQ ID NO: 388740 - DNA, 828 bp, Oryza sativa
aggggtatctgctgacaagccgatataagtagggtaactacaggggttatcccagtcccaaatgttgattatcgccggcccagtaagcgggggtaataccactcactataaggcgaattgggaccggggcccccccttaaagtacgacggtatagattagcattaaagcgtggtaacggccaaggtgccctgggcgatggcgaacccccgcaagatcttcgagatgatggaatacgctttcaaccagcatgagaagaagagggcagatgctgcagttgccggcgcaggcgccgtgaaagacaataaggacattgtagacgtgcttctcaggattcagacggatgggggcctcgaagtgcccctcaccatgggagtcatcaaaggcggcgttcgtgacctttttggtgccgggagtgagacatcagctaatacactccaatggactatgtccgagctcgtgaggaacccaagagtgatgcaaaaggcacaaactgagctacgtgattgtcttcgagggaagcaatcggtgtcagaagatgatttgatcggattgaaatacttgaagcttgtcatcaaggaaaccctaaggctgcatcctgtagtgccactgcttcttccgagagaatgtcaagagacatgtaacattatggggtacgacgtgcccaagggtacaaacgtgctcgtgaacgtctgggcaatatgcagagatcctaggcattgggaaaatgctgagacattcataccagagcgatttgaggatagcaccgtagactttaaaggcacagactttgagttcataccatttggagcaggacgaaggatgtgcct

SEQ ID NO: 388741 - DNA, 764 bp, Oryza sativa
ccacgcgtccggcactagtttgcttgcgatagttgatgaagacatctatgcgccaattcgatcactgcgttgaacccgctgttcaccgggacgttcaacgtgagcggcagcggcagcagaagctaaaagcacataatactgatgtattccttgagtgaggaggtcctcgacaaatgatcaagcctgcggcatctgctctcggcattcctcctgaaaacatcattgcaaaccaacttctttttggaacatctggagagtatgctggatttgatcccactgaacccacttcacgaagtgggggtaaagcactagcagtccaacaaattagacagaaccatggttataagacacttgttatgattggagatggtgcaactgatcttgaggctcggcagcctggaggagcagacttgttcatctgttacgcaggtgtccagatgagagaagcagttgcagcaaaagcagattgggttgtcatcgattttcaagaactaatttcagaattgccacgatttagtaccacactgcaatcctaacttttgcattgttgctaatgagtgcatgtaattggagatgtcattgaagcattacaattttgatgcgtgattatttaattgtatgtattttattttttaattttcatctttcctcaaccttacctcctttttaaatgatcctgaggctcctaaacttgattcctatgcactgaatattgtgaataaattgtctcataagcaattgcttgagactgccagagttaagcc

SEQ ID NO: 388742 - DNA, 468 bp, Oryza sativa
ccacgcgtccgaagagagatcccccaacgcttcgcgaatcgcaaatccctctcgcttctctctctctctctctcctcgcgccgccgccgccaccgccggccccgcggccgtgggcgactacggcagcgggatgatgcgggggaacccggacggcggcgggatgcagtcccagcaccaagggccagcgcgtcaacgtgcagcagctcaagctgatggggcagggacacccgacgggcctcacccccaacctgctcaagctcttcgagccccgcccgccgctcgacttcaagccgcccgtcgagaagcgcaagttgccggcctacactgggatggcgcagttcgtgtcgcagtttgcggagcccggtgaccctgagtacgcgccacccgtccccacatgcgagaccaaggctgaaaagaaggataggatccgcaaaagtaagcttgaccaaggtgcggctaaggtggctg

SEQ ID NO: 388743 - DNA, 464 bp, Oryza sativa
ccacgcgtccgagttcagcaatcctctgcttttgtcagttgtagttcacaacgatcgagcatccggccatggcgttgaacccgctgttcaccgtgacgttcaacgtgagcggcagcggcagcgacaactacggcgacttcatcgccggcatccgcaagagggtggccaacccgaggcacttctcccacaaccgccccgtcctcccgccggtggagcccgacgtcccgccgcgccgctggttccacgtcgtgctccggacgcagaccagcgagctcacgctcgccacgcgcgccgacaacctctacctggagggcttccgcggcagcgacggcaccagcgcgtggtgggagctcacccgcggcctcatcggcggcgccacctacctaggcttcggcggtcgtaccgcgagctcctcgggcacacggacaacatggtcgtgtcacgctcggcccgcagcagatgac

SEQ ID NO: 388744 - DNA, 423 bp, Oryza sativa
ccacgcgtccgggatcaaagagtgaatggtggactcagtggattacagtctgtgggaaatgtgcctcaggtatctgctcaagctactatgaatagtacaaatccaatgattggtcagtataaacatactgaagttaccatcccttctgccttctattcagttctgccgtccgtagtctcttcgtgatggtgtatcaaagaaaaatcctgtcagccgtacctggaagacatgttggcccttcttcaggatttaacaatgcccctccaaagcgacaggatgattccattttagctggccatggccagcatggtcagaccaatgaccgcatctggttggatggctacagggcatcactggattatgtcaataatcagcgttttgcacattcaaaatgttaccactgccagcagtactttcaccact

SEQ ID NO: 388745 - DNA, 605 bp, Oryza sativa
ccagaaggctatcacaatccgcaacgacgtcaacctcaagaaggagactcttcggattgagcctgatgaggagtgcccgggccgcttcctcgtcgccttcacctttgacgccacccttgctggaagcatgactgtttacttctttgcaaaagaagagctcaactgcaatctaacggcggtgaaagaagacctgattaagcctgttactgtaagcttcaaagagggtcttggtcagaagttcagacagccttctggcactggaatcgacttctccgtgtttgaggattccgagttattgaagcagggggacatggatgtatatccacttgcagttaaagctgaaacaaccatgcctgttgatcaaaagttggaaggagaagatcaaaagatgaaaactccaaactcacagatcacacaggctctgtttgaaaagaaagaaagcggtgattatcaagttcgagttgctagccagatcctttgggtcaatggaactaggtatgagttgcaggaaatatatggaataggaaactcggtggaaggcgatgctgatgccaatgatcctgggaaagaatgtgttatttgcctcttcgagccaagggatacta

SEQ ID NO: 388746 - DNA, 516 bp, Oryza sativa
ccacgcgtccggaaccacccataaatgataaaatgcaaattgaagtcattagcagaccaccaagcatcggtatacattccaaggaaaatcttggctatgttgtcataagtcttgcagatgttataaacaataagaggatcaatgagaaatatcatctaattgactcgaaaaatggccgcatccagttggaattgcagtggagaacatcttagaactcacgggctgaaatcttgtaaagtttcttgtttagaatgctttctacacttgtatgtatcatttggcagacatatcttaccttctgaattattccacttttaaaactatgcttttcattgtttcccccagattctcactggttggtatatatgattatgaacagaaaccaggaagcctgaactaattatggaattggtattctgtatgagaatcgatgaatttgtgttatttgtactacagcataacaccgagttttaacggtgcttgtcagtgcctattagaaattgtaggctactagat

SEQ ID NO: 388747 - DNA, 462 bp, Oryza sativa
  unsure (1)..(462): unsure at all n locations
ccacgcgtccgcccacgcgtccgccacgcgtccgcgaagcgataagccccgngggagagacgagcgcgcgctccgctccgagcagaaatggcggcgaggttgtgggcggcggcggtggcgccggcgaccttaaaccctcctctcctcactctctccgcctcctcctcgccgtcgtcttctcgcctccggcgttcggttctcggacgcctgcgcagccgcgccccgcgccctgccgatttcgtgtgccgccgcgccaagaacgcggcgtacgacgactacaagttcccggaccccatcccggagttcgccgcgcaggagacgagcaagttcaaggagcacatgatgtggcggctggagcagaagaaggatgactacttcggggagcacgtggaggaaatcgtcgacgtctgcaccgagatactaggaactttcttggagcatgattaattgcggacctggggc

SEQ ID NO: 388748 - DNA, 878 bp, Oryza sativa
  unsure (1)..(878): unsure at all n locations
ccacgcgtccgcccacgcgtccgccttgaatgaacaagcacgtcgcatttgccatcaggaacagtccaggacactagcgttctgcagcttcaagcacaaccagactagtatagaggaaagcgagacacattttgttcgtcttttggatcatcaaacttttgagttcctgtcaatttatcagcttgatcaatatgagcatggctgctccatcattagctgctcattctcagatgataataatgtttattattgtgtgggaacagcatatgttttaccagaggaaaatgaaccatcaaagggccggatccttgtatttgcagttgaagatggcagactgcaattaattgtagagaaagaaactaaaggagctgtctattcgctgaatgcattcaacggaaaattgttggcagctatcaaccagaagattcaactatataagtggatgctacgggaggacggttcacatgagctgcagtctgagtgtgggcatcatgggcacatattggctttgtacactcagactcgtggcgatttcattgtagttggagacttgatgaaatcaatatccttgctcgtgtacaagcacgaggaaagtgcgattgaagagcttgctagggattacaatgcaaactggatgagtgcagttgagatgcttgatgacgagatctatattggagcagagaataactacaacattttcactgtgcggaagaaacagtgatgcagcgacagatgaagagaggggcaggtggaggttgttgnnagagtaccatcttggagaggtttgtgaatagactccggcatggttcggtggtaatgcggctttccgactcagagatgngccagatccgaacggttatctttggcaccataacggg

SEQ ID NO: 388749 - DNA, 400 bp, Oryza sativa
agctggtccagatcaaagtagcatacatcagcagatcggtgtacacataatcacatataataatatacacggcgctgctaattacacatggaagcatcagtcatggtctcatggattcagatcgatattactacccttttattacatcatttctaggtcaaaataatgacaaacagaagcgagcacatctagatgacctgacactgttttactccgtcttggccttgtcagccgccgccggttgcagcggcatcacggcacatcatcttcttgaactcctcgaacccgacgcagccatcgccgtcgacgtcgacggaggcgatcatcctctcgcactcctcggcgctgcagccctcgccgatccggccgaggaccttgccgagctcggccgccgtgatgc

SEQ ID NO: 388750 - DNA, 940 bp, Oryza sativa
  unsure (1)..(940): unsure at all n locations
ccacgcgtccgcggacgcgtgggcggacgcgtgggcggacgcgtgggcggacgcgtggggtggaggaagtattttcgactttctttacaattttagaggaacttttcagctccctgatgtgttaagaattgcctctgatgtatccccggggatgaactacctgcatcaaattaacattgtccacagggacttaaagactgctaatcttcttatggatgaccaggttgtcaaggttgcagactttggagtagccagagttaaagaccagtcaggagttatgactgcagaaacaggaacctatagatggatggctcctgaggtcatcgagcacttgccctacgatcagagagcagatgttttcagtttcgggatagttatttgggagctgctgactggaaagcttccttatgaagatatgacgcctcttcaagcagccgttgccgttgtccaaaaggatctgagacctatcattcctgctgatactcatcctatgcttgctggtctacttcagaaatgctggcagaaagatccagctctaagaccaactttttcagagattcttgatatactaaattctataaaggaggctgttcgaagttctggacatcagaagagacactcaggtcgatcttattccaggcagagacgaagcggttgatgcagcaattttcctttttttttaaaaaaaaaaatcttgtttcgggttagtttctgaaatgcggcaggttttgtttagcggtccacaccctcccttttgttatggtcatttccacggcgagcaatttttacttggttgtatctcagcggtaacgttggaatataatctggtgagtttcttgtatttttttttcatgtcgtgagctggtgtaaacgattgttgattataatcctttcagttcaaccacgnnnnnnnnnnnnnnnnnnnnnnnnnnnnnnnnnn

SEQ ID NO: 388751 - DNA, 494 bp, Oryza sativa
ccacgcgtccgcggacgcgtgggccgccggcatcccggcgacgagagagagagagaggggagaaggctgcgcggcggagatggcggtggcggacgtggcgttcaaggcgctgacggcggggctcggggtggcgacgctctacctcgccggaaccttctccgtcaacgtctaccgcggcctctcgtggcactcggagcaatccaagttagaaaaggagaaacgtgaagactgaaaagcatcagaagctagtctagaatgtcagacacaacaaaagaaaacctaaagataaacactcaccttgtgagatgagttgtctttagactagttatgtttcctgggattgtttttgcagacctttcaagatctccagaatgctattttgatttgatgtaagatgcaaagatctcatgattattattcctctttatgcttacgaaaatatttcgaccaacatatgggtgtcattgatgccattttataaaaaaaaaaaaaaa

SEQ ID NO: 388752 - DNA, 1300 bp, Oryza sativa
  unsure (1)..(1300): unsure at all n locations
cccgctctccggcgcccggcgtactggttgcccctctcatcgccgccgtcgccgccctctattcagattcagaatcgactttattcgatatcgtcgcttccactaaaggctcgaggcgtgagaagatgcgaggcttctctagcaagtgactacacgaaggcatctgaggtagctgatttagattgggagaaccttggttttggaatcgtgcagaccgactacatgtatatcacaaaatgcggacaggacgggaatttttctgagggtgaaatgatgccatttggacctatagcgctgaacccatcttctggagtccttaattacggacagggattatttgaaggtctaaaagcatatagaacaacagatgactctatcttattatttcgcccggaggaaaatgcactgagaatgagaacaggtgcagaaagaatgtgcatgcctgcgcctagtgttgagcagtttgtggatgcagtaaagcaaactgttttagcaaacaagagatgggtgcctcctaccggtaaaggttctttgtatattagaccgctactcatgggtagtggtgctgttcttggtcttgcacctgctcctgagtatacgttcattatatttgtctcgcctgtggggaactactttaaggaaggtttagctccaataaatttgatagttgaagataagtttcatcgtggcaacccctggtggaactggaagtgtgaagaccatacgaaattatgcctcggtcttgatggcacagaagattgcaaaagaaaagggctattctgatgttctctacttggatgctgttcacaaaaagtatcttgaagaagtttcttcatgtaatatttttgttgtcaagggcaatgtcatttcaactccagcagtaaaaggaacaatattgccaggcatcacaaggaaaagtatcattgatgttgctctgagcaagggtttccaggtcgaggagcgacttgtgtcagtagacgagctgcttgaagctgatgaggttttctgcacaggaactgctgtcgtagtgtctcctgtgggtagtattacctatcaagggaaaagggtcgaatatgctggcaacaaaggagttggtgtcgtgtctcagcagctatatacttcattgacaagcctgcagatgggccaggcagaagattggctaggctggactgtgcaactgagttaggaagtacataaaatgttcatcaacatcaaaactcaaaagatggacatgattatgatcangtgtacccntcagttttgtagtttttgttggggtgacatcctgctgtatatgtat

SEQ ID NO: 388753 - DNA, 691 bp, Oryza sativa
  unsure (1)..(691): unsure at all n locations
gggancatcagantagccctttnttttngcaatcttctgtnccatcaagaccgaggcatagaagattncaaaagaaaagggctattctgatgttctctacttggatgctgttcacaaaaagtntcttnaagaagtttctncatgtaatattttnttggtcaagggcaatgtcatttcaactccagcagtaaaaggaacaatattgccaggcatcacaaggaaaagtatcattgatgttgctctgagcaagggtttccaggtcgaggagcgacttgtgtcagtagatgagctgcttgaggctgatgagggttttctgcacaggaactgctgtcggtagtgtctcctgtgggtagtattacctatcagggggaaaaggggcgactcttttccttccttgcatggttccaagaaattagcaagcatattacatgaaaattagattatataacactaaaatagcaacaaaacaccacccaagcaagttcaacagcctaatgcaccatctaattcctaatcgtggtggctaccaggctcctaggcggcacccagtgccgacttttagaacattgctttccttgaaatttcagctgtttgctgtatgtgtagtcaaaagtcaaaattgttttctttcttaacacccatattatgtattgttcctcaaatatatcaccaattaagaactttctaatgg

SEQ ID NO: 388754 - DNA, 564 bp, Oryza sativa
  unsure (1)..(564): unsure at all n locations
atcaggaaggagaggctgaggcctgagggagacgacgacgagggaatcaagggattcggaatcggcccgtctcggggaaggaaagatgcctttggcctcaacgtgtcgcaccaacccgtgaacctcgacgggagtggacgacctccgccccgtcctcgtccgacgcattcccaagtaccgtcgccaccatcatncggcaaggcccgaaggcctatgctgatggttgttctcaagggcttcagtgcctatggcaatttggaggtacccccaggagcctgccgcttatggcgcaggctggtttccatttggtgggctgaaccctggtttgtcaacacagaagttgaacgtgctggcatttgcctctatcctggagtcaaagctatccatatcccaagggctcgcttgctacctcaagttctacgattccaagcgctcggactttggatggaacggcaccaccttttaggttaaactgtatgcctgtggcttcaagatgcatgaaacctaagaattcctaatatcttgttcattgcctattggaggacaatgcagtcgatgtatcag

SEQ ID NO: 388755 - DNA, 715 bp, Oryza sativa
  unsure (1)..(715): unsure at all n locations
cccacncgtccgtcttcgtccactccccctatcctctcctcccaccgcgccgccgcctccgccgccgccgccgcggctccccctcctccccacagccaagatgaatgttgacaagctcaagaagatggcaggtgctgtgcgcaccggggggaagggtagcgtgcgcagaaagaagaaggcagtccataagactacaaccacagatgacaaaagacttcagagcactctgaaaagagtaggagtaaacaccatccctggcattgaagaggttaacattttcaaggatgatgtggttattcagtttctgaatcctaaagtgcaagcttcaattggtgctaatacatgggttgtcagtggaactccacaaacaaagaagctgcaggatctgctgccatcaattatcaaccaacttggtcctgacaacttggataatctgcggaggcttgcagagcaattccaaaagcaggctcctggtgcttctggtgaagaggctggtgccagtgctggagctgctcagggtgacgatgatgatgttcctgagcttgtccctggtgagacatttgaggaggcagcagaagagaaaaaggaatcatgattttgttgcatgtcttctcctgtgaaggattataagttgcgaattgccattagagacctccgctcttaaaaacctctgacctaccttatttgtgtcagtgctcggttttgtcatgtacga

SEQ ID NO: 388756 - DNA, 630 bp, Oryza sativa
  unsure (1)..(630): unsure at all n locations
ccacgcgtccgtaagaaccctgcaactggtaacacagaaaagaagactgatgaagaggattacacagggtggcacagcaaccggctgacttttgaacctgattcttctaaggatggaatgacgaggaaagatgatccagatgactatgtagtggttgatccctctccttgagaaaggaaaacaaaaattcaacaagatgcaagcaaagcttaagcggagagaacgtgaatgggcaggctgatctctgacctgacccgcataagctgcttgagaggtgcaccgtgcaaaagattacctcatatcataacagtgccactactgcagttttgatggtgtcggaactgtccactgcgtttcgctatgttgtggttcatggtagagggaccacctgtagactagtgcttgtaacattaacatttgtatcattgtcgatcaaactgtagataacaattgttttaaacttagaggttcataatgcccttattaagttgcagtggtctttttttttattggaatttcttttgtggtatcatgtgctacaggacagattatttatataaccgcataaattgatccgactcttatcttggnnnnnnnnnnnnnnnnnnnnnnnnnnnnnnnnnnnnnnnn

SEQ ID NO: 388757 - DNA, 515 bp, Oryza sativa
ccacgcgtccgaaaccatttccatggcacccttcgacgagcgaaaagtgagaatgacccaactcttggagtgagcctggtggagagaagttcatgataagaggaaagacttacctgacagattacactaaggttgttggaggtgatccccttctaaagcttattgctgtcgattggtttaaggctgaccggcgttttgattcagttgccttacaccccaagagcctcgttcagtcagaagctgcaaagaagattcccttcatactggtcataaacttgcaggttccagcgaagccaaactataacttggtcatgtactacgcagcagaaaggcccgtgaataaagattctctgttgggaagattcattgatggaaccgatgcgttccgagatgccagatttaaacttataccaagcattgttgagggttattggatggtaaaacgtgcagttggaacaaaagcttgtcttctgggaaaagcagtaacatgcaaattaccttcgccaggataactt

SEQ ID NO: 388758 - DNA, 479 bp, Oryza sativa
tccggcacgactacgcgtaccggacgcttgggattgctgtgccatttgcagggatcatgtgtgctcatcgagttgcagctggtgtgggactggaacaaagatctcctgtactagatgcgggtcttcttgggctcctcagatggttgagaacgcttgcttaggatgatacggacaaagatttggttgaccgtcgattgattttacgattacagaaaaacaccttctcacacatgtcatggtcattgcacatttgttttggtgagccatacatggatcaagcagcaccttttgcctcttgggatcttgcttctgcctggtatatacaagaggttggattttcagctgctgtgatccctgaaaagctgaagcttcctggagtaattgtacagaatgtcagttgttatttgggagcaaaaggcgtaaagactaatatggatgcatatatgtacctagggccttatacacatgatgtaacttgt

SEQ ID NO: 388759 - DNA, 520 bp, Oryza sativa
ccagatccaccagatccaacaaatagcaccctctcctcctccctccctcggtggcggctctaacggtggttctggtcctcgggtggcggcgcgcggcggctccagcagctgtgtgtggcggcgatggcgacggaaggagagtgcgcagcggcgacaatagcaatgcatgcggcggtgatggcgacgaaaggcgagcatcggttctcgggcggtgacgcgcagtccctttgcctccctcctcttgccgcctctttccctcctcccttctctctccaccgccaccagccttccttccctctccaccgctgtgtgggggaagaagggcagtggcacggggaaggaggtgtggcagcggcgtgccatgggtgccgcttcatcgtcttcgtcgtcgtcgtcgtcgtctccgtcgccgcagggtcaagcccaagcccaagcccaaggtaaaccgaactacagtacatctctgactgatgaggagtggaggaagcgccttgacaaagatcagtattacattactcgg

SEQ ID NO: 388760 - DNA, 735 bp, Oryza sativa
  unsure (1)..(735): unsure at all n locations
ccacgcgtccgcccaaatctcgcgtcatctctcttgacctgggccaagcaatcgatcatcccgatccactcgggctttaaacaaatcgctgcaaatttgttgttttccccttaaatttttatgccaagatcgcttaaattcaaccggccaggtggggatttcctaggagaggaaggcgatggcgccgccgcggaagcagcagcaggaggaggagatggttgccggcngaggcnaggcggcngcncttcnggcgcccgcggacgtgatcgccgcggtgttctcgcagctggactgcgtcgacctggcgcagctgctcgctcgtgtgcgggtcagtgagcaaagcacgacgcgattcccggttcttgcacgcggcgtgttcgacgtaatgcccacccggacgcctcgagctcgctcgatgcagtgaatcgaatccggtttgctcgatctctccgtgtcaatggctctgacgtagcttgctgtctattggtatctgccttttgcttacaggctggatcatagctctgctcttaacaccggtgagttgaattgatgatggatcatcgctggtgaattagggagatccctaaatccgatttattttcgtgttttaagaacatttcggtcaagcaaacggccatcatatttcttggtgaattttttgaccaaagcgaaactaccgataggttaattggtgcttgatcaggtggttaaaaaaggggatactttttttttttt

SEQ ID NO: 388761 - DNA, 783 bp, Oryza sativa
  unsure (1)..(783): unsure at all n locations
ccacgcgtccgcatcatgattgttagaagagctcttaagaactcaacagttgtacctggtggtggtgctattgatatggaaataagcaagtacctcagacagcatgcacgtaccatagctgggaagtctcaattcttcgtaaactcatttgctaaagccctcgaggttattccaagacaactttgtgacaatgctggatttgatgcaactgatgtactcaataagctccgacagaaacatgcatctggtgaaggtgctaattttggtgtggacatcaacactggtggaattgctgattcctttgctaactttgtctgggaacctgctgttgtgaagatcaatgctataaatgctgcaactgaagctgcttgccttattctcagcgtggatgagacagttaaaaatcccaagtctgaaagtgcgcaaggtgatgcggctgctagcgcgatggctggccgtggcggaggagcgatgcggggccgtggtggaaggggcatgaggaggcggtaatcaatctacgcccacgtttgctttagcttcgtcgctcgtgtggtttaaatttaggagtaggttatttgcagtctgctctttatcgaagtttttcgtgacgctacatgcatgccctgctcgatgtattttccaattgtgcttgtcagattcgtgaaaacatggcaaatatttttgtgatggttgcctactagcttttgtaacttcacatgttgactgtttcaatcaatgggtattcttcttgatcctcnnnnnnnnnnnnnnnnnnnnnnnnnn

SEQ ID NO: 388762 - DNA, 473 bp, Oryza sativa
ccacgcgtccggtgatgagattattgttttggagaatggggaggttagtggaacaaggacccacatgatttcctgctgtcaaagggtgcccgatatgctgaattgtggtcacagcaggaataacagtgatgccatcgatgctgccgcggttagcttagaggtttcatagactatatacataattcccttttgcaagggaaaatgcaaaccatatttgaatgaaagaaggcttccccatatctgcattgtaaattgaatggttaggtttttagatatcggggaacagaaatttatagcttaggagcaaataactccgtttgaaagaaagccaggaggcaaaattttcctctttgaggaaacacccaacagttcgacatgtttccatgatgtaagcattttttttactaatccaagtaaatattttttcccactaaatcctatgaccgtgatctgatcgaaaaaaaaaaaaaaaa

SEQ ID NO: 388763 - DNA, 903 bp, Oryza sativa
  unsure (1)..(903): unsure at all n locations
gcggctcaacttccccgacaacgccgcctcccgcggcccgctccangnctccgtcgacgccaagctccagacgctctgccagaacatcgccgccgccaagaacgccaagaagtcctctgtctccgcctccgccgccgcaacatcctccgcgcccaccagcaactgctcgtcgccgtcctccgacgacgcgtcgtcctgcctggagtccgccgactcgtcgccctccctgtcgccgtcctccgccgccaccacggccgagacgccggcgaccgtgccggagatgcagcagctcgacttcagcgaggcgccgtgggacgaggccgccgccttcgccctcaccaagtacccgtcctacgagatcgactgggactccctcctcgccgccaattaacaccaccaccacttcttggctagtactcacgccgtcgttagcctaatcgtcgccgccgccgccgccgtgcagatgggattttagacattctgcaccgcacggacgggcatggattagcagttttatagtccctaatccttttggtttggttcgtttgtgtacgtagatcgatctctctccggacttgtttcctctgtagatgctagggttggttggtgttcttcctcaaccggagacgccgatgctaccggcagccggcgtttttgtgtccggcgtgcgtctccggtggccggtcactggtcggttactccggccgtggcgtccattgctcttctaaagtctgttattaccttctactgctgatcttacaggttgtaaacagtagtagtagcattattattattattatgtcttgtaatattattagcgtgttataagaacttgtaatgtgaattacctctactactactattattattatttagcgtcgttgttaaaaaaaaaaaaaaaaa

SEQ ID NO: 388764 - DNA, 402 bp, Oryza sativa
  unsure (1)..(402): unsure at all n locations
gacccacgcgtccggattgtacatcagcaatgccaacagtaggttacattctttctccaggttgattattattttatttccaagcaagattgtacagcagcaatgccaacactaggttacattcttgtatgtgatccatgtctattatctattacagtgattgtaccatcatttgtcttcagcttccacaaattacaacatcaacttgcatgacacatatcacaaagcagtgaaagcacatcttttttctncngctccataatacaaatacactggttacatctgttgctccaggcctccagtnnnnnnnnnnnnnnnnnnnnnnnnnnnnnnnnnnnnnnnnnnnnnnnnnnnnnnnnnnnnnnnnnnnnnnnnnnnnnnnnnnnnnnnnnnnnnnnnnnn

SEQ ID NO: 388765 - DNA, 358 bp, Oryza sativa
ccacgcgtccgtagtgatctcctttggtgagctactgtacagtagtatgtctatactccatagcaagctacacaaagaaagtagtccgcgctaatgttgttgattcttttggatacgttacaaggatactcgtattggcagctgcgaatcaacttcaggttgtcttcgagatgcatttgtcctgcctcagctggaatagagaactgaagaaagcagcagcagcagcggcaaagatcccctctgtaaatactctcatttttgtttgctctattctttgcttttagaaagatgtagggcataattttgaatggtagtagaatctacattatacgtaacagctttacagaagaatgacaag

SEQ ID NO: 388766 - DNA, 477 bp, Oryza sativa
  unsure (1)..(477): unsure at all n locations
cccaagntagccagagagaggggctcttttggtggagccagaagttcagacaggccaatgacaaggcagaggtggtgagatacggcgtttgagcatttgttaaggaaactctgggtcctcgttttttgtttcgaaagaatggggaagaataagtcattttcttctgtgttttgactcccattttgtctgatctagaaagattggagagaagcttgtcaatggaggttactctgcgtgaagctatttattatcgcctcttaagttgtagggtattttggttccctttttgtcatctcccatgccaaaacaagacctggcaaactttgatactaactattgttcctgatcggttcatgtcgcatgtggtctcttaagcattcatggatggagaccttttgtatggatattttgatattttgtacagttgcatgtgttagccatctgttctgttnnnnnnnnnnnnnnnnnnnnnnnnnn

SEQ ID NO: 388767 - DNA, 537 bp, Oryza sativa
ccacgcgtccgcttgaagagccagataagaaaactgcagccaatgatcatgtagaggatgtgactgttgaagagccagataagaaaaccgcagccaatccgcccgcgcggccggtcatccctgaagagacagataagaacaccacaaccaatgagccagtagaggatgtgactattgaagagccagatatgaaaaccgaagccaatgatcctgtagaggaagccaccgttgaagagccagctgtggaagctgggacaattgaagagattgctacggctgaagcacgagatgagaaaaccatgataaccgaggaaactgcacaggatcccatggttgaagatgagaaaaccatgacaaccgaggaaaccgtacaggagcccatggttgaagatgagaaaaccgtgacaacggaggaaactgtacaggatcccatggttgtagatgacaaaaccatgacaaccgagaaaactgtacaggattccatggttgaagaaaggggtacgaatatcgcagctgctgaggaaactgtagagcatg

SEQ ID NO: 388768 - DNA, 1123 bp, Oryza sativa
tcacaacttcgcttctcggttggcagcagcgatttcatccaagcaccacgccgccgccgccgtcgaagccgatctcctgcgcgcggagcggatcgcctctgtcagtcaccagctatacagtatgagttcactggagagtgcaagagcagatcttgctctgcttattttatacctaaacaaggctgaagcaagagataagatctgtagagctatacaatatggctcgaaatttgtgagtaatggacaaccagggcctgcacagaatgttgacaagtcgactagtctagctcgtaaagttttccgactttttaagtttgttaatgatctgcatgctttgattagtcctcctgccaaaggaactccactacccctgatcttacttggaaagtcgaagaatgcactgctatcaactttcctctttctggaccaaattgtatgggctggaaggacaggaatatacaagaacaaggagcgagcagaattcctcagcaagatagcattttattgcttcctgggttctaacacatgtactagtattattgaggtagccgagcttcagcggctatccaagtcgatgaagaaactagagaaggagcttaaacaccaggagctgttaaagaacgagcaataccagatgaaactgcagaagtgcaacgagaggcgtctcgctctcatcaaatcgagcctcgacatagttgttgctatagggctgcttcaactggctcccaagaaagtgactccgcgtgtgacaggggcgtttggatttgctagctcactcattgcttgctatcagttgctcccagccccagccaaatccaagtgatccacctgaaggggtgtcagtgggcagttccaatgttgcaaccagtaagaaataaaagtggagctgcttgattgactcatgtggacttgaaaatcctttgtgggttatggttaatatgatgatctagtggattgctgcagctgtaattttaaggtgcagtacttgtgacaaaaaataagaaacttagcatgggaaaaatgttgcattgtttgccaatggtttagtgttgggactagctaataagaacattgccattatatcaacatctgtttgtgtgccttgttcgagactgaaacaaaa

SEQ ID NO: 388769 - DNA, 1601 bp, Oryza sativa
ggccgcgcgcaactttccctgaagccccggatccactcaacccccctccccctccgcgccagatcgttgtgtttatgagctcgaaggagaagcccactcttggaggccagcggattaagacccgcaaacggaatattgctgctcctttggaccctgcatcattctctgatgcaattgtccagatttatctggataatgctggagacctggaacttgttgccaaaagtatcgagtcctcggatctcaacttctcacgttacggtgacaccttttttgaggttgtattcattggagggcgcactcagcctggcacaataaaacctgaggaagaaggagagcgtcacccctattctgtacttgattgtgcagcgcagcgtgaagcaattttgccttctgttctctacattcagaaaacattgcgcaggaggcctttcttgataaagaatcttgaaaatgttatgcgcaaattccttcagtcactggagttcttcgaagaaaatgagaggaagaaacttgccattttcacagcacttgccttttctcagaagttatcaggtcttccacctgaaactgtcttccagccactgctcaaggataatcttgtttccaaagggatagtgctttcgttcattactgagtttttcaaagaatatctgaaggagaacactttagatgatcttattgcacttttgaagaaaggcaaaatggaggacaatttgctggaatttttcccatcggcaaaaagaacctccgaggctttatctgaacatttcactaaagaaggtctgacaagtcttgttgagtacaatgaaaagaagatgtttgaggttaaacttaaggagataaagttaacactgacaacaatgatcaatgaagaggctgaaatatctgaagtcacagaagctgtcaagcaacaggtgaaagatgctaaatttcctgatatagaggttgttcgcatgctatgggatgtgctgatggaggctgttcagtggtctgggaagaaccagcaacaaaattctaattcagcacttcggcaggtgaaagcatgggctggccttttgaatgcattctgcacaagtggcaggcttgaactcgaactcatatacaaagttcagacacagtgctatgaggatgctaagctgatgaagctatttcctgaaataatcagaacgctgtatgaccaagatgtcctagctgaagataccatcctcctttggttccgcaagggttcaaacccaaagggcaggcaatctttcgtcaaagcactggaaccttttgttaaatggctggaggaggccgaggaggaggaataaatggtgctactggaggctgtgcgaatgtattgtttgaatatttccttatatcccaagtttccagctaaagttatgtatcttttgctcccttgttactgggccgaccattttatgatcacatgctgatcctaatagtctactgaatgttaaaatcccatgcaagaagttattccaggatttgctaaattattggttgttacaacttacaagaatgttccatatgttatttctcaactgttggtacttaagatattttaaattcttatgatttaaaaaaaaaaaaaaaaa

SEQ ID NO: 388770 - DNA, 629 bp, Oryza sativa
  unsure (1)..(629): unsure at all n locations
ntcggacccacgccgnntccgcccacgccgnntccgagaagggcgagggatnncatgcagcccgtnngccggtctccgaccgccctcagcanggttcgccggcggcgcccccgagatgtcccgtgctggcgccgtcaagctcatctggaaccacatcaaggccaacggcctccagaacccagcaaacaaaagggagattaactgtgacgataagcttaaaagcttattcgccgggaaggacaaggtcgggatgatggagattgccaagctgctgtcccctcatttcattaaagctaactaaaccagtcatatggagcaagtattagtgcttactgctcggacttgtgttgggatgcttcttttgtgatccatgttaggccccaaggttccactaggttttaggtcatgtggctgtgttaagacttaaaagacttcgttgaacatctaggccggggttcccagtgatgcatgtaaaaaaaaaaggcactcccaatattttattgcgtcctactactgtgatcccaggcgttttatgtggttcaatttttaatctgccattggcatcttgttacctnaggcnnnnnnnnnnnnnnnnnnnnnnnnnnnnnnnnnnnnnnnnnnnnnnnnnn

SEQ ID NO: 388771 - DNA, 1199 bp, Oryza sativa
cgtcgtgtgggtttagatggtgaatctgatcaaccttatcgtgctgctggtactgcagggccaacacggctactggtgccagcttctcaagctggcagcctgattggcaagcaaggagcaaccattgaatccatacaggatgcttctaagtgtgttctccgaattcttgaaagtgtaccaccctgttgcattaagttgacgaccgagttgttgagacacagggtgaacctctagatgtccacaaagcagttggaactgattgcaagtcatttaagaaaacttcttgttgaccgcactgtgctcccttttgttcgaaatgcagatgaaagtgcacaatgcgcacagagagcaacctatgccacctcctcagacgtggggtcctcctccaccgtggggtcatccatcaaacgttcctcctggtggcccaggttatggtggtaatccacagttcatgcctcctcggcctcaagaccactattatcctcctcctgatgtacctcctgtcgaaaagcaaccacactatggaatttcttcatatggccgtgatgcacctcctactggtgctcctcctgcctcagggaatcaacacccaccacatggttcttctcaaataacacacagcatgcaagttcctctttcctacgctgatgccgtgattggggcagctggtgctagtatcagctacattcgcaggcatagtggtgcaacaataagtattcaggaaggtgttcctggagaaatgactgtggagatatcaggaagtgcttcacaagttcaaactgcccagcaactgatcaagaatttcatggctgaagcttctccccaaggccccccacaagctcctgctcctcctgctcaaccagtcgacacgggctacagctcctacccaccgtacggaggaacatcatacggatctcctcctggcggcgcaggtcctcacaacggtggaagctatggcggtgcgccacccccctaccctccgagctacggatactagttgtttggaagcgccctaggctctagaaagagtgggatcttctggttttgttctgttcgtctgtcaagaactctcagattattggttgttaggacttcctgaacgctttagttatggtgtaaactgctttctgacggcggcagcaaatgttccctgtttcctcatatgctgtctaagcttctcatgtgtcgtaaaatggagc

SEQ ID NO: 388772 - DNA, 714 bp, Oryza sativa
  unsure (1)..(714): unsure at all n locations
ccacgcgtccgcccacgcgtccggtgggtgtgtgtgtctccaggcgatggcgtcgaggctggcgcagctacggtccaaggcggcgcaggcgtcggagctcgtgtcgaagcacgggtgcgcctactacaaggaggtgatggagaagaacaagcagcacgtggtgcagccacccaccgtggagaagtgccaggagctctccaagcagctcttctacacccgcctcgccagtttgccaggccgctatgaggcattttggaaggaatttgatggtgtcaagcaggtatggaagaatagaaaggagctcaaggtagaggaccttggaattgtgacattatttggagttgagctttatgcgtggttctgcgtaggcgagattgttggcagaggattcaccataaccggctataaggtctagaagagttctgattaagacctggtttataaaatacactgttagctgatgcttgtcgaaatgacaaagatacctcctgccttttcacaattttgtttatggaaagtctttctagtgctggatgtcagccaagacgagcacatcgttgcaacactgcttcaataatttgctcgatctctcgattgccattttggtgtcctgtaatgtgaaatactgaaattccatcttgccccacccgtcaaattgtcatttatttgttctcttgnnnnnnnnnnnnnnnnnnnnnnnnnnnnnnnnnnnnn

SEQ ID NO: 388773 - DNA, 424 bp, Oryza sativa
cccatctcgccgtcctcctcctcctcacctcacctcgccccggatcccccatccacctcgcgacctctcctctcccctccccggcgcttcacccacggcgatggcgtcgaggctggcgcagtacggtccaaggcggcgcaggcgtcggagctcgtgtcgaagcacgggtgcgcctactacaaggaggtgatggagaagaacaagcagcacgtggtgcagccacccaccgtggagaagtgccaggagctctccaagcagctcttctacacccgcctcgccagtttgccaggccgctatgaggcattttggaaggaatttgatggtgtcaagcaggtattggaagaatagaaaggagctcaaggtagaggaccttggaattgtgacattatttggagttgagctttatgcgtggttctgcgtaggc

SEQ ID NO: 388774 - DNA, 1295 bp, Oryza sativa
gttcatgctgatccagctggaccatgcaaggccaggaataacttgtgtaaacttgagagagagggattcattgaatcatctccggcacaggattgtgacctctgctgcaaaatgcctgatttctgccgagagtgctgctgcgtctcctgccgcagggttgttgactattcctttggaggttatagctacattaagtgtgaggcagtcctagaagagaacaaaatatgtgggcatattgggcaccttgattgtgctctccgtacttttatggctggaacagttggaggatgtattgacttggacatgcagtattgttgcagacgttgtgataacaaaacgaacttgatgctgcacgtagaaaaattcttggaaatatgccaatctcttcaatcaagggatgacattgaacctatcctgaatactggcttatgcctagtgcgtggttcaagacaaacaagagcaaaaagcttggagagcattatgagatcagcaatggcaaagctaaagtgtggggttgatcttgctgaagtttggaaaatggaagataatggtatcaactcaactccaagtgcagaagtttcccctgctaccggtggtgtaacagtgcttgggatccagcaagctccagaagaggatgctcctccagggtttccatattatgttgatttggctgacaatgatttgcagagggctgttgaaaatcttccagcttacattaccgaggatcaacacacactgtctgtcaggttcgaagattcgatagatcatgctcttaaagaactgaagagatctcaggaagcagagtacaagctggcagagcagaagctttattcccagaaggatcatgtcctgagtctttatcgtcagcttgattctgaaagatccgtccttgcagaccctatgcccttagctgatgatgatggttcactatatagtacactaatcaccaatgttatgaagcgtgtggatcaagtgaagagtgaagaggagaagctcaaggtcatgctgggaatcgctgatggatttgggaaaacgccatcaggagtcattcaggagcatttcgggctacctgctgatactgccaactgagagtgcctgctttgttgtactgtcgtatgagtttgttaccaacccatctggtttggactaaaccagtaataccgtgaaactcgcggtaatccgtggacatgcctttaggaaccttcgctctccctaataccagttttaccgtttagcggtaccagttttaccgtacttaaagtgatcgttctactgtcaaaaaaaaaaaaaaaaaa

SEQ ID NO: 388775 - DNA, 1233 bp, Oryza sativa
  unsure (1)..(1233): unsure at all n locations
ccacgcgtccgcgctaaggcccttgcatatcaaaatgtggaatatgcatttcgactagggcagaaagtacgtcataaggtacacgagctgtgatttgtggcatggatcctgtgtgctgtgaatccaagtcatggatggagacagcaaatgtggaaaacttgtccaaaggaccgaatcaacctttttatcaagtccttgttgatgtatatgctgatccagaactccttgttgcatatgttgcagaagaaaatcttgcagaagctgaaatatcagagaaagtgagtttgagttcttcatttgctttggtggttttcatttttggtcaaattgaactaatgctcgccccgtttataaatagggaagatttgatcacccctatattgaatttctgttttttggcgaggacactgctggggacttcattcctatcaagcagcttcgtgagaagtatgatcagccacgttatgaagcttctggggatgaagatgacgatgatggcagcacggatagctgaaaggtaggcagcaagagttgttttgatgccatttccgatgccttaccaccgactgagttccgaaatggtggaggagcttgacagcttgttactatctgatgtaaccacagcgggctaatgtcagtgaagactggtgactgggctaacccggaacctgaacaatccacagcaatctgcaatgaggcaatctgcatttgatatattgatatctgaccttgcagattcacgattgaggataacacccatatagtggccaatccatgaagccctttacatatacggttctaaagaagatccttgtggatttgcagtctgtacttccccaagttctgctctaactgtgttccctctgatgggaattttgtagataagctgcattcatcaaccctgcaactctagcagctgcagagaaagcaaagggttgacgtacatctattggaaagttggaatatacttacgtggaaaactaaaaaaaacataaaaaaaacnaatanttttngggggggcccggtacccanttcgccctatagtgagtcgtnttacaattctctggccgtcgttttacaacgtcgtgactgggaaaaccctggcgttncccaacttaanctntttttttttnttccccctttcgccanctggcgtaatagcnaaaaggcccgcaccgatcgcccttcccaacnnttgtgcancctgaatggcnattggcaaattgtnancgt

SEQ ID NO: 388776 - DNA, 500 bp, Oryza sativa
  unsure (1)..(500): unsure at all n locations
aattcggcacgagcgccgcgntctacgnnntccccgcaatttttgccgggagctaccctgtaaggataccgtcctgcctcgcccgcttagctaaccttgtgtagggtgctagaactttcttacacctctcagaggaggcctcttcttaatttaacgaccatacacgaaagcatcagccattaggcgatgtaattaattaggttttgtttctttccaccacctttttctttctttctttctttcctttggttttcttgcactgtattatccccacgcgggggatacagcacaaaaggttggctgccctgatcagtagcatattgttgcagcgctgtctcaccttgttttctctgcatatattatatatgcaatcatatacgagtggttaaggggaattcaggtcttgatcatattggctaagttggccatgctactggtactagcatgttcatttttctttttgggtttcgatttataagctagtagtatttgatagcact

SEQ ID NO: 388777 - DNA, 414 bp, Oryza sativa
ggtattgtgatagccaaacgcaaatgttgcagttaatgccggagatctccctctgcgatggatgctgcacaatgggtatgaagttccacgggatatgctgcagagtggttctgatgcacaatccgtccgttaggggaggaggggatcttacccctggcggtgacactgggcagtctattgctggtgaagtgtggggcaatgtcaaggacatagttgggcagaagaaggatgagtatgattacaccaaactttttaaaacctattttattcattcccttccggcattcttaagccggacaaggactacctgtggaggtgtggcaagcaaaggctccgtgaagctagaatacaaggcgttgactatctgatcctgggccttgctggtttatgtctagggacattagctaaagtgag

SEQ ID NO: 388778 - DNA, 555 bp, Oryza sativa
ccacgcgtccgcccacgcgtccgcccacgcgtccgtaactctctccctctctctctcctcgccgccgccgccgcctccacgtttctctctcctcgccgcgcgccggcgagacctcgccgccatgaacaatctcctcaccgattcgtttgagctccctcggggaggctcttcaagagatggggacattgaaatgggaatgcaagctgatccttcagacaatctaaaaggtttcttgaaaaaggttgacgcaattgaaagcctaattgctaagctgacgaatctcttgcataagcttcagactgcaaatgaggaatctaaagcggttacaaaagcaagggacatgaaagcaattaaacagaggatggagaaagatattgatgaagtggggaaaatcgctcgcatggcaaagacaaaagttgatgaattggaaaaagataacttatcaaacagacaaaagcctggatgtgggaagggatctgcggtagatcgatcaagagaacagactactggagcagtgaaaaagaaattgaggaacgcatggatgattttaagttt

SEQ ID NO: 388779 - DNA, 1460 bp, Oryza sativa
  unsure (1)..(1460): unsure at all n locations
gcgtctcaaaacgcggccgacgcgcgcgtatccgaggctgaggctcctcttcctcttcctcttcctcctcctctcggcggcggcggcggcggcgggtctccatttgctcaagcttgcctgccatgcccatggggacgaggtagcgcttcccttcctgcctgcggtacatactaactaagcagagggcatccctcatatataggctttgcgaaatcaatcaacaagcttggggaggagaagaggaagaggaagaggagatggagcaggggggtgaggccggcaccggcggtgggctgggcaacctgcgcgcgctgctggccatcctccagtggtggggcttcaacgtcaccgtcatcatcatcaacaagtggatcttccagaagctggatttcaaatttcctctgacggtgtcttgtgtccacttcatatgctcttcaattggggcttatattgcaatccatgtgctcaaagcaaaaccactcattcaagtcgaaccagaagaccgttggagaaggatttttccaatgtcatttgtcttctgcataaacatcgtgctcggaaatgtcagcctgcgctacatcccagtctcctttatgcagactatcaaatctttcacccctgcaaccacggttattctgcagtggttagtttggagcaagcattttgagtggcgcatatgggcttcgctggtcccaatagttgggggaatactcctaacttcaataacagagcttagtttcaacatgtttggtttctgtgctgccatggttggctgccttgctacatctaccaagaccattttggcagagtctctactccacggatacaaatttgacagcattaacacagtgtactacatggcaccctttgccaccatgatactggctctaccagcagtgttacttgaaggaggcggctgtggttacctggttctacacacatgactccattgcttctgcactagttatcatcataggctctggagtgcttgcattttgcctaaacttctccattttctacgtgatccattcaaccactgcagtgaccttcaatgttgctggcaacctgaaagttgctgttgctgtattggtgtcatggttgatcttccggaaccctatctctcctatgaatgcaatcggatgcgcgatcacgctcgttggctgtactttttatgggtatgtgaggcatttgatccctcaacagcaggctgtagctccaggaacaggaagcccaacaacatcgcaaacaaattcgccgagaagtcggatggagatgctcccccttgtaggcgacaagcaagaaaaggttaacaaaagaatacactttgtactatgcaatagtcattatggtctggattcccttgagttcgaactattgtgttccttaggttactgtttcaaatnggcagaaactgccgacgctatactccttttgtgagtgatacggaattttctactact

SEQ ID NO: 388780 - DNA, 499 bp, Oryza sativa
ggaatgccgggggcgacccacgcgtccgcatcccgccgcggcgccatggccgctaccgtcctcctcctctcgccgcgcctcgccgtcgcgcctctacggccgcaccccaggctggggctgacccccaccgcagtcggacggcctcttcccctcgcctacctcggccgccgcgccgccgccgcgaggcagctcgccgccgtcgccgaccggaacgtctacaacggcgtctacggcccatggaccgtcgaggactccgacgtgcgcgaggtcttgctgtatcggtccgggctggtcaccgccgccgcgtccttcgtggccgccgcctcggccgcgttcctccccgaggggaacgccgccggcgacgccatcaggcaaggcgccgacctcctctacgccaccggagcggcggggctggggctttcgctcgtgctgattcacatctacgtcactccgatcaagcggttcctccaggcgctgtgggtggtcggagtcgtcgggt

SEQ ID NO: 388781 - DNA, 930 bp, Oryza sativa
  unsure (1)..(930): unsure at all n locations
gagagagagaggagagaggaaagctaagcttccagagatgtcggcggacgagctgcggctggacctggaggagctgcggcggctggagggcctcgccaagcggccccgcgtcctctccgccctcgccaacgagatccgcgccgtcgatgccaagctggcgaaagcgaccgagccgcagactcgcaggccgtcgcggcgggatcgcacctgtagtggggcggcggcggcaccggcacctgctgctgctgctggggtgagctacgtgacgttggggtcgttcagctgggatcaggatgctgagaagataaagatttatgttttcctggagggtgttgagcaagataaggtggagactacttttaagcctatgtcagtagatacaaaattccatgatgtgaagggcaagaactaccgatgtgccatacctaagctgcacaaagaaattgttcctgagaaatgcaaggttttagtcaagcctacaaagattattgtgacgctttacaaagcttccaaaggcaactggttagacttgcatttcaaggaggataagttcaagccaagcatggctaaggagaaggatccaatgtctggaattatggatttgatgaagaacatgtatgaggaaggtgacgaagacatgaagcgcacaatagccaaggcctggtctgatgcaaggtctgggaagaccgccgattcagtgaggggattaccttgagtttgcccgaagcgttggctctgctgagccagttcggtgtgattgaatgcacttgggtatcttattttgcatgtaacgaactggaaatcggtcacgccgggcctgttcatttgtgaagaaaacatcttctcgtgtgatattatcacttctgcgtgtgatcagcctttaatggaatgattatgtgccnnnnnnnnnnnnnnnnnnnnnnnnnnnnn

SEQ ID NO: 388782 - DNA, 588 bp, Oryza sativa
ctaactcgtattcagcaaaaaatcagagccagcgcccaactgcaaacctcatgggtatgcatgcacagataccttcgtcgggaatgggtttgacatctcctagttatcataccaggatgtacccagacaacagattatatgggcagtatggtcagtatgggaacgcacttaaaactgggcttggtttcggatcaaatatgtacaactccagaaataatggacggtggggaattgttgatagcaagtacaagcctagaggtcgtgcatcttttggttttggcagtgagaaccaagatggcttcactgagcttaacagaggaccaagatctggaggattcaagcaccaaaaacagtttggaccttctgtcacttttgctgtgaagggccaagccctcccctcagtcgggaaacaggagaatagtgccattccagataagggccaattccaccaggaaggttttccagtaacatacaaagatgcaaagttctttgttatcaaatcttacagtgaggatgatgtgcacaaaagtataaaatacaatgtgtgggcaagcactcctaatggaaacaagaagctggatgctggat

SEQ ID NO: 388783 - DNA, 1445 bp, Oryza sativa
tgatggtaagaacaagctggtcacagttgatgcatctgagtacattttcaagctggcccttctacgcaaacggtatgatcatgtgatgagtatgatcaagaattcccagctgtgtgggcaagctgtgatttcttatttacaacagaaaggctttccagaagttgccctccactttgtgaaagatgagaagacaagatttaaccttgctcttgagagtggtaacatccaaatcgcagttgcttctgcaaaagagattgatgacaaggatcactggtacaggttgggaattgaggccctgaggcagggaaatgttggtattgtggaatatgcataccaacgtacgaagaattttgagaggctggctttcctatatcttattactggttacatggacaaggtggggttcatgtgcaaaattgctggacagaacaataacctgatgggtcaattccacaatgctctgtatcttggtgatgcgttgaagagagttgagatcctagagaatgctggacagctacctcttgcttatattactgctaccacccatgggctcacagaaattgctgataggcttgccgctgagctgggtgaaaatattccttctcttcctgaaggaaaagctcgctctcttttgatcccccctgctcctcttacagccagtggtgattggccattgcttagggtgatgcatggtatctttgagggtggactggatgctactgggaaggctgaacttgaggaagacgatgaagctgctggtgctgactggggtgatgagggcctggatattgttgatgcaagcgaagcgatggcgaatggtggtgacggttttgatgctgaggagggtgaagcaaatgaggaggatggcgaggaaggtggttgggacctagaagatctggaacttctgcctgaagcagagaccccaaaaaatgctggcaatgcacgctcagcggtcttcgttgctcctccaccaggcatgcctgtcagcctgatttggactcagaaatcttctcttgctggggagcatgcagcagcagggaactttgacactgcaatgaggttgcttagtcgccagttgggcataaaaaactttgctcccctcaagcccctgtttcttgatctgcacatgggcagccactcatatcttcatgcacttgcaactgcccccatcataccagttgctgttgagaaaggttggagcgagtctgcaagtcctaatgtgagaggccctcctgcacttgttttcaccttcccacaaatggaagacagactcaaggctgcctataaggccaccacagatggtaagttcccagaagccctgaggcagttccttagcatcctgcataccatccctcttatcgtggtagactcgaggagggaagaggattaagataatgactttatcttttatgctatagattcttctttataattatattataatc

SEQ ID NO: 388784 - DNA, 846 bp, Oryza sativa
ccttagcatcttgcataccatccctcttatcgtggtagactcgaggagggaagtggatgaagtaaaagagttgatcgagattgtgagggagggtggtcttggcctgaggatggaacttaagaggaaggagttgagacatgatgtcaaccgccaacaagaattggctgcttatttcactaactgcaagcttcagagagttcatatgaggcttgtgcttggaagcgctatgggtctgtgctacaagcaaaagaacttcgctactgcagagcactttgcaaggatgcttctggagaacaaccctaatgaggcccaggcaaggagggctcgacaggtgcagcagcagtgcagtggcaagaaggatagctctgagctgaactatgactacagaaatccatttgttgtctgtggcgccacatatgttccaatctaccgtggccagaaggatgtttcctgcccgtactgtggatcccggctttgttccttcgatcgaagggcagctttgtaccatatgtgagcttgccgtggttggtgcagatgcttcaggcctcgtctgctcgcccacacagttgagataagtggtgctaaggtagagctcccccattttcttttagtctcttaaaattctagggattctctatctcacattttagctgcatgtttactgattgaggagtgtatacatggtcgtgtttttgtatcttctccccctcatttccctcgatttttgtttgccttgaggcagctgttacacttgtcatatatggacttttgatcatctcatggtggcctatgcgcctacccctggacaattgatgtaccaatattactttcaaaaaaaaaaaaaaa

SEQ ID NO: 388785 - DNA, 445 bp, Oryza sativa
atgtttcctgcccgtactgtggctcccggtttgttccttcgatcgaagggcagctttgtaccatatgtgagcttgccgtggttggtgcagatgcttcaggcctcctctgctcccctacgcagtcgagataagcgtcggtagatatgctcccttatattctttctagtctctcttaagacttcgctatgatatattttaccaggatgtttactgattgtaaggaataagtagtgttatacatggttgagtttttgtttcactcctctctccatttcccttgatttttgtttgcctcgaggctgttgttacacttgatacatgcttgaggacttctgatcagctcatgcaaatgctatgctcggacgttatgtaccaatgtttgtttcactcatgtaaaaaaaaaaaaaaagcgcccccgctcgcgatctagaaccggacgcgtggg

SEQ ID NO: 388786 - DNA, 1716 bp, Oryza sativa
tgtggaggccatgctggtgttctgaaggaggccaaggttttcaaggagttggtgctatcaccaacatcaaaggcacttgtacatgctttctttgcccagcgtttaaccacaaaggtgccaggtgttactgatgttcaattgaaacctaggaaaataagaaaagttgctgttattggtggtggtttgatgggctctggaattgcaacagctcttcttgttagcaatacatccgttgtgcttaaggaagtaaatcctcaattcctgcaaaggggacagaagatgatagcagctaatcttgagggtctagtcaagaggggctcattgacaaaggacaagatgaacaaggccatgtcacttctcaagggtgcattgggttattctgatttcaaggatgttgatatggtcatcgaggctgtcatagagaagattcctttgaaacaatcaatattttctgaccttgagaaagtatgcccaccccactgcatacttgcaacaaacacatctaccatcgatttgaatgttgtgggcgagaagacaaattctcaagatagaattataggggcacatttctttagccctgcccatattatgcctttgcttgaaattgtccggacggagaagaacatacccgaagctattcttgatctcatcacagttgggaaaatgataaagaaagtccctgttgtggttgggaactgcacaggcttcgcagtcaatcggacatttttcccttacacacagggttctcatcttcttagttagtattgggatcgacgttttcagaattgatcgagtaataagcagctttggcatgccaatgggaccttttcaactgcaagatctggctggatatggagtggcattggcagtaaaggatatctatgcggctgcctttggaacaaggaatctggactctaatctggtggatttgatggtacagaatggacggcagggaaagagcaatggtaaaggttattacctttatgagaagggtgggaagccgaagcctgacccaagtgttcaggttgtgattgacgagtacagaagatgtgcaaagacaatgcctggtggaaagcctggtactttatctgatcaagatatattggagatgattttcttcccagttgttaatgaggcatgcagggtcatggatgaaaatgttgtgatccgagcttctgatcttgatattgcttctatccttgggatgggttttcccaagttcaggggtggtcttgtcttttgggctgacactattggagcaccttatatacattcaaagcttagcaagtggactgaaatttatggcgatttcttcaaaccatcatcctatttggaagatagagctaaaagaagcctaccattgagcgcaccaaacgcaacccagcaggcttcgtcgaggtcacgcatgtgagatgctatttcagctgatggcagaataattgcttgatgtgcatcggcaccctagttgaccctcatatctgggacctgaaaaaggaggtcagagcagtgttcaccatgtaatctcttttggatattttggcctttccggttttccgaactgggttgctatggcaatcggagtaataaatgttggcttcggatgccacaaaactgtaactttatggccgatagccttttactccagtgttacattaaaatgtatatggtacagtgtttttttaacttgtagtaaaataatatgcatgctctccgaat

SEQ ID NO: 388787 - DNA, 802 bp, Oryza sativa
ccctcctcctcctctccggcgatccacccatcgatcggcgatgacgctggggagctccggcgccggatcgagcgtcgtcgttccgcgaaacttcaggttgctagaagagcttgaacgtggtgaaaagggcattggagatggaaccgtgagctatggaatggatgatgcagatgacatctacatgcggtcttggactggcaccatcattggtccacataatagtgtccatgaaggtcgcatctaccagctgaagctgttctgtgacaaggactacccagagaagccaccatctgtccggtttcattcaagaatcaatatgtcgtgtgttaatcatgagactggagcggttgactcgaggaagtttggtgttctagcaaactggcagcgcgagtacaccatggagactatccttacccagctcaagaaggagatggcaaccccgcagaatcgcaagttggtgcaacctccagaagggacgttcttctagaggagtatttacctcctggctcatctccagaattcagattcaacatcatcaacttgtatttatctggctcccgcgcttaattgttttctagttcaatttgatatatgccctgctttctgtgtaccaacaaccgagtccaactttgcgcctcgtgattcgtcgggtggctgttgattaaggagatgagtcggatgaaaagggtgatctggtttggcaaaattggcagtatgagggatgtaaaattggaaacagatgctgtgtcaagaaatgtgtaactgcaggtcctttatattgcctaaaaaaaaaaaaaaaaaa

SEQ ID NO: 388788 - DNA, 400 bp, Oryza sativa
ccacgcgtccgcccacgcgtccgcgacggacgtggtgaagagcgtcatccaggtggacgactacaagaaccccaagtactccggctccatggacgccttcaggaagatccttcgccgccgacggcgtcaagggcctctacaagggcttcggcccggccatggcgcgcagtgtccccgccaacgccgcctgcttcttggcctacgaggtcactcgctctgcactaggctgaactcatgtatcattacatcctcctccttcttgacccttaattttcttcttctgattctgattctgattcttgctgtcatccatctcatctgtggatgtaagaacagtgtaattctgtacacacaaatactatctttataaaaatttcctagatcaaaaaaaaaaaaaaaa

SEQ ID NO: 388789 - DNA, 740 bp, Oryza sativa
tgccgtagtcaacccaaagcgccatggcggacgaccacgccgccttcgacgacctcgtcgacggcggacgccccgagggcgatacgcattcacgtgaagacggattatcaaaaccaagagataaagatagagaaagagaaaaagacaaggacagggaacgccacagggaccgtgacagagatcgaggaagagaccgagatcgggacaaggacaaggaaaaagacagagacaaagaaagggacagggatagggacagggacaaggatcgggatcgccaccataggcatcaccgtgaaagaagagaacacagagatcgctctgatgatcatgatcgccacagaagccgtgattctgaaaggagaagagaccatgaacgggatgggcgtcgcaggcatcggtctcgctcacgctctcgttctaggggcagggatcgcagatctaggtctcgctctcgttcaaaaagcaagcgagttagtggatttgatatggcgcctccagctcaagctgtggttccacaatttcctgctattccaaccccaagtcagtttccgggcactgctattcctggaatgtttccaaacatgctcccgatgggtgttggacagttcaatccccttgttatccagccgcaagcaatgacgcaacaggctactcgacacgcgagacgtgtttatgttggtggacttcctccaactgctaatgaacagtcagttgcaatatactttaatcaagtcatggct

SEQ ID NO: 388790 - DNA, 389 bp, Oryza sativa
  unsure (1)..(389): unsure at all n locations
aggtgattattgtgagcaactgattgcggcgacggcggcgagcgcggtcggccagctctgcaagcccttcacttcctcgctccacctcgccccggaggacatcgcctttgacctccgggctgccgtccgctcaggcgggatgccctccacccactccgcggctgttgtggcagtggctacctcgcttgggctagaaaggggctttgcagactccatttttggtatgtcagtggtgttcgcagcaatcgtaatgtatgatgctcagggagtaagaagagaggtgggcaatcatgcaagagttttaaacaagttattgacccttcgcgagaagatcactcaaaacccggacgacaattccttgtttgagttncacctctgaacttcactnc

SEQ ID NO: 388791 - DNA, 638 bp, Oryza sativa
  unsure (1)..(638): unsure at all n locations
ctgattcactactatcttcacttgttttaaatttatcttcatccgaagccgaagttccagcgaaattttctgctctagctgtggtagaaaataattggtttaaaagatctctgccttcaaagacttggaaggcaagctctgattctaatcttagtcaggaagaaagggagagaaggcggaggcgagctgcagtgagatcatcttttgtacagcacctgcttgtctctacccctttttgatgactagcagaagaaaaaaagagcagctccgtgcactggaatctcgagtgggccttttgtccacacatttctggatgaatgatgaagtaaagcatcttccaaatcctgaagcagttcatccaaccggaggctggttcctgatcctttcgacattgatgatgaaccgatgtggctggcctcttacttgtcatggaagcagttctgaacatttatgttcgaaatccaattcagattgctaggctatcgactagcgttactgtattgattgtgttattccatatgatttcattatgtgcttaacaatacaatgaacattacccccaatttgattcttactataaacatttcaaaattgaattccatgtttggtnnnnnnnnnnnnnnnnnnnnnnnnnnnnn

SEQ ID NO: 388792 - DNA, 693 bp, Oryza sativa
  unsure (1)..(693): unsure at all n locations
gtccgcggacgcgtgggcggacgcgtgggcggacgcgtcggctcatttgattggcccaggctccaggcacttttgttgcagcagctgctcgaaccccagtatgtaatttatcattgatggtaggaacaactgacatacctgagtggtgttttgtggagatttatgggaaagaagggaaaaactgcttctcagagtatccttcatttgatgatctttgtcaatttcaccagaaatcaccaatatcacatatatcaaaggtgagcacgccaacactttttctccttggagcacaagatctcagagttcctgtttctaatggcttacagtatgcaaggaccttgaaggagatgggagttgaaaccaaaattattgtctttccagaagatatgcatggccttgacaagccacagtctgattttgaaagcttcctcaatataggtgtttggttcaagaagcacatgagcaaataaacaacatgcctctgttaccacactctcaccttgcttaataaatgcttgtaatttgggtcaaagcagcccaaggaaacgtggttctgttggcattctaataaattaagcctgctgtaacatttctgtactgggataattcttgaaaatgtaaatgcatttggttataaaattttaccctcgtggtacggaactatggattacnnnnnnnnnnnnnnnnnnnnnn

SEQ ID NO: 388793 - DNA, 1000 bp, Oryza sativa
ggagaaggctatggcgtggatctggatgctcatggcggcgggggccgtgctcctgtgggcggtttctctggggcgggtgctctcctcctcctcgccggcgtgtctgcctgccaactccaccttcctctcccctcctcgcggcgacaggatgagccggaatgtcctcctcgttctcgcccaccccgacgacgaatccatgttttttgctccgactattcttttcctcaagtcaaaaggtcacagcattcatatcttgtgcttgtctcaaggcaatgctgatggccttggaaatatccgcaaagaggaactctaccttgcctgtgtcactcttaagattccagctgagcaagttaaagtcttggaccactcagaactgctggttggatttcataaaaacttgggatcatggactaatagcagaacttaccctggcacaatcccagttatggaatatcgacacgattgttgccttcgattcccgaggagtatcaggccatccaaatcattgcgatgttcatcatggaatctgcaagcttctgcgtgacaacgggcaaggacacattgaagcatgggagcttgtaagcttgaacatttttcgcaagtacagtggtccagttgacatttggctatcttccaccctctcctcaagctcaaaacaaccaacttatactcttgttaataatagcccttccagaagctttgaggcaatggcttcacacaaaagccagtgggtttggttcaggagattgtttgtcctattctcaagctacacatacataaatgtgctccaaaaaatttgaagtttgttgtcgtgccaaagcaagcaccttccggctcagattgtcaaatgcctgtacatgcagagtgccagagtgtaagcgggaagcttctctgaagaaagacaacaatgttgacattggatcaggaattcgaaagatactgaaatgtgatgatgaaatgcaacagtttaggaacctttgtgattatatgccctttatac

SEQ ID NO: 388794 - DNA, 735 bp, Oryza sativa
tttgtgtgtgccttgggatgaagctgctgaggaagcgcgacatcccggaggagaagtacaccaacgccttcctcggctatggcgcggaggacaaccacttcgtcgtcgagctcacctacaactatggcgtcgacaagtatgacatcggggcaggtttcggtcactttggcatcgccgtcgacgatgtggcgaagacggtggagctgataagggcgaaaccggggaaggtgaccagggagcccggccctgtcaagggcggcatgttcggtgatcgccttcgtcgaggacccagatggctacaagtttgagatccttgagaggccagggactccagagcccctgtgccaggtgatgctccgtgtcggtgatcttgatcgggccataagcttctatgagaaggcctgtggcatggagctgctagggaagagagataaccctgaatacaagtacacagtggcaatgatggggtatggtcctgaagacaagaatgctgtgctggagctgacatacaactatggtgtcactgaatatgacaaggggaatgcatatgcccagatcgcgatcggaaccgacgacgtctacaagacggcggaggtggtgaagctgttcggagggcaggtggtgcgggagccagggccattgccggtgatcaacaccaagatcacgtccatcctggaccctgatggctggaaatcggtgtttgtcgacaacatcgactttgcaaaggaactggag

SEQ ID NO: 388795 - DNA, 554 bp, Oryza sativa
ccacgcgtccgagcaaacatggtatgatctaaacaatagttatctggtgaccacaaccagcacaaaaattcatttagttttggtgtatgacatccaaaagtggttgctcaatgaatgaatagcaattaccgtttgtctgtcaaacaagtatcgagtgaattgagcaatgtacatgtatgcaaatatcattcagtgcaagaaaatggtgtcacttccaggagggtgtggcggttctgatctgtagattctgaggtggcaagccgttgtgttattactactcattaggttgatataggtcgtggtatctttgacaccttgtgtatgaaggagctgcgaaactgcaagatatgctgaatgatttgatgcagagttttagcacgacttcagaattaacctgttctatgtgcttcatggattcagtgcactaccattatgagacagatgcctttgctttgctggttggtgtgatctaatgtaaacaacacaatggggaagtatttgaggccataagaaaagcggcagagttggtataatatatttaatcttaagagcaa

SEQ ID NO: 388796 - DNA, 625 bp, Oryza sativa
ccacgcgtccgcccacgcgtccggatattttagagcaactttcatatagaacgttttcaaacgtaacacaccatttagcagtttaaaaaacgtgccacgaaaatcttaatattcatctaactcttgttggataaaagaacgggacctttcttgtgcaatctgaattctgaaatcttggcggcgacaggccggagagggaggtggcgagggtgcagccggcggcagacaagctgggtgagctggggttcaggtacaagtacggcatggaggagatactcgacggcagcgtcggctgcgcggcgaggctgggttacatcgacgcagccaagctcaggccgcaggaaggatgaatctgctacagatttgcaggatgaagaagatggatgatatttgttcggttttgaacaagtttttggtgtttgtttgtaatctcatgtgttctgaatacctctctcatgtatcacatgacgcatttctgcgtcagagaacgatattaataagtactccgtggagctcgctaggcacttgagttatcaagcgtgtttcattcggtaattcgggctaatttgctattgttagcacaagcctgaactggtattaccatttaaaaaaaaaaaaaaaaaaa

SEQ ID NO: 388797 - DNA, 732 bp, Oryza sativa
gagacacccatcaatcataaatttttggtttgtatgcagaacccattccgcttatcgttcacaagaattaacaatgcttatccctataggttggttgcaatgttatgaatgaaatagccaaatcagctttaaagtctgactacaacaacttgtaaaaaacttattttattacttccttaaggaatatttcattgcaatatgatgctttgcagaatatccgtgcaattttcggcttgctaaatggtgaaacaattagatgaccagaaagaggcagcaaggaagaatgaagaagaaactgagaagctgaggcagcaaggaagtgaaatccaaagcttcgttcgctccttgattggcaccaagtttgcatcatcagatgctcagcagtaagctctcatactcaattaggttccagatgatattttggtgacactgaacttgcgaccattgtgattgtgagatgttattttggtgctgttgtgcttctggccgttgtgctgttgctattgggcttttggtcattgcgatgctgctgctgtgaagctattgcagatgtgctgctgttgcgctcgatgtaggaggaagatgaaatttgagactttggatatgtattgaattagtggatggatatactgatattgcattttcagacttgtggaatgtgggatgcatatggcattgcaatcatttgtgcaatgttaattcatttcaatctgaaaaaaaaaaaaaaaaaaa

SEQ ID NO: 388798 - DNA, 507 bp, Oryza sativa
  unsure (1)..(507): unsure at all n locations
aattcggcacgagcttccgcatgttcgggctgctgttgagatggatgtggctggatgttgttggtgtgcggttgctcctatgcgggaagagctgccagctgcagtggatgaaaaatatccgtgcaattttcggcttgctaaatggtgaaacaattagatgaccagaaagaggcagcaaggaagaatgaagaagaaactcgagaagctagaggcagcaaggaagtgaaatccaaagcttcgtctcgctccttgattggcagcaagtttgcatcatcagatgctcagcagtaagctctcatactcaatgaggctccagatgatattttggtgacactgaactngcgaccattgtgattgtgagatgttattttggtgctgttgtgcttctngccgttgtgctgttnctatntgtgcttttggtcattgcgatgctgctgctgtgaagctattncagatgtgctgctgttnctctcgatgnaggnggaagatgaaattcgagactttgga

SEQ ID NO: 388799 - DNA, 811 bp, Oryza sativa
  unsure (1)..(811): unsure at all n locations
taaannncacncnnnatnnnnnnnnntnnncnnnnnnnnnnnccncccccnncccnatnnnnntttnannnnncccccctttnnnnganccncctttnanataanaaaaaancnncccnggggntttnttnccaanantggcccccaaaannggcccccnccaagnnttnaaaagtgccnnnttgaaccgggcncccgaantgaaaccccctngnaggntaanncccttttggaanangggaantttcaaacgngttccccatcccgnaagncnattttttcccaggaattccccccccaaatngcccntatttagaaggaccnccnaacacganaggcctcccctgtgatggcaaggttctattcgggnacctagctgnncntcccatattatccagtacgttcatcaaagcagntncctctatatagagctacagtccntttgccagatttgtacatggaaagctctcgtggatcccacgactactgtttaatcctagctttggttcagttggttctagtctcattttgtttttgggtagtgtgactagctgcgatgtaagtaggcgatgtagcatggattctgagggccgagcactttgtttatacaatctgttgtatcattgactggatgcaatgttggcgttgcattgattcccattacttgtttcatcatgtnaaaaaaaaaaaaaaaaaaaaaaaaaaaaaaaaaaaaaaaaaaaaaaaaaaaataaaaaaaaaaaagggaaaaaaattataaaatacgctgcttttttatcattgtttggcgtaaatttaaaattttcttatt

SEQ ID NO: 388800 - DNA, 1526 bp, Oryza sativa
  unsure (1)..(1526): unsure at all n locations
ccacgcgtccgagaagataggaactctggcatcacaacccagacattgttaaatcatgcgtgggcatctgcaaatcgtcataacaaaaacaattccgattcaacctctgaagaagttcctaagatttatgttcccacaaaccctaaaggtgctgaaaggctcccaccaggcattgttgtttctgaaacagatctttttccacggagattgtggggtgatcctagtgaggacctgagtagcgaaccacggtaccttgttacttttacagttggaattacacagaaggctaatattgatgctgctgtcaaaaagttttcagataaattcactatcatgctattccattatgatggccggactactgaatgggatgaatttgagtggtctaaaagagctatccatgtgagtgtcaggaagcagactaagtggtggtatgcaaagcggtttttgcatcctgatgttgttgcccgatatgactacatattcatctgggatgaggacctaggtgttgagcatttcaatgcagagaagtatattgaacttgttaggaagcatgggctagatatctctcagcctggtttgcaacctgacaagggactgacatggcaaatgacaaaacggcgaggtgatcaagaagttcacaaagttactgaggagaggccaggctggtgcactgatccccatctgccaccatgtgcagcatgggttgagagcatggcaaccgtgggctctagggatccatggccctgtgtctggcatatgattcagaatgacttggtccatggatggggtcttgatttcgctctaaggaaatgtgtggagcctgctcatgagaagatatggagtcgtcgatgctcaatggattgttcatcaagctgtgccatcacttggaaaccagggcaacgcagagaatggaaaagcaccatgggaaggggtaagagcacgctgtaggaaagaatgggagatatttcaaacgaggctggccgatgccgagaaggcatactacttatcacaaggaatcacaccacccaactcgaccctagtttagaagaacacacgaacacgacacgacctcacctgtgatggcaaggtttcctatttcggcaacctagctggaccttccatattattcagtacgttcatcaaagcaggtgcctctatatagagctacagttcctttgccagatttgtacatggaaagctctcgtggatcccacgactactgtttaatcctagctttggttcagttggttctagtctcattttgtttttgggtagtgtgactagctgcgatgtaagtaggcgatgtagcatggattctgagggccgagcactttgtttatacaatctgttgtatcattgactggatgcaatgttggcgttgcattgattcccattacttgtttcatcatgtaaattattcagctggtcttactgttttatggagttaaggtcgagcattttgttttnnnnnnnnnnnnnnnnnnnnnnnnnnnnnnnnnnnnnnnnnnnnnnnnnnnnnnnnn

SEQ ID NO: 388801 - DNA, 738 bp, Oryza sativa
  unsure (1)..(738): unsure at all n locations
ggcgcgtccccatattacagagttactgagaaaatagcagtnccaccaaaaaaagtgcagcaagtcacggagatgtcatatcctaagacgaagaacccaaagcctgtatatttnctacttctcaaactttttaagctgtcagacaaccaggtactctccaggaacgttggctggctacatcttcctggaaaagactacaagttgttggaacagtatcgtcagaaacagataccactgaagatcaactctaagatttccatctcaggctctggatacaaggtcagaatgtccatagagaacagatcaaagaaaccagaaaacgctaacgtatcaaccatgaatctagccgatgcaaacggttccgacagaaccggagaagaagccatccaggatggacatagcagtggcctgtgggggaaaatccgcagaggcctcatcatcacaaggtcagatgacaacgtaagaacagtggaggtgaaaggggccgattcaggcgtctcgtttttcctccatttctcggtacacacatctgagccatcatccagtcaggatgtttacaaggacacaagaatcctccctgtccactactccgacaactacttctccctcgtaccgggggagaagatggccatcgacatctcgttcgaggccccccagggatccacccccagggtcattctgaaaggctggaactatcacctggaccatgcagtgacgttatagtaagagtacttcaac

SEQ ID NO: 388802 - DNA, 1250 bp, Oryza sativa
ccacgcgtccgaaacattacaacaagatgaaccaacgcatgccattgatatatgcaaaactatacatgtatcagatatgcagagctttggcgtacattcacaacaccattggcgtgtgtcacagggatatcaagccacaaaatcttctggtgaacccacatactcatcagctgaaattatgtgacttcggcagcgcgaaagtcttggtaaaaggagaaccaaatatttcttacatctgttcaaggtactacagagctccagagctcatatttggtgctactgaatacacaacagcgattgatgtttggtctgccggttgtgtgcttgctgaactcctcctggggcagcctctattccctggcgacagtggcgttgatcagcttgttgaaatcatcaaggttctgggtacccctacacgagaggagattaagtgcatgaacccaaattacaccgagtttaaatttccgcaaatcaaagctcacccatggcacaagatcttccataaaagaatgcctgctgaagcagtcgatctcgtctccaggcttttgcagtattcaccatacctccggtccactgcttcggaagcattgatccatcccttcttcgacgaactccgtgatccaaacacccgcttaccgaacggccgtttccttcctcctctcttcaccttcaagccccatgaactgaagggtatgccaatggaattcctggtgaagcttatcccagaacatgctcgaaaacaatgcgctttcgtaggatggtgatttgtgaggtcagcatgaaaactagttcagaatttcttcaccgtcctccattagaaaacagagatgaaccctgcctgcagccatttgggaaagctggtgcatatggaagtggaactacattttttttgtccgggattctgacgccgcgtattcttttcccccctcccactttgctgctgccggtgtaaccaaaaaatcatccacggttctgtaaagttgatgaagaagagtgtaaaatcaggttgaaaactgaattcgatcggtttgtcaagattgtagcaacatgcgaggaaggatgttgcacactttgtatggcaatgttcgttcggtccaaatatttgggcatggatcgagaggctattcatttaattgtacttgctactacatgttcttacatatcagtaatcttctgagaagcttgtcaaacaaagtaagggcgagcgcgcccgcgtcaacagaatccaagcattgcgtgcgtgtgcagtc

SEQ ID NO: 388803 - DNA, 472 bp, Oryza sativa
ccacccctccggaacatttcacagggaggacaagtgctgcaatcaaagaacactggagaggtcctatgaaaagaaaattaaattcgtatttagcttcaggattgctcaaaaaatctcctggtctgcctgaaaatctatcagtttcgcagagtagtgactcaaatattcttcagcagtgtgatgtttcatctgatgagaataaactgttatcagatttacgaccaagcctaaaatctaaagaaggggtgagctcaaaatgtgatggttcatcttctgataatcaactgttatcagatttacgagcaagcctaatatctaaaggggctagctcatagggtgatggttcatctggtgataatcaactgttatcagatttacgagccagcctaaaatctaaaggggccagctcaaagtgtgatggttcatctggtgataattaactggtatcagatttaccagccagcttaaaatc

SEQ ID NO: 388804 - DNA, 941 bp, Oryza sativa
ccacgcgtccgggtgatcatgaatctgaagaacgtatcgggttctctggtgtgcctcccacagcattggtccggagcttacacagggggaagagcttcaagattggatcactgcagatgttcattcagaacaatggaagttgtgaggatatgggtccccgagcatttccagtgaaggaggtccacaaaatagcagtgttagatcttaggttagcaaacgctgatcgtcatgcagggaacattttagtgtgcaaggatgaagaaggtggcaattacaagttggttccaattgatcatggttactgcttgccagagaagtttgaagattgtacctttgagtggctgtactggccccaggctcgtgaaccattcagtgatgaaaccattgcatacatcaaatcactagacgctgaagaggacatcaagcttctcaagttccatgggtgggagctgtctgcaagatgtgctcgtgtcctgtgcatcagcaccatgcttttaaagaaaggtgcagcacgaggcctcacaccgtatgacatcgggcgtatactgtgcagggaaactgtgaatagagactctgagattgaggacatcgtccaggaagccgagggccatgttctcccagggtcaagtgaagtaatcttcttagaaaccgtatctgaaatcatagaccgtcacctcgacaagaagttcgcttagaaacccagaataactgatctagttgttcagctgtatccagtcagtttggtgtaagtatgttgacaagccactcttcaatggactaaatgatttcatttgtttgtagcatctcaaaccttcaagtgcattacctacatacattttgtgaatatgtaagcatgtgttgtgtgttggtcgtgcgcatcatcagcatggtactgtctgagagacgaaataaaatgttgatttagtgctgttttaaccaaa

SEQ ID NO: 388805 - DNA, 888 bp, Oryza sativa
tatagaagtaaaaccaaatgggtatcttagctgaagaagccatatttggactgatactgacaacaaccgctcagggatgcttccttttgtgttcgatgactcatttggatttgagcgatatgtggactacgcattagatatcccgatgtattttgtctatcgtaataagaagtacattgactgtactggaatgtcatttcgggattttatggtaggaaaactcccacaagctcccggggagctgcctactttgaatgactgggagaaccatctaacaacgatatttcctgaggtcaggctgaagcgatatctagagatgagaggtgctgatggtggcccatggaggagattgtgtgctttgccagcattttgggttgggctgttgtatgatgaggaatcactgcaaagtatttcggacatgacctctgattggacaaatgaagaaagagaaatgctaaggcgaaaggtacctgtaaccggtttgaagacacccttccgggatggatatgtaagagatctagctgaagaaattctgcagttgtccaagaatggattagaaagaagagggtacaaggaagttggtttcttaagagaggttgatgcagtgatcagttcaggagtgaccccagctgagaggctgctcaatttgtacgagacgaagtggcaacgagcgtcgatcctgtcttccaggagttgttatactgatgctgagaaacctcttacacagcaaaactggacagtctgtagatgtactcccccatacagaaaaaacctcatatccattctatttcatgcctcggcagctaatgtccgccatccgttcttcttgagcctgaaggagggaaaaataacccgccgtgcagcaattcagcttcacggactcattgt

SEQ ID NO: 388806 - DNA, 702 bp, Oryza sativa
  unsure (1)..(702): unsure at all n locations
caaagcatttcactagaacctggtggtcagtttgaacttagtggtgctcctcttgaaacattacatcaaacttgtgctgaggtcaattcacattctttaccaggtcaaagcagttggagaggaaatggggattggatttctcggaattggttttcagccaaagtgggcactgagtgacataccaataatgcccaagggaaggtacgaaattatgaggaattacatgcctaaagttggctctcttgggcttgatatgatgttccgaacatgcactgttcaggttaatcttgacttcagttcagagcaagatatgataaggaaattccgcactggtcttgcattccagcctattgcaacagcaatatttgctaattctcccttcaaagaaggaaaaccaaatgggtatcttagcttaagaagccatatttggactgatactgacaacaaccgctcagggatgcttccttttgtgttcgatgactcatttggatttgagcgatatgtggactacgcattagatatcccgatgtattttgtctatcgtaataagaagtacattgactgtactggaatgtcatttcgggtctcttcctgtttctgttaccttagtgcttgtgctgttatatgcagtagagctttggctatagaatacagaacttnggtattacctagactaactggngtttatatttgttttgcagg

SEQ ID NO: 388807 - DNA, 603 bp, Oryza sativa
ccacgcgtccggagacctgcagttattcaatctatgtacatctttaagcaaccaggcattggtggcgaggtggtaccacaccaggataatacattcctatatacagaccctccatcgtgcacagggctgtggcttgcactcgaagatgcgacaaaaacgaatggttgcctttgggcaattcctggatcacataaaaatggcctgaaaaggcgaatgatcagagatgaaatcgatactcattttgatcatccttcgccaacctatgatctgaaagaatttgtgcccttagaagtaaagtcaggtgatttggtggttattcatggagatcttattcaccagagctttgaaaatctttctccggtgtcaagacatgcactgagcttacatgtaattgataccgaaggatgtgaatggtccaagcaaaactggttcaaaggaaaatccacccagccactttataaaattagtcaagcagttcctatgtgtaaataaacgagtgatgacctagaagcaatggtcagacaatgtaaataccttgctactctgttttcatggatgttttttatggcaataaatttggtgtacgatgttgagtacaaccaa

SEQ ID NO: 388808 - DNA, 637 bp, Oryza sativa
  unsure (1)..(637): unsure at all n locations
ccacgcgtccggaagttgaggggctccataggtcttctcctaggaacccacgagtggtagtactgacgcctacagctgagcttgcttctcaggtccttaacaactgccggtcaatatcgaaatcgggggtaccttttaggtctatggctgcaactggtggatttcgacagaagacacagntagaaagtcttgatcaagagcttgatgtacttattgcaacacctggtcgtttcttgtatctgcttcaagaaggctttgtgcaattaaataacctcagatgtgttgtgctggatgaaagtggatattttatatggtgaagaaagttttgaacaagtgcttcatcaattgattactgttgcaccactgaccacgcaatatctctttgtcactgccactcttcctctcgacatctacaacaaggttgttgaaacatttccggactgtgaactaatcatgggaccaggcgtccaccgaacaagctctcgtcttgaagagattctcgtggactgcagtggagatgacaatgaggaaaagaatccggagacggcgttctcaaacaagaaatcagcacttgtaaagataatcgaggaatctcctgtccgtaaaacaattattttctgcaacaagattgagacat

SEQ ID NO: 388809 - DNA, 423 bp, Oryza sativa
gaactgatgacacactatacttctccccgtgacttcccttggcttcccgcgtacgcctcctctctccccctctctctttccccttctcccttctctcctccagccccaaaaccctaccacggtaccacccactctgctctccaccagccagcctccatggcatcggattccgcccccccccgcgccgccgacggaatggtggagaagttgctcttcgacgcggctcacaacggggacctctacatcgtcagggggatggcgacgttgctggatgatgggaggggtcgaatcggggaggcggtgcatgccgccagggtgagacgcgccccgatggtcgggatggtggctctgtccctcgtcgcctccacatggaggcttaaggtgttcatctttcctaggtcctatatggtccattgtcttctt

SEQ ID NO: 388810 - DNA, 368 bp, Oryza sativa
tttattcccctaaatccaaatactatttcaagtgaggtgacaataggcaagtatcattccgtttccctgtttgtgtattgtatctgcgaacactgtaaagattgcacctgaacatacatcggaacaagttcactagcacatgaacagccatcgaaaactggtgcattttaactcatgcatgccaatgaggtaaaaattttctggatagctcactgcaagaacaccacattggtgatgtccgggaacttctccttgatggccgccttgatcccgctcccgatggactcggggccttcgtacctcaccaggcagtcctcgccgtcgacggcgaccacctccacgctcccgccgtagttgcggacgcgtgg

SEQ ID NO: 388811 - DNA, 554 bp, Oryza sativa
gaatcggggaggggagaggagaggagatgaaggaggcgacgtcgtcgggcggcggcggcggcgggggtgcgggggtgaacgacccgcggcagccgtcgacggcgaggcagtacacgccgccgaagctgtcgccgcaggacctgcccatcgactacgcggggttcctcgccgtcgtcttcggcgtcctcggcgtcatgctccggtacaaggtgtgctcgtggatcgctatcatcttctgcgcgcagtctctggtgaacatgaagaatttcgagaatgatctcaagcagttatccatggctttcatgtttgcagttatgggcttggtgacgaactatcttggcccccctcgtccaggcacaaagcgctaatcaggatgcacactatgcaactgtatgagagtatcacttgtatttttatgttccagaagctattggccgcgctcacatctctgaatttcatctgagcatgtagcaaatacagtaatacactgccttaatcattaggggacaagaatatggatgatccttaataatttaattgcgcggtactggtgt

SEQ ID NO: 388812 - DNA, 711 bp, Oryza sativa
  unsure (1)..(711): unsure at all n locations
aggacacccggaccctgggaaaatgtggcctcgnccggtggccgttgtcaaagacngcggatgattgcgaagagccactattaagaggctggaaaatgacatcggccgcattgattcaacaggtcccagcagcagcaactccaatggccgtagcagcagtgaggggcagaggtacctcaagccccagtgatggttggtgctcacctagggctagcctcaagctccagctagctccaccaacttcaatttccagcatccaacaagtaccctacatacactagattatatacataacatggttgtgatcgtgatggagacgacgatcctgctgctgtcctagctgctacaaaatctttattactccgatgacggatgacgacgacgatgattatgatgagccttcttctccagcttgctagaaggcgaattcagaagtaataaggagaaggggtccgagacatcatcaacctccccatggggaatactgttgtttgcgtctttcgttgtactgctctcgtgtctccatgtctacgtgtgtttgtagtattgtgacccacccacgaggcttgtcgatcgttggctgccggctggagatacgctggccagctgatggccgatgtacgttaattgtccgtcttctctgcatgtctaatctatcaaatatctatccaaaatgtgctgtgctgcaannnnnnnnnnnnnnnnnnnnnn

SEQ ID NO: 388813 - DNA, 473 bp, Oryza sativa
tacgctttccgcgttttcgtcagttacccagatctcatcttacgcaggcagagatggctgtcactagaattggtcttgctggccttgcggtcatggggcagaaccttgccctcaacattgcagagaaagggttccctatctctgtctacaacaggacgacttctaaggttgatgagaccgttcagcgcgccaaggtagaaggaaaccttcctgtgtacgggttccatgaccctgcatcctttgtgaactccattcagaagccacgtgttgtcatcatgcttgtcaaggctggtgcaccagtggaccagaccattgcaactcttgcagcacacttggagcagggtgactgtattattgatggaggaaatgagtggtacgagaacactgagaggagggagaaggcaatggaggagcgtggcctcctctatcttgggatgggtgtttccggagagaggagggttcccgaattggcc

SEQ ID NO: 388814 - DNA, 939 bp, Oryza sativa
  unsure (1)..(939): unsure at all n locations
cccagatctnatcttacgcaggcagagatggctgtnactagaattggtcttgctggccttgcggtcatggggcagaaccttgccctcaacattgcagagaaagggttccctatctntgtctacaacaggacgacttctaaggttgatgagaccgttcagcgcgccaaggtagaaggaaaccttcctgtgtacggnttccatgaccctgcatcctttgtgaactccaagagcttggagaaagggtggaccctcaaccctcggtgaagctaccgaggatctggaagggagggtgcatcatccgtgccatcttcctggaccgcatcaagaaggcctacgacaggaactccgacctcgccaacctgctcgtggaccctgagttcgctcaggagatcatggacaggcaagcggcatggcgcagggtggtctgccttgccatcaccaatggcgtcagcaccccaggcatgtcggcgagtctcgcgtacttcgactcctaccggagggacaggctgcctgccaacctggtgcaggcacagagggactatttcggggctcacacctacgagagggtcgacatgcccggctccttccacaccgagtggttcaagatcgcgcgtgctgctaagatgtgaaatgcttcaaattttcggtaatatttggttgctgcttgctgctgagtcgcttgtagggtgggaggaactgttgttaaattttatggtcaatgtgctacgcttaatttggataaggaggtccatagctatctccattcttttaatgtaaggagcagcccagggtggagagaacatggatatttatcattggaacctttgttgtgatctttgtaagtctatatatgaataaaagcattttggcaatgcttgcttttttccccgcgacagggtacatcgcgtcgtggctcgtcaggctgctcctcgaccgggg

SEQ ID NO: 388815 - DNA, 796 bp, Oryza sativa
ccacgcgtccgggtcgatctccctcctctcctcctccgtcgcgccgcagacgccaaccccgatcccgatggccgcctccgcctccgccgccggcgccggcgccggcaagtcgctgttccagaccttccgcaagttcttcaagaagccgtgggagatcaccggcccgtgcgcctcccccgagtaccgcagcgcgctcccgggcgccctggagtaccgccaccgctgcccggccaccctgacgaaggacacgatggccgtcgtgcccacctccgagcccgagaccgtctacgacatcaagtactacacgcgcgaccgccgccgtgaccgcccgcccgtccgccgcaccctcctccgcaagcccgacctcgagcgctacatggccgccaagcagttcgaccccgccaaggacttccccgtgccttacgtgaacaccgccgtggaggaggactacgacgccgtcggcggcggctaccagaagtgatggtcgaggtatctacctttcttgtgcttgcacttcgtcagaagttgcattgtcttcatttgtgcccttgaaatccattttgtatttcagaggaaaaaaaatctggttgtaagagatgatggcggcaataatatgacacctgtggactttgctgaatgtatctttcttgtaagttgtatcctaaaacttggaactacctgatgctgatgctttggtagtatggttcaatgaccgattgaatgtttcaatctgtaaaaaaaaaaaaagggcaggccgtccacagtatacgatccaagctaagggatcagtgcatgt

SEQ ID NO: 388816 - DNA, 329 bp, Oryza sativa
ccacgcgtccgcccacgcgtccgcatggattggggactctcgaatccctggaggacgcccttccccgcaagaggggactctccaacttctacgccggcaagtccaagtcgttcacgagcctggccgaggcggcggcgaaggcggcggcgaaggagatcgccaagccggagaacccgttcaacaagcgccgccgcgtcctcgccgcgtggtcgcggcggcgcgcgtcctgcagctcgctggccaccacctacctgccccctctcctcgcccccgaccacgccgtcgtcgaggaggaggacgaggaggacgactccgacgccgagcagtgc

SEQ ID NO: 388817 - DNA, 566 bp, Oryza sativa
ccacgcgtccgcctcacctgagctaaccccctcttcgattcttctccccggcggcggcggcggcgacgatgggcggcgagggcaagtcgaggaagcggcgctcgtcaccctcgtcaggggaggaggaggagagggagcggaagaagaggagggacaagaaggagagcaggaggagcagccgagacgaacaagccgaggaggaggaggaggaggagaggcgcaggatgaagaagaagaaccgtggcgacaggggcaaagacaaagagagggattcaaaggagaagcattccaaggagaaggagaagagcaagcgaaagcacaaggatgatgatttcaaagaaatatccaaagatgactatttcgcaaagaacaatgagttcgcaacctggttgaaggaagaaaaaggcaaatttttctctgatctttcttcggagtctgctcgtgatctgttcgagaagtttgtgaaaacttggaacaaaggaaagcttccatcccaatattatgaggggatcactcgtggtccacggtcagcacacaagtggaacatcaaagtgtgatgcaacctg

SEQ ID NO: 388818 - DNA, 635 bp, Oryza sativa
  unsure (1)..(635): unsure at all n locations
ccacgcgtccgcccacgcgtccggcaacagaacatggctcttccaacaccaagattggtagttcctatagatgtgagcaagaagccatgggagcaaaaagtccctctccataaccgctggcatccagatatccctcctgttgcagatgtaactgaaggggaattgttccgtgttgagatggtcgattggactggaggaagagtcagtgatgataactccgcagatgacatcaaattcctggatctcacaattactcattatcttagtgggcccttaagaatagttgatgctgaaggggttccagctgcacctggtgatcttcttgctgtagagatctgcaaccttggtccacttcccggtgacgaatggggatatactgccatatttgaaagggagaatggtggtggattcttaaccgaccacttccctagtgcaagaaaggcgatttggtattttgaaggaatttatgcatactcccctcaaataccaggtgtccgatttccaggattaactcatcctggtatagtgtggactgcaccatctgctgagcttctcaatatatggaatgagagggaaaaaatattggctgagacaaatnatgagtcaaatcaaaatctgtgaaagtttctacatca

SEQ ID NO: 388819 - DNA, 1085 bp, Oryza sativa
  unsure (1)..(1085): unsure at all n locations
atcacaccatcacgagcaccaccaccactcaccacgcgccacccacccccgcaccgcacgccaagatccgaccgccgccgccgccgccgccggagtagggagagggagaggagatggggcggagggcggggtcctacccctactacgtggaggcggcgccgccggtggacgtgaacaagaacacggagtggtttcatgtaccccggggtgtggaccacctacatcctcctcctcttcttcgcctggctgctcgtcctctccgtctccgcctgctcccccgggatcgcgtggaccgtcgtcaacctcgcccacttcgccatcacttatcacttcttccattggaagaagggaactccatttgctgctgatgaccaaggcatctacaacagactaacttggtgggaacaaattgataacgggcagcaacttactcgtaataggaagttcttgactgtggtacctgtggtgctgtacctgatcgcgtcacacttgaccgactacaaacagccaatgcttttcctcaacaccattgcagttctggtactagtggtagcaaagctgccaaacatgcacaaggtccgtatatttggaatcaatgcagatatctgaggaccatatgaagaacatcagggcacaagcttctgtgtgtttgcaacgagggacaagcgaactttgtgcaaacacggtatctaaagtagtgaaaaaactaaactttttcaccactgcaatctgtagtatgtgcataggtgtaggaagaacctgtaaatgttactgtagcttataatttgcctacaggttggaggctgctgcatgtttgctcatgccacttcctttaagaactctagtggagagtgtagactgtaacttaaataaacatgtaatcttgtggatatggaaagtttggtggttgttaaaatggtgaaccggagttcagttcctgcaaaanaaaaaaaaaaaaaaaaaaaaaaaaaaaaaatattaaaaaaataaaaaaaaaaaaaaaaaaaattaaaaaaaaataaaaaaaataatataataatggggcggccgttctaaaggatccaagtttacgtccgcgggcttgc

SEQ ID NO: 388820 - DNA, 582 bp, Oryza sativa
cttgctaggacagggtcgtacatgcacactaccctcgcctcctacgcccaggatctcgccatgcctgccgccgcactcgacctcctccctgacaaggcgcaccagccgtccatggcgccgtcgctccacgcctgggactcccccaatggcgcccccactcccatgcccaagaggctggaagggaaggtggccattgtcaccggcggggcgagggggatcggggaggcgatcgtgaggctgttcgtgaagcacggggccaaggtggtgatcgcggacatcgacgacgcggcgggcgaggcgctggcggcggcgctggggccgcacgtcgggttcgtgcggtgcgacgtgtcggtggaaggaggacgtggagcgcgccgtcgaagcgccccgtggcgcggtacgggcggttggacgtgctgtgcaacaacgccggggtgctgggccgccagacgcgcgccgccaagagcatcctgtcgttcgacgccggggagttcgaccgcgtgctccgcgtcaacgcgctgggcgccgggctcggcatgaagcacgcggcgctcgccatgacccagcgccgcgccggcagca

SEQ ID NO: 388821 - DNA, 839 bp, Oryza sativa
ccacgcgtccgatggcaacttaatcattagaaaactgatccgcatttcatggctggcatcttctcttgcgaacatcgctctttctttgatggctctctgttgagaagaagagcaaccaagtaaattttcgaaatgtttttttgatctttctattcaccattgcaggttgtcaaagccatctagaaggccataccgattccgagagcgcaacccattgccttggatggcccagcaagggaagagctcgaggccatggaggcgcataaggtcgagatcgaccgcaccgcggcgctccaggtgcgccgtgagctttggctggggctggcataacctcgtcgtccagactgccggcttcatgaggctcacattctgggagctctcatgggatgtcatggaacccatctgcttctatgtgacctccatgtacttcatggccggctacaccttcttcctccggaccaagaaggagccctccttcgagggcttcttcgagagccggttcgcggcgaagcagaagcggttgatgcacgcccgggatttcgatctccgccggtctgaccagctccggcgagcctgtggcctgccggtggttcggactccgacgagcccctgcagaccgtcgtcggcgacgtcggcttcgacgcaggagagccattgccattcttactgccattgccaatgatctttgtgctgctctgttctattgtcagaatatttttcatgcccagtttatgggggttaagctagcttctccattgtatcgctctgatgcgcggatgatgcgatgcacagcatagttgtgtgaagagatgacaaggcagattttagcttgaaaacct

SEQ ID NO: 388822 - DNA, 813 bp, Oryza sativa
accacgcgtccggacaatgtgaccatttatcatgttaaaagtcaccttcagaaatacagaacagctcgatacagaccagaattgtctgaaggttcttcagaaaagagggcagcctcaaaagaggacataccatcaatagatctgaaaggagggaactttgatctcactgaggcattgcgtctccagttagaactccaaaagaggcttcatgaacagcttgagatccaaagaagtttgcagctgagaattgaggagcaagggaagtgccttcagatgatgctcgagcagcagtgcatacctgggacagacaaggcggtggatgcttcaacctcagcagaaggaacaaagccatcttctgatcttccagaatcttctgccgtgaaggatgttccagagaacagtcagaacggaatagccaaacaaacagaatcaggtgacagataatggagatgtgatgagggtctctccaagatgtggacccaagtggccattgaatgggctcgatggctatctgactgatgtttggcaaagctaaaattaaatcgtttttgccttttcacggggaacagaacattgttgtgaacagcatatcaaagcttgccccagcgcttgtagctagactttagttgtacagtaccccaaacacggcagcgacgattccgtgttaatgggatgatctttaggtttcagaaggcagcacaagcaaatttgcactgatgtactctttgtcaggtggtttgacttcttgctttctttgttgttagggactggatagcatggattaggaatttgattatgatgaactaattcaag

SEQ ID NO: 388823 - DNA, 639 bp, Oryza sativa
  unsure (1)..(639): unsure at all n locations
gtgtgaccaagtttggccactcggtcttcactaggctacacatgtggatgaggacgtggcaccgaatatgccgaacatgtagcattgtaaacgcctcacaaaagaccgtacattagggaggggattaggcaacaaaagctcgtcgtccatccgcagatacggaactactcccctatccaacacctccgagtccgagcaacgcaagatggcgtcgtggtcgtcgcccgtcgccgccgccgccttgcaggtccatttcgggtcctcctgcttcttctccgcccgatcgccacgacagaccctcctcctaccacctctcgcccgcaaccctacactgaccatccagccccggccccatcccttccggaacatcaactcctcctcctcctccagctggatgtgccacgccgtcgccgccgaggtcgagggcctcaacatcgccgacgacgtcacccagctcatcggcaagactccaatggtatatctcaacaacatcgtcaagggatgtgttgccaatgtcgntgctaagttcgagattatggaggcctgttgcagttgtcaagggcaggataggntacagtatgatttntgatgcggaagngaaagggtttataactcctggnaagggtgttttngtggacc

SEQ ID NO: 388824 - DNA, 703 bp, Oryza sativa
  unsure (1)..(703): unsure at all n locations
ccacgcgtccggccgttatgttgatgaagtgatcattggtgctccatgggatgtttcgaaagatatgattaccacatttaatatttcgttggttgttcatgggacaattgctgagaatatggactttatgaaggatgatttaaatccatatgctgttccaagggctatgggcatctaccgtagactggagagccctttagacatcactactagtactatcataaggaggatagttgctaaccatgaagcctaccagaaacggaacgagaagaaagaagccagtgagaagaagtactacgacagtaaaagctttgtcaatggagagtaacttaggaacaggtcttgcattaatgctattgcccagaagtttagttcacaaccttctggcacaaatgcagcggttagatgatccacaattttacagtcttgtggtaactattctcatgttgctgatatagctcaggaaacttcagatgctgatgatggtgctgacttgggtgatgctggagaccctattttcctgtatatggggctttgtggctgccaataccagctgtgttattttgagatgggtagtttttttttttttgttcaggattgttgtagagtatgaatgttaagcttgattaactattcctgatgctttatttcggagttgccaagtatatgtggcatcnnnnnnnnnnnnnnnnnnnnnnnnnnn

SEQ ID NO: 388825 - DNA, 1449 bp, Oryza sativa
ccacgcgtccgcccacgcgtccgcccacgcgtccgtggatcctgattttggggaggcagcaataggccgtgtggcacctgttgattcaggtctatggtggatcatattacttagggcgtatggaaagtgttcaggagatctgacagttcaggagagaattgatgttcagactggaattaaaatgatattaaagctttgtttagctgatgggtttgacatgttccctacattactggtaactgatggatcatgcatgattgatcgtcgaatgggaattcatgggcatccacttggaaattcaggcactgttctattcagctctcctgtgcgcgcgtgaaatgttaaccccagaagatggatcagctgatttaatacgtgctctaaacaataggcttatcgcactgtcctttcatattagagagtactattgggttgacatgcagaagctgaatgagatttatcgatataaaacagaagaatattcctatgatgctgtgaacaagttcaacatatatcctgatcaggtttctccgcggcttgttgagtggatacctcctaaaggaggttacttcattgggaacctgcagccagctcacatggacttccggttcttttctctggggaatttatggtccatagtaagcagcttggcaacaactcatcaatcccatgccattttggatctgattgaatccaaatggtctgatttagtggcagagatgccattgaagatatgctatcctgctctagagaaccaggaatggaagatcattactggaagtgacccaaagaatacgccttggtcatatcataatggaggatcctggccaacattgttatggcagctcacagtagcatctatcaagatgaacagaccagagattgctgcaaaagctgtagaggtagctgagaggcgaattgctatcgacaaatggcctgaatactatgacaccaaacgagcacgcttcattgggaaacagtctcgtctttaccaaacctggtctattgctgggtaccttgtggccaagcaactgctggacaaacctgatgctgctagaattctttcgaacgacgaggatgcagaaattcttaatgctttgagcacgaacaggaaaagaggcaagaaagtgttaaagaagacattcattgtatgagttcttgaagcaaaagatccatcacttggttctttaagttagcatttgagttataggaaatgtcctgtatatatacacgaaaggatatgtttggacggagagatgcctgctgttggatgctgttattgtagatgcatctggcttttgcaagaaagcccttgcctgggcatttctcaacgggatccctttcattaatttttggaccctagacttgcctcttgtagtttaccatataccccatttgacatgccaaattctgtgccaaccagtatggtcccatacttttgcccccccc

SEQ ID NO: 388826 - DNA, 717 bp, Oryza sativa
  unsure (1)..(717): unsure at all n locations
ccacgcgtccggccaaagctttgtcatggcgttcgatgatcctggaccatatggacggggcaggtacaactggaacatgaccccagaggttgaactcacacaatggcgcaaaggctcgcaatggtttgaagtaaacagggagcttgccatcgaaattgtgagagacacgctctattacccaaaattcaaggagttctgcaggcctcattgttatgttgatgagcactatttccctacaatgcttacaattgaagcaccacaaagcctggcaaatagaagtattacttgggtggattggtcaagaggaggtgcacatccagccacctttggaaggggtgatatcacagaggaattcctgagaagagttcaagagggccggacttgtttatacaacgnnnagaactctacgatgtgcttcctgtttgctcgaaagtttgctccaagtgcgttggagccattgttagagttagcacccactgtgcttggttttggttgatgtatggttgaacaggtgcaccccctgtaattttgatacgagatcattgtaggattacatgggtagagaagtgggcttatcttgatagatgaaagcctgcacgtcgcccatctctgctccattgtgttatatacacaaacttgtactgttttgtacagtaacgtgacattgagtcacatgaggacttcttatcttagaatattaccctgtattttttgtta

SEQ ID NO: 388827 - DNA, 337 bp, Oryza sativa
ccacgcgtccgctgccttatcatagtgggagagacgcatcctgtggaagaagagatgatagaattccacatgatcaagtcatgatgaatgaaagtgcttttatggccttgtagctggatacatgatcccaggcttatagctcccttgaaacgatacttcgatgcttccgcccgccgtgaaaggtccaccagtagtagtttactgctccaattgttgctcatttttaagttagtactgggttcagctgttgttctttttttggcctgataccgaatactctcaaaccagtattgaaccttgtttacattgtgtgagctcatatttgaatgtgttcgtg

SEQ ID NO: 388828 - DNA, 1107 bp, Oryza sativa
tcagtgaggggccgtgggccacgccagccctaccggggaggtggtcgccgcggtggccactcggccgggcagagtggagacgactatggacgtccgcgcagggcgtatgagcgccacagcggcactggccgtggctatgagttgaagcgtgaggggtctggccgcggcaattggggaactgtcaccgatgaaggccttgcacaggaagttgcggaggctgttaacactgaggaggctcctgcaactgcagaggatgagaagaaacctgaagatgtgccacagtctgaggtcgacaaggacaaggagagtccagagaatgaagaagaagaaaaagaacctgaggataaggagatgactttggaggaatatgagaaagtgctggaggagaagcggaaagctttgcttgcactgaaggctgaggagaggaaagttgaagtcgacaaggagtttgcaggccatgcaacagctctctgtcaaaaaggctaatgaggaagtgtttatcaagctgggctctgacaaggacttgaaaaagaaagaaaaggatgaaaaggatgaacgtaccaagaagtccctgagcatcaatgaattcttgaagccggctgaaggagagaggtactacaaccctggccgtggtcgtggccgtggcaggggtcgtggtgatcgtgggggtttctatggtggttacaatggcaacggtggtcgcagacaggctgccgctccggtgatcgaagatcaggcccagttcccctcgctaggtgggaaatgaaacgaacgctcggatctagcggctcggttgtcttgttggttcacctgaaaactgtgtcgtcgtcgagttgagtactgtgttgttatgtcgcccctcccagataggagtgttgtgtttatcgcctgtctgtatccccgtgcatatccgaggtgcacccatccatcaccattgctgtgtttgtcagacatagtagctcatgtgctgcttctattttccgacaggagtggacagtgtatgccatgtttctgatgagtagtcgtgtgtgcgttggttcagagattttgctcagctgagaatggatcccatggtttattaaagaggctaatctgaaacctgtcccc

SEQ ID NO: 388829 - DNA, 850 bp, Oryza sativa
  unsure (1)..(850): unsure at all n locations
ccacgcgtccgcggacgcgtgggcggacgcgtgggcgagaaaaaagcgaaaggacctcttgaccccccaaccacaccgaggccgccgcggaggaggaggaagaggaggagatcgaggatgtttttcagccgcttcgatccgtggccggtgttcttccggagggagtggaagcgctgctggcccttcctcaccggcttcgccgtcaccggcgccatcatcaccaagatgaccgccggcttcaccgaggaggacctcaagaactccaagttcgtccaggcgcacaagaagcactgatctgatccgtgcctccatggtgaaggaacagctggtattgcctaagtcttcagtttggcctatttttctgttccaaatgaacctacctgttttttgtttatccatttgggtggacaaccgctccagttgtatctaataagaggcgtttgaatctttggaccaaaaaatttgagcttctggtataaacctgtaatactcttcaagtgccaaactgcttcctgatttattttttgtaaaagcttgtatcgatggtaagtatacatcgaaagggctttcctggctggttgccaaacgttgggcttaggcacgacatagtttcttgggcaagacatttggttcattgctgtaacttccgcacacttgtcttaggcacgtttcttttgccaaactttgtctaaggtgaggcgagtaaattgctagacacaccgtagacaagatttggccgagaagtgtcgtgtcgaaatgaaccaaatctgcccgtaaaacttgcagcgtttgttccattcccatttaaaacacagntttgggtttnnnnnnnnnnnnnnnnnnnnnnnnn

SEQ ID NO: 388830 - DNA, 757 bp, Oryza sativa
ccacgcgtccggtcctccttttgtgtacccatggagtccagcatggaatggcattcctgccatggcaccaccggtatgcacagcaccagctgaaccagcaaattcttcagacaatggaagcacagctagtgttcagtggagcatgccaccagtgatgccggtaccaggatactttccggtaattccatcttcagtttggcccttcatttctccctggccaaatggtgcatggagctcgccatggattcaacctaattgcagcgtgtcagcttcatctcctacaagcactagtacatgttcagacaacggctctcctgtcctaggaaagcactccagggactccaaaccgcaaggagatgacaaggcagagaaaaacttgtggattccgaaaacgcttcggatcgatgatcctgacgaagctgcaaagagctcaatctggacaacccttggcattgaacctggtgaccgtagcatgttcagatcattccaggcgaaacctgaaagcagggagcagatatccggtgctgcaccagtcctgcaggcgaatccagcagctctatctcgatctcaatctttccaggagacaacgtgatgtatattgaagaaatcgtgtgacaattgtagaacatgttactactataatttaagcaagtgctacagcctgaaggatgattggcgatgtaggcgctgctgcaaacatggaggcagcgggatctgtactattgaaacctggaagaggctattcttgacatttttc

SEQ ID NO: 388831 - DNA, 582 bp, Oryza sativa
ccacgcgtccgcggcgaccctcaccaatgctgaagtagctccagtgaaacgtaatttcataatgcatcgagaataccttgtggagttattactggtcgcatgggtgaatgaactcatcacaagcattggcatcaatcaagttcatgttccctctggaactactaaggaaaaattcatgacaacaaagtttatacctgacaaccactgctcggtggataaggtaactgctacattgagagagactggtcttcaatcatcaaatttgatttcttggtattgaaataccaaaagcaatgacaagcaatgaatagtcaggtgatatgtgaggttttgcttccataggttgatggcttggtgattgaggatgcagtaatttgtagtgacatccatgttttggcttcattaattaggaggaaccaaagctgcaaaggaggtttttgagctcatgatgtcacagttttacgtacttctttgtgtcacagttgtcaaactgacgtctcaatattttcttgcgaacgaagctgacctcttaggcaatagtttttttcccttactgtgaatacatccgtccaattcctcttc

SEQ ID NO: 388832 - DNA, 925 bp, Oryza sativa
  unsure (1)..(925): unsure at all n locations
cccacggtccggagagagatagggagagggatttcgatttttttttctccacggcgaaatccgcgaggcggaggaggaggaggagggcgagatgggggcggcggaatccgtgccggagacctccatacacgaattcaccgtcaaggattgcaacggcaaggaggtgagcctggagatgtacaaggggaaggtgctaatcgtcgtcaacgtcgcctccaaatgtgggttcacggagaccaactacacgcagctgacggagctctatcagaaacacagggacaaagattttgagattctagcatttccctgcaatcagttcttgcgacaagagccaggatctgaccagcaaataaaggattttgcttgcacaagatttaaagctgaatatcccgtttttcagaaggtgcgtgtaaatggtcctgatgctgcaccactttacaaatttttgaaagctagcaagcctggcttgtttggatctagaatcaagtggaactttaccaaatttcttattgataagaatggcaaagtcattaacagatactcgactgcgaccagtcccttgtcttttgagaaagacatcctgaaggcgctcgaggattagatctcgtaccctcccccatccttcatttgcagaagtaggcaaagtatctggttgtaatatctagacctatgggatgctcaatagtgaatttttgcaatatattccttcttttgtgtagtgtatttgttgtctttatatattattatattgtaagtagaggttggctggttgggtaggcactgttttgtctatactggttttatatggcttggcttgaaaatttgtttagaaacctaagacattattatcaacgtgtaatatcgacaagttgaaattgtatgtagcgtaaggtttgtgtttgcactgnnnnnnnnnnnnnnnnnn

SEQ ID NO: 388833 - DNA, 824 bp, Oryza sativa
ccacgcgtccgcgatgatgactgaattttgccgtaaaatacatggactcttgaccggtgtttttttccagaggccggtgggtgagttggccgggttggcggttggttccgcggtttgcattacgtccatcttcgcaggggcaatttcaggtggatcgatgaacccggcaaggacgctggggccggcgctggcgagcaacaagttcgacggcctgtggatctacttcctgggcccagtcatgggcacgctctcgggagcatggacctacaccttcatccgcttcgaggacacccccaaggaaggctcctcccagaagctctcctccttcaagctgcgccgcttgcggagccagcagtccatcgccgccgacgacgtcgacgagatggagaacatccaagtgtgataggacgacgagatgtcgtcgatcgtgtcctcttactcggaaaattaccagtcgatctcggtctcgtcatcactagctacgtctttgtgtgtgttttgtgtcgtgtcactgctgcttcgtacacgccggagagagttacataaaacgcgcgcgcgtgcacgggggagtggcgctagctttggttgcttggtggttcgtgtggggtacgtagattgctcgctctgttaattccggggctggagcctgctaattttgggcgtgtgcgtgtcccgcttgtgcatcagtctctgccgtcaaattgtgcgtgtgtgccaggtgtactatctctccagcagttgcttgttccacttcaattcacccccaaagtaattaaaaggatgtcacgttctctcccctatataaaacatcttcggctttatat

SEQ ID NO: 388834 - DNA, 971 bp, Oryza sativa
ccacgcgtccggagcgagcgagctagccagccagtgttagagcttgagctgcttgttcttcttctacctcctgcactcgcgtgctgcacaagtagctcagctagatagagcgtcagaaatggccagcaacaactcgagaacaaactccagggcgaactactccaacgagatccacgatctctccacggtgcagaacggcaccatgcctaccatgtactacggcgagaaggccatcgccgacttcttccctcctcacctcctcaagaaggtcgtgtcggaggtggtggccacgttcctgctggtgttcatgacgtgtggggcggcagggatcagcggcagcgacctgtctcgcatatcgcagctgggacagtcgatcgccggtggcctcatcgtgacggtgatgatctacgccgtcggccacatctccggcgcccacatgaaccccgccgtgacgctcgcgttcgccgtgttcaggcatttcccctggattcaggttccgttctactgggcggcgcagttcaccggagcgatatgcgcgtcgttcgtgctcaaggcggtgatccacccggtggatgtgatcggaaccaccacgcccgtggggccgcactggcactcgctcgtcgtcgaggtcatcgtgacgttcaacatgatgttcgtcacgctcgccgtcgccacggacacgagagcggtgggtgagttggccgggttggcggttggttccgcggtttgcattacgtccatcttcgcaggggcaatttcaggtggatcgatgaacccggcaaggacgctggggccggcgctggcgagcaacaagttcgacggcctgtggatctacttcctgggcccagtcatgggcacgctctcgggagcatggacctacaccttcatccgcttcgaggacacccccaaggaaggctcctcccagaagctctcctacttcaagctgcgccgcttgcggagccaggattcca

SEQ ID NO: 388835 - DNA, 1028 bp, Oryza sativa
  unsure (1)..(1028): unsure at all n locations
ggtcgaccacgcgtccgcaaaaaagttgcttcaaacatgtctcgtgttgttgtctctcttgcttcattcaatggtaatcgcattgttataatctcattgcattttcatttcttttttatatcatatcactaactatgattcattatgatcttgtaggcgaagaacggatttttgcttgcacaggaatatttataggctgcgatgaatccaacacanggattctgacttcagcaagtttggttaggatttctgatgatgaaaacaggattaatgaccgcttgaagattgttgtacaccttccaaacaaacaacaaactgtagggacattgcaacattatcatctgcattacaatgttgctattgtcagcatcaaagggttttcgttgtcttcgtacggaagaatttcatgatccagggctaattgagcgtaaggaggtattatctgtaggacgcgtcttcaagtcagccaaattattggccacaagtgggatattgactgacaacccaagcaaacttgactgcaaagaacttaaggtctccccttgtagaatcagtaaggctgggattggagggcccctgattgattgtcatggtaatttcgttggtatgaacttctacggtaggaaagagactccgtatttaccaagggatacaattctgaaattattgagctattttgatggagaaggggacatctctcctgagattatggacacccaaaacagatggcctgtgcccaagttacgttggcattatccttccttctccagccatcgcaagatagagccgcgcagatatataaaatattagtaatttatatccatgcctatttagtcttgaacctgttgcattggttgctatctactatcttgaactcctgtgttgtgcaagggcagacctgacaaagcacttttgaaatgccgtaacactggattacttgaaactttatgaaattatgcttgtacctacngctnnnnnnnnnnnnnnnnnnnnnnnnnnnnnnnnnnnnnnnnnnnnnnnnnnnnnnn

SEQ ID NO: 388836 - DNA, 668 bp, Oryza sativa
  unsure (1)..(668): unsure at all n locations
acanattccccaacccaggccaaggccaagaccatncccntgaagcnttggnncctcccagnnttcaggtttgctggaagctccttattacgtaagggtttttgggcccgcaccnnaccgccaaaaggaccaaaagtttaattggaagccaaaaaggagaatggattggttggatgggaccgaaccttaacttaccacttttttgaagtttccaccagcttccaagctnccnaaattttccnccgagaaccatggcgccttggttgncaatttgcccatttgccaaaatgggccaaattttttacacgctgacaactgggagccaaacgaaaggagatgggagaaaatcaaggataggctacatacagtcgttgattccttcaaaatcgaggcaagagtatgacggaggtgcaacatatattgtgctgatttttcttgttggttttcttcgtttcaggaggtgaggttcaatggtaaatgtcgagaacatggatcttactgatctgttttattttgaaatgtgtggcacaaattctatttgtacgtatgtatatcttgccaatgtcgatcctgatctttctatttgtatgtactggtgaggttaagaaaatacgtaaatgatccttcgaataagcaatgttgattataaagccaaaaaaaaaaaaaaa

SEQ ID NO: 388837 - DNA, 632 bp, Oryza sativa
  unsure (1)..(632): unsure at all n locations
cccacgcgtccgcgcacccgtacgcgcgcgcctctctagggtttcccacctctcaccggcggcggcggaaggcgaaggcggcggcggcggcggcgaagatggggcactccaacgtgtggaactcccaccccaagaactacgggccgggctcccgcgtctgccgggtgtgcgggaaccctcatggactgatcaggaagtacgggctcatgtgctgcagacagtgcttccgcagcaacgccaaggacatcggcttcatcaagtaccgctaaagtcatcttggtttcctcagccctactgctgggtgaagagatggagcatttaatggaaggcttaatttcagttccagtaatttagctgtttgtttggtactctgcagactaaagtggtttatgtttctgatgctatttgaatgatgtggatgctaagtatgaattaatcgcgcatcaaaaaaaatcctttaatactattatatatgtgctcctgtgagggatcgtatgattttttgctgttgaatggagatgttcaggttagcagtcagctgctgcattttggacaggcacattttcagtttggtggtttaaacgcagttttagcagttaaattgnnnnnnnnnnnnnnnnnnnnnnnnnnnn

SEQ ID NO: 388838 - DNA, 564 bp, Oryza sativa
  unsure (1)..(564): unsure at all n locations
tccgaattcccggtcgacccacgcgtccgcggacgcgtggccgtccagctcctcgccgccgcatccgatccgacaaggaagggaagcgagagctcgaggtcaccctcaccggcggcgagcgatgggccactccaacgtgtggaactcccaccccaagaactacgggcccggctcccgcgtctgccgggtctgcgggaaccctcatgggctgatcaggaagtatgggctcatgtgctgcaggcagtgcttccgcagcaacgccaaggatattggcttcatcaagtaccgctgaaggccattttgcctcgccgttgagcctgagaactccgcctgaaccagagaaatggatcttttagtataatactacatttatgtggtttagcttttgttcggagtaccgtcctattaaacatgtttaagttttgatgggaaccatgaggttgttgaactaactttgtgatcaaatattgaagtactctctttatgtttgaggtcttgtgtatttgatactactgtgatggctcagttactggtttacagcnnnnnnnnnnnnnnnnnnnnnnn

SEQ ID NO: 388839 - DNA, 556 bp, Oryza sativa
ccacgcgtccgatggaggctttgcgtgacgataaaactcagatggaggtcattttggatgagaagatagatgaagtgcgcaagatctctagcaaagttaatgatcttgaggtgcagcttagaagggagaaagatgaatgccataggatgaccgcaaagatgaagaagtttattaaagctcatgctcggtttttgaaggcacaagaagaagtgaaaaggtcacaagctcgtttcgagaggcttggtgatttgcttgcttcagatattttgaagcgtggtgctaatgaagaggggtccagtgtcaatgaagacctaaacgaaaggagtcctaatactgcagcaactaaaaagagatcaatcccatactcaacaagtgaagaagcgaaagctgtgaagaagagaagagagcgagactctgatacaatgactaggtcagattaatataggtcagatgttacagattttgataaaacaagtaaggtgactgaggcaaccaagtctttatatttgaagaagaaattatgggaagatgaaaaaagtaagctaggagccaacat

SEQ ID NO: 388840 - DNA, 428 bp, Oryza sativa
ccacgcgtccgctgatacatttcttgttagtggcagaggcacactgcacctcactatattgatagaaaacatgcggagagaaggatttgagtttatgattggacctccaaaggtcattaacaagacagttgatggaaagctgcaagagccttatgagatagctgctgtggaagttccagaggaatatatgggttcagttgttgagcttttggggaaaaggcgtggacaaatggttgacatgcaacctagtgggccagagggaacaacattactaaaatacaagattcctactagaggcctcattggactcaggaatgcagttttgacagcatctaggggcacagcaatactcaacacaatttttgacagctatggcccatgggctggagatcttagttcacgtgatcaaagctccttggttgcatttg

SEQ ID NO: 388841 - DNA, 833 bp, Oryza sativa
cccacgcgtccggattcgatgagaggggacaaaccagattatagccaattaattaacctcgtaaaggaagtcaggaattcgttacatgagttggcctcaaatgagttgaaggaggaaattcttgagaacattgacctcgaaattttgtctcaggtgcttcagtcaggctcccaggacacgcgatatctggggcagattttgcagtactccctggatatggtcaggaaactatctgcccctgcaaaggaagatgacatgaagaggagtcatgagaaattgttaaacgagttggctgcaagttccgaagttaatgacaatggtatcagctcctttgtcattgctgtcatcaagggcctgcgtttcactctcgaagaaataaagcaactgcaaactgaagttagcaaggctcgcatccagctcatgcaaccaattattaaaggctctgccggagtggaatacctgcagaaggctttcacggatcgctatggacctcctgctaatgcatcagtgtctctccctataactaagcagtgggtttcggcaacgaagagcatcgtggaacaagagtggagctcacatttggagtctctccaagctttgccagcagatcatgctcagcacgttgttccggtacttcgagctggtcacggtgctccagcgccgcaggcttcttcgtctgcagctagcagttctggtctcccagaatgcaagggtgagaagatcgacaagctgacaagggttggcttgttgcaacttatcagcaatgtggagggcctgaacatgcagtcaacccctgagaccttccaaattaatctgctgaggttgagggctgt

SEQ ID NO: 388842 - DNA, 1060 bp, Oryza sativa
  unsure (1)..(1060): unsure at all n locations
ttcggcaccgacatgtccccggacgccaagcgcgcgcngctggcgcggtcatcgtccatcgcgtccgtctgctccgtgtccgccgccgacnggacccctcccccgcngcgccgcnnccgctgctgcgcaccagctcgctgcccacggagaccgaggaggagcggtggcgccgcagggagatgcagaaccgccgccgcctggaggcccggcggaagcggctcgagcggaggatctccgtcgggtcgtcgtcggtcccgaacaagcccggcagggaggacggcggcgacggcgccgttaacaggttgcagctgaggaggtcaatcgggtcgcaggggagcagctcggccaacccgcagatcaagctattgattttcaaagtcctgacgtgcggacatatatagaagtatatgggattgtgatccacttacatgtgctgttcagtgttcactatcaggtcctgatggaagtgcaatctgccaatccacggaggcgagaagcccatcaacctctgatgataccaaccaaaacagtgcacttcctccaacagcatcaactggcaagccgctaaacggcaccgtgacacagcagtccccgttgcgaacgcttgggtcactgacaatgcggacgagcagcactggcgacatcgggaagatcatgatggacatgccaatggtgtcttccaaggtggaagggcccaatggtaggaagatagatggcttcctgtacaagtacaggaaaggtgaggatgtgagtataatgtgtgtctgccatggtaaattccatagtcctgcagagtttgtgaagcacgctggagggggagacgtctcaaatccgcttaggcatatcgtcgtcaatccctcgccatcggtgttcttgtaatcacaacctagggaggtttttcttcacattctttacctgttgaaaacctgtaacttgtgtttgtaacttctgataaacaccctgtttccgtgcgtgcaacggaacgagggtccaagcaaatttaccaaattgtgagaatagcagagcatgttcagaagnnnnnnnnnnnnnnnnnnnnnnn

SEQ ID NO: 388843 - DNA, 1072 bp, Oryza sativa
ccacgcgtccgattttccaagctacatatggtgctggaaacaatacactagttctgaaccaggcttcagcaaatgcttgtttctctgatgttatgagcattctggcaagcaaaggagcaaacactaacatccctgagttatgtactctaaggccatcaaatcttacggatgcttcttgccctgtgaaggatattagcacatttgagaaaatagttaatgtaagcaagcttctagacgcatgccgcgatgttgacccacttgaagaagtgtgtagacctgtttgccagcctgcaatagtggaagcagcagttcacatatcctctggaggagcaaacatgtttggaagttctagcatatccggaagtgatgctgggatcaacgtcgttagtgactgcaaaggggtagttcactcctggttatctatgaagctttcatcagaagaatcaaacactgcttttagagtattatctggctgcaaggtgaacaaagtttgtccgttggagtttgatgatccttcttccgttgttaaggcatgtggcaaggcatcttcttcaacgccctcatgctgtggggcattgcactcttacattgcaactcgccagaagcaaatatttgtaacaaatttgcaagcaattaactgtgcaaccatgttcggatcaatgctacagggagctggtgtatcaaatgatatttatgagctttgtgatattgatttaaaagatttcagcctgcaagcatttggtcagcaaggctgtctacttcgcagcttacctacagacattgtatttgacaatgctacgggcattagttttacatgtgatttgagtgacaacattgcagcgccatggccatcatcatcatctgttcaatccttgtcactttgtgctccagaaatgtcattgcctgcattgcctgtcgcgccaacatctggaagctcagtaggtatctccagaactggaattggaattttggcgcctcttctattctttgcgacggccatcaccttctgagaaatgcttcacctagtgaaccaggagcttcttacccctgttgtattttttcccctctgtgc

SEQ ID NO: 388844 - DNA, 781 bp, Oryza sativa
  unsure (1)..(781): unsure at all n locations
ttggaatttactggatgcacagagagttgcatgacataaagccattgtacaagtacctgcacacataccaccatatttacaacaaggagaataccctatcaccatttgcaggactagcattccatccactggatgggattttgcaagccataccgcatgtgtttgcgctctaccttatcccaacacacttcaggacacacattgctctcttgttcatagaggccgtgtggacaactaacatccatgactgcattcacggcaaggtttggccggtcatgggtgctggctatcacaccattcaccatacaacataccgtcacaactatggccactacaccgtgtggatggactggatgttcggcacccttcgagagccagaagatatcttgaagaaggattaggatcgaattgttaagcacggcgcgacgttcgcctctcgtctttgtagcagtcggaagaagggggttctatgtatttatcctgctcgatgctatctgttatctttcatgtaccaatgtgctgtttcagtatgctaggtgaacataaaagtgaactttagtgagttcatcatccctggaatgcaatggaatcgagagatatatcctgggtaggttccaggtgtttgtaccattcctgaatttctctgtacttctttgtgtcaaagaacatgatgaacagttgtggccagcttttgtacagcaataactgttttattgtaactgctgccatccttttgtntcnnnnnnnnnnnnnnnnnnnnnnnnnnnnnnnnnnnnnnnnn

SEQ ID NO: 388845 - DNA, 453 bp, Oryza sativa
  unsure (1)..(453): unsure at all n locations
gaggcggcggcgcgaaaaatccgaagctttcgcggcgaggagctagggtttgtgtgtgtggttgggcgcgcggcgagcgccgggagatgtcggcgtacgacgaggtggagatcgaggacatggagtggaacgcggacctctggggcgtacacgtacccgtgcccctgcggcgacctgttccagatcacgctcgccgacctccgcctcggggaggagatcgcgcggtgcccctcctgctccctcttcctcaccgtcgtctacaacgaggaggacttcgccgacgccaaggagcccccgcacaagccggccccgcgccccgtcgccgtcgcctgaggcgcaggatggaatcaggcttaactaagatgagaaaacaaacgggagcatttgtacttctaagatgagaaagtagttatatcgacctttngcttttgaattcactatgtacgggttacc

SEQ ID NO: 388846 - DNA, 887 bp, Oryza sativa
ccacgcgtccgatctggaacacttcttgaggaaggccaggtcagatctatagtagatggaattaaagaagtaataactgcgagtgctctcagaaggagagaacgaacagacagggcaaaagctgaagattttgattcagaagaagaggatctactcagagaagagaatgaacaggaggatgaaatcttcgatcaaattggtgattgtttgggcactcttgttaagacgttcaagacttatttccttccattctttgatgaactttccgtctatttgacacctatgttggccaaggacaaaacagtagaggaacgaaggattgccatatgcatttttgatgatgttgcagagcactgtcgcgaagcagctgtcagatattatgatacatatcttccttctttattagaagcctgcacaagtgaaaatccagatattagacaggctgcagtttatggtattggcatttgcgctgagtttggtggctctgcatttaggcctcacactggtgaggccctgtccagactatacaatgtaatcaaacatcccaatgcgttggacttggataatgcgatggcatatgacaatgctgtttctgctcttgggaaaatatgtcagtttcatcgtgatggcattgatgcatctcaggttgttcctgcttggttaagttgtttgccaataaaaaatgacttaatcgaggccaagatagttcatgaacaactctgtacgatgcttgagaagtcagatagggagcttttgggtcataacaaccagtatcttccaaagattgtctctatctttgcggagatattatgtgcgggtaaggatctggcaacagaacaaacttttagtaagatggctaatgtgctaagacagcttcagactacatt

SEQ ID NO: 388847 - DNA, 792 bp, Oryza sativa
  unsure (1)..(792): unsure at all n locations
ccacgcgtccggcccctctgagctagcagtgactgctgagcctactgaggagatgacggaggaagagaagaagctgcatgacaaggttgagttgatccgagtaaagtttctgcgccttgtctatagattgggggctactcctgaagaaacagttgcagcacaggtgttgtaccgtctgagccttgctgagggtattcgacacggaaggcagacaaaccgagctttcagccttgacaatgcacggaagaaggccatgctgcttgaagcggagggaaaagaggagttgaacttctcatgcaacatacttgttttggggaagataggggtcggaaaaagtgcaactataaattcaatttttggggaagagaagtccaaaactgatgctttcagttcagccaccaacagtgtacgggagattgttggtaatgtcgatggtgtccagatacggatcattgatactccaggccttcgacccaatgtgatggaccaaggatccaacagaaaaatcctcgcttctgtcaagaaatataccaagagatgccccccagatattgttctgtatgtggaccgcctggatagtctgagccgtgatctcaatgatttgcctcttctaaagaccattacttctgttctgggctcatctatatggttcaatgccattgttgctctcactcatgctgcttccgcccctcctgaaggtctaaatggtgcccctatgacatatgaggtgctaatggctcaaaggtctcacattatccagcaatccatcangcaagctgcaagagatatgcg

SEQ ID NO: 388848 - DNA, 508 bp, Oryza sativa
ccacgcgtccgagcagctatgacttctttcaaggtccaccaagacaagtcgtcattcacggggaaatctatactgtatctgaataggcaccaaactgaggaatggaagggttggatgcaggtgctgtttttgatgtaccactacttcaatgctaaagagatatacaatgcaattcgtgtgttcattgctgcatatgtctggatgactggatttggtaacttctcctattattatgtgcggaaggatttcagccttgcacgatttgctcagatgatgtggcgcctcaattttttcgtggcattctgttgtattgtgctaaataatgactacaccctctattatatttgccctatgcacacactttttacccttatggtttatggtgctcttggaatactaaataagtataacgagattggatcagtgatggctataaaggttgttgcctgctttttggtggttatcctgatatgggaaatcccaggggtcttcgagattgtcttggagc

SEQ ID NO: 388849 - DNA, 659 bp, Oryza sativa
gtgcattatgggagcaagaagaagcgaactaaggttgtttccaaaacactctctccagattggaaccagacatttgagtttccagaaacaggagaacccctgattttacatgtcaaggaccataatgcagtccttccaactgctagtataggccaatgcactgtcgaatacagcatgcttcctccaaatcagcccgccgtaaaatggataccactccaaggagtaaaaagcggagaagtccatgtaaagatcacgcgaaaagtaccacacttggagaagaaaacaagctttcagactgatgcatcttcccttggcaaagggcacaagatatcatcgcagatgagagatagcctgaagaaattcacaggtttagttgatgagggtggcgacacagaggccatgtcactggccttgacagagattgaaagcatccaggatgagcaagacatgtacatacagcagcttgagcgggagaaagcggctttgttgcgtaaaatacaagagcttggttctgaaatcgtcagaacatcctctggtccggcaaggatgccctactagttaacaaccaatacacaggaacaaagaatagccttcacagttgtattcattggcaaagacctgaattatttacatagaactatactctagtgcagatatgt

SEQ ID NO: 388850 - DNA, 563 bp, Oryza sativa
gtcaaggtcgacgtcatccatctgctggagatggtgtgcgaggagtacggcggtcgggtggagctcgcgaaggcctacttcgctgggctgacggagtcggtgcggcgccacttcaacggcaacggcgtgatcgcgagcatggagcactgcaacgacttcatgctgctgggcacggaggcggtggcgctgggccgcgtcggcgacgacttctggtgcaccgacccctccggcgaccccgacggcaccttctggctgcagggctgccacatggtgcactgcgcctacaactctctgtggatgggcgccttcatccacccggactgggacatgttccagtccacccacccctgcgccgccttccacgccgcctcccgcgccgtctccggcggccccgtctacgtcagcgacgccgtggggtgccacgacttcgacctgctccgccgcctcgcgctgccggatgggaccatactccggtgcgagcgctacgcgctgcccgacgcgcgactgcctgtttcgccgacccgctccatgacgggaagacgatgttaagatcttgaacgtga

SEQ ID NO: 388851 - DNA, 842 bp, Oryza sativa
ccacgcgtccggagaaacctactgaggatatacccaaagggcactcggttcacatcatccaactataatccatttgttggttgggtgcatggtgctcagatggtagcgttcaatatgcagggatatggaagagctctttggttgatgcatggattttataaagctaatggtggctgtggttatgtgaagaaaccagatttcttaatgcaaactgatccggaggtttttgacccaaaaaaatccctatctcccaagaaaaccttgaaggtgaaagtatacatgggggatggttggcggatggacttcacgcagacccactttgatcaatattctcctccagacttttatgcacgggtggggatagcgggagtaccagcggactcggtgatgaagagaacgagggcgatagaggataactgggtgccggtgtgggaggaggatttcaccttcaaactgaccgtgccggagatcgcgttgctgcgggtggaggtgcacgagtacgacatgtcggagaaggacgacttcggcggccagacggtgctgccggtgtcggatctcatcccggggatccgagcggtggcactccacgaccgcaaagggatcaagttgaacaacgtcaagcttctcatgcgcttcgagtttgaatgacccaacacaccgacactttctttctttctcgccgcatcgcattgcactgtgcctgtgcttgtgcagcatccatcatttggtttggtttttcatgttcctgtgcatacgcatttgtgtctgtacataggctcggtcctgtatattgtttgtgagtaacatgtaataataaggcttcacgccatgttcattcctcc

SEQ ID NO: 388852 - DNA, 391 bp, Oryza sativa
  unsure (1)..(391): unsure at all n locations
agggncaaggnagggctgatggtaagggaggttggagccagctgagttgaaatatttctcaaggcagctgggtacttagagtgtgctatccagcacgctctcccgaagatatcgcctgaaaaaaggaaaggtcttcctgtggacctaactgaaggaatcctgaaagctatctgcatgcaagcctcagggtcaaatatggaagatcaatttctcaaatagcttggttttgctacacaaatttttgttgcttgctgtggaactattgtttgattctggaagcagagatgaattcttttgaatatgagattgtataatttattaggttgaatctgagatgaactattgtttgaattttgttgtattctgattgtatctgttattatttggatct

SEQ ID NO: 388853 - DNA, 464 bp, Oryza sativa
gcgcccacgcgtccgcgcaaatttcgccatggccaccaccaccaccaccaccaccaccatgggcggcctccaccggctaataagcaggagcagctgcggccggagaaccttcgccgcctccacgccgccgcagcgacccagagcgatagccgtccgagtccgaagcagcagcgccggtgtaacgaagagccagaggcagaggcagaggcaggtgaagctgacatacctggagatcaacagctgggtgtgggaggtcggcggcgcgcgcatcctggtcgaccccatcctcgccggcaacctcgacttcggcgcgccatggctcttcgacgccgccaagaagcgcctcaagaacctgggcgtccaagatgtgctgcagcctccgggggtcgacctgctcctcatcacgcagagcctcgacgaccactgccacgcgcgcaccctggcccagcttcgccggcgcgccc

SEQ ID NO: 388854 - DNA, 1343 bp, Oryza sativa
  unsure (1)..(1343): unsure at all n locations
gagaaaaagcggcgcaaaagcgagtgaaccgcttgaaccggaagcgactcgagtccaagccaagccacgcgctgcaccactcgccgctttacccgccgttctcctcctcctcctcctccacgcgcggcggcgaggcggagcaagccctaggaaggagcggcgcgtcaccggcggcggcggcggcatgcatcacgaccccaacccgttcgacgagggcaacgccgacgacaaccccttctccaatgggggaggtggtggtggcggcggcggcagcaggcagcagtacgggttccgccccacggagcccgccggcttcggcgccggcaggggggacgccaccgtcgatgtcccgctcgacaccatgggcgactccaagagcaaggcaagggagctctcatcgtgggaaacagatctgaagcggcgggaggcggatatcaaaaggagggaggaagcgctgaggaatgctggagtgccaatggaggataagaactggccaccattcttcccgatcattcaccatgacattgccaatgagataccggctaatttgcagaaattgcagtatctcgcgttcgcaagctggcttggtatcgtgctttgcctctcatggaacttcatcgctgtcatagtctggtggatcaaggagggagatctcaagctgtttttccttgccactatctatgccttgcttggaattcccctctcgtacttgatatggtataggcctctctaccgtgctatgaggactaacagtgcgttcagttttggatggttctttctctgttacttgatccacattggcttttgcattattgctgccattgccccgccaattgtgtttcatggaaaatcattaacgggcatactggctgccatagacaccttttctgagcatgtgataattgggatcttttactttgtggggttcgcgctgttttgcttggagacactgctgagcattggagttcttcagagagtgtacatgtacttcagagggaacaagtgaagctattcatcatgatggaaagtttccggtgatcaccagtagcacacctcttcatgcatcgcttctgtgcatacaaatcagtacaccctgagaatgtctcttcatgtcagtttattgtgaaaccttttcaagcttgttatgggcgtaggttgttagcatcgttatcatagctttgtgtctggaacgaggtgttttgattcttggcaaactgtagtccgtatgtgattgggtagatcgccggtttgcctgttggttaccgttaaatgagctaaggctattctcgctcgggaaaatagacacaaaattgcattcagaccnnnnnnnnnnnnnnnnnnnn

SEQ ID NO: 388855 - DNA, 1138 bp, Oryza sativa
ctcatcctcatcctggagaagattccagtccttccattgcagctgtggttgcttctcaagactggcctgaagtcactaagtatgctggattggtgagtgcccaagcccatcgtcaagaattgatacaagatcttttcaaagtatggcaagacccgcatagaggaactgttactggtggcatgatcaaggagcttctcatttctttcaagagggctactggacagaaacctcagaggataatattttacagggatggtgtcagcgaggggcagttttatcaagttttgttgtatgagcttgatgccattagaaaggcttgtgcatccctggaacccaactatcagcctccagttacctttgtggtggtccagaagcggcatcacacaaggttgtttgctaataatcacaacgaccagcgtactgttgatagaagtggaaacattctgcctggaactgttgttgactcaaagatttgccatccaaccgagtttgatttctacctgtgtagccatgctggcatacagggaacaagccgccctgctcattatcatgttctgtgggatgagaacaaatttactgcagacgagttgcaaaccctcacgaacaacttgtgctacacgtatgcaaggtgcactcgctctgtatcaattgtgcctcctgcgtactatgctcatctggcagcctttcgagctcgcttttacatggagccagagacatctgacagtggatcaatggcgagtggagctgcaacgagccgtggccttccaccaggtgtgcgcagcgccagggttgctggaaatgtagccgtcaggccctctacctgctctcaaggaaaacgtgaaagcgtgtcatgttttactgctaagagcttgggctgtacccccgtatgcgccaaggaaatgtaagtaactatgttaatgttaattttagcaacttgcaactctgtcgttgatcccgttaaaaacgggtatgctaccataagcctgttggaactattctgggtattgtagtactacttgttttgtatttgtgtttgtgacgctgcagagcgtgaacaacgcaagtctggtacttgtatcgttgtgtttgtgggaacctaaatcttgttggacctttgttgtgcttgaagaaccaagtt

SEQ ID NO: 388856 - DNA, 594 bp, Oryza sativa
ccacgcgtccgacgcggaggggcaacgcggcgtaccgcgaggtcgtcgtcagcgtggaccaccgcttcgtcggctcgttcgtgccgttcccggtcatctacacgggcggcatcaacccgctcttctggcagccggtggccgcgctcggcgcgttcgacctgcccacctacgacgtcgagctcaccccattcctcggcctcctggtcgacagcaacgcccacgagatcggcctcagcgtgttcgacggcatcgcgaagtggctcgtcgacgccaacctgcacctctggctggaccccagcacgtcggacgtgcacgccgcgctcggggtaaccagacgccgcgcctgaaaatctcacgccactactcgacgcggctgctcgagggcaggttcaagatcaaggccaagaggaagtcctccttcagcggctgggtcaagtcctcgttcggcaacttcaccacggaggtggaaggcggacttgaaggcgaccagcctggtggagttcaccggcgacggccggaaacaagaccgtgtcgcttggaggcgaacagggagacgaagacgctgatccgggcgggcgacacccggaagttatt

SEQ ID NO: 388857 - DNA, 1323 bp, Oryza sativa
ccacgcgtccgaaagcacaagaggagcttgtcaaggtggcaaagcattatggtgtaaagttgacaatgttccatggaagaggtggaacagttggcagaggaggtggtcccagtcatcttgccatattatctcaaccaccagacacgatacatggatcacttcgtgtaacagtacagggcgaggttattgaacactcgtttggagaggaacacttgtgctttagaactctgcagcgctttactgcagctactcttgagcatggaatgcatcctccaatttcccccaaaccagaatggcgtgctctaatggatgagatggctgttgtggcaacaaaggaatatcgatcaatcgtcttcaaggagccacggtttgttgaatacttccgatcggcaacacctgagacagaatatggcaggatgaacattggtagccgaccatcaaagagaaagcctagtggtggcattgaatcgctccgtgcaattccttggatttttgcttggacacaaactaggtttcatcttcctgtatggcttggatttggtggagcgttcaaacatataatgcagaaggatatcaggaacatccatacactgaaagaaatgtacaatgagtggccattcttcagggtcaccttggacttgcttgagatggttttcgccaagggagatccaggaattgctgctttatatgacaaattgcttgtggcatggtgatctgcaatcctttggagagcagctgagaaacaactttgaagagacaaaacagctactgcttcaggttgccggtcacaaggataccccggacgcggggccttacctgaagcagcgtctgcggctgcgtgagtcgtacatcactaccttgaacgtttgccaagcctacaccctgaagcggataagggaccctagcttcgaggtgatgtcgcagccggccttgtcgaaggagttcgtcgacagcaaccagcctgccgagctggtccaactgaacgctgcgagcgagtacgcacctggcctggaggacaccctcatcctgacgatgaagggcattgctgccggcatgcagaacacaggctagattgtccacaagaatgcttccagcaggtgcaatcaatcaatcatcaataactccttccatgatgagatggtgaatatgtttaactagtacgttcgccgatgctagtgaattctggagacttttttttgctcgcacgttttcttttggttgtgtacttgatgtaaatgtcaaggggggacttatttggcttttgcagcccgatccaaaataaaatatggaccaatcattctacgaagcttgattctgaaaaaa

SEQ ID NO: 388858 - DNA, 764 bp, Oryza sativa
ccacgcgtccgcggacgctgaagaaaaggacatgctagattacttgtatacttctcagtatcagatgagagggattctagctgtgtcattagggcgcatagaggatcccaacacagagaactttacgcatgctgttttgatgcgttttcagcagaaagacgacattgcaaagttccacagtagtccctactactacaaaattctcgatgagcacgtaaaacccgtttcatatgtacgcctcagcatggctcggtttctgtagattttgaatctgaagttgaagatgacattatccctctcttccgtcggggagaggattttaactatggagtggagttcatgctactgatatctttcttggaaagtgcatctggagattcagtggaggatgcattagcttctcttcagaggttcatcagtcaaatgcagttctttcattgttcaggcaaccttagggctgctgtctgaatcatatgggacagtggttacagtcatcgctgcagttatccgttttccgtcatttgatgacttcaagatattcagggaggggatggaatacaaggatatgtgggcatcaacatttcaaccgattgtggagaaatctcttgagctacacttcacagttgatcccgtgggtaaccagctgatgtagattctgagcacctgacaaaatattcagtcctggattggacgtatatattgttggtaaactcctgagttgctgatgagggaaaagtattgaaatgaaatcttgagggtttaca

SEQ ID NO: 388859 - DNA, 533 bp, Oryza sativa
aacgcccgcatatccttccatgtctgtgtgccagaggtaaacggcagtttctttctgttcttccaccgtttgtgctaataaatgttgtgcattccctccttgtttgagctcggccatggaggagtcaccgggatctctgggctggcggtgctagaacagtacacacggtcgcgttgccgggggagctggacggccttttcagggatttgtgggatgcaagcagcagcagaaacagcgtccgggcacgtccgattccagctacgttcagcgtcatgtatgggaaggtggggatcagtcccgacccacacccccagttctacctccgattctttcttcagcgatagtcttaattaatagctcttgtgggcagtcattgacaggcatggtgtgtacttaactgcttattgaaatgatcaggtttactttccattcctaccggttcatacattggtctgctctaaaattttcttttattcaggggataggcagattgttttacaggcatggggcagaccggtttcctttttattttg

SEQ ID NO: 388860 - DNA, 1252 bp, Oryza sativa
  unsure (1)..(1252): unsure at all n locations
ttttcctccacttgccgattacttttttgccccccggcgcgctgggcgccttggctttggccctggctttggctccgctgttcttatcttccccactcgtgcctggctctctctctctccctttctcctctcctccaaggtcatggcaaaggagaaataacagctagcgggcttggggaagggaaaacagcaagtgggagatcggcagggagaggtgaattactacttgagtagaagtggtacaagaagagtcgtcgtctacctgtgagcgaattatttcgaggttgtgcgttgcgatgatgggaggtggtctggtgatggaccagggcatgatgttccccggcgtgcacaacttcgtggatctcctgcagcagaacggcggcgacaagaacctcggcttcggcgcgctcgtgccgcagacgtcgtcgggggagcagtgcgtgatgggggagggcgacctcgtggacccgccgccggagagcttcccggacgccggtgaggacgacagcgacgacgacgtggaggacatcgaggagctggagcgccgcatgtggcgcgaccgcatgaagctgaagcggctcaaggagctgcagctgagccggtgcaaggaccccgcgggcggcgtcgtgggcgacccgtccaagccgcggcagtcgcaggagcaggcgcggcggaagaagatgtcgcgcgcgcaggacggcatcctcaagtacatgctcaagatgatggaggtgtgccgcgcgcaggggttcgtgtacgggatcatcccggagaagggcaagccggtgagcggcgcctccgacaacctccgcggctggtggaaggagaaggtccgcttcgaccgcaacggccccgccgccatcgccaagtaccaggccgacaacgccgtcccgggcttcgagagcgagctcgcctccggcaccgggagcccgcactcgctgcaggagctgcaggacaccaccctcgggtcgctgctctcggcgctcatgcagcactgcgaccctccgcagcggcggtacccgctcgagaagggcgtccctccgccgtggtggcccaccggcgacgaggagtggtggccagagctcggcatccccaaggaccagggcccgcctccgtacaagaagccccatgacctcaagaaggcctggaangtcancgtgctcancgntgtcatcaagcacatgtcgccggacatcgagaagatccgccgggtggtccggnagtccaagtgcctcaaggacaagatgaccgc

SEQ ID NO: 388861 - DNA, 584 bp, Oryza sativa
ccacgcgtccgcccacgcgtccgggacactaaagcagtagtctagtctcccggccaagcaagaaccaaaaagcaattaagatcgaactcgagcaaacatgtcgtcgactaacaacagttcaggcgagccgccgccggcggtgcgcgtgctgggcggttgggcgagccccttcacgaaccgcgtggtggtggcgctgaagctgaagggcgtggagcacgagatgttgcaggagacggtggggaagaagagcgagctgctgctccggtccaacccggtgcacaagaagttccccgtgctgctccaccacagcaagcccctccccgagtctctcgtcatcgtcgagtacatcgacgaggtctggccggcctccaatggcggcgccccggccattctccctcgcgacccccacggccgcgccgtcgagcggttctgggcacggtacgtcgatgacaagattttaccagggctttgggttttgagaggatcggttggctgagacaaggaccaaactcgaagtgaaaatgtcacgactttacagcgcttgaggaagcatttgtaagtgcagccaaggaagaatactttgg

SEQ ID NO: 388862 - DNA, 1659 bp, Oryza sativa
  unsure (1)..(1659): unsure at all n locations
ttttgatcctcgcgcccgcggctcnatctactctgctctctctcagtctcactctcccaatccgcctcggcccgagcgcgcgcgcgctttccccccctcgccgccggcgacgagctcgaggcggcggtgcgctcgcctacctccggagggcggagcggggggatggagcccatgagcgtggacggcggcgggggatgcggcggcctggacacgcagatcgagcagctgatgcagtgtcgcccgctcgccgagcaggaggttaaagcactgtgcgagaaggccaaggagatattgatggaggaaagcaatgttcagcctgtcaaaagcccagtaacgatttgtggtgatattcacggacaattccatgatcttgtagaactttttcggatcggtgggaagtgcccagatactaattatttatttatgggggattatgtggatcgtggctattactctgttgagactgttactcttttggtagcgctgaaggtgcgtcacccacatcggattacaatccttcgcgggggtcacgagagccggctgatcacacaggtttatggattctacggcgaatgtttacgaacagtgtggccatgcaggtgtatggaggatatgcacggattgatgtgactatcttccactgacagcactggtggaatctgaaattctctgcctgcatggtggtttatctccatcaattgagaaccttgatagtgtggcgtagtttagatcgtgtccaagaggttccgcatgagggaccaatgtgtgatcttctatggtctgatccagatgaccgctgtggttggggcatatctcctcgtggtgctggctacacttttgggcaggatatatccgagcaattcaatcacaccaacaatctcaaacttgtagctcgggctcatcaactagttatggaaggatataattgggctcatgaacaaaaagttgttactatattcagtgctccaaattattgttaccgatgtgggaatatggcatccattttggaagttgatgactgcaacagccatacttttattcagttcgaaccagctcctaggagaggtgagcctgacgtgacacggaggacgcccgattatttcctttgagttaatggtgctaccatttgtcaccttgtactgcgaatttgcgatagtcaaatgctggtcagtgatactttgctggactgtgaaacctgcgcataggccaaccaacaataacaagggaacatcagatcccttcgtaaaacttgaccctccattggtcaatgcaagagatgctgctatcctgaaacaaagtgtcatgctcatgcagcgatgcctgagtttttcaggtgataaaaaaggcccatccatcctcaccctctcctttttaggcatttttacagaggaaatctagtggcaagactgaacttctatttgtattttgtagcgtaagcttgtatcgatagtcttgtaatttgtatcatcaatggcaaggcaacctaatcatctttcggtgtagtattccgaattttgggggtggttaccctgatgtgctacagtgcagtgttccatggcacctttttctctagttggatgtttttcttcgcatgtatctgacattctggttttcaaatttcgcgctactctactagtnnnnnnnnnnnnnnnnnnnnnn

SEQ ID NO: 388863 - DNA, 603 bp, Oryza sativa
  unsure (1)..(603): unsure at all n locations
gggggggaaaatttnaagggaaangtnggccnggataanccagtttgaattaaccttcattaaagggaacaaaggngggtttccnccnggggggggccgttttaagaataagggaacccccngggctgcagggaatttggcaagggggggaaacntgggcataggccnacccaacaaataaacaggggaacattcagatccctttggaaaaattggaccttccattggtccaatgcaaagagatgctgntatcctgaaacaaagtgtcatgttcatgcagcgatgcctgagtttttcaggtgataaaaaaggcccatccatcctcaccntntcctttttaggcatttttacagaggaaatntagtggcaagactgaacttctatttgtattttgtagcgtaagcttgtatcgatagtcttgtaatttgtatcatcaatggcaaggcaacctaatcatctttcggtgtagtattccgaattttgggggtggttaccctgatgtgctacagtgcagtgttccatggcacctttttctctagttggatgtttttcttcgcatgtnnnnnnnnnnnnnnnnnnnnnnnnnnnnnnnnnnnnnnnnnn

SEQ ID NO: 388864 - DNA, 717 bp, Oryza sativa
ccacgcgtccgcccacgcgtccgttttctatcacgacagagtgctgagctgctagaacgctactcaaggattgtaagagtgttggaggagaagaaagagtcgattaaaaatttgtacagtaagcttcaactggaaaaacaggctagtaaggagaagatatcattcgggcgtttcgaagttcatgagctcgcggtctttgttcggaaccctgctgggcattacgaagcaatcaaccggaactgatcaaactactacctatcagaggaatcagtggccctattcacggagcagcatcctcggcacccagcttacataatcgggcagattgtgcacatcgaacggcgcatagcaaagctgccctcgcacggtgaccagatggaagcttcacgccttgatagcggtggccgccggtcgcccgcttccatgctgaacccgtacaatctgcctgtgggatgtgagtacttcctggtgacggtcgcgatgatacctgacaatattcgttgaaaacggccttcctgatcatgcctatggctgctgaaatgaagggagaaactctcatctgtcaatatactgccactgaaatttatagccttccttggttgcttgcgccttcttcttcctttgtacataatgatgatgatcaaggttcctttgtaaatagactcccagctaccactgatgttatcatcttcgttcaagcagactgaatattctttc

SEQ ID NO: 388865 - DNA, 703 bp, Oryza sativa
  unsure (1)..(703): unsure at all n locations
gctgcaggaattcggcanagggagaggnggnacactatatgacccttcaggagaggcggctgccctagcagatagatatggattagctgtgggacttcctgctgctactgctgttttactaaagaaacaaatgcagtaccgttattctcatggaatagattattggtggacatacatgagagctgactctgaaggacttcatgagatacagaggctgtctggagctgggaaattgcagataccggtggagaagacatttcccatcagcaaagtaagagaagctcacgaggccaaggagaaaaggctggtgcctggcaaggtggttttagaatttgactagttttagtaagattcttctcttgtaggaacagaagaaccgcacctgtctgtaaatcgtaagaactttctcctttttctttacctctattttggaaatatgtatcggtttgttggcctgacaaaatttggtcgtcctgtcaagatgcatttgtcatactcgtgccgaatcgatatcagcttatcgataccgcgacccgagggggggccgganccaatcgnccaaaggggcgatacatcacggcgcgttaaagcggacggnacccgggnccactaacgctgngaancccttgaacggggaatgaaggcnacggtgcntccaaagtgcngctaatggaaggaatgaangaaatngaaaancggaatt

SEQ ID NO: 388866 - DNA, 886 bp, Oryza sativa
ccacgcgtccgcccacgcgtccgcggacgcgtgggtgcccatggacgacgacaccgtgcacctcgacatggagatggagtggttccgtgatctgctcggcatgctctgcaccggccgcgacatggacggttgcaagggcatgatgaatcaatctcttttcttggttggagaaatcggaggcaatgattacaaccttgctcttatgagcggcatgtccattgaaaagactcgcaacttcactcctagtgtcattgccaaaatttcttccataatcaccgaattgattggacttggggccaagacactagttgttcccggtgacatcccaattggatgtattccaatgtacctcatgcagtttgagagtgataagaaggaagattaccggccaaagataggttgccttaggtggatgaatgagttctcgcaataccacagcaaacttcttgtagatgaattggaaaacttgcgcaagcttcatcttgatgtgaccatcatctatgccgattactatggagctgccatggaagttttcctttcccctgaacgattcggaattgaggatcctttggtcgctcgctgtggtggaagaggaccttatggcgcatctgcatctgtacgctgtggatatggcgaatacaaagtgtgtgatgacccagcaaaatatgcatcgcgggatggcttccatccatcagaagctgcatacaagggcattgcaattggcctgctacagggttcatacactcaacctccaattgttagcatcactaattcttgtccgcagataattggccttggttcctctgttgaacacaaggccatgtacgacttgtaattctgtaattatattttgttattattatacacaatatgtgattaaaatatg

SEQ ID NO: 388867 - DNA, 672 bp, Oryza sativa
ccacgcgtccggctcctcaaacgagaccaagaaatcaatcgttccagcgaagaagaagaagaagaaggaggaatccatggcggcgaggacggtggcggtggcggcggcgctcgccgtgctgctgattttcgccgcctcgtcggcgaccgtggccatggccggccggccaacgcctacgacgtctctcgacgaggaagcggctcaggcggcggcgcagtcggagatcggcggcgggtgcaaggaaggggaaggggaggaggagtgcctcgcgaggaggacgctgacggcgcacaccgattacatctacacccagcagcatcacaactaattaatcttatcgatcaatcaataatcaatcaatcaatcagtcgcttcctcttcgatctaccaatactagtattggtatataattaaaactgcaaatcccgtcatgcatgcatggtatgcccatcgatccatccatgattatctctagttagatgtagtaacaaactgcatgcgcgtgttgtgctcatcagtgttaattttggccgcccccctgttgataaacagttcttgatcgatgagagctagctttcgttttgttttgatttgttggttggttggttgatttgagagttgagacagatcgatctctgcttgaatggtacctgtcccaaaaaaaaaaaaaaa

SEQ ID NO: 388868 - DNA, 859 bp, Oryza sativa
  unsure (1)..(859): unsure at all n locations
ccacgcgtccgcccacgcgtccgcggcagtgcaagagccaccaagatcgatagctccatcgccggcgagcgacggagatggcggcgtcgcaggcgtacctcgacaaggcgcagctccggcagagctaccgcaacgtctggcacaccgacctcaccaacgccatcacggccgacttcacatgctgctgcttgtctctgtggtgcggaccatgtgtgtcttacatgctgcgcaaacgtgcgctctacaatgacatgtcgagatatgtgtgctgtgctgggtacatgccatgcagcgggagatgcggcgagagcaactgccccgaagtgtgccttgcaaccgaggtgttctgctgctttggtaactcggtggcttcaaccaggttcctgctgcaagatgagttcaacattcagacaacccaggccgtcttctgcctcttgggcttcatgttttgtctccaacaattcgcctgcatctgttcgctggtcgcttgcatcgttggcagcgaagaactttccgaggcctcgcagttgatttcctgcatatctaacatggtctactggacgtaaggctctcaactcaagtattcatccttctgaaatctgatttctttctttccaattaccagtatttctgatgttatctgttgcaatgtgcagggtttgctcttgtatgcaggtaatggcacatttttttttttactttcctcctgaataatctcactgctttaaattcctgatatcttatgatgaaactgcaaaatgtaaattcagacacagcacaaggtcgagatggacaagagggacggcaagttttggacctatgacagtgcctccaatgcagcagatgtctcgancggatc

SEQ ID NO: 388869 - DNA, 419 bp, Oryza sativa
acatcccccactcgaacaagggaggggatcagacgatcagtagagagccgagcaacgcccacaatctcgcgaatccgcttcacccgccgactgggcccgcatggtcgacggcatgcagcgccacgccctctcctcccgcctcgccgtccccatcctctacggcaccgacgccgtccacggccacaacaacgtctacggcgccaccgtcttcccccacaacgtcggcctcggcgccaccagggacgcggagtcgcgcgtaagatcggcgaggcgacggcgctcgaggtccgagctaccggcatccactggaccttcgcggcctgcgtcgccgtttgtagggatccgaggtgggggaggtgctacgagtgctacagcgaggacacagaggtcgtgcgctcgtttgaccaccatcgtttccg

SEQ ID NO: 388870 - DNA, 921 bp, Oryza sativa
ttctcatctccgcctcctccgagctcactgacaggtgggccccctccctcctccgagtcctcgccgtcgccgccgttgcctgctccgacctgacggacggagaggcggctggggctcgatcggacgccgccgccacgggaggccggaggaggggaggcacggcgaccggcgaccggccacgggtgggtgggtgcatgtcgacggccgccgcgtcagccgcgcgcggtaggtagatgaaattaaggaacacagcaataacacgagctaactcagcctgtcttccaatggaggattgtgttggtatcaagtacagcagtgtcaatgagggcgaagagcgtaagggaggccatggcgtcccaaaggtttccatcatcccactcattgtcctcatattctatgaagtttctgggggtccgtttgggattgaggatagtgtcaaggctgctggcccactcctagcaattgctggatttttgctgtttgcactcatatggagtgtcccggaagccctgattactgcagagatgggcactatgtttcctgagaatggcggttacgtcgtctgggtctcttcagcccttgggccattctggggttttcagcaaggctgggcaaagtggctgagtggtgtcatatataatgctctctatacagtcctcttcctcgactatgttaagtccagcattccagctcttggaagtggtctcccaaggaccttggcggtgcttatcctcacagctgcacttacttacatgaactacagagggttgacaatagttggctgggtggcagtctttcttggcgtgttctctctactccccgtttttgttataggattaatagcgttatcccgaatcgaaccactaagatggcttgaaatggacttgtggaatgtgaattggggttatatctaaacacact

SEQ ID NO: 388871 - DNA, 765 bp, Oryza sativa
  unsure (1)..(765): unsure at all n locations
cccttttggctgcaggatgcccgctttagaacgtgccganttcgggccncctcgtgnaacaagaatttttcttcttggatantgagatcgtgttcaatgaggccgtcccngaggagagggatcagggaatacaagaaattcngcnccaaattactgaagtaaatgaaatcttcaaagatcttgctggtctagcccgcgatcaaggacaaatgattgatgacattgacacccatatcgagaatgctgttatagcgactacacaagcaaaaggccaactctctaaggctgctaaaactcagaagtcgaactcttcgctgatatgcttgttgctggttatattcggggtggtcctgctcatagtgataatcgtcctcgcagcctaggcagcagcctggaagaacatgggactcctagatctggttgagcttagagcgaagtattccttcctgatttaattttgctgtgaagtcgggaatgtatcctgatctcctgcctggaggagggggttgcgttctggtcttgtgccatggtggtgtatgtgatgatgaatggtgtgtctggaatgcatggtttatatataagtaattaagtataatcgcttggtgtcactctagtgcctcctgccttgctcgctcgcccctgtttatatcttgtgatgtatcgttgagtgagtgttgtaagaacgaggagtttggtctttgcattataatagttgcttaagttggtcagtaaataaaaaaaacaaannnnnnnnnnnnnnnnnnn

SEQ ID NO: 388872 - DNA, 1139 bp, Oryza sativa
cccaaattaactccacgccaaggaaacaaaacgcccccccaattccagacgccaacgcgaggtcgacgaaggccacgtctccgactccggctcgatttccaccccccccaaatcctcctccggcgagcggccggccgcgagacaccccggactctcccgcgcggcgattcttcggtaccccgatcggaggaggaggcggcggggagggaggaggaggatgagcttccaggacctggaggcggggaacgcccgcgggctgccgcggaggggcggtggcggcagggcgggcgccgcggccgccggggcgggggcgtcgcaggccgtggcgtcgggggtgttccagatcaacacggcggtgtcgacgttccagcggctggtcaacacgctcggcacgcccaaggacacccccgacctccgcgagaggatacacaagacacgtcaacacataacacaactggtgaaggacacatcggagaagcttaaacaagctagcgaggctgatcatcgtgtcgaagtcagcgccagcaaaaagattgctgatgcgaagctagcaaaggatttccaagcagttctgaaagaatttcagaaagctcaacggttagcggtagaaagagaagctgcttatgcacccttcatttctcaagcgggcttgccacaaagctataactcgagcgaggtgaacaatggtgctgataagttggctgagcaacgcacggcgcttctagaatcaagaaggcaagaattagtcttcttggataatgagatcgtgttcaatgaggccgtcattgaggagagggatcagggaatacaagaaattcagcaccaaattactgaagtaaatgaaatcttcaaagatcttgctgttctagtccacgatcaaggacaaatgattgatgacattgacacccatatcgagaatgctgttatagcgactacacaagcaaaaggccaactctctaaggctgctaaaactcagaagtcgaactcttcgctgatatgcttgttgctggttatattcggggtggtcctgctcatagtgataatcgtcctcgcagcctaagcagcagcctggaagaacatgggactcctagatctggttgagcttagagcgaagtattccttcctgatttaattttgct

SEQ ID NO: 388873 - DNA, 476 bp, Oryza sativa
ccacgcgtccgctaggccatatgaagacgattcttgtattgaccttgggttttcttttctttggaaaagagggccttaattttcacgtagtccttggcatgatgcttgctgtgattggcatgatttggtacgggaatgcttcgtcaaaaccgggaggcaaagagcggcaggtttactcggtgcccagcgagaaaactcacaagtcatcacaatcagagcttgaccagaaggtctgaaacaaagttgtttcactatttttacagctccattgcttagcgagcattgagaagaccacgatctgatttattcttttttttttctggtaagtttaaagatgtttctgtacaactgaaattcataccagacaaacagaatatggcaggaactaagcgcgacgataatttaatttgtaatattccattgaggaactgcatatatgatggaaagatattttcagctgtgatgttccgtttaac

SEQ ID NO: 388874 - DNA, 915 bp, Oryza sativa
ggcgatgaccacggcggcgcggccgacctgggctccggccaagggcggcaacgagcagggcggcacccgcatcttcgggccctcgcagaagtactcctcccgcgacctcgccgcccacaccaccctcaagcccaggaaagaaggacaacatacccaagaagagttacagaagaggaatctcagggacgaacttgaggagcgtgagaggaagcactactcgtcaaaggacaagtcctatgctgaggagagagataggcggaaaagcacaagcctactcctagaaggttcaaggagagaggctgaggataagatagttcctagagaaatcgatgcagatgattctgatgtggaacccagaagtgatgatgaaagtgatgaggatgatgacgacgatgatgacactgaagctctaatggcagagcttgaaagaatcaagaaagaaagagctgaagaaaaccttagaaaggaacgccaacaagcagaagaggaggctaagatgaaggaagctgaactgatgcggggaaaccccctgatcaatattaacaacgccggatccttcaatgttaagagaaggtgggatgatgatgttgtattcaagaaccaggctcgtggagagaccaagacaccgaaacgtttcatcaacgacactatcagaagtgatttccaccgtaagtttctgcagaggtacatgaagtgatgctgccgttgtacgctgttccctggccttctcggcctgcctgtctctgtctgagatccctgtgtttctgtttctgtaatttgagtggaaggtctatatgtgccccacctgtaacatctgcttaatctggatggcacatttttcccctaaaaatggaaagaaaatctatgcttgtggattattagcttggtggctaagcttatgaaatgttttcattc

SEQ ID NO: 388875 - DNA, 886 bp, Oryza sativa
gcgcttgttatcgttgaaggaactggaatggctggtgttcctggtactgcatgtgccatatttggagctgacactgatgatggagctaatgttatcatgatatcgcaggctagcaaagaacactccgtatgcttcgctgcaccagaaaaggaagttgctgcagtttctgcagctttgcatgtcaggttccgcgaagcatctatctgcaggcaggctatctaaggccgaagtccttcatacatagatcatccttgatgctgtcggcctgaagatggcattttctcctggggtcagtgcaaccctttttgatgcacttgcaaaggcaaatattaatgtcagggcaatagctcaaggttgtagtgagtacaacatcactgttgtattgaagcaagaggactgcgtaagggctctgagagctgctcactcaagggtcttcctctccaaaaccacacttgctgtcggaattattggacctgggttgattggtcgtactctccttaaccagctgaaggatcaggctgcagttcttaaggaaaatatgaacattgatctgcgtgtcatgggaatcactggttcgaggacaatggttttgagtgatacaggaatagatttggcccattggaaagagcagctacaaactgaagcagaaccagccaaccttgacaagtttgttgatcatttgtccgagaatcaattattccctaacagggttttggtggactgcacagcagaccacaagtgttgcatcccactattatgactggttaaagaagggaatccatgtcatcacgccaaataagaaagcaaattcagggccactggacaagtatttgaaacttaggactctacaacgtgcatcatatacccattacttctatgaagcaac

SEQ ID NO: 388876 - DNA, 301 bp, Oryza sativa
ccacgcgtccgcacccaggaacacatcatcatcatcatcatgtctccgatgccgtcgctgctactcgtgttcctggtcgcctcgtcggcggctggtgttgcggccggcggccgcggcggggagctgaagcacatccacctgtacatgcacgagacgttctcggggccgaacgccaccgagggcggcgtcgtggcgtcgccgttcaacacgacgttcgggcaggtggccgtgttcgacaacgagctccgcaccggcgaggacagggcagcgtcgccgctggtggggtaggtaccaggattca

SEQ ID NO: 388877 - DNA, 646 bp, Oryza sativa
  unsure (1)..(646): unsure at all n locations
cccacgcgtccgatcaaagagaaatctccccccgtctcgtcgtctcctccgctccttgcgcctccccaagacgagtcgcggctgaacagaagagggggagtaggcggcgatctccatctggcgactcgcgagcagagcaggggaggggatcctgatctggaagaagctctcctcttaatttcagcgccttaaccttaatacaagtaccagtttgagtttgtttgttcccaagttggatccggccctgggtaatttctttcttgctgaaggtggagagactgagctgagctatggacaacttgtggcatctcggggatgagttccgtgggcagtcgaaggtagtggaggaccgtcagtggtctctcatgacatcgaagttggctgagatcaacaagtccaaggcggagaggacgaatgagcttgactatgcgcggatgaacaccatccctgatgtcaagcaatgggataaggtatcctaccaccaagatgagagcaagatggaccacctcaatcttggccttatgaatctagatcttaagatgaacgacatcaggatgaatgacgcagctatgaagaatcctttccgcggcatggcctacaacatgaatcagctgtaccccaagggaggcaatggcaatgnttaact

SEQ ID NO: 388878 - DNA, 974 bp, Oryza sativa
  unsure (1)..(974): unsure at all n locations
ccnngggctgcaggattcggcacgagcttgcatttgccggacatccacttatctgggcagccgtccttgcagatgttggcacatgcttgctggtgatcatgtncagcatgctgttgctgananaganngacantcgaanggggaanaaatgtgctgcttctcatcacggatctccaagagaagtgctgttcttctnctcatcntggatctcatggtaaaaaaaatcttggcgtttcccaccattgttcggatggtccgtgcaaatcaatggtcagttgcaaagaatcatcagttgctaagaatgcttgtcatgatcaccaccatgagcataaccatcacgaagagccagcccacaagcattctgcgaaccagcatggttgccatgatcacagccatggccatagcaactgcaaagagccaagcaaccagctgattacaaacaagcatgcttgccatgatggtcataaccactgcgcagatacgagcaatctgcacgacaccaagaagcatgactgccatggccatgagcatagcacctgcaaagaagaactcaacgctttgcctcccaccaatgaccatgcttgccatggccatgaacatagccactgtgaagaacccggtgctctgcactctaccggcgaacatgcttgccatgagcgtgagcatgagcatatccactgtgacgagccaatcggctcgcattgcgctgataagcatgcttgccatgaccatgaacaggttcatgagcatcattgctgtgatgaacagcaaactccgcacaccgcagatttgcacccctgccatgaccatgaccatgacaacctggaggtcgaggaagtaaaggactgccatgctgaaccacctcaccaccacaaccattgctgccatgaacctcatgatcaggtcaagaatgatactcatccagtccaggagcactcgatctcgatcgaagaatcatcagaccaccatgagca

SEQ ID NO: 388879 - DNA, 422 bp, Oryza sativa
  unsure (1)..(422): unsure at all n locations
tgcaatttgaagatcaagaaacaaatgaacaagtcactggattcagaagaaaaagatttgttaaatagatttgatgcatcaaccagattcagaagattctttttcttcttgaatagtgttttgggttatctatctttgttagtgttttgggttttgtatatattgttagttaagttgctgggctaaatttgagtcagttcttttgttttgggcctgtaaattgactacagtgttgatttgggctttcatttgatgtaaattttgtatttgggctcaatctggactatttgattgggtcgagttgtatttgagcccttcgaaaatgggcttccaaacctatttgttattgtttatctatgtatttttaatttttatttgtcaaataatagtagctgttggatctnnnnnnnnnnnnnnnnnnn

SEQ ID NO: 388880 - DNA, 437 bp, Oryza sativa
gactagttctagatctctccccttctctttggcgtaaaaggaaaaacacccgtctcgtcgtctcctcagctccgtgcgccatctcgcgtcgcggctgaacaggggaggggaggggatcctgcctttgtttgtttgatggcctcacctgcatcaccgagagagttcactcaggaagctgcccgtcagtctctgattgcgatctcccggtctgttccagcggcaggagaagccgtcaacatcaagtcaccgagcggcgccatggtgaatggccaccaccacgacgatgacggggcagagaagtacagatcaaagctcatctccatctccaacctgtcgccttgatgcccagcctacggccgtgcttctcccaaggacaccgctgcttgcttaggcttaaattaaccgtgttaccatgttaatgcttaaactttccaagt

SEQ ID NO: 388881 - DNA, 742 bp, Oryza sativa
ccacgcgtccgccacgcgtccgcccacgcgtccggcgacagaagcaaaaggcggcgaagagagagagagagagagagagagcgagatcgcgcggagatggccgacggggaggacgccgccgccgcccgccgccgcgcctccgtgacggagtaccggaagaagctgctcaactgcagggagctcgagtcgcgcgtcagcaccgtgagggaaaacctaaaaaatgctaagaaggactttacaaagaccgaagatgacttaaaatccctgcaaagtgttgggcagatcatcggagaggttctccgccctcttgataatgaacgttttattgttaaggctagcagtggtcccagatatgtggttggttgccggagcaaagtggacaaggagaaattgacttcgggaaactcgtgttgttcttgacatgacaacactgacaatcatgcgcacacttccacgtgaggtggaccctgtggtttacaacatgcttcatgaagaccctggtaatgtcagttactctgctgttggtggtctgtctgatcagattagagagctcagggagtccatcgaattgcccttaatgaaccctgagctctttcttcgtgttgggatcaagccccccaagggtgttctactctatggtccaccaggaactggtaaagacactattggcgagggctattgccagtaacatcgatgccaactttttgaagattgtttcaagtgctataattgacaagtacat

SEQ ID NO: 388882 - DNA, 408 bp, Oryza sativa
ccacgcgtccgcccacgcgtccgcccacgcgtccgcccgcatgaactgcacgaactgggcatctgatcagaacggagatgaacaaggcgctcaccaaggacggcgaggaagcatgtggccgtgaatcttttttgcccctcctagaagggccagtgatgacctcgtcgtgttcagctattgagcaccttgcagtatccatgatatagaccgtggtatatttataaatagcttacctagttaaaagcggcgttcgtgctgctgtgctacccctactcgccagcaaccttagagggtctggtgtagtgccagtagtggtgtttaaagacttctaatcatcggtgtgtaatcgaaataagtaccgtacctactagttgtttattatgctatatgatgtattaaacttgtgtt

SEQ ID NO: 388883 - DNA, 391 bp, Oryza sativa
  unsure (1)..(391): unsure at all n locations
ccacgcgtccgctcctcgtgccgttgccccccggttggactcggcgcgcttgcttctcgctcgcggctgctcgtaacctcgcctcgcctcgccctcctgcagcacgcgcggctggctgcccgacccagatccggagcgccatgtcgaggaatccgggctgcaccgtcttcataggtaacttggatgaaaaggtacctgagagggtcttgtatgagattcttattcaggtaggtcgtgttgtagacctacacataccacgtgacagggaaactaatcggctccaaaggttatgcttttgctgagtatgaaacagaggagattgcccagtatgctgttantattttctggccttgtcgcctcatatagacacttagattgcgatttctggcaa

SEQ ID NO: 388884 - DNA, 469 bp, Oryza sativa
  unsure (1)..(469): unsure at all n locations
ccacgcgtccgtgcaaattgcagtgatcgaattcgcccgctctgtcatgaagttgcgtggtgctaatagtacagagtttgatccagctacaacgacgccatgtgttattttcatgccggagggctctaaaacccatatgggggcaacaatgcgccttggatcaaggaggaccttcttccaggccaatacatgcaaatcagctaagctgtatggcaatgcaagctatgtagatgaaaggcaccgccaccgatatgaggtgaatcctgaaatggttccagaatttgagaaggcaggtctctcttttgttggcagggattgaaagcgggacacgcatggagataattgagctacccactcatagggttttttgtttggcgcacaatttcatcctgatttcaaagtcaagaccttggaaagccatccccacttttcatggggtttaatagcagtttcataaggcagtttnacc

SEQ ID NO: 388885 - DNA, 1028 bp, Oryza sativa
  unsure (1)..(1028): unsure at all n locations
anaggcacatcgagaatctcactggtagtgcatcacatcagaagaaggacgcactcttcttcttcttctcgtctccgattccaacgaggcggcggacagagcagaggcgcgggatggcggcggcgcaggggagcggagtgccggcggcgctggcgctgagcagcggccacacgatgccgtcggtggggttgggcgtgtggcggatggactcccccgccatccgcgacctcatccactccgcactccgcatcggctaccgccacttcgactgcgccgctgattaccaaaacgaggctgaagttggggatgcacttgcagaggcattccaaactggacttgtcaagagggaggatcttttcatcacaaccaagttgtggaactcaagatcatgggcatgtggttgaagcatgtaaggatagcttgaaaaagttgcggctagattatctagatctctaccttatccacttcccagtagctacccgtcatactggagttggtacgactgctagtgctcttggtgatgatggtgtgctagacattgataccactatctcattggagacaacatggcacgctatggaggatcttgtttccatgggactggttcgcagcattggggattagcaactatgacatattccttaccagagattgtttggcttatgctaagataaagcccgcagtgaatcaaatcgagacacatccctacttccagcgcgactgtcttgtcaagttctgccagaagcatgggatcttagtcactgcccatacccctctgggtggctccactgccaatactgagtggtttgggtccgtctcatgcctcgacgaccctgtcatcaagtctctggctgagaaatatggcaagacaccggcgcagctggtgctccggtgggggcttcagaggaacacagtggtgatccccaagacatccaaggaggagagattgcaggagaactntgcggtcttcgatttcgccatctccgacgaggacatggagaagaagagatccatcgaccggaagtacc

SEQ ID NO: 388886 - DNA, 899 bp, Oryza sativa
ccacgcgtccgcggacgcgtgggcggacgcgtgggcggacgcgtgggcttgcacaagaatttagatataaagtcgaagatataccgagatccatcactcgcttgcgtcttcttgatgaacaatggcaagtacatcattcagaaggtgaatgatagtgaacttggtgttttgcttggtgacgagtggatcaagcaaatgacaaacagagtgcggcgttggagcatggattaccagcgggtaacatggggcaaggtcacaacagtattgcagactggcggtcctggagtaggtggactccctgccacggcaatgaagcagaaactccggatgtttaatacctactttcaggagatctatgaagtacaatcagaatgggtgatagcagatgaacagctgcgggtggatgttagggcagcagtggcggaactgtaatgcccagtatatacagccttgatttctagattgaaatcatcccccgaagccaggcatgacttgtacatcaaatacaccccagaagatgttgaggcatgcatcccagcacttgtttgaaggagcagctaagtgatccagttgatcagtacgttatggtactggcgtgctgcagcctgcagcttctactacagggtttgtggagttctatcatggatcctggtgaatatctgcgtcccattattggtgattttcatagcttaacctttcatcctcattgtttgtattttgtcctccatgaagaaatcatgaggtaagacaaatggtgtacaactgtacatgactactgtaggtgtatctgtaccaattagtaaggtgattattttgtaacaatcaggactatttttccatttgtttcaactatttcagattaacagctaagtgtttatgtgtgaaaaaaaaaaaaaaaa

SEQ ID NO: 388887 - DNA, 824 bp, Oryza sativa
  unsure (1)..(824): unsure at all n locations
ccacgcgtccggcccagcaagtttggttacggaaactgggaggagcaaagcctgttgtcaatcaggggggtagtgggataattactgcaggacgagcaaaacgtacgagtgctcaaccagcccaacctggtgaaagatttaaacagctgaaagaagaggagagcaagagaaaaggcaacaaagcgcttgctgcaggagattcagatctttcagcctcaacatcagaggatgaagagtcggatgatgagactactgaagagggaggacctgaggaaagatacaattccagtagcaacaagaaacttccaaattactccggaaagaagggcaaaagatcaaagaggaagcgcatggttcagtaggtgtgacagaacctgattggatttcatttttgtcattactggttaattcagttggccagtacggttgtgtagttgatctcggacacaattttgatgatcagttgggaaggctaatcttcaggtgcaggacagacacgaaacattccagtggtacaggtgttttgctggcacacagcaagatgaaaatagttcagtacactacaataggtttgagaggataggcatggcttgagtatgtgctacaacataagagtagtacacaaattattcttgtgctactctgcaatgtgggtaccaaactcacgcaggaattgcataattcatgctctacatgcatttatttccctcttgtaacctaataacattctttgcggagtatattgcagaagttagaacaatccagtcgcctagaaaaggtgaggaaaaaaaaatacattgctgaaaaaaaaaaaaaaaaannnn

SEQ ID NO: 388888 - DNA, 694 bp, Oryza sativa
ccgaatcgacccacgcgtccgctggaagctttggatgtgagtggtgttgaatacagatcaatggtgtgattatgacgacaacaatggttacatccccccaacgtatgaggaaggttcatcatctggaggaggattaagaatgaaactgaaggaattccacaaaagcacgacatcgttcactgcccttgacaggaactatctgactccatttttcaccagtcaaactgatgaggatgatgatgtcttcggtgaacaaccccaaaaccagagacgcggattctatgaccaatagcttggatgagttgccacctgacagccacatacacgatacttagcatggtagcatgtgatgagattggaagcgatcgtaagtatacaacttctcatagttgaatagcatatgaaagagcataccgtaggatagatatcataacacaacttgattcgtcggcgatgacgaaagcatgctgcttcatgtatatattttaggcctcgattagtacgtggtggagctgtaatgagacaaaaatgattgtaagggaaaaaaaactgagcccaagcccatgtcatgagttagaatgattgcaataacccagagctgatcattggcagcttactgtcaagttggaaaagcatgttaaccaaatcaccagctgtgtcattggctggtcttgaagttactaaaaaacacaaa

SEQ ID NO: 388889 - DNA, 977 bp, Oryza sativa
  unsure (1)..(977): unsure at all n locations
ccacgcgtccgcgctcccagcccgtttcaccttcaacggcgtggacgcatccggctgacgtggaggtgagcttggaggtgtccgggctggagaaggcggaggcgttcgacccggcgttcggcgacgacgcggagaggctgtgcggcgcgaagggcgcggacgtgaggggcggcgtggtgttcgggctgtgggtgctggcctccgccggcctggaggagaaaaccgccgtcttcttccgcgtcttcaagccggccgggcacggcgccaagcccgtcgtcctcatgtgcaccgaccctaccaagtcttctcttagcccggatctctacaagccaacttttgccgggttcgtcgacaccgacatctcgtccgggaagatctccttgagaagcttgattgaccgttcggtggttgagagcttcggcgccgggggcaagacctgcatcctgtcgagagtttacccgtcgatggcgataggtgacaaggcccatctttacgtcttcaacaatggggaggcggatattaagatttcacatctgaaagcgtgggaaatgaagaagccgcttatgaatggcgcctaattaatttgccgcggatatatatgatggcgactttaattaattgctattattaaatcatcactcgccatctgcgatataccggccagatcgtccctgacatcgatctcctgttcttggccgatgttgcacgctgcacgatattttgattgcttgttgctgaggatgattggagtttgtattcgtgtctccagatatcgaaagaccagggtaattttacactcttcttgtacaattaattgattgtatcacgagttgtttgtaaacaattgtttgtatcacgagttgtttgcaaacatttgtttgtgccacgatcgagttgtgtgacaaataaattaagatgctgattatttcatcatggtacagntaataaaggggttttccgtgnttttaaaaaaaaaa

SEQ ID NO: 388890 - DNA, 775 bp, Oryza sativa
  unsure (1)..(775): unsure at all n locations
gtgctcgcccatccaatccaccgcaagccgaagcgtgacaaagtgccctcgagccatggccatgtccctctccctcgcgcgcgtcgnntcccgcctctgctgcagcagcaggggggcgcccccaggaagctccaccccggcgccctcgcgttccccgccaagtcgttcttcggcgcgccgctggcggccgtcgcggtctcccccgcgtcggnggcggcggcgtcgngatccgtcgcaggccgtcgtccgcctccgccgtcgtcgcggcggggaaggggtacaagatgaagacccacaaggcgtcggcgaagcggttccgggtgacggggagggggaagatcgtgcggcggcgcgccgggaagcagcaccttctcagcaagaagaacaccaagcgcaggaagaggctatccaagatgatccaagttaacaagagcgactacaacaacgtgacgggcgcactgccctacctcaaagtgaacaggaatgcagaatgagatctcctaggtcttgcaaacatgcttctgtttcgtttcatcaaattgtaattttgtgtatcttctttgtatttcttttctgaataccaaggtcccaagtcataccaagcaagcacaaacaattattcatgccaacatgttcaaaaatgagttgcacttgcacgagctagttatttacaagtcctttttccccttttgacaaagaaaattccaactgataatgaaagcaactattaaggagtaagaacatgagtggttgactaaaaaaaaaaaaaaaaaaa

SEQ ID NO: 388891 - DNA, 652 bp, Oryza sativa
ccacgcgtccgcccacgcgtccgcccacgcgtccgctccaatcagcagctatctcccttcctcatcaccagcttgctgtgatcttatcaggccggtttgttgttctgctggtcttgctcgcgtgcaaagagatgccggagcactctgagaatgcggctgcgaacattgtggacagcatagtggacgccattgccgacaatcttcccaagcagaagtcagtcagatttgaagatggctcaatctctgatcaagctaagagactcttcggtggtcagaagtctgtccatcatgttttgggtggtggaaaatccgccgacgtgttgttgtggaggaacaagaagatatcttcaagtgttcttgcagttgcaacggctgtctgggttttcttcgagtggctcgactaccacttcctgacgattgcttgctttgttcttgttcttggcccatggttgtccagtttgcatggtccacttttgcaggcatgctaaatgggtcaccttcgaaagttcctcgcgtcgaattgccggatgagctgttcgcaaacattggttctgcaattggcacccaagtgaacaagttcttgggcactcttcaggatgtgtcttgtggaagagacctgaagaattttatcctggtgattgccgggttcttc

SEQ ID NO: 388892 - DNA, 630 bp, Oryza sativa
gtcatggacccggcttggccacacttgcagattgtgtatgaactattcttaaggtttgtccagtctcctgagaccgatgctaagctggccaagagatacgtcgatcatggtttcattatcaagctgcttgatctctttgactcggaggatcctagggaaagggagtatttgaagacaatacttcataggatatatgggaagttcatggtgcaccgtccattcattaggaaggcgattaataatatcttctacaggttcatatttgagacagaaaagcataacgggattgctgagctattagagattttggggagtataatcaatggttttgctttgccactcaaggaagagcacaaattgtttcttgtgcgagcattgattccgctccacaaaccaaaatgtgttagcatgtatcatcaacaactgtcatattgtgttactcagtttgttgagaaggactgcaagcttgcggatactgttataaggggtttacttaaatactggcccatcacgaatagtgctaaggaggtgatgtttttgggcgagttagaagaggttttggaagccactcagccagcagaatttcagagatgtatggtgtcacttttctgtcagatcgcccgctgtctg

SEQ ID NO: 388893 - DNA, 807 bp, Oryza sativa
  unsure (1)..(807): unsure at all n locations
gccgcgtgccgccggccttcttgcccgacgtcgaggacgccgagagccccatccacgagatcaagcgcaagggtggcgatttgagatattgtcagaaatgttcccattataagcctacccgtgctcatcattgtcgtgtctgcaagagatgtgttctaagaatggaccatcactgcatatggattaacaattgcgttggacatgaaaactacaagattttcctagtctttgtgctgcatgctgtagtagcaagcttatattcactggttctggttataggaggtgctgtgcacagcttgcctaagaatgaacaattaggcagtgattcttctagaacatcaattatcatttgcggggtatttttgtgtccactagctttggcattgtccattcttttgggttggcatgtgtatctcatctttcataataaaactactattgagtaccatgaaggagttagggcaatgtggttggcagaaaaggctggaaatctataccaccatccctatgaccttggtgtctatgagaatcttgtttcagtgctagggcctaatgcgttgtgctggctctgcccaatatcaaggaatacaggcaatggtattcgtttccgtacatcatatgatataccactatctacaccaccaatttgacatcaggtagcattacattcatgttagatttctggtaatttgctaaaaaaacttggttgcctatccaagtgtgaaatgtgctattctcgnaatagcatttgataacccttcataagggatagcgtttgtcaatgtcttgaactcttgcacagggttt

SEQ ID NO: 388894 - DNA, 580 bp, Oryza sativa
  unsure (1)..(580): unsure at all n locations
ccacgcgtccgcccacgcgtccggattgtgctacagggcgtcccgaagagcccattcggacggtagattgggaaggaaaggttgctctgatacaatgtgctaaggccatgggaattcaaaagtatgtgttctactctattcataactgtgacaagcacccggaggttcccttgatggaaatcaagcattgtacagagaagtttattcaggatgccggtctggattatctcatcatccgtttgtgtggtttcatgcagggcctaattgggcaatatgctgtgcccattcgagcagaggagccagtatggggaactgatgctcctacccggattgcttacatggatacccaggacgttgctcgactgacgtttattgccatgcggaatgagaaggctagcaagaagctcttacacttttgccggaccacgtgcctggaccaactcaagaggtgattacactgtgtgagcggttggctggccaagatgccaacgttactactgtccctgttgcagtgttgagatttactcgtcagttgacacggttctnccagtggacaaatgatgtggctgacagactggca

SEQ ID NO: 388895 - DNA, 963 bp, Oryza sativa
  unsure (1)..(963): unsure at all n locations
ccacgcgtccgggccgggacaccaagtctcttggaagcttccgcttggatggaatccctcctgcaccacgtggtgttccacaaattgaagtcaagtgtggtattgatgccaatggtattctctctgttgctgctattgataagggtactgggaagaaacaggatatcaccatcaccggcgctagtacactgccaaaggatgaggttgagagaatggtggaagaggctgacaagtttgctcaggaggacaaagagaaaagagatgccattgataccaaaaaccaggcagactctgtggtctaccagactgagaagcaactgaaggagctaggtgacaaggtacctgcacctgtgaaagagaaggtggatgcaaagctcaacgagctcaaagaggccattgcgggtggatcaacacagagcatgaaggatgccatggctgctttaaacgaggaagttatgcagatcggccaggccatgtacaaccagcagcctaatgctggtgctgctggacctactcctggtgccgatgctggaccgacaagctcaggcggtaagggaccgaatgatggagatgttattgatgcggatttcactgacagcaattgatagttctagcgattgaagattattgatggaaggatgatctgtggtggatggctgtgagggtctgatgggtgatggtataggaagaagggagtgaacaaattgttctttttgtttactatggatcccatgttcaataggctctttagtttgcaatttgatagcgtagggttttgccaacattttcctgtgatgttgaatgaaggattataaaaagtagccttcaaaaaaagaggaggcaaaggttttgatcgaagaagtagctgattgatatgaccttgttccttgaaaataaaaatatcattagttccctgtgcnnnnnnnnnnnnnnnnnnnnnnnnnnnnnnnnnnnnnnnnnnnn

SEQ ID NO: 388896 - DNA, 729 bp, Oryza sativa
  unsure (1)..(729): unsure at all n locations
cntttcccagtcacgactttntaaancgacgnccnttgaccncgcgtaatacgactcactataggncnaattgggtaccggcccccccctcgagtcgacccacgcgtccggggttctcctctctgcggcggcggcggcggctattttctctcgcctactccgaagatttggctttggttgagcggagaaggtctagatcttccgtcggggagtcgccatgagccgatcggggcagcctccggatctgaagaagtacatggacaagaagctccaaatcaagctgaatgcgaaccgtgttgtcattggcactcttcgaggattcgatcagtttatgaatttggtcgtggacaacacagtggaggtcaatggaaacgagaagaatgacatagggatggtggttatcaggggaaacagtgttgtgatgattgaagccctcgaacctgttcccaagccgcagtgaactttcagctcgcctagtttgcttcggtacttgatttggacatttggtagtgccatgtcaaacctaattgttattccagatgtttatgcccgcgggcattttgtatcctgacctggtttatatgcaagctcgtgcacctttgtatagtctagccagcgttacgatttatgcgtttagcctgaacgttactatattgctgtgatgattttccggngttttttgngnnnnnnnnnnnnnnnnnnnnnnnnnnnnnnnnnnnnnnnnnnnnn

SEQ ID NO: 388897 - DNA, 336 bp, Oryza sativa
  unsure (1)..(336): unsure at all n locations
aatcagaatttagtcacgcacccaggaacaccaagaaaaagaaaaggaaaaaccttttctttctttcttcactttggttgcgttgcgtctcgcgatccagcgtgcgttgagtagatagatggtaatgccgcccacgaatccgtggcgagttcttgcgtcgcagagtggcaatctgtaggagtttctctgggggtttgttttttttttttttaacggaagaacagaatctaatcgcatcgaatcgaaagagaacgtgaattaatctgtgggtttcttggcggcggatcgatcggcggcgatcggccggcgatggcgccgccggtcnatgggattact

SEQ ID NO: 388898 - DNA, 727 bp, Oryza sativa
  unsure (1)..(727): unsure at all n locations
cnnttttctttacactgcctggttgggccgnttctcccctgttgcaggggagaaattggaaaaatggattgcgatcattgctgtcacccttcgtctcttctttcctcgccatttcccctgattggttagagctgccctggtgctgtgatccttctcattgctgttgccccgaacctgtttgcgagcaccttccgaggccgacttagttggcatcttcatatgcctcatcattggatgctacctgcttcaagagcacatcagggcgtcaggtggattcaggaacgccttcaggaagggcaacggagtgtccaacagcattggcatcctcttgctcttcatctaccctgtctgggccctggtgctgaactttctgtaggcgccaccgcttcagcgcttctctacaccatccagctccgatcgctgttcgttcttgtgtacatgtcttgtacggtgatttggtatctggtgatctggtagtatcgttttgaggagatggataatgtatgtttggacctcctgcctcctgatgcacgttttcttggcattttcgtttgttgtagctttgctatcagcccgtgtttcgtcgttctgagtgtacaagcgtcaataaattcatctctgttgccttctgtaaatttaaagagcttttatccaagttctcttatgtgattatccccactactacttctgaacaataatgctatgcagttgtgtgaaaanaaaaaaa

SEQ ID NO: 388899 - DNA, 1550 bp, Oryza sativa
gcatccacaccttcattgccaccagcgagatccatatgcagcacaagctaaggaagacgcccgagcaggtggtggccattgccaaggaaatggtggcctacgcccgcagcctaggctgccctgatgtcgagttcagccctgaagacgctggcaggtcaaacagagagtttctatatcatattctagaggaagtcataaaagctggagcaacaacactcaatatcccagacactgttggatacactcttccttatgaatttgggaagctaattgctgatataaaagcaaacactccaggaattgaaaatgctattatttctactcattgccagaatgaccttggtctagcaaccgccaatacattagcgggcgctcatgcaggagcacggcaattagaggtgactatcaacggtattggtgaaagggctggaaatgcttctttggaagaggttgtgatggcaattaaatgtcgccgagagctcttaggaggtctgtatactggaatcaatacccaacatatcactatgtcaagcaaaatggtacaagagcacagtggacttcatgtacaaccacataaagctattgtcggtgccaatgcctttgcacatgaaagtggaattcatcaggatgggatgcttaaatacaaaggaacttatgaaataatttctcctgatgatattggtctaacacgtgcaaacgagtttggtattgttcttgggaaactcagtggaaggcatgctgtgagatctaaactagtggagcttggatatgaaatcactgacaaggaatttgaggatttctttaaacgctacaaagaggttgcagagaagaaaaagcgtgtaactgatgaagacattgaggcgctgttgtctgatgagatatttcagcccaaggttttttggtcccttgctgatgtacaggcaacttgtggaacacttggtctgtctacagcaactgtcaaactgataggtccggatggagaggagaagattgcatgtgcagttggaacaggtccagttgatgcagcttacaaggctgttgatgatataatacagatcccaactgttcttcgagaatatagcatgacatcggtcacagaaggcattgatgcaattgcaactactagagtggttgtcactggagatgttagcgactctaaacatgctttgactggtcactccttcagccgggcattcagtgggagtggtgccgcactggatattgttgtttccagtgtgcgagcttacctgagtgccctgaacaagatgtccagttttgttggggctatcaaggctagtagtgaagtatctgaaagccaaagagttcaaaccacagaatgagtcttgacttccttttgggttttcatatccgatggttctatggttcacattcccagcaaggagtatgtgcttgttgaaacataggtttttccgtccagaaaaaacatgggtccgtttagtgcatcttggaggatgtctgggttcttggggagcctgacttaaggtgacattccagacgtttgggatatgcgtgtatattcatattgaaac

SEQ ID NO: 388900 - DNA, 1102 bp, Oryza sativa
ggtattgctgctggcctagagtccatgacagtgaaccaagttcgccttgatgggcaagtgaaccccaaagttgagctgttttctcaagcacgcgattgccttctcccaatgggcctcacgtccgagaatgttgcaaaacgatttggcataacacgaatggagcaagaccaggctgctgttgagtcccacaggaaggctgcggctgcagctgccttctggtaaattcaaggaagaaattgttccagttcacacgaagattgtggatccaaaaactggtgaggaaaaggagatagtggtctcggcagatgatggaatccgaccaggcacttcattggcagtcctgtcaaaactcaaaccagcattctctaaagatggcaccactactgctggaaacgctagccaagtaagcgatggtgctggagcagtcttactaatgagacgtgacattgctatgcaaaagggtcttccaatagttggcgtcttcaggagctttgcagcagttggagttgatccagctataatgggtgttggtcctgctgttgccatccctgcggcagtgaaagctgctggtcttcaaatagatgatgttgaccttttcgagattaatgaggcctttgcatcacagtacgtatactgctgcaagaagttgggacttgatcctgcaaaagttaacgttaacggaggtgcaatggctcttgggcatccattgggtgctacaggtgcacggtctgtcagtacccttctcaacgaaatgaagcgacggggcaaagactgtcgatttggtgtgatttccatgtgcataggttctggcatgggggctgctgctgtctttgagcgtggggatgcagtggatgagctcactaatgctcggtgcatcccgacccataaccggctttcgaaggacgccatgtaactagaactatatatatatgtcataaaaattgtgcaactgccactattgtttgaaatatcaacacaagagtagggaataaaacgcttgtgtatctgtaatctcatccagctctgaacttgggctagttggagaatcctggttaattagggaatccatgcataataactcaaaagttgtcccttgtcagcc

SEQ ID NO: 388901 - DNA, 532 bp, Oryza sativa
ccacgcgtccggagagcctggtcagtgacatggtggtggtggtatagaagtgccacagcttctggtgcattgcttcttgggcatatctacatctctgatctgacctgcagtttgtaagatacaaaacagggttcattagcctcccttgcagaaggtcgcgaaagtggcatcttgccctggtcccatcattacacttggaggcttcccaaataactaggttaaccaaactgtaaatagtcatcctatttggattgttgttctccttagccagcttcctttcccaaatgtaaaaaggtttggaggtgcttccatatgataaatcaggttagtggggactgcctgggcaagtggttgtttatatgggcccagggagaatgcatgcgcatgtctctcatagatgttgttcaatagatagatgcatttgtccagctaacacaatattacatggcttgatgaatcaatgccttcttttagctctttcattgtaagcactggacagtcatccagtgactcaaggtagggcgtcattgtc

SEQ ID NO: 388902 - DNA, 551 bp, Oryza sativa
  unsure (1)..(551): unsure at all n locations
cccacgcgtgcggggacgcgtgggcgacttctgtggaaagctcaatggcattcagctgtgctatgctggtggatttgggtaccatgcgtatgggaaggccgggtggtcgaggagagcgagggtggtgtccgtgcagcttgagaagtcggacggcggcgagtggcgaggtgtgaagtccatcaagacatggaagaggcttgatgatccacatctcaccacaattgactcagaagtcctctggaacagaggctccaatggaaggcgcaagaagaatcctgatggaaagatgagatagtgatatagatgggaagacggggatagtgaaatgttgcaacgtactacacgttatgatgtgctgtttgccaatttgttttacaaaattttcgatttatgtaaatgaacaaaaacatggtacacgacacggcatgcacccttttcgcggttgtaattctcaccgagaaaacagtgaattttagtaaaaacagttactgtagttttagtaaaaaaaaaaaaagaaggccgctcgcgatctannnnnnnnnnnnnnnnnn

SEQ ID NO: 388903 - DNA, 748 bp, Oryza sativa
  unsure (1)..(748): unsure at all n locations
ngagcgtccacgcttcagcagacggagaagggaatctctcctcttctcttctcttctcgcgccgccgccgtgtccagtgcccaagatgtggggcagcgccgacggcggcacgccggaggtcaccctggagacatccatgggcgccttcaccatcgagatgtactacaagcacgcgcccaagacctgcaggaacttcctcgagctctcgcgccgcggctactacgacaacgtcatcttccatcgcatcatcaaggatttcatcgtgcaaggtggggatcctactggcaccggaagaggcggcgaatccatctacggagcaaagttcgaggatgagattaggccagaactgaagcacaccggcgctggaattctgtcgatggccaacgctggtccaaatacaaatggaagccagttctttattactcttgcgccttgtcagtcacttgatggaaagcatacaatttttgggagagtatcaaaaggaatggaaattgtcaagcgccttggaagtgtccagacagacaaaagtgataggcccatccatgaagtgaaaatcctgcggactgtggtcaaagattgaggcacagcgggtctactcggtgtcactcatggcttctggtatttggagttgtagctgctgtcagtttcaggaattggttcctggttgttccgtgcttatgcagtggtgtatcgtttcggatgggctagtttagttataacaactcatgaatcgtgaccgtcttaatat

SEQ ID NO: 388904 - DNA, 992 bp, Oryza sativa
  unsure (1)..(992): unsure at all n locations
ccacgcgtccgcggacgcgtgggcggacgcgtgggcggaacgcgtgggcgctcgtcttcctcccaccttccgccgccgccgccgtcgctctcctcttcgctccgccgcgcaggtaagaaggagaggaggagaaaatggtgaagcacaacaacgttatccccaatggccacttcaagaagcactggcagaactatgtcaagacatggttcaaccagcccgcccgcaagcagaggcgccgcattgctcgccagaagaaggctgtgaagatcttcccccgcccaacatctggccctcttcgacccattgttcagtgccaaactttgaagtacaacatgaagtcgagggctgggagaggctttacccttgaggagctgaaggctgcgggcatccccaagaagtatgctccaaccattggaatttccgtggatcaccgccgcaagaaccgctcacttgagggactccaggctaatgtccagaggctcaagacatacaaggccaagctggttatcttcccaaggcgtgctcgcaaggtcaaggctggtgattccactgccgaggaacttgccactgccacccaggtccagggtgactacatgcctattgctcgtggtgagaagcgctcagttgaggttgtgaaggtcaccgatgagatgaaggcgttcaaggcctatgctaagctccgtgttgagaggatgaaccagcgccatgttggtgcccgccagaagagggctgctgaggcagagaaggaagagaagaagtgaagtgaccggacatagtatctgttttgttatattcagcagctagtggatgctatcagggactaaatctaaattttgtttttgtgctggaaatagagaccagcttatcattttggtgtcatcataccccttctgtttgatatctggtactgatttgcatgctctgctatcgaatgaaattccatccatgtgttgtgtctgattaaaaaaannnnnnnnnnnnnnnnnnnnnnn

SEQ ID NO: 388905 - DNA, 954 bp, Oryza sativa
  unsure (1)..(954): unsure at all n locations
ccacgcgtccgcggacgcgtgggcggacgcgtcacctcgcgtcggcatcctcctccgcctccgccgccgccgcctcgccgcccaaggtaaggtaagccatggtgaagcacaacaacgtcatcccgaatgggcacttcaagaagcactggcagaactatgtcaagacatggttcaaccagcccgcccgcaagcagaggcgccgcatcgctaggcaaaagaaagctgtgaagatcttcccccgccctacttctggaccacttcgccccattgttcagtgccaaacacttaagtacaacatgaagtctagggctggaaggggcttcacccttgaagagctgaaggcagctgggatccccaagaagtttgccccaaccattggcatctcagtggatcaccgccgtaagaaccgctcacttgaaggtctgcaggccaatgtccagaggctgaagacctacaaggccaagcttgtcatcttcccaagacgtgcccgcaaggtcaaggctggtgactcgactcctgaggagcttgccacagccacccaggtccagggtgactacatgcctatcacccgtggcgagaagcgctcggttgaggtcgtgaaggtcacggatgacatgaaggcattcaaggcctacgccaagctgcgcgtggagaggatgaaccagcgccacatcggtgcccggcagaagagggcggccgaggctgagaaggaagagaagaagtgaaaggattgcaacctgcaacgttaagaatagatgccctaagttttattaccattattgttatcagcttctcctgatgcgagactggcattctgatcttgctgctgtctgtctactcttcagtttgagcttgtttgggtttttgtctgaagtgaaccaaactaagtgcatactacttgtcttaagatgaattcagtcatttcgctnnnnnnnnnnnnnnnnnnnnnnnnnn

SEQ ID NO: 388906 - DNA, 437 bp, Oryza sativa
ccacgcgtccgctcacgcacgcaacacgcacgcacccctagctcatgtgcaagacgagccggcgagctgtatacgtagcagctggactctggagaagcatcagctaagctgtacgtactactgtagttcgatcgatggatgctggtaataacgcaatcgctgcggcgtccttcgccatcgtcgtccttgtcgccgccgccgcctcgtctttagcggcggcggtgccggcggtgtacgtgctcggcgactcgctggcggacgtggggaacaacaaccacctgctgacgctgctcaaggcggacttcccgcacaacgggatcgactacccgggggggaaggccaccggccgcttcagcaacggcaagaacttccccgatttcctcgctgagaaccttgggttggcgacatctccaccgtacctcgccatatcgtcaagc

SEQ ID NO: 388907 - DNA, 527 bp, Oryza sativa
ccacgcgtccgagctgagctgagctagctatagccatcacagcaagtgtcaggtggaaactagcttagatagagatggctccggccttcgtctccgacgagcgcgccgtcgcggtgtcggtggagaggctgtggaaggtctgcttggacgtgcactccctgcccaaggtctgcgccggattcatcgacgccgtcgaggtcgaggggaatggcgggccgggcaccatccacatcatgaagcttaaccctgccgcggacgcagggagcgtatacaagaccaaaatagtggtgtgcgacagcgcaactcacgtgctaaaggttgaggtgttggaggttaagagcagggtgggcaacctcaagtcgcactcgacggagacgaagctcgaggccaccggcgacgccacctgcgtggccaagctcacggtggagtacgagctcgaagacggcgcctcgctgtcgccggagcaggagaggatgacgtcgacggctacttcagcatgctccagatgatcgagtgtacctcgtcgc

SEQ ID NO: 388908 - DNA, 820 bp, Oryza sativa
agcagctttatcctgaaagtgataatgactactacaatacccgactatatcctctgcgcagttttggctatgatgcaattgcaccagagtgtaggaggacaggacagtaaagtgtaaagagcgatatctacgctttggggctgtactgttggagcttttaactggtcgcaaagtagttgattattcacttccgcgtttccagcagagcctcataacatgggctacaccaaggcttagtgaagacaaggtgaagcaatgcgtagatccaaagcttggaggagcattcccactcaaggctgttgccaaggcttcctttgcccaccgtcaagctggtgtcggagtccagcgtgttgaaggtagaggagaggtcggtggtggaacaaggggctgaaggccatttcggaggggaagctagccgttatccttttagccggtgggagacttggcctggcagctctgatcctaaagggtgtttcgttcaacatctggtgggataatcgatagagctatatatgcagaggataggacatggtgactttatgaaattgtgaaatatcttggaatatatgtcgattacttaagatcttgttgaaggatatctggaattggctgcagagacaatcatttttgtggcagtcatgcccgggtagggtgtagagtactgcattacagtgggatgttgatctacatgtaagtataggtgtttgaactactgccctctaatttagcatcatcttgagtcttttttctccatgcttaaatttaatttgttcatagttcagacatttcatctttattaaattaaatttatgctaagtat

SEQ ID NO: 388909 - DNA, 438 bp, Oryza sativa
ccacgcgtccgtccttctccggttctccctctcctatctctctctcaccggtcggcatggagcagcggtaactccacgaaaaggcccggcggcggtgactgcaaagcgagcatggctcgcggcaactcaacaaagcggcccaccagcgacggctgcaaagcgggaaggaggggcgtagcggcggctcagtgaaggggtttggcgcatctcctcctctgctcccgcccgcctctaccaactaagcccatagtcgacgagcctcgagaggccgcatcagaagccaacagccttgggtggtgacgacgacctcgatgatgtgacgatttctaggaacaagctcgggggaggtggatccatcgccggtgagcttgggggaggccgacgatccgttgccaacaagctcaggggaggtggatcatcgtctgcgggctcagggga

SEQ ID NO: 388910 - DNA, 679 bp, Oryza sativa
  unsure (1)..(679): unsure at all n locations
ccacgcgtccgggcgatgaggctggtcagggcggcgcagctggaggcggcgaggaagaaggacgtgaagtacgagaggatcaggacgatcgagaaggggcagaggaggcacttccacgacgacatcaccgtcgtcgtgctcttcctcgacaagtgccgcggcaaggccggccgcggcgacgagatcgacggcaccgacggccccgtcgacgtcttctccctcagccccgacgaccgggaggacccgaccaggccagtgctccgttgatcgacggcggccggagcttcaattccagccgccgccggtggtgtgtgtacgtacatacgactgttcttggttctttaatttgctccccaaatcgaggtttgcatttggcgcgaaattggccgtttcagccagaaaggtttggttttttaagttgccagttgccacgcaggtctggtgttcatcaccctcaaatcgttttctggttcaaagcttcaaaattcaatttgttttggttggttttctagaaataatgctgcaaccacttcatcggagagaactacgtgtaatttagttgtgaagagtagacagtagtagtactgtagtagtgtcgtgtcttgtaaattctaaacataacaagttgctcaagcttctccattggagagaggcatccnnnnnnnnnnnnnnnnnnnnn

SEQ ID NO: 388911 - DNA, 553 bp, Oryza sativa
gcgacgcgtccgtggtaacacaatgaaggctccttgtggcctcaagactcgctccttgggtagaatcttggctggggtgcgcgcattctttgaggggcgcgagcaagaaggcagccacccaggaggggtgcatctggagatgactggacaaaatgtgacagaatgcatcggcgggtcacgcacggtgacattcgacgatctgggctcacgataccacacacactgcgacccgaggctcaacgcatcgcagtctctggagttggcgttcatcatcgccgagcggctcagaaagaggaggatcgcctcatggcagttgaacaagaacagtcatctgggcaacatcccatctttggggctctgaaagtcatatatatacagaaacagtgataagaaaagatcaaataccataggcaagctgtgagctatccaattgtcttgtactagctgttatgtcaagttgtcaagtttcgtttcatgttactcatgtactgctaaacaagtcaccctcttgatttaccctgtcatatataaataaaaaatgcaagttcacctt

SEQ ID NO: 388912 - DNA, 1279 bp, Oryza sativa
  unsure (1)..(1279): unsure at all n locations
ttgtcaatgaggtagaccatgagaaaggacctgggcatttcacctatgccagtcaagtcaaatacttgaggcccctcagttctatgaaacccttacagggttgcggatgccagagtgtttgcctgcctggtgatcccaactgtgcttgtggacaacataacggaggtgacttaccttacagctcatcaggacttttggcgtgccgcaagccaataatttatgaatgcggtgatgcttgccattgtactacgaattgccggaacagagtgacccaaaaaggggtcagatttcactttgaggtcttccggactgcaaatcgaggctggggtcttcgctgctgggatcccattcgtgctggtgcatttatctgtgagtatactggtgaggtcattgatgagctcaaagttaatctggatgacagtgaagatgattacatttttcagactgtatgtcctggtgagaagacattaaaattcaactttggtcctgaattgattggtgaggagagtacatatgtatcagctgatgaatttgagccactgcccatcaagattagtgcaaaaaagatgggaaatgtctcacgtttcatgaaccatagttgttccccgaatgttttctggcagccagttcagcatgaccatggagatgacagccacccacatatcatgttctttgcactgaagcacattcctcccatgacagaactgacttttgactatggtgttgctggatctgagtcttcaggttctcgtagaactaagaactgcttttgtggatcatcaaactgccggggagttttttaattgatggatgtatcttcattgggttggatcaacacacaaacctatttgccagaacttcctgcctgtacccccagattcgagctctggtattattccctgagaatgacgatgggtttcaacatgaactgtgaagagacagtaaattaccgtcgatttgaactgcatagacagttaaattatggttaaactctgttgtgttgatgccgcacttggtaacttggtggcctctgtacaccaccttttgttccatattttgtgggggcatgtatttgatattattgctgcaaatcgtctgtaatccatctgcacccatcctttgtaggctagcgtcagttttaactggaactctagcaattagttgtgacctgtcagatgcagtcatgtacaatgtgcccgtttaggatcaccttgcattttcgctctacttcatttcttccttggctgtnnnnnnnnnnnnnnnnnnnnnnnnnnnnnnn

SEQ ID NO: 388913 - DNA, 635 bp, Oryza sativa
ccacgcgtccgatccgaagtcccaactcccaaccactgctctctcccgcgagataaagaggtgtgccttcgtcttcctcttgacactccatccggcccccttttctagctagcggcacgcgagaaaccaaaactactacgagtcctgctgcttgaagggaaaaaaaatgaacgctagttgttgtgttgaatcttttatacttgttcctgatgagaagaaagcacaaagtagctcttgttctggcgggcggcccgcgagcattgaagccaatatggccgcgctgccattagccaccgccgaagtgtgcgacgcaaactcaaatccaatcatcgccggcgagctccgcgccctccctcccatcttcaaaatctacgggaggcggcaggttttcgccggcccagtcgcgacggtgaaggtgttcgaggacaacgtgctggtccgtgagctcctccaggagaagggacatggccgggtgctcgtcgtcgacggcggtggtagcgtgcgctgcgccctcttgggcggtaacctcgcgcagctggcgcagatcaatggatgggtcggcatcgtcgtcaatggctgcatcatggatgtggatgagatcaatggctgtgacgttggtgtccgtgccttcaatt

SEQ ID NO: 388914 - DNA, 698 bp, Oryza sativa
  unsure (1)..(698): unsure at all n locations
gtgaaggacaggattgaatcacagaatgaagtaagggctaaagagaaggaagaaaaagatcttgttgctcagcagaacatgtatgcccaattgcttcctcttgccttgcctgctcctcctggtatgggcggtcctccacccccagtggggatgccgggcatgcctccgatgggcggaatggggatgcctccgatgggtcccggacctatgccagcatatgggatgcctccaatgggaagctactgagttatcatccacttgtgaagagttcatttagatgataagaatttcaatttacacagaagaggaggcatctttcaagttgtagatgtgctattattggttgtttaaactgattcttttggtaccaggacaattttggcgagtgaaatctctagccaggtcgagttaatgactagttgctatatatattatgttacgatgggataggacgagggatggtttgttaggttgagcgggagctggcaaaggctgggtaccattatttgtataggttgtgtgataaaaaagcttgtagacattttgcatgtacactttgccgtagtggttggcgttggcagccataaacaggaacaccattgtctgtatgttacttgtttacggtctcatgtccagctgtttgaattttgtacctgnnnnnnnnnnnnnnnnnnnnnnnnnnnnnnnnnnnnnnnnnn

SEQ ID NO: 388915 - DNA, 901 bp, Oryza sativa
gttatcttcattgtcaagaaaggagatacatattcttctcatttttaagaaagtaaaatagtaaagggagatcattatctaaaaatgtaagagaggcactgaactgtttgtttaacaaaatattattgtaaaaaaccctccccaggaaatcaggataaaaagttatagagtttctgcatatattcgttcattaagcagtttcttcccttacattgtactcagaacatgcatatgttcatcatgcagattctagtcggtgtgaagtttgtccggagttggccatttcttggccgtgtaagactatgttttgtggagcctccttattttcagatgactgtaaagccactcattggtcatgggcttgatgtcactgagtttccaggaatttcaggatggctggataagttgatggatactgcatttgggcagacattagttgagcccaatatgcttgttatcgatgtggaaaaatttgtatcgactcccgcacgcgtgggctggttcagcattgaggagagacctcctgttgcatatgtgaaacttgagattttagaaggatccgacatgaaaccatctgatatgaatgggctctccgacccttatgtgaaaggtcgtcttggtccttttaaattccaaactcagatacagaagaaaacactatcccctaagtggtttgaagaattcaaaatacccattacatcgtgggagtcattaaatgaacttgccatggaagtgtgtgataaggaccacatgtttgatgactcgcttggaacatgtactatagatatccatgagctgaggggtggtcagagacatgacaaatggatatcactcaagaatgtcaagaaaggaaggattcacttggcaataacaggtgaagatatatcagaggagaaggggg

SEQ ID NO: 388916 - DNA, 731 bp, Oryza sativa
ttgctatctgatgcagaatcagtacgctggttaaattatgcaataaaaaagatgtggcctatctgtatggagaagatcgtctcacaacttctacgacccataataccatggttcttggataagttcaaaccttggacagttagtaaagcaggagttcaggagctttatatgggcaggaattcaccactgtttacttcaatgagagttttacctgagacatcagatgatgaccatttggttctggagatagggatgaattttctatctgctgaagatatgagtgctgtactttctatgcagctgcataagagtgtcggacttggaatgactgcaaacatgcatctgactagcatgcatgttgagggaaagattctagtccgtgtgaagtttgtccggagttggccatttcttggccgtgtaagactatgttttgtggagcctccttattttcagatgactgtaaagccactcattggtcatgggcttgatgtcactgagtttccaggaatttcaggatggctggataagttgatggatactgcatttgggcagacattagttgagcccaatatgcttgttatcgatgtggaaaaatttgtatcgactccctcagacaatgactggttcagcattgaggagagaccctctgttgcatatgtgaaacttgagattttagaaggaccgacatgaaaccatctgatatgaatgggcttttccaccctttatggaaa

SEQ ID NO: 388917 - DNA, 558 bp, Oryza sativa
gctgcagcaggaggaggaaaacgcaaggaggcggcgggaaacgggcgtgggagaaggcagcgtgacattgacgatggaagagtacgacgagctgagccggtgagcacgggagacggaggagatcgccgggaagcgggtgacggaggcggtgaagctgatcaaggaagccaaggacgcggaggtgcggagcctggagaagatggcgcagctggcgaagcaggtcgagcagaggaggcaggcgctcgaggcggcgaccatggaggtcgaggaagcggagttcagtaagctggcggcggagcgggagctcaggcaatggcgcgccgagcacgagcaccagcggcggttgaccggcgagggcatggcgtcgccgcgcacggggctcgcggagatctccgtgttcgacggcggcgaggggcgcgggaacccgcacatactgagcccgagaggagggtatatgccgaggactgatatggcggcggcggaggtggaggcgggcgcgaagcagaggcctaccttcttcccgcgcatggtgatgtttctggcgcgcaagaaagctca

SEQ ID NO: 388918 - DNA, 452 bp, Oryza sativa
agttcccgggtcgacccacgcgtccgacagatttggtcacaagttcccatggccacctgaagaaatgttctatttcatggactcagggtacccaaacaggccgggttatcttgcaccatataagggaataacttatcactttcaggaatacaacgaaggcataatgccccaaaataggaaggaatactttaactactgccattcttcgtgtcgaaatgtgatagagaggtcctttggagtgttgaaaaataaatggaggattttattccacttaccaagctatccacagcaaaaacagagtatgataatatgcgcttgcctagcattgcataatttcattagagatagtaaactagccgactgtgaattcgacatgtgtgaccaagatgaaagctatgttccattgcctgagcaaagtcctcaatcaaatgatccaaccagctctttggata

SEQ ID NO: 388919 - DNA, 809 bp, Oryza sativa
  unsure (1)..(809): unsure at all n locations
ccacgcgtccgctatctttgaaattcctggagcaaaggaggttgccattgaaacagcatctttctccaaatatgctggattcactggtgtgcgtttgggttggactgtggttcctaaggagctccttttctcagatgggcatcctgttgctaaagatttcaaccgcatagtctgcacttgcttcaatggtgcatcaaacatttctcaagccggtggtttaggttgtctatctccagagggtctaaaggccatgagtgacgttgtcggcttctacaaggaaaatactaaaattattgttgacacatttacatccacttggattccaacctcctacggtgccaagaatgctccatatgtgtgggtgcacttccctggccgtaattcttgggatgccttcgccgaaattcttgagaaggcacatgtggttactactcctggtagcggatttgggccccggtggtgaaggcctccgtaaggggtcagtgcatttgggcaccagagaggaccatttattgaagctgcgagaagactgaagcagctggtacaaatgagcagtgatccggcctttatattctcaacctcttggggagccatatcaaataaaaccaagcagagttcgaagacaaaatttactctgtcgggctatcagtagatgttagaattgaaacctaatactttataggcagttgttctgttccgctcggtatttatccantcagagccattttacantctgaacttctcttgttgtttagccctgatgcacctgagtgaatngcaancttatttatctccaaaaaaaaaaaaaa

SEQ ID NO: 388920 - DNA, 708 bp, Oryza sativa
  unsure (1)..(708): unsure at all n locations
ctttcttctccccaaagaaagaagcgagagagagagagagaaagcttcgcaggcgacgatggcgagcggcggcgtggtgaagaaggagatcggcgggaaccacgacgtcctccgcttcggcgtcaacgacagcgtcaagggggacctcgcgccgccgcacccgctccaggccagcgtccacaaggatgccaagttctgggcggacaagaagaggttcggcgcggaagccatctacggatccgccttcaacatccgcaaggatcttgatgcccaaatcctctccaagttccaaaggccccctggtgcattgccgtcatctatgctaggatatgaggcactgactggttccttagatgattttgggtttgaagattatcttaacttgccccaagattctgaaagcttccgtgctcccgacatgcaccacggaatggaggttcgcctcggtttgtcaaagggacctgtttgccctagtttcaattgatttctcaaaaatgtatttcttgtcttacactgcgctcctcgttcagtatctatatcggtctttagaccgtgaccgtgaccgtgacatgtaagaactataggtattgcatccgtttgaggagttctaaaatcgaatttaatgttatcatgtttgaacttatgtccggtttgctggttgctgtggtcgaatgcacttaagaaaatgatttgctcccaaaanaaaaa

SEQ ID NO: 388921 - DNA, 1286 bp, Oryza sativa
  unsure (1)..(1286): unsure at all n locations
tcgttaaggggcaagtgtgagcaggcggcggcggagccatgccgatgccgtcgcgggcgcggcgcaggtccaaatcccggtggcctctcggcgagccccctcccggcctcttccccgctagggacgacctcctcctgcgtgctcgccgtcgtctccatcgccgccgcagcagccgctgcctgcagccttctcaaccgccgccccaaacccttgtgcgacagcggcggcgccgcctatacccaccatgattcatgccaaccatgccctccccatggacgatgcgtagacggaaacctggagtgcgtccagggattcaacaaatatggcaacctgtgcatagaggatgggctggtcagccaaactgctacccagatttcacagttgctagagcggaggatctgcgatcaatatgcccgtgctttatgtggcccacctgccaaaatcttgttccaagagctcgatatcttaaacatggctgatgagctgttatccaagggttttgttggcctaccgcccgcgcgtccgaaggttgcaaaaattaaggttctggacagtgcgcgggccttctttgagaaaacattcagctccgacggagtcgaagagtttaaatgtccagacctggttgccgagctttataggcccctgacctgtcaaattcggcaatggatctcaagaaatatcatgtctgtgacagcctttggtgtcctgtttcagcactgctctggattctttggactatttacaagagacaagcattatcaaagagggccgaacaaatatatgctcaggtgtgtgaggtccttgaagataatgccatagatgcaaagattggcaactctgaatgtgagccttgggtggtcacgtcttggctgcgagatcatctgctagtcccacaagagagaaggaatgctttcctttggaagaaggtggaagaactaatactggaagattctcgcatagatcaatacccgaaagtggtcaagggagagtcgaaagttgtttatgagtggcaagcgagcggctcgctcagtggaaagaaaaaggttaagaagatgcaaggtgtagcagcaggcaagtcaagagccgatggtgcagctggcggcgccataaaacttgctgaagaactggatgcaggctagctagagctgccatgcgttatgtatgtacaaatgtttctcaagctactaggagagtatatatcatgatgtatgcttggaatgtactaaattaattgagttaatggagtacgtggtgtatatgtnnnnnnnnnnnnnnnnnnnnnnnnn

SEQ ID NO: 388922 - DNA, 379 bp, Oryza sativa
ccacgcgtccgcccacgcgtccgcccacgcgtccgggagaatgtgttggctgagatggtcatctctgctgtaccaagtatcgaaatggtccgttttgtcaattcagggacagaagcctgcatgggagcgctgcgccttgtgcgtgcattcactgggagagagaagattctcaagtttgaaggttgttaccatggccatgcagattccttccttgttaaagctggcagtggtgttgccacccttggcctcccagactcccctggagtccccaagggagccacatctgagactctaacggcaccatacaatgatgtcgaggcagtgaaaaaactgtttgaggagaacaaagggcagattgctgctgtcttccttgagcccg

SEQ ID NO: 388923 - DNA, 523 bp, Oryza sativa
ccacgcgtccgcaaagccaaagccacacatccctacgcgagcgagagaagaggaggggagcagcagcagcagcagcagcaatggcggtcgtcggcgtcctcgcgctgcagggctccttcaacgagcacttggccgcgctgaggaggatcggggtgaggggggtggaggtgcggaagccggagcagctgcaggggctcgactcgctcatcatccccggcggcgagagcaccaccatggccaaactcgccaactaccacaacctgtttcctgcacttcgagaatttgttggtacaggaaggcctgtctggggaacttgtgctggactcatcttcctagctaacaaggcagtaggccaaaaatccggaggtcaggagcttattggaggactagattgtactgtccaccggaacttttttgggagccagcttcaaagctttgaaacgggactttcaagtgccaatgctttcagatgaaggaaggagggagccatacatcccgtggtatttttttaccggggcacctg

SEQ ID NO: 388924 - DNA, 579 bp, Oryza sativa
ccacgcgtccgcggacgcgtgggcggacgcgtgggcggacgcgtgggcggacgcgtgggttcaaagagcttgtgtgttgaaagattgagcaaacgtgaagtgcagaaaaagcattaagaatttttggagtctaaaagaggaaattgtattctttctctgcggatggcgtggaaacctctccttccccaaggagaagcagatggaggctctggtggcacgtctgaaggggcaatagcaaggctgcgaccaagatcaagagttggatgatgtttttcctaccaaaaaaagtttgaagtccgtgttaaagtaagagttgtcaatttctgctatgggagttcttacccctttttggttaggttggctatcctttaagtgaccctagctggtccggatgtgtgaccatgtgagacttcccttttgctctgagctcatgtaaaccttgtaatcccagcgaacctgtcgttgtggctttcaatataagctacggggtaggtctgaggaccttcttgaaaaaacatttattcctatgttgaatgaattgtctagaattagatccaaaaaaaaaaaaaaagggcgggc

SEQ ID NO: 388925 - DNA, 692 bp, Oryza sativa
  unsure (1)..(692): unsure at all n locations
gatttcgtcaagagcatgcctgtggagccacacccaggcttatggggtgcacttgctggcgcctgcaagatccatggcgaggtggagctcggtgaggaggttgccaagaagctcattgagttggagcctcagcatggcagccggtacatcctcctgtcaaacatatatgccacctcgaacagatgggacgacatggctaatgtgcgcaggatcctgaaggatcgcaaggtccccaagggtacaggcaatgccatagttggaaatgattctcagtcttcaggatatgaaatcgattcgcgattagtgcttctttggactgagaaagtgcattcagtgtgactttgcacaagctgcgttgtggtagggaggggattgaaccacccaaccttggagacaccattggtactggaaacaagccccccataaggatatttactttcatggggcatttggaaagtgcataacgggatatattctcagcattcttgatgggttagtttgcaagtgcttggagaaaaaacactcagattatgaagaaatggtgaccaagggaagaaccaccaccttggagacaccattgtactgaaacaagcccccctaaggatattactttcatggggcatttgnaaagtgcataacggggtacattgttggtagagacggatcacttcattggaattttcaagagcact

SEQ ID NO: 388926 - DNA, 818 bp, Oryza sativa
ccacgcgtccgctaggatattccaagccttcagggtggaatcattccacagaaagaaggtcgtggaatatggagatgatgattgtggattatctgatgaacacacattttcacttatttctcttcaaaaggtcaaacaagggcaacatgatacacgtttgcattctgctgctgtacgtatccaaaataagttccgaggatggaagggaagaaaggagtttatgatcattcgccagagaattgtgaagttacaggctcatgtgcgagggccgcacgcgtgggaaaactataaaaaagtagtctggtcagtaggtattgtcgagaaagttatattgagatggaggagaaagggacgtggtttgcgtggctttcgacctgagaaacaattagaaggccagacacaaatccagcctgcaaaaacagaggatgaatacgattacttgcaggatggctgaagacaggctgaaggctgtctacagagggcactggaccgggtgcgctctatgacacaatacccagaagcaagagaacagttccgtaggcttacaacttgtgttgctgaaatgcaacagtccaggatgatgcacgacgagatgctaagtgaggcagctggtgctgacggaagtgatttcatgaatggactggaggacttgatatgcagagacgacccccaaatgactgccatttggtgaagtcgaagttgttacatcagttaggccgatcattgcccttgtcattgacatattagccttgtaaattctttccgtttgagttcactcactgattaatatctagctcatgctgttagtattatgtaac

SEQ ID NO: 388927 - DNA, 544 bp, Oryza sativa
  unsure (1)..(544): unsure at all n locations
ggggaagttttgtatccaattaacaagngctntntcaganttgcagacaagntgggaagtatggcaggagcgtggacgaatcctcttccggaggtccccatctagtggacgacacctgaattgagggcctcaggccaaagtcacccccacagaagaactaagggcagcagccattgggctctataggtgtggttgcaagtgcacttacaagcgagcaacctggtagaatatccccgagatcagtagttaccgtgattggttcagacttgagaggctaattttttcgtacctgtagctttattacatcgcatttcctcttattgaagtttagccgaggtggtgcggatggatattcagtctaacagactcaatgaacgctttgttgtatgacttgtacagtactggctgctcgaacaggatggttcagcttccagaaatttggcaacgctccatttcaaagaaaatcattcagtatttgaaaaaaaaaaaaactcgagggggggcccggtacccaattcgccctatagtgagtcgtattacaatt

SEQ ID NO: 388928 - DNA, 1457 bp, Oryza sativa
  unsure (1)..(1457): unsure at all n locations
ccacacacctagtcagtcatcaaagtgtgcgtgcttctccagaacagtgagagagagaggggcaaagggaggcaggataaaaagccgagctgtaggggactaaagaagaaagaaaagcatagaaaagaacggcaagcaagcagctcgaggcacccgcgctagtacataaagccaccgaggtgcgatttcgcgagctctagccgcttccacttggccatttcccatctgcctcctggagctttagctctaactctagttctagctctagctccggctacgtttgcaactgttgtttatctcctggtggatagcatttagactcttgaagactttgagctagttaaccttatggaagaagggtccaacaaaagagaaggacttcctcctcaactcctagatctcatcccagatgagaaggaatggaagctgagagaagcattaggtctagggagatcaagaaacgcaggcttcgacggtgaagaagacaagaagctagacctaaagcttggtcttcctggttttatagaagatgatgaggcagaaaccttaagagattacaggctacagcaagagagcccatctctctcccttagtttctttccaaagcactccaagaccaccagcagcactactacgacaactggagcaaagaggggattcatagacacagttgaggacacaacagaaggttataacgaccagaagcagcagggcaagggcaggatgtgggaaggaacttgcagtggaggaaatgatagcagccgtgagtgagagggagaaaggatgctgccccccaccaccaccaccacatggtgctcctgctacacctgcgcgcaacagaccacagacccagggaagaggagctgcagcaccagtggttggttggcctccaattcgatccttcaggagaaaccttgctagtagtagttcatccaaacattcccctgaaccacaaaatgataatgccaatgcaaaggtgacgctcacctgcaagaaaaaccctcttgtaaaaatcaacatggatgggatccctattggaaggaaaatagaccttgcagcctataacagctatgatgggctatcgtcagctgtcaaacaactcttccatgggtttcttcaagctcaaaaggaccaaactaatgcgcaaattgcacagcaaggtgcagatgacaaaatattttatcaattgttggatgggtctggtgaatatactctagtttatgaagacagtgaaggagacaggatgctggttggggacgtgccatggaaagtatttgtctcaactgctaaaaggctgagggttctaaggagttcagagctttcccataccctggtaagacaagctagaccacttaaagtcgtgtccaaatctttggtgtagccataaaaaattagctttcgctaaatttgaatgaagatagctacacttttatgttnnnnnnnnnnnnnnnnnnnnn

SEQ ID NO: 388929 - DNA, 983 bp, Oryza sativa
  unsure (1)..(983): unsure at all n locations
gagctgcagcaccagtggttggttggcctccaattcgatccttcaggagaaaccttgctagtagtagttcatccaaacattcccctgaaccacaaaatgataatgccaatgcaaaggtgacgctcacctgcaagaaaaaccctcttgtaaaaatcaacatggatgggatccctattggaaggaaaatagaccttgcagcctataacagctatgatgggctatcgtcagctgtcaaacaactcttccatgggtttcttcaagctcaaaaggaccaaactaatgcgcaaattgcacagcaaggtgcagatgacaaaatattttatcaattgttggatgggtctggtgaatatactctagtttatgaagacagtgaaggagacagggatgctggttggggacgtgccatggaaagttatttgtctcaactgctaaaaggctgagggttctaaggcgttcagagctttcccataccctggattggagctactgctagggtctagccgtctaggagagtcaccaattgctgaaatgctgggatcttattaaccattcggaatgaatgtgtgcactcaagccagtccattctccattttaggactacccctattttgcctatatagatgatctactgagatgagttggcatacagcaaatgcaaggaaatggcaatctgttttgtaaattaggttaccttgctatgacatgttgcttaattcaattcgaagcgattttggttttatcggggagagccgcatatgtagacttgcaggtcacccatgtaaagtgccttgttctgcgtgataaatttgtattaatcgctgctgcaacccgacatgcagatctaatgtcaccagcgtgtctcagaggacagcaactaggctaacctgatagcatcaagtcatcactccacgtggaatatgctactngtnggaatttttttttttgaaaaaaaaacagnattatccaaaaaaaaaaaaaaaaaa

SEQ ID NO: 388930 - DNA, 816 bp, Oryza sativa
ctcctctatccatatccatattttccccttttccatccgcgagcgagggagtgagtgagcaatcgagatcgagatggaggtggcgagaggcggcgggaagctgaacccgtgggcggagctttcgtgccggcgggctggtcggccacctactggcgctgcggcggcgtcgctgccgtggagccggctgtggccgaggtggaggacttctccccggagtggtggcgcctcgtcggctcctccccggccttccgcgaccgctggctccgggactactccgcgctgggcctcctcgacgacaacgacaacggcgacggctacgacctcgaggggttcctcctccccgacgacctcttctcctccacccctcatctggtgggagaaccggcggatgagaaggagggcaagggtttcggcggcgccggggggaagaaggtgaagggcgggtccgccgaggtggtggcgtggggcatcgacaagtggtggcgcgcgcactcctcgccgccggaggtgcccaggtacgccgacaaggcgcccagagggtcgccgccgccgccgctagggtcaacccccgccccatccagcagccgcgctgagcgtccgtctccgccgccgcccgcgtaatcatccatccatccacccatcttgacaaacaagcagaaaaaaattagggaaaaaaagggtttgttttgttattttcgatctactcctagcttttttgctaatctcgtcgcgtcgtcatcgtcgtcaagatctgggttttggtcaggatctatggagctgcgagagatctcccctgtgttgtgtacagaatcatgt

SEQ ID NO: 388931 - DNA, 559 bp, Oryza sativa
ccacgcgtccgggagaaaaggtgttatctgccctgagtgaagctggactttttacgaacagtggattgataaaggacaaggttctcttctgtagcccagaaaatggccgcacctcttttgtgcggcaactggaacctgattggcgcagggatactagtccagaaattgttcatcagctagctaggtttatcaaatatcaactacatatttctccacaacgagcagaaagagtagcatccaatgttttcagctctacaagcttggaacaattctttggaggccttgatcagagatgataatatgaggtgagctccagcaaacaatggcatagcgagaactgagacgaacatcattgttcattttttttccttgaatgatggaactcgtttttcttgtaccatgtgtaaaagtcgtgtcatgttaaactggttctgcaactccccataagctatggaaagagatagcatctgtagcataatccatgtatcaattgtgttcctgtataaccgaaatacttaaaaatggcattccagtatttggttcgcccattcattcccag

SEQ ID NO: 388932 - DNA, 1209 bp, Oryza sativa
ggcatcatcaggtcaactactgcagaatgctccatcgatgctttcatcatctcagtccatgcagacacctttacagatgagcagcaaagatttcaaggcagttgaatcaaaaactagggttgtagaaccattgctacctgatccaccgtcacgtgctcttcctgaaaataatgagcctatattgccattgccgaaacaaacacctcaaaagtacaatggagctggttcacacagcaatcaccactacaggggccgtggaagaggtagaggcagcgcgttttcgcagtcagtaacaaattttactgaagaatttgatttcatggccatgaatgagaagtttaacaaagatgaagtctggggtcatcttggtaagaaatcccattcaagggacaaagatggtgagctgggcgatgatgtgtttgatgaagacctggaggatgaggaaacagaaaatcctgagctagctgctaagcctgtttatgtcaaggatgacttttttgattccctcactagtggaacatttggacgtggagggcaaaacgggaggtcaagattttccgaacagcgcaaactagatacagagacttttggtgatttcccaaggcatcgccagccctatcgtggtgggggggcgggttaccgtggcggcggtcgcgcccgtgggtcatactacggtggcagagggtatggaagcatgggagcaaggggtgggcagggtaattcttaccctcaccgtggttcctactgaaggggctgatgatgatagcagatatgtactgtcagtcataccggctggtgctgtatccttcaccatgatgcaccagctcttactgttgtccaaataaatggaacttagcgtgccccttgtgttggcaggggccgtataggtttgatgtccggtggtttatacccctagagttgtcagtagatgggggcagctgatgctctctcatcatatatagtaggtgcaaagtgtgcctcttactctttagggtgttaccatgcgagtgggatttagtttgtataggcggatctcattcctggtacaccatgctgggcttaactcactcggtgactcttttgtctcttttctagacttagctgtgttgtttgtttttgtacctttatatgctaaagagattgctttgactttgaatttgaagtgcttaatcatcaagtttatcatattaatatggactgttgaatttg

SEQ ID NO: 388933 - DNA, 442 bp, Oryza sativa
ccacgcgtgcgcgagctagttgccgccgttcctagaactgcgatggccgccgccgcgccggaggaggatgagggattggccgtcgacaccggagatttgatgcacctccgccgccttgtcgaggagaaggacggcgggccggcgtggattcacatgatggacaagacgctgcccacgatgcgctaccaagcatggaggagagatcctgagggtggcccgcctcaataccgcagtagcactatctttgaggatgcatcgccagaagttgtcagggatttcttctgggatgacgagttccggattaagaacacttgggacgacatgcttcttcagcacgatacgttggaggagtgcacaaagactggaacgatggttctccggtgggtcaggaagttcccgttcttctgcagtgacagggagtacattatcggtcgcaggatat

SEQ ID NO: 388934 - DNA, 550 bp, Oryza sativa
aaacctcccttcacaaaagaaccagagagaagaggcgggaagcgaagccgcagcccgccactcgcctccgccctccgcgcgcgcgaacccctccctcggcggcggcgacgaccaaggcggcggcggcggcagcggcgcaagaggacgcggtagcccgatggcgccgctcgtgccgtcctcgcagccatgggtggagaaataccggccgaggcaggtgaaggatgtcgcgcaccaggaggaggtggtccgggtgctcaccaccaccctccagaccgccgaccttccgcacatgctgttctacggcccgcctggcaccgggaagaccaccaccgcgcttgccattgcttaccagctctacggtccagagctctacaagtcaagagtgctagaacttaatgctagcgatgatcgcggaattaatgtggtgaggactgagatcaaggactttgctgctgttgctgttggttctgcacgaaaaggcggttatccctgcccaccatacaagattattatactagatgaagcagattcgatgacagaagatgcccag

SEQ ID NO: 388935 - DNA, 566 bp, Oryza sativa
ttttttccctttttccaaatatacttcgccactgcaacgcaaaggacgaagaactcgagtcaagtcgccgacttttggagttctcctcgccccagctcggggttgctgctgctagccgtggttggtgagacggttcttggagaagggggatttcttgaggtgcttttctgggaggtgtaaccaactaaattcctatgctaccttctggttgatggccgtccctcctgttgaatcagaaacaagaagtgaagaaacagataatttccctttacttgcagaccacatggaaaatactggacatcaatgcacatgcagttgatatcccatgggattcttcaccatcgacatctcgccgagataatcataatggatttgatcaattacctcgtatcttagaaggttctcctgggacatctactccatctaactctcagaatggtcctctagcaagaagagatgataatcgtggtcgtcgtcagcctagtcccttgaattctggttgctggatctcagttgagctagttgtaaatgttagccagatcatagcagctatttgtgttctgtca

SEQ ID NO: 388936 - DNA, 436 bp, Oryza sativa
  unsure (1)..(436): unsure at all n locations
cagagactcgtcctgctcgtgctcttaaggcaaacccagctgcattgtcncggtcgcagtcgttccaggagacttcttgactctttacctgttgaatttcctatagtttttgtcagcacagtgtgtgtactgtaaaatgtgtatagcagtagaggttttgcggtattcagaaggatcaggagagagctttttgtgcagccactaacttgaggtggataggagttgcaaagggctttcatgagaaactacatcgagatgtatatgtattgtaaatacttgacaaactggttgtgtacatctaggttaagtcaggaaaatacactcacctggtttagctctcctagtatattatactacattggtatgtctatctttgtttttgaagaaaaaaggagtgcaaaagattcagattnnnnnnnnnnnnnnnnnnnnnnnn

SEQ ID NO: 388937 - DNA, 838 bp, Oryza sativa
ccacgcgtccgcccacgcgtccggtgttccatgaatttggtcatgcgctgcagcacatgcttaccaaacaagatgaaggatttgtttctggtattcgtggagtagaatgggatgctgtagagctgccctctcagttcatggagaactggtgctaccacaagaatactcttttgagcattgcaaagcattatgaaacaggcgaacttcttccagaggaaatttatgcaaagcttgtcgctgcaaagaatttccgtgctggcaccttcagtttacgtcagatacgttttgctagtgtggacatggagctgcatacgacttacgatccaaatggttcattgtccatatatgatgtcgaccgaagagttgctgagcgaacacaggttcttgctcctcttccggaggataaattcctgtgcagctttagccatatatttgcaggaggctatgcagctggatactacagttacaagtgggctgaagtattgtcagctgatgcattctcagcatttgaagacgttggtttggacaatgagaaggcaattgaggaaactggcagacgattcagagaaacagtccttgcgcttggaggtggaaaatctccactcgaggtggttgtgtctttccgcggacgggagccatcaccggaagctctgctcaggcacaacggcttgctacctgttgctgcattgtgataactcatgctcgattgtccccttcttttttcttttaacttgcgaaaacggcttgtaagatgttattgattgatggcatatcagcaacacgctaaaagtgccgtgtcctgcttacaacatgaaaacaagttgctgtcacaaccatt

SEQ ID NO: 388938 - DNA, 687 bp, Oryza sativa
  unsure (1)..(687): unsure at all n locations
ccacgcgtccgcaagctcagcttggtattggttcagttgtcttgggaactgtcgagagcctgaaaccttatggtgcatttatcgacattggtggaatcaatggccttctccatgtcagccagattagtcatgaccgtgttgcggacatctcgacagttctgcaaccaggagatacgctcaaggttatgattctaagccatgaccgtgaaagaggccgtgttagtctttctactaaaaagcttgagccgacacctggtgacatgattcgcaatgccaaagcttgtttttgagaaggctgatgagatggctcagatattccaggcagaggatagctcaagtcagaggcaatggctcgtgctgatatgttaagattccagcctgagagtggattaactctcagttcagagggcatcttagggccattatcatcagacacaccttctgagggctcgggagaagggcaaaccacagatgaatagcttcaataggaagattacgtctgagtagaaagctgtgatggtagctcatcaactcattttcccacgatctaaaaggcatgaagaagacctattgtattccaaccatttcccatcttcgatctgtgcttgtatcaatcaatgtgtatgaaagtaaagttactgaaagaaatggntgttgcttcccnnnnnnnnnnnnnnnnnnnnnnnn

SEQ ID NO: 388939 - DNA, 526 bp, Oryza sativa
  unsure (1)..(526): unsure at all n locations
ccacgcgtccggagacagtgatcctgcagttcggtaagattgaggacgacgcgttcacgatggactaccggcagccgctgtcagccttccaggcgttcgccatctgcctcacaagctttggcacgaagctggcctgtgaataagtgtaacttttgggtttgatgatgatttacaccgtgcatatggatgggatctccgttgatagcgcggatagcctgaagccctgaactatagcgcccctgttgaaccaggagagtaaggtgtaaaagggcgacaggggcacactgcactgaacacaccgtgtccctaactctcgactctctcttctctttttctctcgtctaatgatgtggatggacttggtttatgttgatcttggagagatgatggtataactctttgttgtaaatggcactccttttcacttgctgatgtaccccgtgcataatgaatgtaccagtggccgnaaattcctgcagccggggatcactagttctagagcggcgcaccggttgagctnnagtnn

SEQ ID NO: 388940 - DNA, 515 bp, Oryza sativa
  unsure (1)..(515): unsure at all n locations
ccacgcgtccgcccaatcccgtcgcctccggtcgccaaaccgggcaggccgctcaccgtcgcggcgtgcagcaacagcagcagcagctcctcctcctcctccccgtcgtcgacctcgtgctcggctgcctggagtctcccggtggcgacgtcggccggcaggagggggctgctcgcgctgggcgcggggttcctggcttcccctgggcttctgtgccccgccggcgacgccggagcgacgcgcatcgagtactacgcgacggtgggggacaagctgtgcgacatgaacgtcgtcaagtcggggctcggctactgcgacgtcgaagtcggcaccggcgcccagcccccgcgcggccagctcataaatgtacactacactgcaagatttactgacgggatagtgttcgacagcacctacaagcgaggacggccactgacaatgcgccttggcgagngcaagatcctccgagggcttgaacagggaatcagtggtgtcnntggcctgtcaccaatgct

SEQ ID NO: 388941 - DNA, 908 bp, Oryza sativa
  unsure (1)..(908): unsure at all n locations
ccacgcgtccggacactaccagggagggtggaatagtaatttcagagagtattgcacaagggggaacacaagaagctgaaatgaagaaggatatcagctatgaaaaggaagtggcaatggttgagagaatcagttacaaagagcaccaagatagtaacgtaaagcaggcgaatggcagcagcgatgagagcgccctggttgttcctgagagaaccagtgtccaggaaagcaaggaggaactattaaactgcatatccagcatgtcgaaaagcgcggaggggctccggcatgggttggactccctatcgaagcgcgtaggcgacttctttcagatcgtgcttacgggacgtgatgcattgctctgcaacctcaggatctcagatgcagcaagcaaggtcgccgaggtcagctcttgatattttatgtaaggtttcttgccgtataatgtttgtgtggctaagtgtgcgcccagcttggtagcacagctttgaacattgtgcttctgacctgtggcccctgctcagccccacagaaactaagctggggccacatctcagaagcattgtgcatagtcctgtgctggctagttgtgcttgtgccgtgcaaatcttctaagtccatcggcatcaggctctgtgactgtaaactcagccttgtcaagtcctatacagtcattttgtttactttttggtaagagttagtgctctactcgttgtagcgcaggtcatatgcgagtgtatagaggcgtgagtgtagtaactgtatgtaagctggagtgtgttagcaatatacgagtagattaatgtgttctgcaaagagcagatcattgtgtgctattgctgaactagcaaatgatatggccaacttgtnttcnnnnnnnnnnnnnnnnnnnnnnnnnnnnnnnnnnn

SEQ ID NO: 388942 - DNA, 526 bp, Oryza sativa
ggcacgagcctgtttgtggagcaaatacgcaactgtggtgggacatgcaatccttgcggcaatcctatggacccgctcacggtcgattgatctgacaagcaaaaactgcaatcacttctttctacatgtttatctggaagctgttctacgcggaataccttctcattcctcttgtaaggtgacaaaggcgattactccaggtagattggaattggatcatggctggatggatgaacggacggcgccccataaaatcacctgcaaatcacccggtacacatgttgacatcctgcatccagatatgatattgatagatcatcgtcggcaccatcattcctctgaaagatttcgcacggcatttcaacctccaactcccaacgtaccccaaaaaaagtaactaggccaggtgagcatctgctagcctatagtagacgttattggaacagtggtagtacttgttagcagcagtaataataatcatcataataaagctctgggttactgtccgctcaaaaaaaaaaaaaaa

SEQ ID NO: 388943 - DNA, 1431 bp, Oryza sativa
  unsure (1)..(1431): unsure at all n locations
cggacgggactatgactcgccagcagcaaccacggcggcgcttcggatgcacggcggcggagctccacgacgaccaccgccatcgccgccgcgcgggtagcacatgttgcatgagcagcacgcgccgccgccgcagccggagccggaggtttcgctacagctgtcggcgcccgccaccgccgccgacgatgtcgctgcaggcgacgacgaggaggtcaccgtcgtcaccacgtaccgcgacatccaccctctgacgccgccgtcgccgacgacgacgacgacgccacccacgcggctcgggtccgccgcgtactcgtgggacacggccagcagccaccggtccgtgtcgtccgaggagcagttcatgacgatgagccgggagttcacggccatggtcgccgccgggacgaccatgcagactggccccaacgacggcaacaacggcggtgaccagctcaccagcatcggcgaggacgagctggaggagaccaacccgctggcaattgtgccggacagccacccgatcgccacgccggccaggagcagggcgtcccagctggaggttgtccccgcggcagggccatcgccggcgccgccggtggaggcgaggcaggtgaagaaggaggaggtggagacgaaggtgtcggcgtggcagacggcggaggtggccaagatcaacaaccggttcaagagggaggaggttgtcatcaacgggtgggagaccgagcaggtcgagaaagcatccgcatggctcaagaagatcgagagaaagctggacgagcagcgcgccaaggcgctggagaggacgcagaacgacatcgcgaaggcgcggcgcaaggcggaggagaagagggcgtcggcggaggcgaagagaggcctcaagctcgccaaggtgctcgagctcgccaacttcatgaaggctgttgggagggtgcctaccaagcgatccttcttctagcttcctgcagccagcctctgcaaaccttcgatcttgatcgatctgctgctgctctgtttctttcagtgccttttgtgtgctggattaatctagctgccgttcttcgtgtgatgtttgcttagctgtgcgcatccgagaacctaattgtaaaaaagattttaaaacaagttgtatatttgctgttgctgctgttgccctctgctgcttgtgatcacagagtggcccttgtttttcccctggcttgtattatccatacggcataaatggtttgtttgctcaaatcttgcaaacattcagttcgacactagtactagcacttcatttttcttcagctctccatggatcaatctagctcaatttctcaaannaaaaaaaaaaagatatacttatttactaaagcttggattgaattaaaagtatattgtttacattagaacagaggaacgcattgattgtcctaagattaatcacat

SEQ ID NO: 388944 - DNA, 724 bp, Oryza sativa
gagagaagagaagaggtcaagaagagaagcaagaggagagaggagaatcgctgcctctgccactggaaagcagcagcagcaggggagaggcagcaggcagcagcagaggagaagcaagaagcaagaaagagagagaaagcgttgggacttttcattggatcctccgcttttgggaggagcagcaaaggtctcgtctttcctctcttcttctcttccttgttgccggcgaggaggaagaagaaagaggaggagatgttcccgcctgggctgatccaccaccggccggacggcggcgaggcggggcgtgcggcggggggagggcccagcctggtgctgaccgccgatcccaagccccgcctccggtggacggccgacctccacgagcgcttcgtcgacgccgtcgcccagctcggcggccccgagaaagcaacacctaaaactatcttgaggacaatgggtgtgaaggggctcactcttttccacttgaagagtcatcttcagaaatatagactggggaaacaatctggaaaagaggcatcggagcaatctaaagatgcatcctatcttctagatgcccaaggtggaatgagtgtgtcgcctagagtttctactcaagatgttaaagaaaatcaagaggtcaaggaagcattgcgagctcagatggaaatgcaacgaagactgcatgaacaagtggaggtccagaagcatgtgcagatcagaatgg

SEQ ID NO: 388945 - DNA, 461 bp, Oryza sativa
ccctggcattgcccttgccccagatatcagaaaaccatgctactatcacatgcaagaataaggccttttatgtgactgataatggaagtgaacatggtacatggattaccgacaacgaaggtagacgctatcgcgtacctccgaacttccctgtccgtttccatccctcggatgccattgagtttggttcagataaaaaggccgtgttccgtgtgaaggtgctgagcacgctcccatatgaatctgcaagaggagggccgcaaatcctgcaggcagcatgaacgagagacttcagtcagccatggctgctgtcatcactcatcagctactgtacagcatccagtaaaacacagtgaattttgcactaaaatgcaggttccacttccagacaggattttgaatagctttctctgacggattgaaattgcagttctccatacagaaactgaggtgtacaatat

SEQ ID NO: 388946 - DNA, 569 bp, Oryza sativa
cgggtcgacccacgcgtgcgccacgcgtccgggcctccacgctcgcctggagctccgccgcctcctcctccgccccctcctcccgcctgccgccgcgccgctccccgtcgctggtcgtcgtcgcccagggcaaggtcaagaagtatcgccaggtcatactgacagatgacatagcagaggtggggaagaaaggggacacgcttaaagtgagggccgggttctaccgcaacttccttctgccaaagggcaaggcaacgctgctcaccccagaagtactcaaggaaatgcaagtagaacaggagaggatagatgctgaaaagaagcgggtaaaagaagaggcacagcaacttgcccgtgtttttgaaactattggggcattcaaagtgccacgtaaaggtgggaaaggaaaacagatatttgggagcgtcacagcacaagatcttgttgacatcataaagtcacaacttaaaggggatgtcgacaagcgtctcgtgacagtgccagaaattcgtgaattggggaatacattgcagagattaagctttaccctgaagtcacagctcaagtaa

SEQ ID NO: 388947 - DNA, 1112 bp, Oryza sativa
  unsure (1)..(1112): unsure at all n locations
ttttggtggcggcgggggctgcggcggcggcggaggcggagcacatgcggaggctccacagccacgcccccggcgagcaccagtgcagctccgcgctcgtcaagcacatcaaggctcctgttcacctcgtgtggtcgctggtgcggagcttcgaccagccgcagaggtacaagccgttcgtcagccgctgcgtcgtgcgcggcggcgacctcgagatcggcagcgtgcgcgaggtcaacgtcaagaccggcctcccggcgaccaccagcacggagaggctcgagctgctcgacgacgacgagcacatcctcagcgtcaagttcgtcggcggcgaccaccgcctcaggaactactcatccatcgtaactgtccatccggagagcatcgatggaagaccagggacgctcgtgattgaatcatttgtggtggacgtgcctgatggaaatacaaaggacgagacatgctactttgtcgaggccgtgatcaagtgcaacttaacatctctcgccgaggtatcagagcggctagcagttcagtcacccacctcgccacttgaacagtagggtcatcaccggcacgggacatgcgaactggcatgaataagaaagcttcaaatggttgctagagatttaaatctttttgagatggtagtttcctccattgtcttcgataatatatgcccncttgtaaggattagntatgtagggttaattatnnctttaagttgctggctaagtgatgggcttaggtctttttagggaaccgctcctagctaccttgtagttatgtatgcatactgctagtagtatgtgtataaatagggaagcatggagtggtttttgcctctttggtgcacatgtgaaacaacctcaagagttctttttcctgcagttgaaaaaaaaaaaaaaaaaaaaaaaaaaaaaaaaaaagaaaaaaaaaaaaaaaaaaaaaaaaaaaaaacaaaaaaaagaagaaaatacaaaagaaaaaaaaaatcaagaaaagaaaagggggcgcccattttgggggttcaaaatttcagaccgcaggctggggaacaaataggtttttttaggggtcatcaaagtgaaattgctgggcccaattttaaa

SEQ ID NO: 388948 - DNA, 585 bp, Oryza sativa
  unsure (1)..(585): unsure at all n locations
atgtagccgagataagtatcttaggctgttgagttcatcgatgctgttncttagnatttaagaacaagattgtcagtaacatccaagttatgaaggaatgaatagggcaacggcaggggacatgttaggatcccatgatacaaagtttatacatttttactttgaataagagcgattgaagcattggtatgcgcagctatcaaccacggtgctctgataaaatctggtaaagattgtatgcatactccatacaacaatggaggtggaggaggatattttgctcgaaataagaagtttgaacttttattcgtcagacttctacttataactactttgatgattaaatcatggccgtgtagcttagttcttctatgccaaaagagcaagtagaactatcctaaaggtacccaccacaagtggtgtttgtgctttgtaccatacaaacaagactgtttatttactacagtatatagcttggaataaaaaagcaggtgcagatctgtgggtaatccggagtaggacatttgaatgggtgacatgctgtgttggttacccattgctacaggttcctcccatgacagggca

SEQ ID NO: 388949 - DNA, 1159 bp, Oryza sativa
  unsure (1)..(1159): unsure at all n locations
cgggaggccacgtcatcgtcgagtggaacgtggccgtcagcgtcgtctccgactgcctcccctcctacacctccgacgacaactccgccatcgtcgccaccgattccatcaagaacaccgtgtatgtgaaggccaaggaatgcacggagattgtctccatggaggaattcgcggtgattcttggaaggcatttcacctcgctgtacccgcagtctcagaggcaacggtgaccatcgccgagcgtccatgggagcgtgtggttgtcgatgggaagcctcattcccacgggttcaaacttggtgttgagaagcacgtcacagaggtcattgtgaagaagtctggaaacttgctcataaattctggaatccaaggatactccctgctaaagacaactcagtccgggttcgaaaaatttgtgagggatcgctacacacttcttcctgatacaagagaaaggattgtagcaacagaagtaactgcctggtggaggtatccttttgagcatgtttcccagattccatcaaagtcattctgcttcacacaaaggtatcaggacgtaaagaaagttcttgcagatacgttctttggtcctcctgatgttggagtgtatagtccatcagtgcagaatacactatacctgatggctaaggaagttctcaacaggttcccggatatagcatctgttcagctaaggatgccgaacctccactttatccctgttaacttacggaacaaagaacatccaggattagtgaagtttgctgatgatgtgtacctgccgaccgatgaaccacacgggaccattgaagcaacagtgagccgccccaagtcaaagttgtaaaagcaatcaatggtactggggaagctctcggtctggtttctgagggaaaaagaaggaactgtgttacaatcacatgggaaggggnaataaataaataatgttcagaaatgaattgtacatggccngctatagttacgccattgtaaatcttgtactgccttattgtatggaacctcaaacatgtgagaaaaagtnaacggcgtnatatatttaaaaacggagggagtacccacttgnacatttgaaggctnaaggttataaaatttcttctcctttgtacttnaaaaaaaacacaaccanacgctangncnnngcncn

SEQ ID NO: 388950 - DNA, 1013 bp, Oryza sativa
gcagaatgctgctgcacttaacaattaccagaatagccttagaagttcggtcgctttcctgagtttgcttcagcaggaggcatcaagcatgtttaaaggtcccacagcaatgcacaatggcattcagctggaagcatctagatccttccgtggaccaaaccaggtgcatctcgcgcagttccaacatccggcctcatttcagcagcctatgcctcagcagagcagcctccagggcttgggtgtgagcccacaatatcagcagcatgtgctccatcagttgctgcaagaggccaagaacactaacaaccgtgtcttggcgcagcagcagcagcaacaacaacttcaacatgctcctgctaacagtggtcttgcatcaggaggaacggctatcaccggcagcgccgctagcggggatcatatgaataacaacggcgcggtgaagggtgggactccaatggttacaacaggtcctagcagtgtgatcaacaatacagccagcatcctccccagcagaagtaacagcttcaagtcagtgagcagcaacccccaagttgcagctgctgcgggcggcggcattggcagcggcggccatgcggctacccccaaggctgatgctctgcatgagttggatgatcttgacaatcttgggaatctgatcagtactgaactggaggagagtgggctgttcctgggtgaccaggcaggtggtggctactcatggaacatgtgacaaatgcttgcctgcttggcttcttggtgatgatggaaactgccgtagattctagcttctcgtcttgttcttttttgttttgggtatgtggagtttttgtttggggtgtctgaaacagtttctgatgatgatgatacactgatgtaatttaagcgttatgtgcgctggtaagtgagttggcttggaatgctgagatcgaaccagagctgcttctgctagcacacatcgaggcccatcatactgctgaatgacaacgtctggcgattactattatttactttca

SEQ ID NO: 388951 - DNA, 819 bp, Oryza sativa
  unsure (1)..(819): unsure at all n locations
ccacgcgtccgcccacgcgtccgcccacgcgtccgcccacgcgtccgaacagatggttcaaccatcgaagacaaggaaagcgcgttagtttggcaccacgatgaggcagatccagattttggttcatgccaggcaaaggaactgcttgaccacctcgaaaacgttcttgcaaatgaaccagtcgttgttaagaggggccagcatatcgtcgaagtaaatccacagggcatcagcaaaggtgtggttgtggacaacctcttgtcatccatggtgagccgagggaaggcgcccgatttcgtgctgtgcattggggacgaccggtcggacgaggacatgttcgagagcatcgtttgcccgtcgaacagcagcgtcaagctcccggcgagcagcgaggtgttcgcctgcacggtcggcaagaagccgagcatggccaagtactacctcgacgacacggtcgacgtgatcaagatgctgcagggtctcgccaatgcgccagcgcagcggccaaggcaagtncagctgcgggtctcgttcgaaggctcactgtgacggagacagggattattctgcacagtataaaaaccaaggaggaaattccaataacaaatggaaaagatgatgatgattcagttcgtgtggtttaggggttagctgcagaagttacaggataaacaggtttttttttgtttttttttcttctttttctttcaacattttcagccttcttccatgcttgtatatgccccgtatgataaaaatatgcgagaaggtttcagccaccttgtatatgtagttgacgatgacgatgaaatcagaacc

SEQ ID NO: 388952 - DNA, 848 bp, Oryza sativa
  unsure (1)..(848): unsure at all n locations
ccacgcgtccggagcgaatcagccactgcacttcttgttcttgttctcttcctcctcccgaatccgatccatccattggccgccgccgccgccgccgcctcgtgcgtcgcgtgttcgtgtccagagacgatgggcagcctcgccgccgagaagaccgtcaccgggtgggccgccagggacgcctccggccacctcaccccctacaactacaccctcaggaagactgggcctgaagatgtggtggtgaaggttttgtattgtggtatctgccatactgacatccaccaggccaagaaccaccttggtgcttccaagtaccccatggtccctggccatgaggtggtcggcgaggtggtggaggtcgggccggaggtgaccaagtacagcgccggcgacgtcgtcggcgtcggcgtcatcgtcggctgctgtccgcgagtgccatccgtgcaaggccaatgtggagcagtactgcaacaagaggatttggtcctacaacgacgtctacaccgacggccggccaacccagnggcgttcgcctccgccatggtcgtcgaccagaagtttgtggtgaagatcccggcgggctagcgccggagcaggcggcgccgctgctgtgcgccgggctgacggtgtacagcccactgaagcacttcgggctgatgtcgccaggtctccgcggcggcgtcctggggctcggcggcgtggggcacatgggcgtgaaggtggccaagtcgatggggcaccacgtgacggtgatcagctcgtcggcgaggaagcgcggcgaggccatggacgacctgggcgccgacgcctacctcgtcagctccgacgcggcggcgatggcggcc

SEQ ID NO: 388953 - DNA, 586 bp, Oryza sativa
  unsure (1)..(586): unsure at all n locations
ccacgcgtccgcccacgcgtccgacgagaacgaggcgttcatccgcgacgtcgtcacccgccgctggcagatggagttcgtccagttcttcaactgctggaacgagttcgagaacgcgtacacggcgcaggcgttcgtgttctgcgacaaggcggcggacgcggagctggtggtggtggcgttccggggcacgccggcgctggacgtggcgcggtggtgcgcccacgtggacccgtcgtggtacaagatcccgcggctggggcgcgcgcacgcggcgtacacgcacgcgctgggcgcgcagcggaacatcgggtggcccaagtgggtggagcacgtgaagggcaagccgcagcgggtgcacgcctactacgccatccgcgacgccgtgaagcggctgctggaggcgaacggcagggcgagggtgctggtcgccgggcatggctccggcggcgcgctggcggtgctgttctntactgtgctggcgtnccacaaggagaaagcggcgctggaccggctcgccggcgtgtncaccttcnggcaccgcgggtcggcgacccatgctcccatgttcgccganaagaacctg

SEQ ID NO: 388954 - DNA, 763 bp, Oryza sativa
  unsure (1)..(763): unsure at all n locations
ccacgcgtccgtgcatggttgcgctcacaacccaactggaatagacccaactccggaacaatgggagaaaattgcagatgtcattcaagagaagaaacacatgcctttctttgatgttgcatatcagggttttgccagtggaagccttgatgaagatgcatcttctgtcaggctttttgttcaacggggactggaagtgtttgttgcgcagccttatagcgaaaaccttggtttatatgcagaaagacttggagcaataaatgttgtctgctcaacacctgaagtcgcaaacagggtgaagagccagctgaaacgattggcacggcccatgtattcgaatccccctattcatggtgctaggatagttgccaacgttgttggggatccaaccatgtttggtgaatggaaacaggagatggaagaaatggcagggcgtatcaagaatgtaagacagaagctttatgatagtttgtctgcaaaggacgacagtggcaaggactggtctttcattctgaggcagataggcatgttctcctacacgggcttgaacaaaactcagagtgataatatgaccgacaaatggcacatatacatgacaaaggatgggagaatttcgttggctggattgtccctggctaaatgcgagtacctagctgacgccatcatcgctccttccataacgttagctaacgagattcaggcctgctatgtggtancctccatagctggnttggtcctccactaagtctancagtttttccgg

SEQ ID NO: 388955 - DNA, 633 bp, Oryza sativa
cccacgcgtccggcaatgcgctatgcattccatcccagcatcagcagtagagcctggtggcattgtgcctggccaacctaaagagctcctcccaaggttatttgaggagtccttccgcagtatggcaacttccttctccaagtactccatcacagatcattcgacagacttcagtagttctcgcttctctgagtttgggggaggggctctgcaagggcaagagcaagagcaagatggcgatgatgtgaacaaggagaggcctttggttctccggaacaaagcaccaaggtggcatgaacagctgcaatgctggtgcctcaacttccgtggccgtgtgacggtggcttcagtgaagaacttccagctgatagctgctgcacctcagccatcttctggagccgcctctgaaccttcacaggcagggcaggctgcacaacagcaaacccaaccttctcagccatcgagttcgtcgtcgtcgtcatcatccaaccatgatacggtgatcctgcaattcggcaaagttgcaaaggacatgttcaccatggattaccggtacccattgtcggccttccaggcttttgctatctgtttgaccagctttgacaccaagctgggatgtgaataaatgagtag

SEQ ID NO: 388956 - DNA, 896 bp, Oryza sativa
  unsure (1)..(896): unsure at all n locations
cgactacctcctcctcctccgccgccgccgcctcgggtgcccttttattcaccgcgatgtcggcggcgccctccggcgccagcctcgtcctctcctcgccccccgcgcccggggcccggccccagccgcgccccgcgcgggtgtcggtcgccgccgccgcgcccgccgcgcgacgcggggtcgttgccgccgcagcggtgtcgagccccgccgtgtcgtcctctgctggtaaagatgccaaacagattcctaaggactttcttcatattgatgatttcgacaaggatacaatcatgaagatccttaatcgggctattgaggtcaaggcaatgataaagtcaggagacaggagcttccaacctttcaaagggaaatcaatggcaatgatatttgccaagccgtcaatgagaacccgtgtttcatttgagacaggattctttttgcttggtggccatgctatctacctgggtcctgatgatatccagatgggcaagcgtgaagagacccgtgatgttgctcgtgtgctttctggatataatgacatcattatggccagggtttttgctcaccaagacattttggacttggcaaagtatgcagctgtacctgtcataaatggccttacggactacaaccatccatgccagataatggctgatgcacttactatgctcgaacacattggtcgtattgaaaacactaaggttgtctatgttggagacgggaacaatattgtccactcatggcttcgattggctgctttatttcctttacattttgtatgtgcctgtcctaagggcttcgagccagatgcaaagactgtggagatagccaggagtgctggtagtaagattgnaataacagatgaccctatggaagcagttaagggagcagat

SEQ ID NO: 388957 - DNA, 1146 bp, Oryza sativa
  unsure (1)..(1146): unsure at all n locations
ccacgcgtccgcccacgcgtncgattggcattcttgagttgggtatcttgacagcacagggcctgttgccgatgaagaccaaggatgggcgtggaacaactgatgcttattgtgttgctaagtatgggcagaagtgggtgcggacaaggactattattgatagtttcacacccaagtgggatgaacaatacacttgggaggtgtatgatccctgcactgtgatcactattggtgtatttgacaattgccacttgaatggtggggaaaaagccaacggtgcccgggataccagaattgggaaggtccgcatccgcctctctacgctagaaactgatcgagtatatactcatgcttaccctctgattgttctgacacctgctggtgttaagaaaatgggggaggtgcagcttgctggcaggttcacatgctcatcactgctgaacatgatgcatctgtattcacaaccattgctgcccaagatgcactatgtacacccattgtccgtgatgcaggtagacaatctaaggcgccaagccaccaacattgtatcaacaaggctgagccgtgcagaaccaccactgcggaaggaaattgtggagtacatgctggatgttgactctcatatgtggagcatgcggaagagcaaggcaaactttttccgtatcatgggtgtcctaagccctctgattgcggtggccaagtggtttgatcagatctgccattggagaaatccgctgaccaccatactgatccacattctctttgtgattttagtcttgtatcctgagctgatactgccaacaatcttcctctacctgttcctgattggagtgtggtactaccgctggcggccaaggcagccacctcacatggacactcgcctctcacatgcggagagtgctcatcctgatgagcttgatgaagagtttgacacattccctacttctcgtccgcctgacattgtgaggatgcgttatgaccggctacggagtgttgctgggaggatacagaccgtagtcggcgatctcgcgacacaaggagaaaggctgcagtccctgctaagctggagagacccaagagccacggcgctctttgtgaccttctgctttgttgctgccattgtcctctaacgtgacttncattncg

SEQ ID NO: 388958 - DNA, 457 bp, Oryza sativa
ccacgcgtccgaaagatagtgatgagctatttggtcgcctaaagcttacacttgcacagaacacagccgcggcttctattttcgatacattgcgggatcgactatccttccaagggacatactgacctatacgtgtttggccatgggatttgagttttgtgcacccttggtacgtgcaattgcgcaatcagatcgtatcaattcatcttgatgtttctaccattttctttcctgtgtgtacccgaactgccaacagtgtgaatacccccgtccacagctccagctatgtaaaatgtgtagacgattttgaagcgcgaatgtggatcagaggcttttttttttgtagatgcctctttgttgatatgccatgtttaaaaagaaagagagagcatgcattgtgacaaatcaatctgcacgtccatccgatttcggcttaaccattactttttcagccttc

SEQ ID NO: 388959 - DNA, 722 bp, Oryza sativa
ccacgcgtccgcccacgcgtccgcccacgcgtccggtcggtggactgccccgtgacaccacggaagcggattttgggaaggattttggccagtatggagaaatagttgattcagtgataatgagggataagcacacatctcagccaaggggctttggctttattacatattctaaccctgccgttgtggatagagtgatggatgatatccatgaattcaatggaaagcaagttgaaatcaagagaaccattccaaaagattctgtgcaatcaaaggatttcaaaactaaaaagatatttgttggtgggcttcctcaagcactgacagaagatgatttcaagcatttcttccagaaatatggccctgtggtggaccatcagattatgcgtgatcatcaaaccaagcgttcacgaggctttggatttatagtttttagttctgatcaggttgtagatgatttattagcaaatggaaatatgattgatcttgctggtgcaaaggtggagatcaagaaagcagaaccaaagaaatcctcaaatccaccaccatcatcacatggtagtgcctctagatcagcatatggtagggattctaggggtcattcttctggcaatgactatggtggactggccaatgcttatagcaactacaacagtggtggatttgggccttataggaaccatggagtttatggtggtggagtctcagtggttatggtggga

SEQ ID NO: 388960 - DNA, 860 bp, Oryza sativa
  unsure (1)..(860): unsure at all n locations
ccacgcgtccgcaagagcatgcctacagcaccacctaagtttccttcaaatgagatgtcaagacatgaggattggtgtgcagatttaaacaagccaatggcgcctgcgaagagcatgccacccccacctcccaagagcatgcctccgccaccgcctaagtttccttcaaatgagatgtccagaaatgaggataggccttcagatttaaacaagccaatggcacctccgagatccttggacccgagttcagtctcaccaccaaatttgtattcagcacaattaccttcaaaggagcctagagtggtcaaacctggtggggcatctgtttctgatactctgctgaagcttatggattatggagatgacgatgaagaggacaacatcgatgagacgaatagcgtgcttggagggaacccaacttccatttctgggcagaaaccgttttgggctgtgtgaaaaattagtttgttctgtactccaatgcaagttgagtgcaggtagagaatgttgcctgacctgatgcatcagctcaatgccattacgctaacagttcatcgctcaatgttctcagtgtgagctatgtacaatatccagttccttttcttttggggtggttcaaatgtcgacgtgatggtcatttttcttttgacatataatcctgtagaagctagtgtgatcaggcagggcaagggcacttgtctgcacgacattcagagtgctgatgatgcttaagccaatttttgctagcttctcttggatgctgtatgttgctggttttgttagtttggtgaccttgacttgtaagatcaatgcaacaaaaccatgtgttgatacataaatangatcccattttgacttcg

SEQ ID NO: 388961 - DNA, 623 bp, Oryza sativa
ccacgcgtccggcgggagctcgtcgccgacgaggccaccaccggcgacgtcagggtgataaatagcctgttcagctttcgggcaaacgaagaattcctccaaaatgatatcagggtaaagccagaccttgatgccctgggtacgctaggcgatgctgggtggtacagcatccgtgcaattttgtgggctgttgactatgagcttcccaagactgtgatcgccctgcgcaaccctgttcggaaccaagctggcgtgctccttgcctgcggagcaacattgtactgggctgatggaaagattgccaccttcaactgttctttcctcaccaacctcaccatggacatgaccatcgttggaacaaacggtacgcttcacgtcaccgactttgtcatcccatatgaagagaagtacgcggcattcaacatggcgtccaagtcatagttggctgaactccacatcggatgggatccactgccgagcaagcatgtcgtctctacagacctgccacaggaagccctcatggtccaggaattctcaaggttagtgcagaacatccgagacgcaggtggcaaacctgagggaaagtggccagccatcacccggaagactcaggttgtgatgga

SEQ ID NO: 388962 - DNA, 452 bp, Oryza sativa
ccacgcgtccgcgatgagaatggccgcgccgcagcaagtgcatgtgcgtgccgccccgctcgcgcgcgcgctccgaactcgcgtcgccgccgccgccgcgtctgcgagctctcccgaacgcgcgctcctcggcctctccgaaccggatctccggcagctcgccgtcgacctcggccagcaaagttacagggggaagcagcttcacgacctcctctacaagtccagggccaagcaaatccaagaatttagccacgtaccaaaggtgttccgtgaggccttggtcggcgctggctggaaggttggccgctcgccagtgcaccatgctgtgacggcctccgatggcactaccaagatacttctcaagttggaggataacagattgatcgaaacagtagggatccctgtcgatgatgacaaaggcccgtcaagactcactgcctgcgtttcatcac

SEQ ID NO: 388963 - DNA, 583 bp, Oryza sativa
gtcttcttggaggcgcatacttgatcagcagattatgaatagtgtgagtaggtttgaggggcctcctgaatcaactgtccaggaaatgattgatcatgctcatcatgctagccgtttaggtcgaattactactagaatgagggcaaggaggttgcagagggaagccgaaaactctacatttgttgcttcttctgctgcggagagtgggctgccagcaaacagcacatcggatctgcctaggcgtagctcaagtccattttcctcggaaagaattgatttattgcaacactttgttgaccttgcaagcacggaaagattggcaagcgctgtgagtgaccttagaagaatggttaggccgagcccttatggagcatcaacttcatcaaatccaccaaatccaccaaataccgagctgctgccagttgatgggaatcatgttgccgttgcactagctgcagatcaagcttccaattcaagcaccatggctgtaattcaggaggatgctgcttttactgaaagcacaggggaaccaagtaatgcaaggtcttcgagatccctgaggaggagaggaagaaatgatgcc

SEQ ID NO: 388964 - DNA, 1375 bp, Oryza sativa
  unsure (1)..(1375): unsure at all n locations
ggaaggatggggttcaactaacagctacattgtacctgcccccaggctatgatccttcacaggatggacctttgccatgtttagtttggtcctaccctggtgagtttaaaagcaaggatgctgctggacaagtgcgtggctcacctaatgagtttccagggattggtgctacatccccactgctttggttggctagagggtttgctattttatcaggtccaaccatcccgattattggagaaggcgatgaagaggccaatgacaggtacgtggagcagctagtaactagtgctgaggctgcagctgaggaagttgttaggagaggggtggcgctccctgttcactgttctttaggtggctcaccctgataaaattgctgttggtggtcattcatatggtgcattcatgactgcaaaccttttagctcatgctcctcaccttttctgctgtgggattgctcgttctggagcttacaacaggacactgacaccatttgggtttcagaatgaggacagaactctatgggaggcgactaacacctatgtcgagatgagccctttcatgtcggccacaagatcaagaaaccatatttgcttattcatggagagcaggacaacaactctggaacacttacgatgcagtcagaccgattcttcaatgccttgaatggccatggcgcactatctggtttggtgatactccctttggaagccatgggtattctgcgagggagagcatcatgcatgttctgtgggagactgatagatggctgcagaagtactgcttaagcggtagtagtaaaaccgattcagattcagtagctgacaccgnaaaacaagacagtgtccgctagtggtggtggagcaccatgtgaaggtcctgaggccgaggggttctcatcaatgcaaagatcgctatctgtgatgaagtggtttcggttggctgtttgtgagctcatcattggacagtttgtacaagcctgaaaggatcataaatccagttttgtgcttgaaccagacctggttcttcttgctgcaagtggcaaggagtcactactttatggagtattcgattggatttttgctcaaggttgccattccagtgatggaaaggccttattgatgatggatattgcaccctgattgattttacccaattgttttctgttggtatagaaaccagttaaatctaaaaatattctcacctaataatggctctgtagtctgtccaagtatatataaactagtgcctactaggactatagacgatggatccacttgtcttgaacctgttagtcagctttatgcttgcatcagtatgcagtgtgctattgtttgacagcaacataattaataatggatcataccatattgac

SEQ ID NO: 388965 - DNA, 528 bp, Oryza sativa
  unsure (1)..(528): unsure at all n locations
ngagnggnacgtntatattggaagcaccagcgtgagtccaacccttcacggcgagggaaccatgacgaaaactagcgatcccctcctgaatcccccggcgccggcgagcaatcgcggcaacggcggcgtgcgccgcgttcccgtgggcgtccctgatcggcttcgtcgccctcgccatcaacttcgcgctctgcatctaccgcgcggaaggggatcgcggcggatcgcgtttgtcaccttcgcctatctcaacctgctgctcctcttctggtgcatccgccagttcgatcaggcgccgcacggatcggcggcgaggggccggatcagggccgccgtctggatcctcgccacatcgctcaccgccgtctttacatggaaggtggcggcgctgatgccgttccccgtcgccgccgtggcgtgggtcatggccgcggccacgtggtcggtggattctaaggcttcttaatcatgaggacaagtgatcgatcgatccatgatcggatgatcaaatcgcaaaatcggaaaaga

SEQ ID NO: 388966 - DNA, 546 bp, Oryza sativa
  unsure (1)..(546): unsure at all n locations
cgacgcgtccgtgaggttaatgagcgagtgcggacagggatctgggttggagactgctttatttataacaattgatcatggcgcctgaactattgtgttggtggcgaggtcaccacgatgtatcacttggatcgccctatgtacttgttgggatatctagcgaatcaaagccgagtttatcttattgacaaggaattcaatgtcatggggtacacattacttcttagtttgattgagtacaagacacttgtgatgcgtggggatattgaacgtgcaaatgatattttaccatccataccaaaggcgcaatataataatgttgctcatttcttggagtcaagaggtatgctggaggaagcacttgagatagctactgatgctgattacaggtttgacctagctgtgcaacttggaaaattagatgttgcaaaggctatcgcgatggaagcgcaaagtgaatctaagtggaagcagttgggtgaactggctatgtccacaggcaagctagatatggcgganagtgccttgtgcaagcgaaggacttaa

SEQ ID NO: 388967 - DNA, 755 bp, Oryza sativa
ccacgcgtccgcccacgcgtacggcttcctgaagacttagattatcattcaatgacaaacctgtcacttgaagctggtgagaaactttcaaaggtaaggccacaaacaataggccaggctagcagaattggcggggtgagcccagctgatatgactgttcttctcatttggatggagagcaaccgtcgcatggctaactacaagagacagcaaagcacgttgagatctgctgcgaccaaggcagatgattcttcagacgaagtggttcatgccagtgccaccaatgcataattgagcgccccccgactatatcaaccaactgaattggaccactggacttttctgagccaaaaatgtgtactctctgaagataatttccagacgcctgtggaagagttatacaggacatgcatcttgatgtggatacctcaaggcaccttttgctacttgaaggaagtggtggtggcctctgtcagttatggtgtttctccctacgatgctgaattgctgatgtggtttttagaatgtcggatcgtattggtaggatttactatatctttatagtgggtaagaatgtaaagagcgacaaaaatgaaagtggtagagcagagtagcagttgtttatgtatatatacactctaattcgcgaatgcaagggagcaatgtcatttcacagagatgtgaatggtgtatgtaatctgtacacagaatgagtataaagagattgcagtatccctgtgtcctatcaaaacaaa

SEQ ID NO: 388968 - DNA, 684 bp, Oryza sativa
cccacgcgtccgtggaatgatcatcaagttaggaagtgctcaagctcgatgcatcccatggccacgtgacaatgtatgatgctattatttcatttgtctagcttatttacatgcaactaattttttaaaattacattgcagctaatgcatccaagtggtcaagctctacactctaaggtgtcgactattgcgagacataactcagctaaccaaggaaattcggtggcactaactgaggtgttcaagcacaatagcattgataatgcactgcaaagtgttgttggacacaagagagaggtgcatgatctaacaccaaaggagaatataggacgtgaagatacacattctagggcaaagaagattgggaaggccagacccgattctccatatgctaacttcaccaatagccaactgttaacaacttcccggttctagctcaagtccaaatgcatggacaggttttggtgtaatccattctcaggttgtgtttttcctcattgcaaatacatgcgagcctcacaggatgacaggggcaagccactcagtagatcaatgatgtttattgtcttgtaaatcataaatataccattgattgtgatagcatatcttacaaacttaattaccattgagatgatttgtgaaccacttaatgtgcgattgaattggaattgggaattattgttc

SEQ ID NO: 388969 - DNA, 1037 bp, Oryza sativa
cgctctcctcctcgtcgccgtcgccggtcgtcgccggtcgcgggtggcgcgcaacccggagtctctctctccctctacctctgccggctgcttacctcgccgtgggcttcagcttcctcctcgatctccggcgcgcctccatctgcagatcggccggctccccccgcggtcgcgtggcctgcccttgacacttagcaactgcagagtcctgctggagagagatggggttcatcggcgacacgatagagtcgatccgctcgatgcaggtccgccaggtgctggcgcaaatcatcagcttaggtatgattgttacctctgcattgatcatatggaagggtttaatagttgtaacaggtagtgaatctccagtggtggtggttctttctggtagcatggaacctggatttaaaagaggtgacatcctgtttttgcacatgagcaaagaccctatccgcactggagaaatagttgtttttaatgttgatggccgtgaaattccaattgttcaccgtgtgatcaaggttcatgaacgccaggagagtgcagaagttgacatcctcacaaaaggtgataacaattttggggatgaccgacttctgtatgcacatgggcagctttggcttcagcaacatcatattatggggcgagctgttggttttctgccatatgttggatgggttacaattatcatgactgagaagccaattattaagtaccttctgatcggcgcgctgggcctgctggttataacatcaaaggagtaataaagatgcggcttttcagtagagtagtggcctctctggtcgcatggaagaagctggtatttgtttcaccatgtttccaatggaagatgcgaggggtttatttttagggtaactgtgcgacaattggcattgtattttccagcggtttatcatgtggcatccatctttcagtggtttacagttaattgcgcaagaaaatttaacgtgacttttggctcgccaactagttattggatgctgacttggatacaatataagatgaattcataacgc

SEQ ID NO: 388970 - DNA, 501 bp, Oryza sativa
ctactacccaactggcaactgctgctgccgctgtacacgcgcggacccaagaacgcgcctcctctcaccgcccgggaggaagaaggaagaatctctcgcgaagcatctccagagtctcccccgctgcctccgtctccggcggctcaccccgtttctgtggagcaatgcagctatatcaccacccgtattcgctggatagtcagaaagtgcggatggcactggaagagaagggtattgactacacctcataccatgtcaatccactgaccgggaagaacatgaacgtgggccttctttcgcatgaacccttctgcgaaactccccgtcttccagaacggcgcccatgtcatttatcgggccttcgatataattcagtaccttgacaggctttcggtgcatttaagtggtgaaatcgtccctgtgaacactgaggtttaccaatggatgcagaaagttgatagttggaatccgaagatgttcactctcactcacaccccgatc

SEQ ID NO: 388971 - DNA, 562 bp, Oryza sativa
ccacgcgtccggctgcagaagatatgatcaatcaacttcgtcaagaagaagatgaccggaagcagcagaagaagggcaagacaaagaagattattacaaaaagagctcttaaagctgctggccacaccgatctcagtgggaatgcttccaaggatgctatgctgatgcacaagcttggggaaaccatttatccaatgaaggaagatttcattatggttcatttgcagtattcgtgtagtcactgttgtacccttatggtgtctggaaaacgttgggtttgccatcaatgcagaagcttttacatatgcgacatgtgttacgatgcagaacaacagcttgaagatagggagaggcacccaagtaacagtagagacacacatacgctccatccggttgacattgttgggttgcccaaagataccaaggatagagatgatattctggaaagtgaattttttgacaccaggcaggccttccttagtctctgtcaaggaaatcattatcagtacgatacccttcgccgtgctaagcactcatcgatgatggtgttgtaccatctaca

SEQ ID NO: 388972 - DNA, 966 bp, Oryza sativa
  unsure (1)..(966): unsure at all n locations
gagagcttgccagaggagaagatgcataatgtgctgcagattgtgcggaagaggaatggcaatcctgagctggttgggggtgagatcgagctggatattgatgagatggatgtcgagacacagtgggagcttgatcgattcgtcaacaacttcaagaaggcgctcaacaagagtcgacgggctgccattgttaatggtgaaaatgccgatgtcattgatgcttccgtggctaatgatagtgatatgctggtgaatggcagtaccgctacgatggtggacaacggtgatgtgacaatggcaatagagagcaaggatcctgacaagatcactacacaggccgagcagttggatgagtatgtagatatcggggatgaaatgccaacagcaacttaccaatccagtggagattgagaaggatactgaggcccgcgagccagtgggtcctcatcatcccagtgattccagggagctcaaaggacagtgtctcagaatctggcaatgcccattctctggtgtaaggcctccattctaacagtaggatacgagtaggtggatgattaatttccttttgtgtgattggtggtgtagagacaccaaaagtgtaggtgttttgtaagttgattaagaggagttggtatctgtttggatttagtcaagattaatttgtagcgagtgaactggctttgtggctatttctgatagcgcaggtgtcctatgtacatataagtgaaaaatggagactacggtagcaattggtagactggtagttacaccaggctttcttgatctgaagaagtgaatatggttcatgtggctgtctgttcttctagttctcaatgcagttgttttgttacaactgtcatatactcttaatactcttacgtaatttgatgtgtcattatgggtgattgtaactgtggcaattgaagtnncaacatataatcttttctgggnnaanaaaaanaa

SEQ ID NO: 388973 - DNA, 911 bp, Oryza sativa
  unsure (1)..(911): unsure at all n locations
cgaattgggttacnggccccccccttcgagtcgacccacgcttccggagattcttggtagaatacatgtacccccaataaagattggccatgtcttctatcccttgttcattcacagtattggatgctccccaatatggaatttctttttgggcttgatatgctgcggaaacatcagtgcataattgacttaaaagacaatgttcttagagtaggaggtggtgaggtttcagtgcccttcttacaagagaaagacatcccttcacatatacgtgatgaagagaaactatcgaagctagcatctctcagccaaggagctgctggagaatcgtcaacggcacgggagaagactcctgatgcgccaccacgagctcctactacaggtgctccagctgtgaatcctccgcaaccacagggaggaggagatttcgaagcaaaagtcacgaaactggtggaacttggattcgaccgggcatccgtaatccaagctctcaagttgttcaacgggaatgaggagcaggctgctgctttcttgtttggtggttagagtcttgtgatgatgatttgagagagttctttctattgctcacgaccctttcaagggctgaacattttatacacagtgatggagggagatatcagtatatcacctcttgggcctttgtgaaactagaacttctgtttggccaatacaggcttttggtttagagatgatggttcatatttctccttccatagaaaacccattttcttgccttcagtacctgatacaaagatcatgtgcatttcgatctcatttgtttgccaatgatgtgaattattggtctcatatatatggtccctcacaggtgaactgcaatcaatgtactgtcgattgtcgagtttttctgttacaaaaaaaaaaaaaaaaan

SEQ ID NO: 388974 - DNA, 495 bp, Oryza sativa
ccacgcgtccgaaaactgatccacaaattgcaactgttggggcatgctgccttgttggtgctgtgcaacaaaaaacactattcatagccaaccttggaaactctcgggctgttcttggaaaggtcagttgcattgggcagattgttgctgaacagctctctagtgagcacattgccaatgatgcatggaaagcaaagggcctcgtgcaggtgttgagagcgataggtgatgcatacttgaaatacccacagtatagcagggaaccactcaacaaaccaatactaagtgccaatccatctattgtttcacgcgttcttcgaccaagtgaccgcttcatcatatttggctcagctgttctatgggaatatctgtccaatcaggaagctgttgagattgttaaaaaccatcaagcttctggaagtgccaaaatgctagtaaaagcagctcttcatgcagcagccaaaaagcacaacttgcattactcagatctcttga

SEQ ID NO: 388975 - DNA, 641 bp, Oryza sativa
ccacgcgtccgcggacgcccgcgccggcaaccgactaactctgtctgaaggaagctaagattattaatcagtgagtagctagccatggctgaggagaagaagcaccaccacctgttccaccacaagaaggacggggaggaggagagctccggcgtggtggactacgacaaggagaagaagcaccacaagcacctcgagcagctcggcggcctcggcgccatcgccgccggcgcctacgctctccacgagaagcaccaggcgaagaaggacacggagaacgcgcacgggcacaaggtgaaggaggaggtggcggcggtggccgcgctgggcgccgcggggttcgccttccacgagcaccacgagaagaaggacgccaagaagcacgccgccgaccaatactagatcgatcccgatcgaatgaacgcaagaacgaacggtttatatgcttaattactttctccccataattacatgtatgcatgtggttgatggcttaatttgcttcttcttggtcgtcgtcatacgtcgtcgcttttacttcgtgttcatgtacattaattctgtatccgcactgagtattaaataagtgcgtttgtgctgcacacagaaattttgggtttcgttttaaaaaaaaaaaaaaa

SEQ ID NO: 388976 - DNA, 882 bp, Oryza sativa
  unsure (1)..(882): unsure at all n locations
gaaggcatgaaacttgacagaggttatatctctccttacttcattaccaaccaaaagaaccagaaatgtgaactagacgatccactgatcttgatacatgacaagaaggtgtccaacctgcatgctgtggtgaaagtcttggagttggctctgaagaagcaaaggcctctgctgattgttgctgaggatgtagagagcgaggcattgggtactctgattattaacaagcttcgtgcaggcatcaaggtctgtgctgttaaagctcctgggtttggggagaacaggaaagcaaacttacaggaccttgcgatccttactggaggagaagtcataactgaagagctaggaatgaatcttgagaagttcgagcctcagatgttgggtacatgcaagaaggtaactgtatctaaggacgacactgttattcttgatggagctggagacaagaaatccattgaagagagggctgagcagattagatctgcaattgagctaagcacttctgattatgacaaggaaaagctacaggagcggttggcaaagctctccggaggtgttgctgttctaaagatcggaggagccagttaagctgaagttggtgagaagaaggntagagtnacagatgcattgaatgccactaaagctgctgtggaagagggtatttaccaggtggggtgttcacttctttatgcatcaaagngctgntaaatgccgctntaactttgtcaaagttgggtcaatcatcagatcttgagnccgtnnctttgttcacgggttgnaggctttntncgnantttgccaggncncgccttgtttgtccgtaanggatttggcatgtnagntgtttttccctaanggcagctcttggggtntaggttattt

SEQ ID NO: 388977 - DNA, 908 bp, Oryza sativa
  unsure (1)..(908): unsure at all n locations
gcacttctgattatgacaagaaaaagctacaggagcggttggcaaagctctccgaaggtgttgctgttctaaagatcggaggagccagtgaacctgaagttggtgagaagaaggatagagtgacagatgcattgaatgccactaaagctgctgtggaagagggtattgtaccaggtggaggtgttgcacttctttatgcatcaaaggagctggataaattgccgactgctaactttgatcaaaagattggtgtacaaatcattcagaatgctttgaagacaccggtgcacactattgcttccaacgcaggtgtagaaggggctgttgttgtcggtaagcttttggaacaagataacaccgaccttggctatgatgcggctaaaggtgaatatgtggacatggtgaaggctggtatcattgacccactaaaagtgatcagaactgccttggtggatgctgcaagcgtatcatctctgatgacaaccacggaatccatcatcgtagagatcccaaaggaagagaaggaggcgccagcgatgggaggcatgggtggaatggattactaatcaacacccattaaagtaaactaaaaacatactcctgggatttaggattttttttgcggtgcaagttcatcgtcgatgtattttttgttcttgttgatgaggtggttgtcagacaattttgattccactggcggtaggacgggttggaacgaataaaattttagttcagagctaggagttcttgagagctgaggactgcacttcgatcaaaattgaatctgacaccttgtgccggaacatttttatgagctgatctgaaagattacgccttttggcctgaggtggtgtgcagttgtttttaaaaannnnnnnnnnnnnnnnnnnnnnnnnnnnnnnnnnnnn

SEQ ID NO: 388978 - DNA, 475 bp, Oryza sativa
ccacgcgtccgcgccccttctcgaatccgcgccctataatcccctttgcctccccaccccacccccgggcgcgccgccatccccccccgcccccgcgagcccctcccgatggatttggatctgtggatctctaaggtgaaggagggccagcacctcgccgagcacgagctccagtccctctgcgaatacgtgaaggagatcctcatcgaggagtccaacgtgcagccagtgaacagcccggtgaccgtgtgcggagacatccatgggcagttccatgacctgatgaagctcttcgcgactggggggcatgtgcccgagacgaattatattttcatgggtgattttgtagaccgcggcttcaacagtcttggaggtcttcaccattctgttgctactaaaagcgaggtaccctgcacacataacgcttttgcgtggaaataatgaaagcatacagctgacacatgtgtatggtttc

SEQ ID NO: 388979 - DNA, 559 bp, Oryza sativa
  unsure (1)..(559): unsure at all n locations
ctctttctctctcctcctcctccacctgaatctccctctctctcctccaagaacaggggcggccaagcagctaagccggatttcgtggttggtggcctctccccttccaccaccaggctcgccccgccgctgccgcgaggtgcccggccgcctgtttcttctctccggtgcatttcgatctgattcccccgtccgatttcgtgtccgtcctgcttcacacccggatggttcgaatcgattcttgaggagaaacatatgaatcgtggcgaatgaagagtttagcgatgtgccttagttgaatggttccattgccaccctgtctggctgattttgttcagacgaactcatcttcaagcttatttgggtacagttgctgcataggtaatgtgagcaagtcccagccacttccagattataaaccaaaaacatctgtaagaaagaagcctcgccattcatctattggaaaaagaaggcaatgctcatcaggcctagaagcaatggagaacaatgttagtgtntctgtgtcccttgaggggaatatttcatcacttcccaactc

SEQ ID NO: 388980 - DNA, 839 bp, Oryza sativa
ccacgcgtccgcataatttctgtggcggtgcaaaatctccggccactagcattccattggaagaatcagtgcgtcctgaaccagaaagcatccagtatagtgatccagcttgtcagacggaagatgttatacagttgggcactgaaacagatggtccccaacccccagaaaatcacaatgaagatggacaaggccaccttgtacctgatgacatggagatgtctaggtcccctcctgagcattcttctgctggtgccaagcaacgcttccagtcactcatcgaaagtagaaaccaacaacagaaccacatgccacaccaagaaccagaatttaaccaccagctgaagcctttcgattacgctgaagccagaaagaacataacatttggagagcgtaaagccgagagaatcaaaggcaatgcagtggccagggcaataaacaaggattctggagataaaggtagaacctcaaaccaattcggtgctggagagaacgaggggaatcgccagaatcctcgggggcgacaggcattcccgccttctggcaacagaagtgctacataccattagttgttaagatgtataaccagagacattgtgttcttgtaaaaggtattatgttcatcttagaggggaagtgtattgtctctggttttcatcgttagatacttagatcatggcaatcttttgggggacaatgtagcggctttcttagtgatctatcttgagagaagtaggaaagcccttctggctggtggtgctgggttttaactgaacatgattcagaacattgaggatacttataccagatattgaatcatttcagtaaagcccgcatat

SEQ ID NO: 388981 - DNA, 586 bp, Oryza sativa
  unsure (1)..(586): unsure at all n locations
attgaacccaatacccctactcggcggtgactagtacaccttatctcttcgaaaccctagctaagagccgtcgctttatctcttttctcttcttcttcttcccttgtactcctccgatccccaatctcatctatcaccacctgacctgatctttccctgcagatctcattgagaaagagaagagaagagatattcttttttccaaagaagaaaatcttggccgcgcgcgcgagatctttgcgcaaaagatgatatatgatgcctgatcgatcttctcgtttcggatcttattattgctcggctaattagtattattaacgctgctagccagggcctttgatccgcgtggtcgtggtcgtcggtgaggcagccgggcaggccgactcccatgcatggaagctcgcttcagggtcaagtcaactgattatgtttttcattaatttggtggtaattaatttttttatatgtacgtacatatatatatagctcggatggtttggtatttctttctcagatctatatatattgcaaggggatcggagtgtcgttagttacacgggtattattatagagttnttgggataga

SEQ ID NO: 388982 - DNA, 613 bp, Oryza sativa
ccttttgcaacccacaacataatccgcccacgcggccgcagaggaggctacctgcccgtcaaccccttggtggccgccgatgctccccttccttggcgacttcatgagcctgaccgggtgcactcagcacctttcccctgacattcgttcttgcaaatcacatgtacctcacggtgaagcagaacaagatgtccatcttcaggaaatgctggcactggctgaacgttgttggcttcagctgcttgtccgtcgcagctgcggttgctgcggtgaggctaatcacggtcgactacagtacataccatttgtttgctgatatgtgaggctggaaagtgcaagcatgcagccctggatcagctgtaaattcgtcctcttcttttttatttttttggttaggggatgcatgtaggtcgatagaatgatggagattgcaataaataatttggctaaaatgttgtccagatttggttgtttgaggtgcaagatgtttgcctcaaaacgtaccgctatggttcactttttaagaactgtactgctacctctgtttgcggagatttttgtctgcaggcatgcaggatgaatattattcaagtgctctaaaaaaaaaaaaaaa

SEQ ID NO: 388983 - DNA, 681 bp, Oryza sativa
ccacgcgtccggaagaatactctcatgatgcaacaaacaaattcaacatttatcctgagcaaatcccttcttggcttgttgactggattcctgaaaaaggtggctatctcatcgggaacctgcagccagctcacatggatttcaggttcttctctctcggcaacctttgggcaataacttcatctctaactactccaaaacaagctgagggaatacttagccttattgatgagaaatgggatgatctcatagcaaacatgcccctcaagatatgttaccccgcaatggaagatgatgaatggcgcattattaccggcagtgatcctaagaacaccccatggtcatatcataatggtggatcctggccaacgctgctgtggcagtttacattggcctgtatcaaaatgggaagaccagagttggcccgaagagccattgctgtggccgaggagaagctggcagctgacaaatggccagagtactatgacacccgctctggaagattcatcgggaagcaatctcggtcatatcagacatggactattgctggttttctgacctctaagatgctattggaaaaccccgagctggcttctattctgacctgcgatgaggacctcgagctgcttgaaggctgtgcatgctgcctttctaagaagagactaggtgctcacgccgtgc

SEQ ID NO: 388984 - DNA, 541 bp, Oryza sativa
  unsure (1)..(541): unsure at all n locations
taccgaatctcccgggctctcatctctgtcattctgcagctagctgaaaaaatcttcagagaatcatcagttcatcacaaaagactatcaagcgaggcaagtacgtgacggtgactgtgatgagcggcggcggcggcggcgggagggggatgacgagggggctggacctgaagctgaacctgtcgctgccggcggtggcgcgcgcggtgtcgccggcgggggacgacgagtcgtcgccgagctcgtgcctgtcgtcggagagcgagctgcggcagcagcactggcggcggcggcgggcagctgcagtggtcggacagcccggaggcgacgtcgatggtgctcgccgcgtgcccgcgctgcttcctctacgtcatgctcgccgaggccgacccgcgctgccccaagtgccggagccccgtcatcctcgacttcctccacgccggcggggcggcggcatcaacgncgacggccgncgccaccggaggggatgaacatggncatgaccatgatggcagcaagagattgaggagaagcatttaca

SEQ ID NO: 388985 - DNA, 999 bp, Oryza sativa
ggtgactgtcctcttttctgactcaacgtacagcgatcttcaggtaaaagagacgaaccacaatactacagcaatggatgaaaacaatgagttccttcagctgattcttagtagcaatgatgaaggatacaatgctggaagtgaattccaagtttgggatgttctggacttctacttctcagaaagcttttcagctgtgcagtttgatagcttgatgggttttacaaatgatgctagttcttcccatcacgattgtatgaatcttgctgacatggtagagcggcctgttgcgctcctgtccctaaatgataccgaggagcaaaataactctactgatgagttccctgatgatacatcatcataccttcaaatgaaaccctcagattccgaaactgaaagtaattatgcctctcgagatgttgcggtaactgaatatgttgatgaaaagccactttctagaggcctgcctgatttaatggatgtcgactcacccggtcgtctatcaaaatcagcaagatcaaaccaaatcactcttgttctggatttggacgagactcttgtacattcaacattggatcattgtgacaatgttgatttcacccttcaaggtttctttaatatgaagaaccatacaggttatgttaggcaaagacctcatctgaagatgtttcttgagaaggtagctcagatgtttgatcttgtcattttcacagctagccagagaatttatgccgagcaactaatagatagactcgaccctgatgggaggttgatttcacaccgtatttatcgtgagtcatgtatattctctgagggttgctatacaaaggatctgacaattcttggagttgacctggcaaaagttgtaatagttgacaatactccacaggttttccagttgcaagtggacaatggtataccaataaagagctggtttcgatgacccctcagaccagggaatttggtcgaggttactcccattcctgggaggacacttgt

SEQ ID NO: 388986 - DNA, 562 bp, Oryza sativa
ccacgcgtccgcactgcaaagacctctactgatactaaggcaaaaattggcactcatcatgaagagaagatctcacaaagtgcatctttaactacaattgttccccgtgatacttcggataaggcaaaggtcaccgctgaatctccagatgagtctccacaggcagatccttcactggcgccaaagagcacacccaaaaaaagaggtagacctacagaaaccaccacaattgccaaaaaattgttcaaggatagtacccagaagaaacccactgacagtgaatgagacggatatatgtagtccatcagcaagtcttttgtgtatatgtacagaacgaaccacccaagctagaagtgtagaagcaacaagttagctgcaagcctagaggaggctaagaagcaagcccttttgttcatgacccctaggtcatgattatcattgtaaataagtaatgttatgtttaccttccttgccaccttctgtgctgtgaaatgttgttcgaacaactactacttatatggaaccaatatagttatggttgccccctacctaaacaaaaccc

SEQ ID NO: 388987 - DNA, 1181 bp, Oryza sativa
ccacgcgtccggtgagctaagaaacaactagctagagtgagtgagtgagtgagtggttttcttgatgagccacaacccctatataacctcactccccctcacccctctcctcaaaccatccaacctcacacagttcacacaaccacaagcttcaaagctccctactacttctcctcctccttcttctccggcgccggcgacgatgacgctgacgatcccggacgacgtgcgggcgaaggcggaggtgtacgtcggcgacgaggccgggcaggagaagacgcggctgctgctggaggagacggggctccccagcggcctcctccctctccgcgacatcatcgagtgcggctacgtggaggagaccgggttcgtgtggctgaagcagcggcggaaggtggaccacttcttcgccaaggccggccgccacgtcagctacgccgccgaggtctccgccgtcgccgagaagggccgcctccgcaagatcaccggcgtcaaggccaaggagctcctcatctgggtcaccctccacgagatcgccgtcgacgacccccccaccggcaagctcacctgcaaggccatcggcggcctctcccgcagcttccccgtcgacgccttcgaggcccccccgccgccgcccaagaacccctcccccgccgccggggacaccaccaaggtcgatgaggagaagaagaaggaggaggaggtcgccggcgacgccgccgccgccgccattgacgagatcgaggggaagatgaaggagatgaacagcaaggaggtgcaggtgcaggccgagggagtggcagccaagaactgaagaagatcgatcgatcgatatacacagatcatcatacatctcatcatcatcatcagcagcagaagcagcagcacgagatctcactatcatatggagattcagatgagctagtagctgagatgatgagttattattaattaatcgttttatttggttctgaataatctgcatctgcatgcatgcactgctttaaattaattattattaagttgttactacttcttttcttgctgctgttaaacagagagaaaatgatatatatatatggagagatcgacgacatgtattattattgctatcatcatctgatgagattataatatgagcaatggaaatattatttatttaattaaaaaaaaaaaaaaaa

SEQ ID NO: 388988 - DNA, 496 bp, Oryza sativa
tctctctttaggcttagctattccattccatgtacagcaaacaccattagcccggtcccaactcccaagtgttttcggttagcaacctaccatgcttgtcctcttgctcctcctcgccgccgccgtctcctcgccggcgccggcggccggagacggcgggggcgccttgccggtgctcaacccgatctcctccttctgtaacacgacggcggccaggcggacgtacctgccgaacagcacgttcgaggccaacctcaacggcctcttcgccgtgctgtccaggaacgcctcggcgtcgggctacgcggcgggggcgttcggcgcggcgccggacacggcgtacggcctcttgctctgccgcggcgacttcaccgggaacgactgctccgccgcgcggctggcgtcgtcgttccagcaggcggcgagcagctgcttgtacagcaaggacgtcgccgtctactacgaccagtaccagcttcggtactcggaccaggac

SEQ ID NO: 388989 - DNA, 994 bp, Oryza sativa
  unsure (1)..(994): unsure at all n locations
aagaataatgattatnatttaaggtcatttgcttttaggctgaaggcaacaatggagagcatggacagggaattgagaacatcaaggttatcagagcagttaaacaaacactacgcagcaattgctattcccaaaggccttcattgcctttccttgcgtctaactgatgaatactcatccaatgctcttgcaaggaaacaactccctccacctgagttgatccctcgtctttctgacaattcctatctccattttgttttagcatcagataacatccttgcagcctcagttgtgggtcagttcaactattaggtcatcattaaaacctggcaggatagttttccatgtcatcactgacaagaagacctatcctgctatgcactcatggtttgctttgaatactctttctcctgccattgttgaggtgaaaggtgttcaccaatttgattggttaacaagagaaaacgtgccagttcttgaagctatagaaactcagcacactgtcagaagtcgtttccatggaaatcaccttgcaagaaatagtgcaggtgatagcccaagggtttttgctgccaagctgcaggcagggagtccaacatatacttcagtgctcaatcatattcgaatatacttgcctgagttgttcccaaacctcaacaaagttgtatttcttgatgatgacgttgttgtccagcgggacttgtcatcactttgggatattgatctaggtgggaaggtaaatggagctgttgagacctgcagaggtggagatacttgggtgatgtccaagaggttcagaaattatttcaatttctcccatcccctcattgccaataacttcgacccttcggagtgtgcatgggcatactggcatgaatatatttggacctgagtccatgggagaaagacatccatttaaagataaattaccaccatttgggtcaggggaggtaaaacatcggatgccactaccttttcatctgaaaaaccccca

SEQ ID NO: 388990 - DNA, 696 bp, Oryza sativa
ccagcgtccgccccgcgtccgcccagcgtccgccccgcgtccgagagtgatgcgtacagagtccatgtatgcgagaagtgtgggcttattgctattgctaatctcaagaagaattcctttgagtgcagagggtgcaagaacaaaaccgacattgtccaagtgcatataccctacgcgtgtaagcttctgttccaggagcttatggcgatggccatcgctcccaggatgctcactcaggataacaaaactgggaaggatcagaagaaacgttgagaccaaatattacatggggcactcgcttgtcgtactatgtcttcgttcatagtcaatacttaaatctaacttgggcttagcggtctgaccccctgaggcagaaagcagtcagtaggccacatcctcgagttatatatatccctggtgtgctgtgcccttggattatgccaaattgacgccatgggcgaagtggtgcaaagaaattttgtttcttgtatactagggatacggattaagggactgtactgaacaatcttttaccgggactaaaatgttgttgtttgtactgtttcttttttatttttttttggcttttggggatactagatcccaactcgaatattgcctgtattggctctaccagcacgatatcaaaattgtttgatgagagatcttgtaagaaaatagtaataatttagtgtt

SEQ ID NO: 388991 - DNA, 654 bp, Oryza sativa
  unsure (1)..(654): unsure at all n locations
ccacgcgtccgcgtggcgcggtgggcggtgggcgggttcgaggaggacccctacgagctgaccttcacctacgactccctcttcgtctccgactggacgcggctcggcttcctagacgccgactatggctggggcacgccgtcgcacgtcgtgccgttctcctaccacccgttcatggccgtcgccgtcatcggcgcgccgccggcgcccaagctcggcgcgcgcgtcatgaccatgtgcgtcgaggaggcgcacttgccggagttcagggaccagatgaaccgccttcgccgccgccaactagctacacatgcttatactatcatatcatgcacactagttaattatattaattacagtaattataatccttattagtattaattaatcatcaagagggacagtgcaattaattaagcattgtctcatgcaactctgatcgatcgatcgatcggtgtgtgtacgtaattcggctggttaataatggatttgcaacttccttcccccgcagtagacatatctagttaattgcgttgtgtaagagaaattatttttccttctaatatattgacttgtaattgtgttgcgcgttcacgaaaaataatggatttgcaagtagtattaacnnnnnnnnnnnnnnnnnnnnnnnnnnnn

SEQ ID NO: 388992 - DNA, 1542 bp, Oryza sativa
gtctggacactttggggatgtttggcattactggactgatgatggccttggatattatgaattcctccagctttctgaggatctgggtgctgccccaatctgggtgttcaacaatggaatcagccataatgatgaagttgatactgctgcgattgctccttttgtaaaagacgtattggacagtctagaatctgcaagggggaatgcagattcaacatggggttctgttagagctgcaatggggcaccccgaaccattccctgtcaaatacgtcgcaattggaaatgaagattgtgggaaaaaattttaccgcggtaattacctcaagttttataatgctataagggaggcctatccagacattcaaatgatttcaaattgtgatgcttcatcaagtccacttgaccatcctgctgatttatatgatttccatgtctatactgattctaagactttgttttcaatgaagaatacatttgatagatcatctcgtaatgggcccaaggcttttgtcagtgaatatgctgtttggagaagtgatgcaggtagaggaagtctacttgcttcattggcagaggcagctttccttactggactggagaagaatagtgatgttgttcagatggcaagttatgcaccactcttcgtgaacaacaatgatcaaacgtggaacccagacgccattgtatttaactcctggcaacaatacggaactcctagttactggatgcagactcttttccgtgaatctagcggtgctatgtttcatccaattacaatcacttccagctactctggttctctggcagcatctgcaattacttggcaggattctgaaaatagcttcttaagagtaaagattataaactttgggtctgatccagtgagcctcacgatctctgcaactgggcttcaggcccgtgttaacgcactgggatcaactgccactgttctcacatccagcaatgtgatggatgagaactcttttagtaacccgaataaggttgttcctgtcaaaagccagctttccaatgcagcagagcagatgcaagtcacgcttgctcctcactctttctcctcattcgatcttgcgcttgcccagtccaaactcgtggcagagatgtgaagcagcaacacaaggttagcgacagaaacacaagaaatacacgagatgtgatatgcgaataccagaatgctgtccatatatgtgcatgtatcttgaagcactactgtatagtgtaatacacagggaatgatgaataaaattcactcctggcttacttccttcttttcgtttcttttcttttcttttctttttttttttgctttctccatatttatatcggatgagactagatggcgcattgccaccgtgttgctttgttccaaggataacaaatatgagctctttggcctgggaaagagaaaataatttggtccaaggataacagatttgtagagaatatcagaatttgattaaggatttgaacttgcaagttggcatttaaacttgagaaaaattaaggctcagattatgggctt

SEQ ID NO: 388993 - DNA, 468 bp, Oryza sativa
caacctcttcaatactctcactgcaatttctggagctcacactgcatgcgccggccaataatggcgacgacgacggcgaggttgctcctcctgctcacggtggcgggcttctgcctctgccacaccacctgccaggaggcggcgccgccgcgccgccgtactgcggcagcctgaggacggccgtggaggcgcggaacatcatcgggtggaagacggtgccgccgccgtgcgccaagtacgtcgccgactacatcaccggcgagcggtacggccgcgacgccgacgtggtgatcaacgaggccatcgcctacgccgagagcctcaagctctccggcaccggcaaggagatctgggtgttcgacgtcgacgacaccggcctcttcaacgtgccctaccaagccaaccatggctacggagttcaaccgttcgacaaccagagttctctaaagtaaggtggttcaagggaag

SEQ ID NO: 388994 - DNA, 455 bp, Oryza sativa
ccacgcgtccgcccacgcgtccgcacacatctcctctaaagcagctcacagctcaagagaaggagagggcaacaatggcgacggcgaggttgctcctcctcctcacggtggtggcagcggcggcgggctcctgcttctgcagcggccaggaggcgaagccaccgacgccgccgccgccgccgccgtactgcggcagcgtgaggacggcggtggaggcgcacaacatcatcgggtggaagacgcttccggcggattgcgccaaatacgtcgccgactacatcaccggcgaccgctacggccgcgactccgacgtggtgatcaacgaggccgtcgcctacgccgagagcctcaagctctccggcagtggcaaggaggtctgggtgttccgacgtcgacgagaccgcactctccaccgtgccctaccaggctaagcatggctacggagttcagccata

SEQ ID NO: 388995 - DNA, 503 bp, Oryza sativa
cattctagaactgtgcaagcaagcagcattctaccctatcagggagctgttgaacaatgagaaagatgggcgaaaagcagataaaccaagacccttgaggcaatcggatctggagaaagctttatcaacgtctagaaaggggaaacgggccgcgaatggaacatctacggggttgcagtcaccggtgtggattcggccctctgattcagaagacgatcaggtacagagcgcaatttttgagatatctaagctgatgtctcgaatagttcagaacagtcagtcggaaccgcaagagccatcttcaccttaatctaatccttttgctagatctcatgaaaatccaaaggagtaagcgcaggcattacctcgatatcgttaggttttctaatgcagcttgcaagattcagggtttgtatggattcatttagcgtcgcgaggctgcgctggtttttgaagttaatggcagctggcaatgctttgcactgatgttataagttaaattc

SEQ ID NO: 388996 - DNA, 685 bp, Oryza sativa
tctggtgggagaaacatcagggtcactgaggaaacataacatgagtatgtcgatcttgtggctgaacatatattgaccacagcaattcgccctcaaattaatgctttccttgaaggattcacagaattagttccaagggagctcatttccctatttcatgataaagaacttgaactcttgatcagtggacttcctgaaatcgactttgatgacctgaaagcaaatgcggagtatattgggtattcgcctgcatctccggtcatcctgtggttctgggaagtagttaatggtttcagcaaggaggacatggcaagatttctacaatttgtgacaggaacatcaaaagtaccattagaaggtttcaaagcgctacaaggtatttctggtcctcagagattccagattcacaaggcttatggagctccagagaggcttccatctgcccatacttgctttaatcaactggatttaccagagtattcctcaaaggagcaactagaagagcgtttacttcttgccattcatgaggcaagcgaagggtttggttttggctgacgtattgaacaagtgcattgtgtatgcactgggtcaatgggtttctgtttgccatgtacagattttggcggcaaaattgagagcatggtcaccagatgctacacattgcataaaccaggcgaaaagaacg

SEQ ID NO: 388997 - DNA, 626 bp, Oryza sativa
ctcagttcttgaatccattcggggtgtaaaaatcatttacagaactaaagaattgaaagagaaacaggacagaagtcgcatttggaatgagacttggctggcaggtttcttttacaaaccgtgcaattatgaactatttgtcaaacagtcgctgaacatggaaatggctatcattatggcaagggatgctggcatggactggatcattcatcttgataccgatgagctaattcatccagctggtgcccgggagtactctctgaggcgattgcttttagatgttcctgataatgttgacatggttatcttccccaactatgagagcagcattgagcgagatgacatcaaagatcctttcacagaggtttccatgtttaagaaaaattatgatcatcttccaaaggatacatattttggcctatacaaagaagcaacgcgtggtaatccaaactattttctcacttaccggtaatgggaaatcagcagcaagggttcaggagcatctgcgtccaaatggtgctcatagatggcataattacatgaaaaccccaaatgaaatcaagttggaggaagctgctattctgcattacacttacacaaagttctcagacttaacttcaaggagg

SEQ ID NO: 388998 - DNA, 642 bp, Oryza sativa
  unsure (1)..(642): unsure at all n locations
cccggtccggaatggccgggccggcccacgcgtccgctcctcgtgccctcctccacttccacttccacactgctctccccctccccttcctcccgctccggcgaaggcgagcgcgcggatcggcgtgatggcggcggcggcgccctctcccccacccgtcgcggcgctggagcagatgagcaggaccaaaatgttcggcggccacaacctccgcttccgccaccacagcgccacgctcggctgccccatgaccttctccgtcttcctcccgccgtcgccggcatccgacctccccgtgctgtactggctctccggcctcacgtgcaacgacgagaacttcgtcaccaaggccggcgcgcagcgcgccgccgccgcccacggcatcgccctcgtcgcccccgacacctccccacgtgggcttaatatagagggagaggcagacagttgggattttggtgttggtgctggattctatttgaatgcaacaaatgaaaagtggaaaaattggcgcatgtatgactatgttgtgaaggagcttncaaaagttttaagtgacaactttgaacagctgaacacttcacgggcatctatttttggcactcaatgggagggacggtgcactaacaatctacttaaagacac

SEQ ID NO: 388999 - DNA, 1698 bp, Oryza sativa
gttcaccctttgattgacccgcacccgcatccctttcccgcaaggccgcaacaccgtccgtcgccgcctccgcctcgctccgatccccattccgcggtcgccgcccgagtcaaaaagagggggaagcttctcccgccatagtcctcctcctcctcctcctactcccatcaacgactagtcgcggcgaccaagagccaaaccctacgcctcctcccctccccctccacctcgtcctccccgcgagcggcggcggccatggattcctcctccggcggcgcgggcggcggcggcggcgcgcagatcaaggggatggggacgcacgggggccgctacgtgctgtacaacgtgtacgggaacttcttcgaggtctcctccaagtacgcccctcccatccgccccatcggccggggcgcctacggcattgtctgcgcggctgttaactcggagaacggcgaggaagttgccatcaagaagattggcaatgcattcgacaaccatatcgatgccaagcggacactgagagaaatcaagctgcttcgccacatggaccacgagaatattattgccataaaggacataatttcgccccccaagaagagacaactttaatgatgtttacattgtttctgagttgatggatactgatctccatcagatcatacgctcaaatcaaccattgactgatgaccactgccagtacttcctgtaccagttgctacgagggctaaaatatgtgcactcggcaaatgtcttgcaccgtgatctgaagccaagcaatttgttccttaatgcaaattgtgatctcaagattgctgattttgggcttgcaagaaccactacggagactgacctcatgacagagtatgtggtcactcgttggtatcgagcaccagagctgctgttgaactgctcgcagtatactgctgctattgatgtctggtcagctggatgcatacttggtgaaattgtgactcgtcaacccctgtttcctggaagggattacattcagcaactaaaattgatcactgagctgatagggtcgccagatgactcaagcctagggtttcttcggagtgatcatgcaagaggatacatgaaacagctaccacagtacccaaggcaggacttgcgcttgcgcttccgcaacatgtctgctggtgcagtcgatctgttagagaaaatgctggtgtttgacccaagcagacggataactgttgatgaggctcttcatcacccatacttggcttctcttcatgacatcaatgaagaacccacctgcccagcacctttcagctttgattttgagcaaccatcctttactgaagaacatataaaagaactcatctggagggaatccttggcatttaatccggatcctccctactaagagctcagagcaatttatcaatgctggcatctgaagatcggtagctctagaaaagccaaatccccttgctttgtgcatctattaattttatgcccacttgttgggcgaatgagcatggattattgttatagtgacaatttttcttaaggcctgtctaaagaaacaacatttgtattccttatcagatagcctgaacttgggcctgtattataccggttgattgcataactgttcttatgtatctaagcctgtaattgtcttcacaatggcttgaactgcccgtgtatatctgagttgacatcttctctctg

SEQ ID NO: 389000 - DNA, 872 bp, Oryza sativa
gtccgcccacgcgtccggcagcggaaagaatattatgaagggcttgttatcatcaagaaagccagttggcatggatgtaaccagcataaagttgaaaggggacagtaataacaagagattagtaactataaaagagggctttgaatattctcaggcagcggtctcacaactagagtcaacatctgggttgaaacaacaaaatcttgaaaagaatgagtatgaggaaagtccagtacccaatcttcttgacgaatctatggaaaaggaggtagcgtgttcatcggtggaactgaatcagtcagcatcagctactgatcaggagaatgtctcacagaaaatagtggtaacaatcacaagtgaaaaaggtatgcatgaaactgagcctgtttctgctaacaaaattgcaatatgccaacccgattttccttcaaaagcagaatttccagtcggatcaagttttgttactcctcgaaagaacaaactggtggatgtgacggaccataaggattctgcagaactggtcaagacaagaagcattcagaacaagaaaggggagatgccaagttcagttactggcaaggcccctacaatgcctaccaagtcagctccaaaggaccgtgtgaaaaataaatctgtagcaagtggttctgctcagatgtctggtagttcaaggaagcgggcaagaaaggggtggactacgctgaaacagattgctgaaaaggaagagcttgagagaaaagagaagatgggtaactttgtaataccattctttatgcaataagagatgttacaactcacgctgattgtaagctttattcttggtgtatttgttgagaatagcatacaaaattttgatcatattttgagttact

SEQ ID NO: 389001 - DNA, 1081 bp, Oryza sativa
ccacgcgtagaaatttctctccttgtagaaacaagcctagagagtactatggagcagaggaaatttttgttgtgcctaattcttggcttacttgcgacttcaggacctgccaagaccgtcaatgctgactcgccctttgatttttattatctcatcctcatgtggcctggagcatactgcactgacagcgagtatggttgttgcgtgcccaagtatggttacccgtcagaagatttcttcgtcaagagcttcatgacctttgactcgtcagagaacacagctgttgtcaggtgcaactccgacaatcctttcgacattaacaagctagactcaatcgagaacaacctgaaccactactggagcaacatcaagtgtcctcgcaccgacggcgtgaactcatggaagagcgagtggaacagctatggcgtctgctccggcctcaaggagttggactacttcaaggccggtctccagctcagaaagaacgcagatgttctctctgctctcgctgaacaaggcatcaagccggactaccaactgtacaacacggcgttcatcaagtgggcagtgaacccagaagctgggtgtgacaccaggagtgcagtgcagggacgggccatttgggaagaagcagttgtacgagatctacctctgcgtcgacaaggacgccaagagcttcatcgactgccctgtcctgcccaacctcagctgccctgccgaggtgctcttccatccgttccacacctggatgctcaacaccacatcggctgccaacatcgtgatgcccactgaaactgtgctggcctaattaagagcctttaatttgctagctaagctgccatgatctacttgatcaacctgtcctaagagcatgtagcatatgcttagcttgttgctttgggtgaataatcgcgcaacttttatacattgttgtgccctctgaataatatgtgcagtactatatatgaagtattgtaccgcatatgttatgtattacatgtgcaggtcttgtgcacacctgtgaggtgaatggatatattatgaatatataacgtgttgtattatgaaaaaaaaaaaaaaa

SEQ ID NO: 389002 - DNA, 322 bp, Oryza sativa
ccacgcgtccgcccacgcgtccgcccacgcgtccgggagtttctcaagatgatgaagaggataggatttggggccgggtttttttagctcagcaagcagctaattaatcactagtgcttcagtaaacacaaaataatgtttggggaggtttaggcatgatgtaccgactggatggcatactatcactatgtacatatgtaggttaagttggtaccataccgccttatgttttgcaactggtgttttggtgactgagacgatgtacataattgtacagcagtacagataccaaggtagatcaaataaacacgagattgttatt

SEQ ID NO: 389003 - DNA, 1114 bp, Oryza sativa
  unsure (1)..(1114): unsure at all n locations
ctcacaacccacaacattttcaaacaacgcaaagcagtagcagcagcgagaagcaagcaagaagcgatggggatggggatgaggagggagagggacgcggaggcggagctgaacctgccgccggggttcaggttccaccccacggacgacgagctggtggagcactacctgtgcaggaaggcggcggggcagcgcctgccggtgccgatcatcgccgaggtggatctctacaagttcgacccgtgggatctgcccgagcgcgcgctgttcggcgccagggagtggtacttcttcaccccgcgggatcgaaagtatcctaatgggtcacgccccaaccgcgccgccggcaacgggtactggaaggccaccggcgccgacaagcccgtcgcgccgcgggggcgcacgcttgggatcaagaaggcgctcgtgttctacgccggcaaggggccgcgaggggtcaagactgattggatcatgcatgagtaccggctcgccgatgctggccgcgccgccgcgggcgccaagaagggatctctcaggttggatgattgggtgctgtgtcggctgtacaacaagaagaacgagtgggagaagatgcagcaggggaaggaggtgaaggaggaggcgtccgacatggttacgtcgcagtcgcactcgcacacccactcgtggggcgagacgcgcacgccggagtcggagatcgtggacaacgaccccttcccggagctggactcgttcccggcgttccagcctgcgccgccgccggcgacggcgattatggtgcccaagaaagaatcgatggacgacgccaccgcgggcgccgccgccgccgccaccatccccaggaaacaacaacagcctgttcgtggacctganctaccacaatatccagggcntgttcngcggcctcgacatgctgccgccgggngacaacttctactcgtcgctcttcccgtctccccgggttnagggganaanccncccnccggcgccggcntgggcntggtcccgttctgaggttacggcnacccatcaaacaggtggtgntcnatgctnccacntntnttnntttacaccnccgngctggggtcaaaaaatgggtccnggtnaaccc

SEQ ID NO: 389004 - DNA, 613 bp, Oryza sativa
ccacgcgtccgcccacgcgtccgcacacaaaatatcagaggacgcagacagacttgataaccctcgttccccaaattcgcaatccctctctctcccatggccggctacccgccaaaccccggctccggctacccctacggcggcgccggcggctacggtgccccgccaccgccctacggctcctcccccgccccctccgccccgccctacggcgagaagcctcccaaggaaggtaagacctcctcctcttccgccccttactacggcggcggaggcggctacggcgccccgccctccacccagccctacggcagcggaggcggctacggcgccccaccctccacccagcggccccagtcctacggcggcggctacggggctccgccctccagccagccgtacggcgcgccatacggggccccgccgccctcgtcggcgccgtacggggcgcccggcgggtacggcagcccgttcgcgtcgctggtgccaacggcgttcccgcccgggacggatcccaacgtggtggcgtgcttccaggcggcggaccgcgacggcagcgggatgatcgacgacaaggagctgcagtccgcgctgtccgggtacagtcagagct

SEQ ID NO: 389005 - DNA, 855 bp, Oryza sativa
gtttatttatcaaggaaaaatctctcttcctatctccttcctccccacccacccccaaatccacctcgccgtcgccgccgcgaaaccctaggcagccatagccatggctgcggccatcctcctccgccgcgtcccccccgcgcgggcccaggccacggcgctcatcgcggcgcgctcgatctcggactccacggcgccgctcaccatcgagacctcggtccccttcacctcccacatcgtcgacccgccctcgcgcgacgtcaccaccaccccggccgagctcctcaccttcttccgcgacatgtccgtgatgcgccggatggagatcgccgcggattccctctataaggccaagctcatccgcgggttctgccacctctacgacggccaggaggccgtcgccgtcgggatggaggccgccatcacccgctccgattccatcatcaccgcgtaccgcgatcactgcacctacctcgcacgcggcggcgacctcgtctccgcgttcgcggagctcatgggccgccaggctgggtgctcccgcgggaagggcggatccatgcatttctacaagaaggacgccaatttctatggtggccacggtatcgtcggcgcccaggttccccttggatgcggtctcgccttcgcgcagaagtataggaaagaggaaactgctacgtttgccctctatggtgatggtgccgcgaaccagggccagctctttgaggccctcaatatatcggctctttggaagctgccagctatattggtctgcgaaaacaaccattatgggatgggaaccgctgagtggagggcagcaaagagccctggctactacaagcgtggtgattatgtgcc

SEQ ID NO: 389006 - DNA, 704 bp, Oryza sativa
acatcctctcgtttttcttcaccccaacggccggccggcgtgcggcggccggcggcacgcggcccctgccctttccttgaccaaacctcgagctctagcaaccggtcgccagcaagcacccgacagctgccgctctcgacaagctcgacggagcctcctctctcaccacacgccgttgtctccgtcttgcataagttgtttcgatccaattttctcagctcctttcctctccttttttttcttcgtagcgtgcagcacaagagcgcactccagcaagcagcgagcaccacaaggttgctgatgctccagcctccatcatgatgcttgaccagcaatgggaagtacaaatcccaagccaaggggcttggaagcatttggaggaaccaaaacaaggattagttccacttcagttctttgcggatgcagttttttcaaggtttccactgttgttgcagaagcacgctagtatcaagtggtttagattcgttttcaagaacatgtgttgtcttttatgtttttatcgtttcgatctgagcgatgatagcatcagctcatcagcacatctgaagtgtgtatcatatgtttgtgagaggaattttttgtcaacttttcagctccactttgtactacaaaagtatatgtaaactgaagaatcaatgtaattgagtatttttctattgataatagaatggcatttttatttc

SEQ ID NO: 389007 - DNA, 1006 bp, Oryza sativa
  unsure (1)..(1006): unsure at all n locations
gcgtaaaatcatcctccctccctttctcgcgtgtcgcgtcgtccccaaatccgctactcgctatcctccttcctccatgattcccttctcgaatcttctcactttcttctgaagtgctccgctccgctccgctccgatccaatccactccgcccgagtcccccacccatcggcacccaccagcgcgagggtgggtggccatcgatcgatcggcccatcgccgattcccgcgggatctgcggcggcgcggggggatttgatcggagggtgaatatgtcgacgccagcaaggaagaggttgatgagggatttcaaacgactgatgcaggatcctccagctggcataagtggggccccacaggacaacaatataatgctttggaatgctgtaatttttggccctgatgatactccttgggatggaggtacgttcaagctgacacttcagtttactgaagattatcctaacaagccacctacagtgcgatttgtttctcggatgtttcatcctaacatttatgctgatgggagcatatgcttagatatactacaaaaccagtggagccccatatatgatgtagctgctatactcacatccatccagtcgctgctttgcgatccaaacccaaattcacctgccaactctgaagctgcccgcctattcagtgagaacaagcgggaatacaaccgaaaagttcgtgagatagtggagcagagctggaccgcggactgatccactccatctaaccatatgatgcctgatacttaaaacgctcatcttttcagtgtgtcgtgtaccaaactgcttgtaattaaaatgctaaaacagtaaaacgtgcttactgttatgtatgcccttcccgaatacgaggaaggctttggaccatgttgaggaccatatggacttcttatataacatctattgttgccagctactaagtgttaaatgctatattgagtacgaagccgtgcctaaaattcaatgagtnnnnnnnnnnnnnnnnnnnn

SEQ ID NO: 389008 - DNA, 546 bp, Oryza sativa
ccacgcgtccgcccacgcgtccgcccacgcgtccgcccacgcgtccggaagaaaaccttggcccttgaatagttgtgttcttctctgaaacctttttagagaggtgagtgcttgttcatcagaagcagagagacaagatgtataacgctccaatggcacaggacatgtcctactatgaacatgtgcagaggcgccatgaggagaagggttgcctctatgcatgcatcttcactgcactgtgctgcttctgctgctacgagacctgcgagtgctgcctcgactgcctctgctgctgctgcaactaggctgccatatcaagccatagcaagaacatgatcaagatgaggatggagatcgcctccatctctcttacccctgagatttcataatttatcagcccgttgtcatcatgtaaaattaataaacatgtagtagatggaaactttgtcagaatcgagcatttgtgttctgaaaaagaggactattgtaagaaacccagaatactgttatctgaagtgctttctatgaaaaaaaaaaaaaaaaaaa

SEQ ID NO: 389009 - DNA, 731 bp, Oryza sativa
gtttcattttgctgctcgatgcctcgccaccagggaaggggggtgcttttgcggtgtggtatgcatttgtacgctgcattggtgctatgattggcttcgctgctgcatccgctgggcctgggcgtgctggaggatcgtttgctgctgcgttcctaggcagcttcctcggcatcattgttctgatctttggtaatgtgagcaacatcggggcgctgaaggctgctgggcatctgaagggaatggaagacgagaagaggctgggcatggagaaaggggaaggcatgagtgcggttgccgattccggcgagggaagggggagggtatgatgatgattaaatgggcttgtgggaaggaaagattggaaaattgctgtggaggttgtgtttgtgagagggatttgttcttctttcttgtttctttcttgttcatgtttcagtgacactgttaattcggtgctttgccccccttggatgcatgatgatgatgacatagtggtagaggaagtgtgctagttgttaatgtgttattctttgcttggaagacaattgtaactgatgatatggttctttgttcatcgccaccgaaattctctctggcagtcatgcttcgtggttgcttttctgttgaaaatgtgattgtcttagtgtattaaattaatataattaaaataaagaattatattaaaattaaaatataatttaataaataatttattttttattttggggcgc

SEQ ID NO: 389010 - DNA, 863 bp, Oryza sativa
cccacgcgtccgcccacgcgtccgcccacgcgtccgggttgctgccctcttcattcgctcgctcccctcctcgccgcgccgccatctagggtttcgtcttctcctccgccgccgaccgccatggctcgccgcagctcagcaaggtctcgccctgcaccacgtgctgctcccgtgaggaaccctccgcagccagcaaggcaggctcctcctccagctcctgcccagaacggaggtggctctatcctgggaggaattggttccactattgctcaaggcatggcttttggtactggtagtgccatggcacatagggctgttgatgctgtaatgggtccccgtaccattcagcatgagactgttgtctccgaggctgctgcctctgccaccccaatggccaacgccacttccatctgactcatgcagcatccattccaaggccttccaagactgcatcaacaactatggaagtgacatcagcaagtgccaattctacctggatatgctgaacgagtgccgccgtggtggtgcatctgcttaggctggtggccttttggaacttttattaattgggcctcgcgttactctcatgattatacatgaataacttggcaaattcatgaacttggtgccactgcttatggctgtactctgataatcgttggtacgcttgggtttgtggtatgctacttctgggagtaggtacattctactatcctaaaatgctagaactgcctacattgctctgggtgtcataaatattatggaattaaacccgttatttctcgaaacgctccgttgtttcatgtttcgtggaatcacagcagtctccgtttgccgccttgttttgaaaaaaaaaaaaaaaa

SEQ ID NO: 389011 - DNA, 1529 bp, Oryza sativa
  unsure (1)..(1529): unsure at all n locations
cgacgtcgagggcgtcgtctccctccccaaggagcccctcaaggccaccacgcagcaggtggagattcaggtgaggaagatctattgcatcaatagggcgatccccacccttccaatcaaccttgaggatgcctcacggagtgtgctcgaaattgaaaaggctgaacaagctggagagaagctagttcgtgtgggccaagatactcgcttgaactatagagctattgatctccggacacctgcaaatcaagcaatattcagaattcaatgtcaagttgagaacaaattcagggaatattttctgtcgaaaaattttgttgggattcacagcccaaagctaattgctggatccagcgaaggtggtgcagctgtattcaagctacagtacaatggacagccagcatgtttagcacagtctcctcagttgtataagcagatggctatttgtggtgggtttgaacgtgtatttgaggttggacctgtttttagagctgagaattcaaacactcacaggcatctgtgtgagtttgttggccttgatgctgagatggagattaaggaacattattttgaggtttgcgacataatagatggtttgtttgtagcaatatttaaacacttgaatgaaaattgcaagaaagaactagagacaataaacaggcaatatccatttgaacctctgaagtatttagagaaaactttgaagctcacgtatgaagaaggaattcaaatgctgaaggaagctggaacagaaatcgaacccatgggtgacctcaacactgaagctgagaaaaaactaggccggcttgttaaggagaagtatggaacagaatttttcatcctctatcggtatcctttggctgtgcgtcccttctacaccatgccttgttatgacaacccagcttacagtaactcttttgatgtctttattcgaggagaggaaataatatctggagcacaaagaatacatttaccagagctattgacgaaacgtgcaacagagtgtggaattgatgcgagtactatttcatcatatatcgaatcgttcagctatggtgcacctcctcatggtggttttggtgtcggcctggagagggtggtaatgctgttctgcgccctaaacaacatcaggaagacatcacttttccctcgcgatccacaaaggctggtgccataatttgctttttttcccaagagcaaggtttggactcagtacggactgggcagttttcctcggctggtttttttacctggacattattttcgtatttattaatgtgctgtactgcaaaagctgctcctttccacaacatttggaatagttgccgatacatttggaatagggctcaacgttggcgttgtgatttcgttgatgattccgctattcgtaacaatggcgaatccagagcagaaatgaccctatgtcagaaacatatcacatactcgtatgcctatatttccaaaagataagggattatggaaggatgacatattcaagtcccnnnnnnnnnnnnnnnnnnnnnnnnnnn

SEQ ID NO: 389012 - DNA, 650 bp, Oryza sativa
  unsure (1)..(650): unsure at all n locations
agcaaagctaaccaggagaaagcaaccgaagatgcttctggctctagttcaagcaaggccaccaaaactcaggagaaggatgccgatgcaatgcaggttgataacgcggcggagaagaaggctcctgaacccgaaccaaccttccagatcctcacaaacccagcacgcgtcatccctacccaagagaagttcatcaagtttatcgagggcagccgatatgtcccggtgaaacctgctccatctggattcatcctcctccaggacatgcagccaaccgaggcggaggtactcgcactcaccgatgccccctcaactgtggctgcgaccactggtagcgccgctgctgccacaggccaacaggcctcatctgccatggctgtcgacgacgagccgcagccaccacaacctttcgagtacacctcgtgatggtagaaatgtaggaggcttgtaatagagatctggactcgcaaatcctttctttcctactgtatacgttgcttattcttttttgagtatgtaatgcgcggaaatttgttgctggaaaaaaaataactgatgaatcgtccgtagagaactttgatggagattatacgatgggtcttttgagttggggtnnnnnnnnnnnnnnnnnnnnnnnnnnnnnnnnnnnn

SEQ ID NO: 389013 - DNA, 469 bp, Oryza sativa
ccacgcgtccgcggacgcgtgggtggatgacgcgtcgcccccagattacagctcaattgaggtcatccaatctgtcattgagcatcacaatgccattttcactgatgcgaacgagaccgtatggagatagccagcgtctctagatttcactggtgttattagctcgtgcaatgtacaagttccaggtaggaggatggagtatttgcacattgtcgtcagggagacgcattttggtcgaaatatttcttaaaatagatttgtatatatactagtattaattctccataggaggaatctatttgtaggaccctcggcacgtctcatcaataaagctttctggtgccttataatgttcggttgtaaacctggtagacatgttatgatgtgccttatactcgtgttcttcatggcaaattactattgtatgaactgcactgatgataaaggttaccagaaaccattggtcgtt

SEQ ID NO: 389014 - DNA, 1567 bp, Oryza sativa
ccacgcgtccgtgccgatcggagctcctctatgggaatccttgcaagggacaacatgcaactgatcactgcagacggtgaaagggaaaatttggacttcgtatttgggtgtggatatgatcagcaaggaaatcttttgtcgtcgccagcaaacactgatgggatcctgggcttgagcaatgcagcaataagccttcctacccagctagccagccaagggataatttccaatgtttttggccattgcatcgcggcagatcccagcagtggtggatatatgtttctgggtgacgattacgttcctagatggggaatgacatggatgcctatcagaaatggtccagagaacctatacagcacagaagtccagaaagtgaactatggagatcagcagcttaatgtgcgacgaaaggcagggaagttaactcaagtgatatttgacagtgggagctcatatacgtatttaccacacgacgactacacaaacctgattgcttcacttaaaagtctctctccaagccttttacaagatgagtcggatcgaacactaccgttctgcatgaaacccaattttccagtgaggtctatggatgatgtgaaacacctgttcaaacccttgagtctggtattcaaaaaaagattgttcatcttgccaaggacattcgttatcccccctgaggactacttaatcatcagtgataagaacaatatctgcctaggagtgttggatggaacagagattggtcatgactcagcgatagtaatcggagatgtttcccttcgaggaaagctagttgtatataacaatgatgagaagcagataggatgggttcagtcagactgtgccaagccacagaaacaaagtggatttcctttcctctttaaaagagtgctgcaaaatcaacttttgtaaatgtcacatagaaattgaaatttaccaccagctcgactgaccatgctttacttttggacgtgcaaattctacgttcaaagctgccataatcaatatcagtgaaagtaattaaacaggacatagggtaaaaagaagatgtaagtagagatagccagtaagtatgttgtacttagtaatttgtctcttctgtatacacaaagaagcagaattatgtatatgtattttgtagaatatatctcaaccacctgtaaagagtatatctcatccacttgtaagactaagtggtgaagcatatatcagtgaagccatggcatttctcgttcaaaaaaaaaaaaaaaaaaaaaaaaaaaaaaaaaaaaaaaaaaaaaaaaaaaaaaaaaaaaaaaaaaaaaaaaaaaaaaaaaaaaaaaaaaaaaaaaaaaaaaaaaaaaaaaaaaaaaaaggggggggccgttttaggggacccaagtttactaccccgggcttgcaaggtaaaagtttttttttggggccccctaaattaaattcacgggccgcggtttaacaacgtcggaccgggaaaaacccgggggttcccaaattaaatcgctttgaagaaaatccccttttgcccagttgggtaattaccaaaaaggcccgcccctatcgcctttcc

SEQ ID NO: 389015 - DNA, 669 bp, Oryza sativa
  unsure (1)..(669): unsure at all n locations
ccacgcgtccggcgcggcgcggtcgcctttgccctgccctgcactgaccgttggagagccaagcaacccaacccaagcgctcttctcttctcctcctcttcctcccaaatcgatcgggatccgatgcgcacggaggaggaaggagcatggtgaggacgcccgagaggagctactcctgctcctccgccaaggaagtcgcctacagctgtggttactgtggctatgcattgaacctgagctcctcaacacggaacacagcgaacattggatccaagtatggtaagcagatcaggaaaggtgtaatctcattctttgcgatcgacgagagtcggttcacacaaactgatgaggtgagctgcatgccatacttccattcaaggcgctcctggggtttgttcagaaagaggacaaggttgatctgccgcaaatgtggtggccgtatcggtaatgcttatgaggatgaggattccacattgtatgatggttcagatgatttgcacattgacctccgagggctacagcttgtcgagggggaaggaaatatgttatcaagattaatgcactgcagccttcaaccgatgactctggtgttcccttcaccctgtgatgctgtcctgaccttcttcagtatgcacttttggattcttgnccttcggtatactggccttt

SEQ ID NO: 389016 - DNA, 714 bp, Oryza sativa
ccaaatctcacaacccacctcccctccgcctctcccatctacccaccggcgggcggcggcggcgacatggagggtggcggcgaggagttcgcgatcggggtgctgatctccgtgaagaccaccctcggcgaggagttcgaaggccagatcgtctccttcgaccgcccgaccaacctcctcgtcattcaggaaggcgtggggagggcagagagaggtgagcggaggaacgtgcgggtgctcaaggcgaactacatccgggagttctccgttgtaggcaaggccgacgacccgctcgacccggccggctgcgtgctcgacctcgccgccatccacgcccgggaggaggccgctctcagacttgctgtgattgtagccgcgtgaattggtgttggtgtcaccccagaagctcaaagcatatttgatgcattgtccaagacgcttccagttcagtgggacaagactgacattgttgtaatgaaggaggttcgtgtatgcaatccatacctgcctgaaaatgtcagtggaggaacatctgctgcaaatgaacgggttaagaaagtgcttgactttgaaaggaaaaggctacatgtgcgtgtacctggccaattctaacttattcggctgcttttcacctgaactccccctttgtactctactttaagggctgaatcatcaatagatttttctaaaatttgtttctgcaaaatccatgcc

SEQ ID NO: 389017 - DNA, 545 bp, Oryza sativa
ccacgcgtccggtggaacttttactttttaaccgttgtactgtaagccacttcaatacaggccatcatatacaactagggagcacgttttcttgtgtgctactgacaaataaaatacaaagtacatttcaatgagatttgtttacagcttataagtgatgttctttgttttacaccatttttagtcatcgtacaaaattaggctgaaattgttcttaatgctattcttttcagcacaaaagtccctgttgctcctgtgcttggagttctttcctctggggctcctcctcctgtccattgccctcggtgttataaagttaccatttgatatttctggtctgggcaatcatcctaatgtaaggtgttagtttgttctattattctattctcgattatacaagctgtggctttaaagaaatagcagtacatatgatatggccctttgaggtcacttccataaccttggatctgggtgtgcatcatttgtcagtacaccattgccctcggtgttataaagttaccatttgatatttctttgatctgatc

SEQ ID NO: 389018 - DNA, 445 bp, Oryza sativa
  unsure (1)..(445): unsure at all n locations
ccacgcgtccggagctacggtgcacggccactaagaagagccgtcactcagctggttgaggatgttatcagcgaagcaattctgtctggtccagttcaagtcctggtgacaccataatggtggacactgatgcccacggggaaaccttgcttgagcccgactgaatgatcagaccgtccaattatccgatccgacaccaacactttgaaggttcaaacaccctatgtatattcgtgatttactcatttattcttccacaccgataagcaagcttcttgtgcatgcataggttccatagttcatgtacatagcctccacatgctggaatttctccatgcatataatgtaaatttgaatctaacatcaactgtacatatcattgaatttcaaaaggtacttgaaccatttacatgattagatggtccnnnnnnnnnnnnnnnnnnnn

SEQ ID NO: 389019 - DNA, 663 bp, Oryza sativa
  unsure (1)..(663): unsure at all n locations
gcaccagaacgacgccggcgccgtgcggaagctgctggaggaggacgccgcgctcgtcaacgcccgcgactacgacagccgcacgccgctccacgtcgctgcgctccacgggtggcacgacgtcgccgagtgcctcatcgccaacggcncgacgtcaacgcccaggatcgctggcagaacacgccacttgctgatgcggagggtgcaaagaggcatgctcggatcgagctactcaaggaacatggtggattgacatatgtattccgattccaccagtcactctatgttatggaattagtgggggaaaactggaagtcattttgaaccaaagacaattccaccacccctaacaaacaaggctgactgggagattaaccctcttgagttggatttctcaaaagctgttatcatcggaaagggctctttttggtgaaattctgaaagccaactggcgaggaacacctattgctgtcaagcgcattcttccatctctatctgatgacaggctggtgatacaagatttcaagcatgaagtcaacttgctaataaagctgagacatccaaatattgtgcagttccttggagcagtcacagaaaccaagcctttaatgctcgttactgagtttttacgaggaggcgaccttcatcaatacctgaaggaga

SEQ ID NO: 389020 - DNA, 368 bp, Oryza sativa
cagcgtactatcagagagctgggatctacaccagaacttctgtacattggtgactatggccatattgattttgttatgagcgtgaaggcgaaagatgatgtttatgtggacctaataagatttcttagggaaaatggatggcataatagctattaggatgtcttcatgtgtataataaaaacatctgtacaggattgggcctctcccgatgtgagtatgtatatattgcatatgagcttgttggatctatggtgcatgctctcaagtctaaaacgctgtcagcagcaattgtatcattgtatccaacttatcgctccactactgtatatccattatagaaaaccctcttcatttcctcttcaaccaaa

SEQ ID NO: 389021 - DNA, 740 bp, Oryza sativa
ccacgcgtccgcttagcgaatccagcagcagaagctgctgccgacggcgacggtgatcgtgtacgaggtgctgaccccgatcgtcaccaacaccggcgactgccacgtggcgaacaaggtcgtcacgccggtgatcctggtgctctgcgccttcttctgcgcgttctcgcagttcacggacagctacgtcggcgccgacggcaaggtgaggtacgggctggtgacggcgagggggctgctgccgttcagcggcggcggcggcgccgacggcggggacgccgccggcagggacttctccaagtacaggctgcggttcggcgacttcgtgcacgccttcttctccgtggcggtgttcgccgcggtggcgctgctcgccgacgccaacacggtgtcgtgcttctacccgtcgctcaaggaccagcagaagaaggtggtcatggcgctccccgtcgtcgtcggcgcgctcgccagcgtcgtcttcgtcgtgttcccgtccacccgccacgggatcggctacccgccggcgaagcccgccacggcgtcgctggcgtcgctgtaggcggcgagcccgattagtcgatttgcattgacatgcaggcatgtgcttccttttatatggactcggtgcatttaaatatttgcacgtgtgcatatgtgttctgtctgatgcttttgttcgcatttgttcatctgtctgtttgtgacctaataaggccaagagctagtttgatctcgttgat

SEQ ID NO: 389022 - DNA, 973 bp, Oryza sativa
ccacgcgtccgagaaccactgcccggagggcgtcttcacctacaactccgtcgacaaggacggcaccgtcacctacggcggttactcgagcatggtggtggtgcacgagcgcttcgtggtcatgttcccggaggcgatgccgctcgacgtcggcgccccgctgctgtgcgccggcatcaccgtgtacacccccatgaagtaccacggcctgaacgcgccggggaagcacgtcggcgtgctcggcctgggcgggctcggccacgtcgcggtgaagttcgccagggcgttcgggttgaaggtgacggtgatcagctcgtcgccggggaagaagcgggaggcgctggagcggctcggcgccgacgcgttcgtcgttgagcagcagcgccgaggagatggaggccgcgaggtccaccatggacggcgtcatcaacacggtctccgccaacacccccatggcgccgtacctggcgttgctgaagcccaacgggaagatgatcctcgtcggcctcccggagaatcccctggaggtccctcccttctctctcgtccacgggaacaggactctggcagggagcaacatcggcggcatggcggacacgcaggagatgatcgagctggcggcgaagcacggcgtgacggcggacatcgaggtgatcggcgccgacgacgtgaacacggccatggagcgcctcgccaaggcggatgtcaggtatcgcttcgtcatcgacgtcgggaacaccctccacgccgccgccgccgagtgatggcatcgcctgcaaactattcgtgtggtctgtaatctgtatgaaattgttcatggtacgtacacgatatatagattgtggcgtgtcatggcgtataggaatgaacccgatcgaggaagctattggtggtaggctgatgctagtcagctcagtgtttgactgtttgcatttacggattgaaattgagctttgtgtggcctaaaaacaaa

SEQ ID NO: 389023 - DNA, 776 bp, Oryza sativa
  unsure (1)..(776): unsure at all n locations
aattaggggttcctattgtaatgcatgactacttaaccgggggnttcaccgcaaatactagtttggctcattattgccgcgacaacggcctacttcttcacattcaccgagcaatgcatncagttattgatagacagaaaaatcatggtatgcattnccgtgtattagctaaagcattgcgtatgtctgggggagatcatatccacgctggtacagtagtaggtaagttagaaggggaccgcgaaatgcctttaggttttgttgatttattgcccgatgattttattgaaaaagttcgtgctcccggtatctttttccctcaggactgggtatccatgccaggtgttataccggtggcttcagggggtattcatgtttggcatatgccagctctgaccgaaatctttggagatgattctgtattgcaatttggtggaggaactttaggacatccttggggtaatgcacctggtgcagcagctaatcgggtggctttagaagcctgtgtacaagctcgtaacgaagggcgcgatcttgctcgtgaaggtaatgaaattatccgatcagcttgcaaatggagtcctgaactagccgcagcttgtgaaatatggaaagcgatcaaattcgagttcgagccggtagataaactagatagctagactaagtggataaaattagatagaaaaaaggtcttaataaaaaaaacaaaaaaaaaataataagatgtgtttaataaataaaaaaaaatgataactaataaatatgataaataaaaa

SEQ ID NO: 389024 - DNA, 479 bp, Oryza sativa
  unsure (1)..(479): unsure at all n locations
tatcaagcgagacagttcgttccacctccacgaggaagctactgctaagggatactatgtgaaagatgcgactgggaaagacttcgatgggtggtgctggcctggggcatcgtcatatcctgacatgttaaaccctgagatacgagagtggtgggctgacaagttctcctatgaaaactacaagggatcaactccaacattgtatatctggaatgacatgaatgaaccatcagtcttcaatggccctgaggtaaccatgccaagggatgcagtacattacggggatgttgagcacagagaactgcacaacgcctacggatactacttccatatggctacagcagatggacttcttaagagaggtgaagggaaagacaggcccttcgttctgtcaagggccttctttgnctgaagtcaacggtatggagcaatttggacgggcgacaactctgcagatggggaccaccttaaatcttcta

SEQ ID NO: 389025 - DNA, 774 bp, Oryza sativa
ccacgcgtccgaagcaatatccttagcacgacaattcacggccacaatgcatccatgatcaccggctccctcctccccctccccgcgactacctgctgctccggtcgccgttccctcccgcacgacgaccaccacctttccgagacctgctactcccctccgccggcaccgccacctctcctcctcctcctcctccgcgtcgtccacggagagcgacggcggcggcgggagcacgaacgggtcgctgccggggctcccccccgtggtcgtcgaggaggaggaggaggagttctgcccggtggagtgcgtgacggagttcaagacggaggaggagctggcccgcgtcctggagcgcgccaaggcgacgggggcgctggtggtggtggacggcttccgcccgtcctgcggcagctgcaagtacatcgagcaaggcttcatgaagctctgcaagggctccggcgaccacggctcctccgtcgtcttcctcaagcacaacgtcatcgacgagtacgacgagcagtcagaggtggcagaccggcttcgcatcaaggtggtgccgctgttccatttctacaagaacggggtgctgctggaggcgttcgcgacgcgggacaaggagaggatcatcgccgccatccagaagtacaccgctccatcgtcgccgcctgctgaatcagaggagccatcacaggagggatgattccacacagggttgagttgcgtgtcatgatctgaactcaaagtattagcgatctcactacaacgaagaaattg

SEQ ID NO: 389026 - DNA, 350 bp, Oryza sativa
  unsure (1)..(350): unsure at all n locations
ccacgcgtccgcggacgcgtggccacggatcgagggcgaccgataatggaaggcgagcagcagcagcagcagcagcagagcgtcgcggcggtgaggccgtcgctggggaaggcgccgtcgccgtcgttccggctccggaacggcagcctcaacgcggtgcgcctccgcagggtgttcgacctgttcgaccgcaacggcgacggcgagatcaccgtggacgagctggcgcaggcgctggacgcgctcggcctccaggccgaccgcgccggcctggccgccaccgtcggcgcccacgtccccgacggcgcggcggggcttcggttcgaggactttnagtcccttcaccgcgc

SEQ ID NO: 389027 - DNA, 2212 bp, Oryza sativa
  unsure (1)..(2212): unsure at all n locations
cggtggcggccgcctccttcccggcgacctcgctctacgtcggggatctcgacgtcagcgtgcaggacgcgcactcttcgacgtcttcgcgcaggtcggcggcgtcgtctccgtgcgcgtctgcagggacgtcaacacgcggaggtcgctcggctacgcctacgtcaactacagcagccccgccgatgctgcacgagcgttggaaatgctcaacttcactcctatcaatggaaaacctatcaggatcatgtattctaaccgtgaccccagcttgcgcaagagtggcacagcaaatatttttatcaagaaccttgataagtcgatagacaacaaagctttgtatgatactttctgtgtgtttggaaacattctttcatgtaaagttgcaacagatgcttctggagaatcgaagggctatggctttgttcagtatgagcgggatgaggcagctcaagctgctattgataaactcaatggcatgcttatgaatgacaaaaaggtgtatgttgggcctttcattcgtaagcaggagagggataattctccaggccaggtcaagttcaataatgtctatgtaaagaacctgtctgagaatactactgaagatgacttgaaggaaatctttggaaaatttggaaccatcactagcgctgttgtaatgcgtgagggagatggaagatccaagtgttttggatttgttaactttgaaagtccagatgatgctgctcaggctgtccaagagctgaatggcaagaagtttgatgataaggaatggtatgttggaagggcacaaaagaaatcggaaagagagatggaattgaaagagaaatttgagaagaaccttcaagaagcagcagataagtatcaaaacactaacctgtacctgaagaacttggatgatagtgttgatgatgataagttgagggagctttttgctgagtatggcactattacttcctgcaaggtgatgcgggattcaaatggtgtcagcagaggttctggatttgttgcgtttaaatctgctgaagatgcttcccgagctcttgccgaaatgaacagcaagatggttggcagcaaaccgctctacgttgcgcttgcacagcgcaaggaagacaggaaagcaaggctgcaggcacaattttcacaactgaggcctgtcccacttgctccttcagttggtcctcgcatgcccatgtttccacctggtgttcctggagttggacagcaactgttctatggtcagccccctccagcgtttatcaacacacagcctggtttcggcttccagcagcctcttatgcctgggatgaggccaggtgcaggtccaatgccgaactttatcatgcctatggttcagcaaggacaacagccgcagcgtccggctggtaggcgtgctggtgctggtggaatgcagcaacccatgccaatgggtcagcaacagatgatggctaggggcggccgtggctatcggtatcctacaggacgtggcatgcctgatcctgcaatgcatggtgttgggggtggtgtgatgccatctccatatgagatgggaggcatgcccatgagagatgctgctgcgtcacagcctgtacctattggagcattggctactgcactggccaacgcagcccctgatcagcaaagaatgatgcttggtgagaacttgtatcctcttgttgatcagctggagcatgagcaggctgcgaaggtgactggcatgctgctggagatggaccagactgaggtgctgcacctgctcgagtctccagaggctctcaaggccaaggttgctgaagccatggaggtccttcgcacggcccagcagatccagacgaacgcgacgcctgaacagcagcttgcttctctgtcgctgaatgacggcgtcgtttcctcctaagcataacgacgacagcaatttttgatccatatctcagttatcttatctatctagaattgaaaacgacttggttacttggtttattggagttttagttttattggtagttgaactaggcatttaggcaatgcgcgtggattgggtattttgtttgctcggatcttttattttgctttataagttatcatatggattgctactttatgtcttctggtagcatcttttattttgtgggtgatgcatgatttagcagtcttgatctgcaccaaatgaagcaaactttggntnnnnnnnnnnnnnnnnnnnnnnnnnnnn

SEQ ID NO: 389028 - DNA, 618 bp, Oryza sativa
catccagctatttcgtctgtctctgtcgggtggagtcgaaactgctacgtcgttggggtgcgacgaagcttggcaacgataacatttgcagtttctctctagggatgtgggtgttgctagtacaggctttggcgcttcaggggcttgaatgatgtccaaagtgtgagcttggtgttgctttgctcggtttggcggtgcctacaatgatgccatgatcgccgtggagttggagctgctgggtcgctgggcggctagctcggtaacgatgacatgtgccttgtgatgtcaacgcggtgtgccgcctcttcagcatctcgacatcggtgttcgtcgttggattccgccatcgtttcgttgatagtttggctagagtgatatagagctccgtgtgctgtgtggttgtaccagccacggtggaaagacttggcgagtctctactcgccgagagtttgttttttctttttctgtaacccgtctgggtttttactcctgtttaatgaaatatgggtgacagttctcctgccggtttagtttaaaaaaaaacccaagctcatttttgagagtcaacgttgtactccatcatgcgtactcaggtatgagcatcgcgctgcaatttcc

SEQ ID NO: 389029 - DNA, 692 bp, Oryza sativa
  unsure (1)..(692): unsure at all n locations
ccacgcgtccggcaggccgcgagcctacctaagccgtggagtggtgaactgggctaactggtggctgatgagatgatgtggtggttccgcgacggttgttgtgtggttcggtggtggcgctggacgaaaatcattggcaaaagccttgcttagcctttggctagcacgacaacggcggcgcctttggcgtcgttcccttcttggaggcgtcgttatagcattttctccacgctaccagtctttaggtgaaaactgtgatccggtttccggacgggcgatggtggcgtttcacgtcgtatcctccttgggggcatcgtcttggagaaccttacccatgcaccatttgccgcttgtggactcctgtgtcagctcgatgcgctagatgcctaggtgcttggcgaggccttgtccttcttggttcctttcttgtattggtggcatccagcttattcgtctgtctctgtcgggtggagtcgaaactgctacgtcgttggggtgcgacgaagcttggcnnaaaaaaaaaaaaaaaaaaaaaaaaaaaaaaaataaaaaaaaaaaaaaaaaaaaaaataaaaaaaaaaaaatatataaaaatataataataatatcaaaaaaaaaacaaaaggggggggcctttttaaaggatccaagtttacctccccgggtttgcacaggtatactttttttttggg

SEQ ID NO: 389030 - DNA, 1597 bp, Oryza sativa
ctggaattccagggcatcaaaaagcaatttactatgctccagacatggcctgtccggtcaccaaggcctgtttcatcaaagcttgctgctgacacgcctcttctaacaggacagcgtgtacttgatgcactatttccctcagttcttggaggaacttgtgctattcctggagcatttggttgtggaaaaactgtcattagtcaggcactttcaaagtactccaattctgaagctgtggtttatgtgggctgcggggaaagaggaaacgagatggctgaggtccttatggacttcccacaattgacaatgacattgcctgatggacgtgaagagtctgtcatgaaaagaactacacttgttgctaacacatccaacatgcctgttgctgctcgtgaagcctccatttatacaggaattacaattgctgaatacttccgtgacatgggctataatgtcagtatgatggctgattctacttctcggtgggctgaagctttgcgtgagatttcaggacgtctggctgaaatgcctgcggatagtggttaccctgcatatttggctgcacgtttggcatccttttacgaacgtgctggtaaggtgaaatgtctcggcagtccagatcggacaggcagtgtcacaattgttggtgctgtctctccacctggaggtgatttttcagatcctgttacctctgcaactcttagtattgtgcaggtcttttggggattggataagaagctggctcaaagaaagcatttcccatctgtcaattggctcatctcttactcaaaatactcaaaggctctggaatccttctatgagaagtttgatcaagatttcattgatattagaacaaaagctcgtgaagtgctacagagagaggacgatctaaatgaaattgtccagcttgttggtaaagatgcactggcagaatctgataagattacattggaaacagccaagctactaagggaagattacttggcacagaatgcatttaccccatatgacaagttctgtccattctacaagtctgtttggatgatgcgcaacattattcatttcaatacattagcaaatcaggctgtggagcgtgcagctaatgctgatggacaaaaaataacatacagtgtcataaagcatcgtatgggtgatctattttatcgcctagtatctcaaaagtttgaggaccctgcagagggtgaagatgtcctagtcgcaaaattccagaaattgtatgatgacctcacaaccggattccgcaacctagaagatgaagctaggtgaagtgctgtaaattgaggatcacattcgtgtaaacaataaaatatcaccagatattcgaagcgagttggggcaatttattttgcttcgcgtgaggttgtagatgtgaattacgtttcagaatcatcatattttccttctgcatcgacactgctgctgctttttgtagcttcctgtttgacctccggtgctcgatgaaggcattctttttggtgtacaattatttatattgtaagatacctgtgcacatgttgatagttgaataagcacgatgaccatctacttgaacatcataaaaaaaaaaaaaatcaac

SEQ ID NO: 389031 - DNA, 758 bp, Oryza sativa
  unsure (1)..(758): unsure at all n locations
ccacgcgtccgcgcatgttgtcattatcagaggatcctgccttgatgatggcattttcaatggcacgtcgtgcagctgcagtcccacttctgttggttaatggtacctataagtcaactgtccatacatatcttgattctgccattctccaacatcagctacagaggttaagcgagcacaactcgctcaaaggaggacactcaaatcacaggtcaacattggagattccaatattctggttcatacatagtgaacccctattattggataaacattatcaagccaaatctctttcaaacatggttgtagtagttcaatcagaagttgattcttgggaaagccacttgcagtgcaatgggaggtcaatcttatgggatttgaggagaccagtaaaagctgccattgctgcaactgccgagtatgtatctggtttacttccttcacatctggcttatagcccagctcatgaaactgcaacagaggactggacttggtctgtgggctgtaatcccttatctattacttcaaaaggctggcaactttcggagtttcaacgtgatgttattgctcgtaactacatcattactgcagtggaggaatctatacaaatcatcaattcagcaattcaacaattgattacagaaaggacaagtgaacgaggctttaaacttttcaaggctcaggagagagtgctgggttgaaaagtataatcctggttgttagcttgtggagaaggggttctgctaatgtcccaaggn

SEQ ID NO: 389032 - DNA, 522 bp, Oryza sativa
ccacgcgtccgcccacgcgtccgcccacgcgtccgcacccaacggattaacatggtggcgccggcggggagcttcttccaggaggccgccctcccggagcagcggctcgtcgagggcgtcgccttcccggcggtgctcgtcccgagcgccgccgccgccgcggccggtggcggcctcgacgcgttcctggacgccgtgcggtcggagagggcgtccacggcggagccgctgctgcggggcgccggcgcggtgctgctccgcgggttcccggcgcgcgccgcggcggacttcgaccgcgccgtggacgccttcgggtacgcggagctcccctacgtcggcggcgccgccccgcggagcaacgtggtggggcgtgtctttaccggcaacgagtcgccggccgaccagaagatccccttccaccacgagatggcgcaggttccgacatttccggcgaagctgctcttcttttgcgaggtggaacccgagaatggtggcgagacaccgatagtgttgagccactac

SEQ ID NO: 389033 - DNA, 672 bp, Oryza sativa
cttctctctccgtacaacctcactattgacggagaagatacgacgacgacctcaccggcggcggcaccccccacaacgagcttcgaggttacggaggaggtacgatgacctcggcggcggcggcgttcgtcgacctcgctagtggtgggcatccccgacgacaagcttcgaggatacagagaaggtaagatgacctcgccgcctccgacgtcccccacggcgagcgtcgagtctgtggaaggaggtacgacgacgacgaccttaccagcaacgacgtctccctgattagcgtggagactgtgggaggaggcgtcgtccccatccaccaaggagctcaccgagcttggccaccatgtcctcttgaaagcttcgccatcgtctcctcctaggcatgtgttgttgctccgtgctcagggctcaactctcggtttgttgcagtttggtgtgtatgtttggtgcactttgattatttgggtgtttcattatcttttggttagatgttgcataagatgtgcaatgttttttctttgatgttccccgcaacaggctctcgatgttgcaattagttttttttccaatgtcgcatgtgtgtgaaacattttttactacacaatgaaacatttttcactgagtaatgaaatgtctgaaacaatttttaaaaaaaaaaaaaaa

SEQ ID NO: 389034 - DNA, 475 bp, Oryza sativa
ccacgcgtccgcccacgcgtccgaatttttttgattgatttttgcaggaagacgtcgacggagaagaagaggcatcagattagggtgagctcgacgggaggggtggagaatccaccggtagatgatggccatagctggagaaagtatgggcagaaagagattcttggagccaagcacccaaggttggtatttttctgatttccctctactttttccccccaatatttcagtacaaaaaaggtgtttgtttccacctttttcatagcctaatctgcacatgcgtttttcataagctttgtgctgtggcatcatcaaagatatatctgctttgctttcctgcttggtttggttgtttgtggctgccttttctttatcatggtgaaagcagctgcagcctttcctctggtctcaaatgcttggactccacctgtcagaaattcagataggatcataggaccacctgtttgtttgcatg

SEQ ID NO: 389035 - DNA, 653 bp, Oryza sativa
gtggatcgcgctcatcaacgtccccgtcatctcctacgggttcgccgggatgccgccggcgacgccgaccaacatcgcgagctggctcgtcacgggcaccatcttcaactacttcgtgttcaagtaccgcaaggggtggtggcagaagtacaactacgtgctgtcggcggcgctcgacgcccggcacggccttcatgggggtgctcatcttcttcgccctgcagaacgcccaccatgagctcaagtggtggggcacggcggtcgaccactgcccgctcgcctcctgccccaccgcgccggggatcgccgtcaagggatgcccggtgttctgagctcgccggccggagctgcacacggtggtgtatgtaggtagcaagaatttgggtttggattggggaaaaaccatgaattcagcctggtgtcagttaactgatacagtcctaatagttgtcagctgttacctcccgtgtgatgagtgtaacaaattggcttcctgcaaggaaatgatatagtagctagtagttcatataagatcatgccattctggaatatgctgaaacagagatgtgatggtagttaatcatcagagaatccgcaattacggagcaaagatgaaaaatgtaaaagcacaccattgacaaaaaaaaaaaaaa

SEQ ID NO: 389036 - DNA, 504 bp, Oryza sativa
  unsure (1)..(504): unsure at all n locations
ccacgcgtccgggttgattgatcgacatgcagcatcagcagcggatgaagcaggcggcggcggcggcgcagcagcagcagatgatgcagcaggcgctgctcatgcagcagcagcaggctgcggcggtggcggcggcggcgcagcagcagcaggcgcccttgttccccccgcaccacccgcacccgggcctcctcgcggcgccgcagatagagcccattgttagtggcaacctgcctcctggatttgattcaagtacatgccggagtgtgtatgttggcaatatccatcttcaagtgacggattcactgctacatgaggtcttccaaagtattggtccagtagaaggatgcaagctcatcaggaaggaaaagtcatcctttgggtttggtgactattatgacccgagatctgctgcaattgcaattgtatcactcaacggtagacaattgtttggccagccaataaaagtcaattnggcatatgcaaagtactcaaagggnggta

SEQ ID NO: 389037 - DNA, 864 bp, Oryza sativa
ccacgcgtccgctgattttaagtttcttgaggttgcatatccatatgtagcaaagcgtctcttgacagatccaaaccctgctctccgtgaacggctgatacaggtattattcaaagatggtctgttccaatggaaacggctagaaaaccttatagttcttgccaaggaaaacgtgtccaagatgagcagcaatcctgcactaaaaaagaatagctcgcaaattgagagaaatcgacaaatggagaagaaattagatctcaccgacacaataaaagacggagcacgtttgttccttatcgacgctggcatcaggagacaacttattatggctttcacggaggactccaagttgcatgtagaagagcttgttgatgtgtacagactggtcgaagatcaaatcgacattccatcagttgctctcgaggttatccaagatttaccatccgtcgcgcgcgatttcatgctttcttggagcgattccatcctgtcagatcggcaatactgatcctcaggttaacagtttagagcagcaagcagaagtgctgtcaagacctgcaggagccattcttccttcagttaacctacactaaaatagatagatatagatgactacatttttcctctttgctgtacacaatttggtttgctattcttttctatagtatatcattgtataggaaacttgccatctgcatttcatttatatattttcgatggctctgtatatgccgtttgtatagcggaagaaaaggaacttgtatatagaatgagcttgtattgtgggagaaagtagctatatgtgtacatcgaggaaacttacattataagatcagatcatatgttttgcaaaaaaaaaaaaaaaaa

SEQ ID NO: 389038 - DNA, 1297 bp, Oryza sativa
tcgcagcaccggtccggagtcgccggacgcatccacgcgcgcgatccccttctcccatttttcctctcctcgcttctcgccgcagccgccgccgcctcctcctcctctcgccatggccgccgctgctccccccgcgggccccgggctctactccgacatcggcaagaaggctagagatctcctgtatagggattaccacacggaccagaagttcacgctcaccacctacgccgcgaacggagctgcaatcactgttgctggcacgaagaaaaatgagtccatcttctctgaaatccagagccaggtgaagaacaacaatgtgtccgtggatgtgaaagcaacttcagactcaaaattgataactacattcacagttcatgatctgggcactccaggcctgaagggaattctatccattccttttccctaccagaagtctgcaaaggctgaagtccagtacttgcatccacatgctggcctgaatgctattgttggcctgaatgcaaatcctcttgttagcttttctggtgtgtttggaactggggcttttgctgttggtactgatgttgcatttgatactgcaactggggacttcaccaagtacaatgcgggactgagccacactactccagatctcactgcagcactgcttctgaacaacaagggagacagccttgctgcttcctactaccacaaggtgagcaaaacaagtgctgttggagcagagctggctcacagcttctcgagcaacgagaacactctcaccttcgggacacagcatgccctggatgaactcactactgtgaaggcgcgcttcaacaactttggcatggccagtgcgctcatccagcacgagttcaggcccaagtcgctcgtcaccatctccactgaggttgataccaaggccatcgacaagagctccaaggttgggctgtccctggtcctcaagccttgaaggtcgcctgctttttctggtttggtttaggatgctagcttttgatatcagcagctcattgaacaaaacttgtaatcggcttaactttggttgcctctagcctgttctagactacatgagggtttctgttaccagtcaatctgtctcggtttctttttggtcatttgcgggcatattgatgggaaaacatgtcccggaatctgagtgtcaaaactcttgggtgaaattggtcacgtacttcaaagttcaccctctgaatccagctgcagatacttctgtttgattcaaaaccatatttcttctctaactaggctactttgaattaaaaaaaaaaaaaaaaaa

SEQ ID NO: 389039 - DNA, 827 bp, Oryza sativa
  unsure (1)..(827): unsure at all n locations
tacttatccctgagaactttatttctggaagagtgccatattactgataagggtggtgaatggcttcatgaacttgctgtcaacaattctgttctggtgacactgaacttctacatgactgaactcaaagtggcgccagctgatctagagcttcttgcaaagaattgcaagtcattgatttcattgaagatgagtgagtgtgatctttcagatctgattagttttttccaaacagccaatgcgctgcaagactttgctggaggagcattctacgaggtaggagagctcaccaagtatgaaaaagttaagttcccacccagattatgcttcttggggcttacctacatgggaacaaatgagatgcctgttatcttccctttttcgatgaaactcaagaaactggacttgcaatacacttttctcacaacagaagatcattgtcagattattgcaaaatgtcccaatctactaattcttgaggtgaggaacgtgataggagatagagggctagaagttgttggtgatacatgcaagaagctacgaagactccgaattgagcggggtgatgatgatccaggtctgcaggaagagcaaggaggagtttctcagctaggcttgacagccgttgctgttggttgccgtgaattggagtacatagctgcctatgtatcggatatcaccaatggggccctggagtctattgggactttctgcaaaaatctatacggctttcggcttgtgctacttgacagggaagacaggtaacagatctgccacttgacaatggtgtctgtgctctgttaagaaantgcacaaggtttcggagg

SEQ ID NO: 389040 - DNA, 565 bp, Oryza sativa
  unsure (1)..(565): unsure at all n locations
ccacgcgtccggtggagaagaaggcatttacgccagcatcgtcttcgaagacaccattggagccagcaaagccagatgaagttcctgccgcagctgtagaggataagcaagcggcacaggagcctccaaagccacccagcaaccgatgcctgtcatgccgtaagaaggttggtctgactggcttccagtgccgatgcggaggtaccttctgctcaacacaccgttataccgaagctcacgactgcaccttcgactacaagaagcccgcccgggatcagattgccaagcagaatcctgttgtgatagccgagaagatcaacaagatctgattgaaggttatggaagggccatttaatctctattcatggtggcaaccgagtcttcaagtttacttcagccagtaggttccttcaggtctgggttagtgtgctaggagtcccaattgtgtctatccttcctccttatcatggtttcattctctggcaattaaggaataataatgtaaatatatattatattcttaactnnnnnnnnnnnnnnnnnnnnnnnnnnnnnnnnnnnnnnn

SEQ ID NO: 389041 - DNA, 768 bp, Oryza sativa
  unsure (1)..(768): unsure at all n locations
attcattttacttgtcttctgatctgatcatctcaacagttttctgtcatgttactttagttttcactatccctttccatacgtctccctctcaagtaaaattactttttttttttcaaatgtagggtagcattgatattcttcagaagtatcctgtgccagaatgtgatatctggtttatcaaattctcatgcgattttcacttcaatcaattggcaataggcaaccgtgaaggaaaagtctttgtctgggaagtacagtccagtcctcctgttttaactgctcggctgactaatccgcaatgcaaatctgcgataaggcagactgccgtgtcatttgatggaagcacaatccttgcctgcagcgaggatggcagcatatggcgatgggatgaagtggaccatccaaaagcatgaaaagtacccttatagacagaccatggcaatgccagattaagattgacttgggaattcctgcatgtgtactttgttgtgggggttatagtaatcagtcttactgttgaaaaaaagtgcaatctgatactctgaaattagaaggattgacagctgaatgctggggttaccaacttgaatgttgcaaataggatactgcttctgttatatgctgaatgtttcaagttagggcctttttgtaaatgggaagattcggctatgccagatttttggaaaagttgccatttgctttgttaccaaagttgcatggcaaagattggcccnnnnnnnnnnnnnnnnnnnnnnnnnnnnnnnn

SEQ ID NO: 389042 - DNA, 592 bp, Oryza sativa
cttccatctcctatcttcttcccttccaaaacccccatctcatcccactccggcgtctcctccgccgacgtcgccatggggcaagcctgggcgtctctccaggataaactccaagggaggcaatggaaggagaagcaggtgaggaagatcacggacaaggtgttcgaccgcctcaccgaggacaccaagaagcgcgagcaggaggccctcaccttcgaggaggtctacatcgccgtcctctgcgtctacaacgacatcaacaagtacttaccagggccgcactatgatccgccctccaaggagaagctcaaggccatgatgaatgagtacgacatcaacctggacgggctcctggaccgggaggagttcgcggagttcatccggaagctgacggcggagtcgctgtgcgcgatcagcttcaagctgctggtgacgcttgttggcggcgccggcgctggcgctggcgaccaagagggcgacggagggcgtgcccggcgtcggcagggtggtgcgcaaggtgcccaactccatctacgcctccgtcatcaccctcggcgtcgtcatggcccagaaatccaccgagggcgtcgag

SEQ ID NO: 389043 - DNA, 824 bp, Oryza sativa
  unsure (1)..(824): unsure at all n locations
tgatgttgcttaagaaaactagaagactgtcaaaaatgccaggtgaagttagagctgagcataggcccatatcatcaatgaccgttcagatataacagaggagctaagtgaaaagttagccaagacaggaaatatagtcggagatgatgctacagagcaattcataagaaaggggctcactcctagatggggtgacctcgatgtcaatcagcatgtgaacaatgttaaatatattgggtggatccttgagagtgctccaatttcagtactggagaagcatgagcttgcaagcatgaccctggattacaggaaggagtgtggtcgagacagcgtgctgcaatcacttaccaccgtgtcaggggaatgcaccagcattggcgccgacaagcaggcttctgccatccagtgcgaccatcttgtgaaggctgacattgtgaaggcacacacagagtggcgaccaaagcgatcgcatgcagcagctgagaacgcgtaaacaaacaaaccgacgaaaatctgtggtagggagaatatcaaacttcccttgcctctgttgccctgaagctgatcttgaagtgtgagttgtattctgtaaaaaattagtagtttccatagtgtgaggttggaggggaggtgttggtgcttgcctactgtacctgctacatctattatttcttgattctttgttcgcttttttttttcttttttgtttttaacccctgtggagataagacaggttttgaagtgtggaagaggttgtttcaatcgtctaattgattcaactattcagcaagtaaactgctccatggnnnnnnnnnnnnnnnnnn

SEQ ID NO: 389044 - DNA, 817 bp, Oryza sativa
  unsure (1)..(817): unsure at all n locations
ccacgcgtccgcccacgcgtccgcccacgcgtccgcccacgcgtccggtgagaattctagtgaaacgctgataatcaacctttgccgcctccagtcaataaacctggaaaaatctaaacaggaaacaagcactgccatggtttgtggagcttgcccgacagaaaaaaattatgagtacaatccttcattctcggaccaatgtttttgtgcggtgccacttggagttggacttcggttgaagagtccaggagtcacagactttcatccatacgaaaatgctttcaagattgacctaacttctttgttgcagttgtttccttaccagctatatattgagaactacatatggggaagttggtccaaggctaaatatgcacctaaagttatttccaagcaatacaagtttgttcaacatgtctgaggttgtccgactcagacacgtacttgctggatgggaaattacacttttagatgtatttggtccatatgagcttctcaatttcacacttggttcctatgaagatgaatatccaaatctagcttcatcaggtttaagcaaagctgcactgggtggtatcttggcaagcacaatagctagtgctattgcactnttctgcagtagttactgctcttataatgagaaggaattcaagaactaatagaatttcaagacgttcattgtcgagattttctgtcaaaattgatgggggtcagatgcttcacatatgangaaatggcttctgctacaaataattttnatatgtcagctcaagttggncaaggaggttatgggatagtctataaaggaattctagct

SEQ ID NO: 389045 - DNA, 1055 bp, Oryza sativa
cacaggtgtcttggcacaaggcaagctaatcaatagagaatttgtggagtcacctgatggcaggaagttcgagaaattgcatttaggtgaatatgaatgggatacctacgcagaagcatttagtcgtgcatgtaatttttcttctggtctcatcaagttgggtcaccaacgagatgtcgtgctgcaatatttgctgatacaagaactgagtggatcattgctgctcagggatgctttcgacaaaatctaacagttgtaactatctatgcatctcttggcgaggatgcactggtgcattcactgaatgagacacaggtttcaactctgatatgtgattcaaagcaacttaagaagctacctgcaatcagttccaagttgcagagtgttaagcatgttatctatattgaggatgaacctgttgaggctgaggtactcaatcaaatgaagcactggacaacattttcttttggtgaagttgaagaattgggtaaaacatcacatacagatgcaagattaccttcaagcactgatactgcagttattatgtatacaagtggaagtacgggtcttcccaagggtgtaatgattacacatggaaatatggtggccacaactgcagctgtcatgacaatcataccaaaacttggcacaggggatgtttatctggcataccttccgctggctcatgtctttgaactagcagcagagactgtcatgttagcttctggtgctgccattggatatggctcagctctgactatgacagatacatcaaataaaataaagaaggggacaaaaggagatgtttctgcactgaagcctactcttatgatttcagtccctgcaattttagaccgcatcagagatgccgtgtttaaaaaggttggtgagaagggtggtctgaccaaaaagctgtttgacattgcctataaacgaaatcttggagctattgaaggaagttggtttggatcctgggcaccagagaggatgatatgggataacctcatttttaaaccaatacgttccatgcttggtgggcgcattagatttgttct

SEQ ID NO: 389046 - DNA, 1418 bp, Oryza sativa
  unsure (1)..(1418): unsure at all n locations
cgtcttgtatgatggttgatggggaatgggtgggtactaattggaactggaagtgctgccttttttagcgctcgaagctatttttgcaggcggacctattgcgcgcttgcgaaaatcaactattttcgtaggcgttgaggtgcaggcgtatggcttgtccgcctgcgaaaatatgattctgccgactgggaaaagagtttttctagtcgtgagagctcgtaaaaaatatctagtatccaattagtatacccatttgctcagaagattgcgaatttcactgatcaaattccatgctctgcattaattatctaatatttggtgtaggttccaggagggtggatcctcaatgggcagaagcgatggccggccaacggcagttttgcggatgtgttcgtcgttcttgcctgcaataccagtaataatcagattaacgggttcattgtgaatggtgggtccccagggcttaagatcagcaagatcgagaacaagacgtcgctgagggttgtccagaactgtgacattctgctggaggacgtgttcgtccctgacgatgaccgtcttcccggcgccaactctttccaagacctagtgaaggccctctctttctcttgcgtcatcgttgcctggatcagcatcggcattgcagcaggggtttatgatgcatgcttacggtatctggggggagaggaagcagttcggggcgccattagcggcgttccagctgaaccaggagaagctggggaggatgctgggcaacatccaggcgatgtggctcctcggctggcgtctctgcaagctgcacgattccggcaggatgaccactggccaggccagcctggggaaggcatggatcacaaagcaggcacgggagacggtcgccttgggcagggagttgctcggtggcaacggcatcgtcaccgattttcacgtcggcaaggcattctgcgacatggaatccatatacacgtatgagggcagctacgaagtaaacgtgctcgtcgctgcccgagagatcacgggcatcgccagcattaggccgactagccggctctagttgctgaacatcgtgctgtgcacatatggcacaccaagtaacagctagctagcgcgtataagaaggaacgtccatgcgaccaggcccggtgttaaagcacaaatttctaggctagctagctgtctctgaaggtctgattggaccatccttccaataattttatggtccatgaagttcgtctcgtaatatatacttgttggtatacacagtacatccaaccatcaagttaaattaacacttcatagcttttttctgtacacaatatatgtgtcgtggtattgtaacacatatacatatatatataacaggttacgcgtatgattattatctcttatccatgcnnnnnnnnnnnnnnnnnnnnnnn

SEQ ID NO: 389047 - DNA, 814 bp, Oryza sativa
  unsure (1)..(814): unsure at all n locations
ttctagctccgccctccaatcccccgccacccaccgatgataccccgtctacaccgtgccattgcccgccgatcactgctaacctccaccgccctcctccccgccgtcgcccgccaccgcgatgcgccgctgccctccgcccccggcctcccccgtctgctccaccacgcgccgggggcgtccgatcaagcccggaaatcaggtcctcttacgctctacagggatctggtgagccaagggaaactccaacatgacatctaccaggaaaatgtagcaactcagctggacaacttacttagacgacttgagcaatacgagatggaaatggaggattaccatgcaagactctcgatgtgggaaaatacccgggagaaacaaaggcgaaggcttcttgttcaagaagctgaggatacacagcgtgatggggtgtggatagatgagaaaagggggtttcttgacaagttagtgtcaaggaaaagaagaggaaatatagaacctggagttgggaaatgggtctcatatttgaaccgagaaaagaaactggataccttggttggccagaagcctgttgcacccattgctccgaaaggaatatatctttacggcaatgttggaagtggaaagacaatgctgatggacatgttctatggggccacagaaggtcttatcaagcacaggaggagattccactttcacgaggctatgcttgaaatacatgatcatatgcatgatgtatggaagagacgtgatgaggacaagtctattgagtcgagtgctttcagntggatatcaagcctccctttgatgggaaaat

SEQ ID NO: 389048 - DNA, 1034 bp, Oryza sativa
ctcttttccaggctccagccgagtacccgcctcctcctcctcgctcgccgcggaatcttctggaagcttctagatccggccgctacgatcggcgaagaagggatggggcaggccttccgcaagctcttcgacgccttcttcggcaacaaggagatgcgggtggtgatgctcgggctagatgccgcggggaagaccaccatactctataagctgcacatcggcgaagtatctctccaccgtccccactataggcttcaacgcggagaaagttcaatacaagaatgtggtgttcactgtgtgggatgttggtggccaggaaaaattgaggcccttatggaggcactacttcaacaacaccgatgctctgatctacgtaggtgattccctggatagagagaggattgggagagccagagctgaatttcaggccattattaatgacccttttatgcttaatagtgttctattggtgtttgctaacaagcaagacatgaggggcgcaatgactccgatggaagtatgcgagggccttggtctatatgacctgaacaaccgtatatggcatatccaaggaacctgtgctctcaaaggcgatggcctctatgaaggattggactggttagcaacaactctggatgagatgcgagcttcagggcggataacttcaacatcatcgtcatgaagaataacaagggatagttgatccttgcgctatgtggattgacttgatgcctgcatcttgctttcttttccatttgatttcctcctctcctgttgtagctattggtcgtgaactgggcgaggctttttagtaaagctttgattcaggcaaaactgtagtgttacgaaagacaggtgacagtgatgcacttgcacttgggaggagtggttggtttacttactgaaagttcatcttttcgtggaagcgggagtggttgtaaatatatgaagctgctactgtactgatataattgtggttgctcttgaaccagttgtattcgtgaattttcagattcgaaaaaaaaaaaaaaaaa

SEQ ID NO: 389049 - DNA, 1216 bp, Oryza sativa
  unsure (1)..(1216): unsure at all n locations
cccacgcgtccgcccacgcgtccgcccctcgctcccacacagccaagagttgaagctgctatggttaatgcaagaatccggaagactgttagagcgacacaagctaaggttgcttatattggacctccaactgacttcaactatgaccatgagcatcttggcactggaccacaaacccttgttgagattgcagagggtcggcatcccttctgttcaactctgcagtctgctaagaatcctgtcatcattgctggggccgggttatttgaccgggaagaccaagatgcccttttctcaacgatagagactgtagccaaaaaattcaatgtggttagaccagactggaacgggcttaatgttctattgctgcatgctgcacaagctgcagcgcttgatcttggtcttgttgctaatcctacagagagcatcaagtccacaaagtttctgtatctgatgggagctgatgatgtagacttggacaaggttccggatgatgcatttgttgtttaccagggacaccatggtgacaaggctgtgtatagggccaatgttatcctgccatcatcagcattcagcgagaaagaaggcacctatgagaacaccgagggatgcactcagtggacaatcccagctgttcctactgttggtgatgctagggatgactggaagatcctccgtgctctctctgaggtggctggggctcaacttccttatgatagcctctcaggtgtgagggaccggattagcatggtagcaccaaaccttgtgcatgtagatgagagggagccgtgcactatttcctctgaagtgaagcctccggtaaagcaacaagtgagctctactccattcaaaactgttgtggagaacttctatatgactgatgcaatcacaagagcctcaaagataatggcccaatgcagtgcaaccttgttgaagaagtgaaatctacacctttcggaagctattcatcggcagaaaagattttagttccttgtttttgctccaaatttccccagttgttgcatgcttggttggaaattggagtataatttggactgcccttagatttgaagagcagcaaaacttggtctgtgaatttttcttgtgtatgagaagcagagcatactcaataagcttgttgtccttctgaatcatgcaacagccacaggcaataattttgttcctttttagttnnnnnnnnnnnnnnnnnnnnnnn

SEQ ID NO: 389050 - DNA, 688 bp, Oryza sativa
  unsure (1)..(688): unsure at all n locations
cccggngtcgacccacgcgcccttcctctcgtcgccggaggcgggaggccatcgacgctgaagtgaaggggatcgcgatctccggcgagcgtgcgggggaagatggctgacccagagttggaagctatcaggcagaggagaatgcaagagctaatggcacagcatggtgcggcaaatccgcaaaatgctgggcaacaaaaagctcaagaagatgcaaagcaggaagctgaggaacggcggcagatgatgcttgctcagattttatcttctgaagctagagaaaggctctcccgcatagctttggtcaaacctgataaagcaagaggggtggaggatgttcttctgagagctgctcagtccggtggaatatctgaaaaggtgtctgaagaaaggcttatctcacttctggagcaaatcaatacccacactagcaaacagacgaaagttacgattcagaggcgccggagcgtccttgacgatgatgactagctgcatgtgtgttgtgtgtacgatgagctggtggaggagtctgctgtagcgcaaaactacttagaaatgatgattatcaaacgctatatcaacaaccatcaaaacttgagcgactatttgatggatatttggccgtatatgaattaattcgagtttggtttggcttgttccattgatgacattcaaaaaaaaaaaaaaa

SEQ ID NO: 389051 - DNA, 707 bp, Oryza sativa
  unsure (1)..(707): unsure at all n locations
gctgcaggaattcggcanagncttcctctcgtgcgccggaggcagccgcatcgacgctgcaagtgaaggggggccctcgcaagtcgcgatctccggtgagcgcgcgggggaagatggctgacccagagttggaagctatcaggcagaggagaatgcaagagctaatggcacagcgtggtgcggccaaatccgcaaaacgctgggcaacaaaaggctcaagaagatgcaaagcaggcaagctgaggaacggcggcagatgatgcttgctcagattttatcttctgaagctagagaaaggctctcccgcatagctttggtcaaacctgataaagcaagaggggtggaggatgttcttctgagagctgctcagtccggtggaatatcctgaaaaggtgtctgaagaaaggcttatctcacttctggagcaaatcaataccccacacttagccaacagacgaaagtttacgatttcagaggcgccggagcgtccctttgacgacgatgactagctgcatgtgtgttgtgtgtacgatganctggttgagagctnccgtaacgcnaaactgctttgctaaaatgntggtntccaaccgcttttttaacaacatcaaacttagggcattngggattggggannaaanccgttggtgggttttcnaaaaaaaaacngggggtttanaacttttgaccggccccnnggggggggg

SEQ ID NO: 389052 - DNA, 763 bp, Oryza sativa
ccacgcgtccggatttattttgagtcagccctctctgcaatgcgcacacaactgggacagacatattgtgggctggtttaccaatgataacccttccactggagaaaatggcaaccagagtagctggttccctctgcctagccaccgggctaggggaagagatgattgtcagcagtatgaaagagtatgaagatagggcagtagaccttgcactaaatccggcaaaacttcaagctctgactaataagttgaaggaagtccgtatgacttgcccattatttgatacagctagatgggtacgcaaccttgaacgtgcgtactacaagatgtggaacctgtactgctccggtcgccaccgagagccgttcaaggtgatagaagatgacaatgaatttccatacgaccgctgacatgcttacatcaccggctgtgtaaataggcgagagttgtagcatatgtagcaaaatgtggccgctccaggcgcttctttgatgcagcctgtcgtgctgtgcacatcccctctctttccagaggcgaaattatccgtgtacactacccaaaagattctaggggtagtctgtgttgttataattatttatactagttagtcaagtcattgttggccctggggtggtttgccttggactattatttacggtctttgaggtgttgccccgttgtcaaagataaatagtgcatggttattattataatattgtaatacaaattacatttttacttgatgtccaaaaaaaaaaaaaaa

SEQ ID NO: 389053 - DNA, 398 bp, Oryza sativa
ccacgcgtccggcagcagcagccgcagccgcagcagaagcccgccaaggccaacctcggccggccggccgacgaccaccgccaccggcaactccatggccgccacggctcgccgacgggaaggaggacgtttctgagctacttccagtgctgtattaaggcctgaagaaggactgtcaactactgctattggctgtactgttgtgtcacagtgcaaactactcagcttatttttagattaggcttcttgggctttgtcaagcctagcaagatgtgtaatatattcgtcgtgatgcttaatcttttggtcattcagagaacaaaactatttatgagtggcacagattgcttgcgaaatgaggtgcaaagctgtaatatattgaaagataaatggcatct

SEQ ID NO: 389054 - DNA, 1245 bp, Oryza sativa
  unsure (1)..(1245): unsure at all n locations
ccacgcgtccgctccatcaatcatcacagaaggttcaagtggagggccttggagaaagagaattacagatttagatggaaccgagagcgatatcccatggtggattgtggactgtgttgagcataatcgatttccaaaagagaatacaaagtgtggattctacttgcatcctgctgaagggtcacctgcaccgaacataacacaagggaaactgagtgctccacggatattgcggattcacaaagtagctaactatgtggtcgagaaacttgatagaccactggatggcaatgctgacagcacatttggaatgggattgacttctggccaatcacaattttcagcgctagatagttcttcacggcttggactaaaaccatggcaaaaattgaaaccttctgtagagatattgtgtaacagccaggttttggcacccgaaatgagcttggccacagtgcgggcttatgtctggaagaagccagaggatttgattcttaactacaaagtggtccagtcaagatgattgcaacttgaaacgaatgttcaccctaggagctgaggaaatcagtgcggagcaggtcttgttgaagataaccatacgacctagagagaaaactatcatcacgctagagacagaagcgtttcgcccttgtgtgcctccttagcgaaaccgcaaaaattctacctctgtaaagttctctgtgaatgttgaactaccaccaggccctctagtgaggtgtcccatagcacaggtgtaatgatctcttctggctaccaagcttgtaaatttagggatttggggtgcttaaataaactttaaatgggatataatttccccttctctttttttgtgtttacacatataagatttgtaaggaaggtatcaaaccgtgcagcgatttgctgtttgatcctgatcttggactgttacttgctgttttgcattgttttgggagtcccctaaatccttattgacccatgccttgcaagaagtgaaagcttaaaataaaggaatggtggtagaatgattacttgcttgcctgtgttgtagtgtgcatggtcccaaatttgaggatttggggaaccggtatgttcgccatcgggctgttgttatgcgtgtagtttattttgatttgcccgcaagaagtggcgggttttggtgctgtggattctgttttaaaaagagaagagctctctgtttctgttgagagcgcaaggtgacaaaagatttggatcaannnanna

SEQ ID NO: 389055 - DNA, 488 bp, Oryza sativa
cggacctggcagacggatcagattggaggaaaactcgctagtacgcttgttacttgcaactctttctctaatcttgcttcggaaagatatccaaatcgaagaaaaagaaaaaaaaattagaaagcgtgattagccattcctcttctcatctctagccacttcgcttcagcttttcttctttcttgatcgcgagcaaaaagggagagagaaaaaaaaaacggtaaaaggacgtgattagcaaggatggtggcgatcgagaaccagagccagggccagcgggcggcggaggcggcggcgcagccacggatccccagggaggcgcggcggctactgcacgagatggcggcgtcgtgggcggacgttgccgactgccgggcgctgcaggtgattccgctcaagggcgccatgaccaacgaggtgtaccaggtgcgctggctcaacggcgccccggccaccgccgaccgccgcaaggttgaagccgaagcagt

SEQ ID NO: 389056 - DNA, 1062 bp, Oryza sativa
cccacgcgtccgatcatttcatttcttcttcttcttcgccgccgccgccaccttccaccccttcagccgccactccaatccaaggaggatgagtgaagaggacaccaatgctgctgctgggcagcccaggcgcgcccctaagctcaacgagaggatcctgtcctccttgtcgaggagatcagtagctgcacatccgtggcatgatcttgagatcggccctggtgctcctgctgtcttcaacgttgttgttgagatcaccaagggaagcaaagtgaaatatgagcttgacaagaaaactggactgattaaggtcgaccgtgtcctatactcatcagttgtgtatccccataattatggtttcattccaaggacactttgtgaagacaatgatccaatggatgttctggtcctgatgcaggagcctgttattcctggttccttcctccgtgctagagcaattggccttatgcccatgattgaccagggtgagaaggatgacaagataatagcagtatgtgctgatgatcctgaataccgtcattacaatgacatcagtgagctgtctcctcaccgcctccaagagattaaacgcttctttgaagactacaagaagaatgagaacaaggaggttgctgttgatgcattcttgcctgccaacactgctcgtgacgccattcagtactccatggacctgtatgcgcaatatatcttgcaaagcttgaggcagtagagtgctacccgatctttatcgtgaaaatattgtatttgtgccaactgcaaaactggagtagagactttgttcacaaaaatggagtgctatggggctggctatgatttcctttaccctccagctgtgtatcaatttgcatgtggtttcatacttacaaattatgaataagtgaagtttgggcagacatgaatttgttctgtgtcatgcttctgtccctccggatcgtttattgacatgaattactgttcttgttatattatttctatctgctctaaggctgtgtttgagaaaagcacaagggggagaaaaatccctcgttttttaaaaaaaca

SEQ ID NO: 389057 - DNA, 1842 bp, Oryza sativa
gttctacgcggcgacgccctatggcgacccaccacgcccgccgcctccccgccgccgccgccgtcctcctgctcgtcctcctcgccggcggctccgcggccgacgacgcctccagcgacgacgacgcgggcgtcccgccgtcgcccggctgctccaacaagttccagctggttaaggtgaagaattgggtaaatggaactgaaggtacaattgttgttgggttgagtgcaagatttggagcctccgtgcctcgagatattcatgaagctcagaaaacatttgctgtccttgcaaatccacttgattgttgttccaattcgacatcaaagctaacaaattatattgctatagcacaacgtggagaatgcgctttcactgctaaagcaaagattgcacagactggaggtgcagttggtttactagttatcaatgataatgaagaactttacaagatgggttgcagtgacaacgatacttccattaatgttacaatacctggtgtaatgataccacagtcagctggaaaaaagatgaagggcctcttggatcagggagcaaggctggaggtgcagctatattcaccaaatcgaccagttgtagacctttcagcatgcttcttgtggataatggctataggaaccatagtttgtgcttcactctggactgaatttgttgcatgcgggcaagttgatgagcgttataatcagttgacacggaaggatgggcctaattctggaacaaccaacagagaagataaagaaatcttcgagatcagtgccaagggggctattgtttttattttagtagcttcagttttcctcctcctcctcttctacttcatgtcttcttggttcgtctggctgctaattgtattattctgcattggtggtattgagggtatgcatgtttgcttgggtcacacttctcactaggatttgcaaggattgtggacagaagactgtacaactccccttttttggggaggtgttgaccctttctgtcctgattgtaccattttgcactatctttgcaattctttgggctgtctatcggcatgcttcttttgcttggataggccaagacatccttggaatctgcctgatgataactgtgcttcaaatggcacgcttaccaaatatcagggttgcatcagctcttcttagtgctgcatttgtgtatgatgttttctgggtgttcatttcacctcttatattccatgaaagtgtcatgattgcagttgctcgtggtgataactctggggaagcaattccgatgctcttaagaatacctcgtttctttgatccatggggtggctatgacatgataggctttggtgacattattttccctggattgctagttgcattcagctacagatttgatagagcaagcaaaaggggcctcttcaatgggtattttctatggctgacggtgggatatgctgttggccttttccttacctatcttgcgctcttcctgatggacgggcatggtcaacctgcgctgctgtaccttgttccatgtacattagggcttattgttatacttggttggtttagaggtgaacttcatgatctatggaattatggtagaagtcaaacagaaaatttagtcgacgaaccatagaagaatctgcggacaattgagatactaattgcccagtggatctcctggaacaatatcagaaatgtacacagtttactttttgcaagaaaagttagatgcaatgtgatttgcttacctgcagtatatagttttagtaatgtagtactattcagtgctgcattgtactaacataagtgttgctctttatttttattttttaaaataagcatattccct

SEQ ID NO: 389058 - DNA, 977 bp, Oryza sativa
ccacgcgtccgaattgattcagcatcaccatatgagctctcgccccagatctgctgcaccaagcaatacaggtggatattcagaccgcttgaacatgccaagttttcagggtatgatgtacccatcaagtgctgcccaagtgggtgttcctagtcaatctcctcaattgaagccttcgtcagccagagcaacaggtgcacctgctggtgtggcttcccctggtgcttcaccctctaatttgattgtgatgaagagtggtctccatcagcaacaagctaaggctcctatgcagtctctctctacctcaaaccaccaaccccagagttcatcaaagatgggtcctgtcactaatatgtctactggaggaggggatttgtcaagatcttcaaatgctcccgttgcttctggttcaccatccaattcagtctccaaaagtactggtggcagcccaccggcttctggaagtgcaaagggtgttccaccagctgtccaattgccgtcacctcaacaacaatcagccaagaatccagcatcgacgtctggagccaagtcagctcccacaaatcactatagtagtatgcctatgccatcgatccttggtcaacagccaaatgtgccgcctggttctaattcaggcagtaagcagcagtcgcacatgatgaaacagcagccatttccacaaggaggtcatttcttcatctccaatgcatacacaccacaagcccctggagctgctggaggtgttgctcttggcctttaccagaagcgctcagctgacaagacgcagcagcagcagcagccccatcagcagagcgccatgtcggctgcagccagcaataacatgaagactcatcatcctcccgctggcagttttatgcatcttgccgcagcatctcagtctcccgagcggtgtgcctcactctcatatgtcagcggcacaattgacttttggggccccaatgtcaatgtctgtaaaa

SEQ ID NO: 389059 - DNA, 450 bp, Oryza sativa
  unsure (1)..(450): unsure at all n locations
caagcaggtgcccatcgaggagatctggatgctcttcgccaagcactggtattggaagcgcatcgtcaggaaggaccccaagtatcagggccacccccaccanccagatggccgccatgccaaccgccgccgccaagtccggctcgtcggaggtttagatgatgatgataatgaattgatgatggtttaataaggttttagtgggtggtgattaagacttgatcttgaattgttcatgtggcagtagcttttttgatcttcgattgatgcaaaagaagaggtcagagggttaatgcatgtgtgtgctcgtgtgtctatagttttagtttcatgttcttcagaattcgattcagtgtagtggtgggctgattaatggatcttgatgatgcacaaggaatgcagtgttctgaattcttgaaattattctcaatataacttgtagatttgtgt

SEQ ID NO: 389060 - DNA, 839 bp, Oryza sativa
  unsure (1)..(839): unsure at all n locations
ntncaaaagggacaaaaagaacacgaantaagaggggcgtccaaatccgccgccgaattccccacccgtcgcgtccaaaatccaaatccgccgccgcgatcgaggccgacgaggagaggttgaggttgaggtgagagccatggtgagcgccttcttcctgctgtgcgggtgcgtggaccaggcgagcntcgcgttggtggagaagtggggccgcttcctccgcctcgccgagccgggcctccacttcttcaacccgttcgccggcgagttcgtcgccgngacgctctccacccgcntccagtcgctcgacgtccgcntgagaccaagaccaaggataatntctttnttcagcttatctgcacaatccaatatcgggttgttaaaggacatgcttatgatgcattctatgagttgcagaatccccaacagcaaattcaggcctatgctttgatgcccaaagtcttcagcttgcaagtgtctacaaaggggaagcagaaaagattcttctggtgaagaaatcagaagcagaggcaaaaatacctttctggtgatggcattgctaaacagaggcaggctgatggcctgaggacagtaccacagcaaaagaagtcatggacctaatcatggtcacgcagtactttgacaccataaaagaacttggggatggctcgaagaacacaacggtgttcatacctcaaggcccaggcatgtcaaggatatcagcgagcaaatccggaatggtattgatgggaagcgtcaagaaccaatgtgtaaattgtagcgattcacaggtcaaggttnggggatggttcagatnggagggagcctntttgtttata

SEQ ID NO: 389061 - DNA, 1085 bp, Oryza sativa
  unsure (1)..(1085): unsure at all n locations
cagacacgtaaggaggagaaatttcccctcccttcccggctcttttcgtactacttgcaaggaggagaaagaagaacacgaggaggaaatccaagccaatcgccgcctccgcctccgattccttccgatgaagaagatcttcggcgccaagaagaaccaggagcccccgcccagcatccaggatgccaccgatcggatcagcaagaggggcgactccgtggacgacaagatcaagaagctggacgctgagctcgcccgctacaaggaccagatcaagaagaccaggccaggccccgcccaggaggccatcaaggcacgcgccatgagggtcctcaagcagcgcagaatgtacgaagggcagcgtgacatgctgtacaaccaaacatataaccttgaccaagttgcttttgcatcagagggacttaaagatgctcagcaaacgatgactgcaatgaaggcagccaataaagagctgaaaggaatgatgaaaactgtcaagcttgaagatatagatagcttgcaagacgagatgatggatctttatggatgtgagccaatgaaatacagggaactcttcggaagaagctacaatgtccctgatgacattgacgaggaagaacttatgggggagcttgatgcctttggaagccgacatggactttgaatcaaattcagtcccctcgtaccttcaaccagataaggaatcagatctagattctgagcttaacttgcctgctgcaccaacgggtcacacacccgccccaccaaaccggcagcaggaggacgaattgggattgccgacagtgccacaagcatcgatccgtagttgattggattcgttttgtaaaaacataatgtcgtatgcaataacaaattcagtgtatctttgctcatatactactgcaatttgttaagattggaaatagctttctcattgttttgtttagggtctatatgtaagagcatttgttactttttgaagtacagtgtaaatttaattggctgctggggcatacatatataagtccttattctgtgttggtgatgnnnnnnnnnnnnnnnnnnnnnnnnnnnnnnnnnnnnnn

SEQ ID NO: 389062 - DNA, 655 bp, Oryza sativa
  unsure (1)..(655): unsure at all n locations
gtctcgtcgtcttcatcatcgtcgccccgcgattcccgtgttgctttcgaaggtcggaggaggagaagaggaagaggaagaagaagaagaagggagcggagatgatcgaggtggtgctcaacgaccggctggggaagaaggtgcgcgtcaagtgcaacgaggacgacaccatcggcgacctgaagaagctggtggcggcgcagacgggggacgcgcgccgagaagatccgcatccagaagtggtacaacatctacaaggaccacatcaccctcgccgactacgagatccacgacgggatgggcctcgagctctactacgactagccgacctgcctgcctgcctgccttcgagtatggccgatcgaatcgatctttaattatgatgaataattccgtcagggtttgtgtgtcttagaacatcttctggatatgatttggcttggtgtttgtgtgaacgatgtttcatactaatagaacgctactgtgagccgaatcacgttgatttgggggtgaattttttgttgcttcctgtttcctcgttggtgcttatatatctatacatatcaatccgtgccttagatcggaagattggtcgatctccaannnnnnnnnnnnnnnnnnnnnnnnnnnnnnnnnnnnnnnnnnnnnnnnnnnn

SEQ ID NO: 389063 - DNA, 650 bp, Oryza sativa
  unsure (1)..(650): unsure at all n locations
ccacgcgtccgagcggtgcgagcgggcgaggccacacgattctcctctcccttgccgcttccaacaccaagtctcgccgtggccaggactgagctagggtttgcgtgatcttcgggaggagggagcaggagagagttcgaggaggaggaggaggaggagaagatgatcgaggtggtgctgaacgaccggctggggaagaaggtgcgggtgaagtgcaacgaggacgacaccatcggcgacctcaagaagctggtggcggcgcagaccgggacgaggcccgagaagatccgcatccagaagtggtacaacatctacaaggaccacatcaccctcagggactacgagatccacgacgggatgggcctcgagctctactacaactagacaccgtgcctctggctggtctgaattctagtctcatggatggcgatctgttgattatatatgcccatttgagcggccagcgtccgtagctcatatataaaactctagtgagctgtgtagttcgttgtgcctatgactgttaacttcgaatatgtcgttgtagtatgatcaaccagcagatgtgttgtatttgaggttctgctactctcataacataaataacatgttatgaaactttgatcaagtctcaaaaaaaaaaaaaaann

SEQ ID NO: 389064 - DNA, 570 bp, Oryza sativa
ccacaatccttctcgattcttctgctctccaccgagaggagcaaggcgaactgcaggcggagaggctgggccacacgataccctcctctcccttcccttcccttgccgcttccaactccaagtctcgctgtgatcaggagctagggtttgtgcgatcttcgggaggaggggaagatgatcgaggtggtgctgaacgaccggctggggaagaaggtgcgggtgaagtgcaacgaggacgacaccatcggcgacctcaagaagctggtggcggcgcagaccgggacgaggcccgagaagatccgcatccagaagtggtacaacatctacaaggaccacatcaccctcaaggactacgagatccacgacgggatgggcctcgagctctactacaactagacgccgcgcctctggctggtatgaatttagtcatggatggcgaacagattatgcccatttgagcggccagcgtccatagctcatatataaaactctagtgagctgtgtagttcgttgtgccaatgactgttgtcaactttgaatatgtcgttgtagtatgatcaacctgcagat

SEQ ID NO: 389065 - DNA, 592 bp, Oryza sativa
  unsure (1)..(592): unsure at all n locations
ggtcgacccacgcgtacggcccggtccgtcggagccttcagagctatcatttaacccaaggatctggtaatggaggccggaatgcagaaacaaactctgcaggacagaatagggagtccaactctggaggctccaatgacgcctcaatggacatggtttcggacagcgctggtaacgaatactactgaagtggattgtggtgagaaggaatactactgaagtggattgtggtgagatgaatactactgaactggattgtggtgagatgctgcatgcaaaaccaggcagcaacacaataccagtgttgtctcctgttgctgtatgttatgtattttcctaaaaccttatcatctgtgcggccttgtagtcacagatgaaatggttctctttaaggcttttaagcttttgtattttctatttttgttgaagcctgattggagagaaatcaagttgttcgtgggttccatcaggaatactttatatccaactgtgttcgtgacttcgtgttaaagattttgaatgtaaatgaaaattgcattgtgatnnnnnnnnnnnnnnnnnnnnnnnnnnnnnnnnnnnnnnnnnnnnnnnn

SEQ ID NO: 389066 - DNA, 606 bp, Oryza sativa
ccacgcgtccgcccacgcgtccgcccacgcgtccggttaagacgggtgaaagaaactgtaaaggaggttggtgctgggctagagtcatggtgccaaggtctcaacgtgacgaatgggaggaaggtgatgtcgtggaggcattcaacacagttaagaagacaagaaccctagaggaagcctctgcttctgtgactgctgctctaaaggatgccggcttccagctgtagaagtggcaaagctgataggcatccatcatacaacaactgcaggggaatcggagccaaatttatcatggcaagaaagaaagaaagacggggtgcattattgatcacattgctgttgttagcgaagaacaacaaactggttactcgatcgtaaatacgacgaacttatgcaagccatagtacagtagtcaccaaacctgagcttagccgtctcttatagcctgcatcagctgatgctgtattttgatgtacataacaagagaggagacagctgttacctttttttagtttgccactaacaggtagataagcagtgttgtctaattttacaccacctgatttttgacacaggatgtaattactctgtaatggtgctcgtgcc

SEQ ID NO: 389067 - DNA, 1021 bp, Oryza sativa
atccaataacatactggaggaagcttattgatgaatattttgcaccacgagcaagagaaagatggtgtgtatcctcgtatgagaaaagaggaaatccttcaggtgctgttccacacacagctccggattcatggcgctgtgacatttgtaatacacatgggggcaaaggatatgaggctacctatgaaatacttcctagactctgtcaaattagatttgaccatggtgttatagatgaatacttattccttgacatggccaatgaattccggttgcccaatggactaatgctgctggaacatactaaagttgttcagaaaagcatttatgaacatatgcatgtgatacacgaggggcagttgagaatcatattcacaccagaactgaagataatgtcctgggagttctgttcacggcgacatgatgaggatatcactcgcaggtttctttcaccccaggttgctcatctgctgcaagttgcccagaaatatcaaactgttgccactgaaagtggtccagctggggtctcaaacagtgatgcacagaacatttgcaacatgtttgtgacggcgtcacgacagctagcgaaaaatatagaccaccacaccttaaatgagcatggtctatctaaaagatatgttcgctgcttgcagatatcagaggtggtgaatcacatgaaaggcctgattgaattcagccacaggaccaagcttggtcctatagagggtctgaagagctatcccaagcaaactgcagcaaaacttccagtacaaaacatgcacgagccccagcaactaatggcagctgctggccttcctaatgaccagactaacctcaaacgccatgggtgtcaaaacagaaatgaacacccatgcgaatgagacgcacggtattggaccaattggaaatggtccgcagaatgctgctgcacttaacaattaccagaatcccattggaaatggtctgcagaatgctgctgcacttaacaattaccagaatattcctagaagtcagtcgcaaa

SEQ ID NO: 389068 - DNA, 533 bp, Oryza sativa
ccacgcgtccgcttcccctccacgccttatcgcttccgagctcccatggccgcacgccccgcgcgctagctgaagcagccagcctcgggccccacccacgcagccgccggcgccggcgccgccgctccccatgaggcagccgcacctcctctcgccgcagcagctctccccgtccccggtcctctcctcccacttctcgccgccggcgcccgggggctcgccggcgtggcggcggggccgacaccaccaccaccggcgggcgttccacccgccgctctcgtcgctgcgtgaccccgacaaggccacgctccgcaaggcctcgcccaacgtccccttccgcctcggcggcggcggcggcggcggcggcggtcagggcggcggcagcagcaaggaccggcgacccgccgctgaccaggaggaggaggaggaggaggaggcggccgcggaggataagggagacgacggcccgggggccaatatcgggacgcttcttggccgggcgctgatggttggagtcctaggggggttcgggg

SEQ ID NO: 389069 - DNA, 778 bp, Oryza sativa
gctcaagaccccgcgcgtgctggccgccgcctggtccccgctcgccgcggtcctcgcggcgtccaaggccgcctccaagtcctacaaggccgcgcgcacgctcggccccgccgcgcgcctcccttccctcccctccgacaagcgcctcaaggccgccttcgccgccgcctcgctcctccgcctcgccgccgccgcgccgccccccgtcgcgtcccccaccggcgtcgcggccctcgcgatactcaagtctgggtacaagctctccaagaactcggccaaggtcatcgagggtttcctcggcctccaggtgcacaagggcatcaggaatggtgtcgacgcgctcggggtggtcgtcaaggtcgccgtcatcgcctccgaggtcgccgtatgggtcggcggccgatgctggggcggccggcgtgggcgctccgtgcgatttctctgctctacccgcccgagcggtttactccttgttcggtacagcaaatctgaagcccaagttgtgctctttgatcatggacttggaatagctgcgatggatggagatgagaagcagatggaggagcaagagggctctgatttactctgcctcgcggtacctgtgcctgaggcaacaaattattagtgagttagcacttggcacaaaactgttgtacaattgcatatatcagatattgtcatgtagagatggctttgaattttgattgaatgtttgcttcctttttttcgtttgttagttaagtttggctaatgaaactgtgcaacggtacctcagttc

SEQ ID NO: 389070 - DNA, 714 bp, Oryza sativa
gtgctggcctgcaaaatcttgggaacacttgctacctgaactcggtgctgcaatgcttgacgtacacagacaccatttgcggcctatttgcagagcgggaagcacaagtcttcatgtcgtactgctggattttgtgcactatgtgctcttcaaaaccatgttaagactgctctacagtcaactggaaaaatagtgacgccatcacagattgtcaagaacttgcgctgcatctcccgtagtttccgcaattcaaggcaggaggatgcacatgagttaatggttaatttacttgaatccatgcataaatgttgtctaccttctggagtaccaagtgagtctcctagtgcatatgagaagagcttagttcacaaaatatttggtggccgcctaagaagtcaggtgaaatgcacacagtgctcacattgctccaacaaatttgatcctttcttggatctcagccttgatattggtaaggccacgtctctggtgagggcacttcaaaatttcactgcggaagagctcttagatgggggagaaaagcaatatcagtgccaacgctgcaggaaaaaggttgtagcaaagaaaaagtttacaattgataaggcgccatatgttctgacaattcatctgaagcgctttagccctttcaacccccgtgaaaaggttgacaaaaaagttggtttccgcccaatgcttgacttgaagccatttatt

SEQ ID NO: 389071 - DNA, 1551 bp, Oryza sativa
aagagattggctggatctacggatccgttacagaggatattcttactgggtttaagatgcactgccatggttggcggtcgatttactgcatacctaagcgggctgcattcaaaggttctgcacctctcaatctttctgaccgtcttcaccaggttcttcggtgggcgcttggatctattgaaattttcttcagcaaccattgccctctttggtatggctatggaggtggattgaaatgtttggaaagattttcctacattaattccatcgtgtatccttggacatccattccactattggcttactgtacattgcctgccatctgtttgctgactgggaagtttatcactccagagcttacgaatgtcgccagtctctggttcatgtcactttttatctgcatttttgctactggcatcctggaaatgagatggagtggtgttggcattgatgattggtggagaaatgaacaattttgggtcattggaggggtctcttcgcacctctttgctttgttccagggacttttgaaggtcatagctggtatagatacgagtttcactcgtgacagccaaaggtggggacgatgaagagttctccagagctatatacattcaaatggactaccttgctgatacctccaaccactctactcttattgaacttcattggggttgttgctggtgtttcgaatgcaatcaataacgggtatgaatcatggggacccctcttcgggaagctcttctttgcattttgggtgatcgtccatctttacccattcctcaaaggtttggttggaaggcaaaacaggacgccaacaattgttattgtctggtccattcttctggcttcaatcttctcactcctctgggtccggattgatcctttcttagcaaagaatgatggtccacttctggaagagtgtggtttggattgcaactagggagttgggaactcccccatcggtgtgtgctgaaggaatacacacttggttctgtgtagatagaaacacgaaaggtgatgttttgcttttgtcccatggtggtagctcagcctcatatctgcaatatttgggcaaaccggaggctgcggcaaccttgtgaacttcggccaccaagtacagccaaactgcgtttgattgtccagcattctttattactgctttggtggtaaatttaattgggtgagctgaacagaaggtgttggcattgctgttcatgtacaaacttgtgtctcaataaggcaggcaggaatggatctgctatggagtagaaaggtgatgcacagtatttatgtagtgaaacgtgtgtgggtgcccattgaagggcttgttcattccttgtttctcttttttacttatctagaaccaaatggatcatttagtgttagtaatgtagtgcatccagtgttgtaaaggcgccctatttttggttggtaattgtaatcaatatatacttctgttgtcttgacattttcaaagaaaggttgtaaggatgatcgtgatcagatataatatactcgtttctttttgtgaaaaaaaaaaaaaaaaaa

SEQ ID NO: 389072 - DNA, 346 bp, Oryza sativa
  unsure (1)..(346): unsure at all n locations
gacggtcgacccacgcgtccgcaatggggcagctggcaatttccttgcttccccggaggatttgacgcccaaaggggtcaggacagtcgttgacattgacacacggggtacatacactatgtgctatgaagctctaaagtatctgaaaaagggtggccctgggaaagggccctctactggtggcgtcatcatcaacataaggggctagtttgcattacgctgggggctgggaagaaattnatgtctctgctgctaaggcgatcgacatntattctaaaagatttgtggatactggcagggggaacaaattataaaccagaggtcagcgggaggagagagcggtttt

SEQ ID NO: 389073 - DNA, 691 bp, Oryza sativa
ctcgcaagtataccaaattagccgagttaaaaaatgacaaagctatcaaagttatatctgatcagattgaagcagacaacatctcagatgatacgtccacagaacttcacatctataccgacttcttaagaattgttctagaaatcatcaatgcaattcttacatatgcattgcctagaaatcctgaggtcgtgtatgctatcttgcatcgacaagaggtatttcagccattcaaaaaccatccccgcttcaatgaattgcttgagaatatttacacagtgttggatttcttcaatagtcgaatggacatgcagcagttagatggagaatggtctgtagataaggttcttgaggttattaacaaaaactgccgttcatggcgtggagaaggaatgaagatgtttacccagttacggtttacatatgagcaagaaagtcatcctgaggagttttttatcccatatgcatggcgcgttgtcctatcacgaggattctctttcaatcctggtgcaataaatctgttccctgtggagattcatgttgatgatgaaccatccggtgaacaaaaggtctaagaataatcttgaatgttgagttctgactacagcaggatgacatgttccatccaccgaggcaaatagatattgacataggaggcatataccagacgatcgacatgtattcttattca

SEQ ID NO: 389074 - DNA, 650 bp, Oryza sativa
ccacgcgtccgcccacgcgtccgaaacaaaccaagcgtttctccggacaaacagaaatggctcctgaagctgaaggatctggatgctaattggattgagtactaactaggaggacttcactaatacggtccttcaaatttatcatctgacttcaatgaagaaggatctgataatcatgtacagataaaggtgggcaagtttcttgcctacaatactggattacaacactaattcagctcatcaggcacatagatatcctctcaagtagaagtacgaaattgctcaccatcagtgaaaagcacttctcttccaccgacagctgcttctatgttccaccaaaacaaaatcaaccagatcaactccctaattgctcactaaccagagcaattttcccatttactggagcaaaaaaaaaaagcaaaatcattttgctattcacctcatgagaagatgaagtttcacattggcatgtatggctcctgccccagcagcgaacgagacccccggtcgcggatcctggccgaccccgagcgtcccacggccatttcctggtggacctcgacgactttcggcgacggcgtgggccccgggggcgcccccgaggaagtaaacgtggagaccttgctggtgctgccgctgccgttgacacc

SEQ ID NO: 389075 - DNA, 576 bp, Oryza sativa
ccacgcgtccgcccacgcgtacgggaatatgtactgtaagaggaactgatatgacaagtccgcatggtataccagatgatcttgtagatcgattggcgattatttgaacagaaacatacgggcccactgagatgatccagattcttgctattagagcgcaggtggaagagattgacagcgatgaagaaagtctcgcatttttaggagagatcggacaacagacatctttgaggcatgctattcaggtgctatcacccgccagcgctgttgcaaaggctaatgggagagagaagatcagcgaggccgatcttgaggaagtcagtgctccgtacttggacgctcaatcgccggcgcgtctccttcaggagcacctgggaagatacatcacctaaatttctcttgcagtatgacgataaactcgagaatttgtccctattcatgctgtacacaggtgcgaagactctttcaggagcacacttgattgatttttgcagaaatgtagaaactgaacaatgtacccctgcactgtaggcagcctctagagaatagcagcattttcgaaaaaaaaaaaaaaaa

SEQ ID NO: 389076 - DNA, 569 bp, Oryza sativa
  unsure (1)..(569): unsure at all n locations
ccacgcgtccgcccacgcctccgccaacgggggtggtggtgggaagagaattcggatcgcatcgagctcgagctgcttcgcgaatcgaacatatgatatggctggtgtgatcagcgcccgtgctggtctgagccattccttgtctgttactcagacagttccgaatcgtccgctgcaggcttcacaattggcaacgaggtgtacaagcccatcatttctttctgctaaactttgcaagactcgtcccctggtagtagtagcagctatggaggtctcgaaggaagccccttctgctgactttgccaatcgccagccttccaaaggggttcttgagacatggtgcaatgccgatgcagtgtgttttgatgttgatagcacggtctgcttggatgagggtattgatgaactcgctgatttctgtggggctgggaaggctggtgctgagtggactgcaaaggcaatgacaggaactgttccatttgaggaggcactagctgccaggctatcgttaattaagccatatctgtccccaagttgatgactgtttagtgaaagaangcctcccaang

SEQ ID NO: 389077 - DNA, 552 bp, Oryza sativa
gtgattgcttgttgcagaatacatgcccaatgacacactagcgaagcatcttttccattgggaggcgcaagcaatgaaatggcccatgagattaagagttgttctctatctggctgaggctttagaatattgcaccagcaaggggcgtgctctgtaccatgatcttaatgcctacagagttctctttgatgatgactgtaaccctaggctttcatgttttggcctcatgaagaacagtcgagatggtaaaagctacagtaccaatctggcgtttactcctccagagtacatgagaactggacgtatcacacctgagagtgtcatttacagctttggtaccttgcttttggatgttcttagtgggaagcatattcctcctagccatgcccttgacctgattcgagatcggaattttaacatgctgacagactcctgtttagagggtcaattttcaaatgaggaagggacagaactagtgcgattagcttcaagatgcctgcactatgaacctcgtgaacgacctaatgtaagatctctggtgcaagcattggc

SEQ ID NO: 389078 - DNA, 994 bp, Oryza sativa
  unsure (1)..(994): unsure at all n locations
tacaggcatccctaaacatagaagatcctcagttccaagagaagagaatggttgctcaaagaaatgggaagctggctatccaaaatttccatgtctgtgtgggtaaagagaaggaaacaattgcagaaatgctgccctatttgaggctaggatacatttcagatccagatgaaatgcaatccatactttcttcagaaggtgatacatgtccagtcagtccatgcacagagcgagcagtacttgaccaacttgttggatacttggagtcacgattggctgattatccaacaactttggatgaggatgatgctatgttggcagatggcaatttggaaccaaaaaaggaagtcgctactaggcttgtaagattggagaagaaattgttgcatggttgtctccaggctgctaatgagttcataaatgatttgcctgaccacactgtgtcaccttgccctgctccatttgctcctggaatttgaaataaggaaaagtaaagcatgcagcgagcattaattcttgcaacatgggtgtcacttctaatggtgttctcattaatgatcacatccagttgaagtgcattagaagtgcttctttgcaggaaatctgaagcctggctgacgggtgtaatagggatttcactgcccgcatgcagatttggcgattagttgcattgcacacaagtgtgcacggatgttttgttaacctagtggcttttatattcactgagtagattctgtacattctgatgattgactgagatggtaatgccaatgtacatgttcagtctcatttgtcaatagagattctgtacntgttatatttttgggtgttggcatgatttccgccgttctcttttcatggcctgtttgatttttagctgtctgactacacagcagagaattgtatgcaacagtttactgtgatggctgccaaggaatcgnattcatttganatgctccnnnnnnnnnnnnnnnnnnnnnnnnnnnnnnnnnnn

SEQ ID NO: 389079 - DNA, 803 bp, Oryza sativa
gcccacgcgtgcgcggacgcgtccgcccacgcgtccggcaaaacaagaggattgaaggcatataattattatggaaaggatctggagatggtatgtgctggcctatgtgctgggctttacccaaatgtcgttcagtgcaaaagacgaggcaagaggacagcgttttacaccaaagatgttggcaaagtggatatccatccatcatcagtcaatgcgggaattcaccaattcccattgccttatctggtttatagcgagaaggttaaaactgctagcatttatgtcagggattccacaaacatttccgactatgctcttctcctctttggtggttctctcagtgagagcaaaactggagaaggcattgagatgcttggggggtatcttcatttctctgcaccaaggcgtatcatagagttgatccagagattaagaggtgaattggacaaactcctccagaggaagatcgaggagcctgcacttgacatattttctgaaggaaaaggcgttgtggcggcagcagtagaactgctgcacagccaaaacgttcaccactagatgctatctataccggttccatatagcagttttagaactaaaataacagctataccagggagtgcttttgtatactcccttcaatttcgtttgcttgttagagttgaccccttattttttgtgattttccgggagcaagttgctttttacatggacaaacgggataaaatagataaatcaatataaaaatttaattcggacaaaaacttcgaaacatttttttgatctaaaaaaaaaaaaaaaaa

SEQ ID NO: 389080 - DNA, 544 bp, Oryza sativa
ccacgcgtccgcccacgcgtccgcctactactacacacagcgacagagaggagcagagccgcaagaagagtcgagtcatggcggggtcgtcgtccctcagcacgctctccctctgcacgcagtcgccatcaccgtcaccggtggcgtccgcccgcctcgtggcaccggctgtcctcggtttcgccggggccccgcggttcccgacgctgcgggccgcgccacggcggctgacggcgcgggcggtggccggggacgccgaggacgagtgggggaaggagccggcggcggaccagggcggtgccgccgcggcggtggccgaggcgcccgcggatgtgccggtgacgagcgaggtcgcggagctcaaggcgaagctgaaggaggcgctgtacggtacggagcgcggcctgcggcgcgttcaacgagacgccgcggagggtggtcgagctcatcacgcagctcgaggcccgcaaccccacgccggcgcccaccgaggcgctcaccctcctcacggcaagtggatcctcgcgtacaccttattttcaca

SEQ ID NO: 389081 - DNA, 878 bp, Oryza sativa
ggcgactcccgccgcttcccctctcctgctgccgctccccctttcttttccggccttcaccttcccgcctcgccgcgccgtcccctgcgcccgccgcctcgtcttgcggcctccccgcgccggacgccctcgcctccgggacccgcctcccgcggcacccccaccggcggcggaggaggtcggcgaggaggaagaggacgacgatgcccccccgctcaggctcctcgaaccgccccaggaggacgaccccttcccgcccgagatggagccggccgaccccgacttctaccggatagggtacgcgcggatgatgcgggcgtacggggttgagttcttggaaggccccgatgggatggccgtctatgcctcccgggacgtcgacccactccgcagagctagagtgattatggagattccattggagctgatgctgactataactcaaaaacgcccttggatgtttttccccgacattattccactaggccatcccatatttgacatcattgaatcaacagatcctgagaccagattgggatctaaggttagcttgccttcttctctatgcatttgatgtagaagacaacttttggcagctatatggtgattttttgcctagtgttgatgaatgcactagcttgcttttggcaccaaaggacgatctaatggaactagaagaccaagatcttgccacgaaaatgttaaagaaccagaagagagcaattgatttttggcaaaaacattggcataaaacaatccctctaaagctaaagcgtcttgcccctgaccatgaaagatttctatgggcactgagtattgttcagtctcgctctgtcaatttgaaactgagaatgggagccttcctccaagatgcaaat

SEQ ID NO: 389082 - DNA, 691 bp, Oryza sativa
  unsure (1)..(691): unsure at all n locations
cgtccgnattcccgggtcgccccgcgtccgggcgacgtcacccacaaccgcacgcgcagatccgagaggcgagagcgagagcgaggtgggaatggcagggaggctgaccgcggcgggatcccgcgtcctgggcggccagggcgccgctgcccgcgccgcggtgtccgcgctccgccaccgcgccggcatgggcctccccgtcggcaggcacatcgtccccgacaagcccctgccgacgaacgacgagctggtgtgggacaacggcacgcccttcccggagccctgcatcgaccgcctcgcgccgcacatcggcaagtacgaggcgctggcctggctttgcggtgggctcggattcttcgctactcttggcttggctgccaccttgaacgacaaggcctccaagatcccctatactccaaaagtctacccatttgacaatttgagagaggaacttggtgatagaccatagaagaagaccccacttcctcaagtgatgtgatggactgaattctcttgccttctttaatcagagaaaaaaacaggacaattccaatgttcctgatggttgtctttgttgtcgctgtatttttataagttacaatcttgtgatttgctgaatcctgccaagcatggctttgttctataataatgcgatgagtgtctttgagcaactattgcacatgctnnnnnn

SEQ ID NO: 389083 - DNA, 811 bp, Oryza sativa
ctctcgatctccatcttttcttcgtctactaacaaagttataatatcaaattaaggtatatatatatatatatagtagctagcttcaattaatggcgagttcgtcgagcaggttatcctgctgcttgctggtgctcgcggcggcggccatggcggcgacggcgcagaactcggcgcaggacttcgtggacccgcacaacgcggcgagggccgacgtcggggtggggccggtgagctgggacgacacggtggcggcgtacgcggagagctacgcggcgcagcggcagggcgactgcaagctggagcactcggactccggcgggaagtacggcgagaacatcttctggggctccgccggcggcgactggacggcggcgagcgccgtgtcggcgtgggtgtcggagaagcagtggtacgaccacggcagcaacagctgctcggcgccggaggggagctcgtgcgggcactacacgcaggtggtgtggcgcgactcgacggcgatcggctgcgcccgcgtcgtctgcgacggcgacctcggcgtcttcatcacctgcaactactcgccgccgggcaacttcgtcggccaatctccctactgattaattaattaattatattatcacactcactaattaatcatatcgtatgctatgctacgtgtttatgcatgtatggacatgtagtgtcatatggtatatcgtatatgtgtacgtataatatacgtacgtatgctggtgagaataaatccgatgaataaataaataaagctgtactgtcagccgtatttggcttagtgtaaaaaaaaaaaaaaa

SEQ ID NO: 389084 - DNA, 713 bp, Oryza sativa
  unsure (1)..(713): unsure at all n locations
ccacgcgtccgctcagctccaggcggcggcggcggcggcgatgggcgcggaatcggagcaaccaacggcggcggcggcgaccgccgagcaggcgcaggatctcatcgacgccgctaggtacgatgacctggaggacgtcgtcgcgctgttcaccgccggtgtttccctagactccgcggattcgcaaggacgaacggcacttcatatggcctctgccaatggacatctcgctgtggtgcagtacttgatccaaaatggagcgaatgttaatgctacaaactcagagaagaacacacccctccattgggcatgcctcaatggacatatcgaggtaattaaagcgttgatatgcgctggggctagtgtcagtgcactgaacagccatgagaaaacccctatggatgaagcagtgacgaagggcaagatggaggtgatcgatgcaatcggtgcagcagtagctcaagcagaactcgatggtgtcactgtctcctaaaaggacttggtactcctttctgaacggtcctctccttgacaatggatgacatataaccttgttcttatcttttctggtactgtgtattactgtctgtgtcacttgtgatgctgatatgctagtatcttgggcaatgggagaacttgaaccattacttaatattatcaattctgncggcaatcagctattacnnnnnnnnnnnnnnnnnnnnnnnnnnnnn

SEQ ID NO: 389085 - DNA, 868 bp, Oryza sativa
gtgaagtattcggaaagaagagaaggaaaaaaagaatttttagagagaggaggaaaaaaaatatccccaatcccatcatcccttcacccacccgcacgcgtctcctccgactccgatccgagctccagatctgcggcgccggcgaccaacctctccggcggcgggggcggcggcggagatccacgatgccttcgtgcggagcagggggcctcgcccctgcgccgcctcctccgcgtcgacgccctcgtcctcccctccgcttgctcccaccgccttaagccttggtctctccatccccacctcctctcatcctcctaacgccatccaatctctcttctccccgtctctttctcctgctccccgttgccctcccatttcttccccttttcttctcgtagctatagggtgatacacttctctgattattgttgttgttcttcccgtgctgatttggatttaattacaagtatttgtgttggatcggttggacgcgctcactcggtttggtttggtttggattgtattgggttggatcggatcggattagccgcgctatagcgtcaggggatcagctcggctcactgtggtttttgaggtgttagggtttgagtgctaggttgtttgcttgatggatggtcattcctgtggtgatctcgggagagtgtcggaagtgatatccgacggcacctcatcgggtagcgcagacggcggcaagagcctgcctgagaagcattctgcgctggctgatgctacttctggagttgcggcggagaatgccgataatttgtcacaagctgggaagtacatggatttctccagtaccaccagctttggggtgaagaaaggcttccagaagtgcatgacgttt

SEQ ID NO: 389086 - DNA, 444 bp, Oryza sativa
gcgcccacgcgtccgcccacgcgtccgcctccctcttccgcctccgcctcctcctcctccgcccttacccccgcgcgcgtgcacgcgacggcgcggcgatctgatgctgccgccgctgctgctgcaggcgccgcggtgatggcggcggcgccgtccgccggcggcgttggggagggctcttcctcctccgccgccgccgccgctgctgctgctgccgcgacgatcgggccccacgtggtcgacgaagaggcaatgtggcagatgaatctaggagaagctatggaagctgggccatacccagagcgtattggagaaccagattgtagttattacatgaggactggcttgtgcaggtttgggatgacctgtaaatttaatcacccagcagatcgtaagaaggctgttgctgctgcaaggatgaagggggaatatcctcaaagaatt

SEQ ID NO: 389087 - DNA, 415 bp, Oryza sativa
ccacgcgtccgcttctcctcctccccaccgcgtcaaaccccaccccgaagcaaccgccgccgccgccgaatccgccaccggcgaccccaatccgcgccgccggggcccgatccccactccgatccgccgtaatccggccggcccccccgcgcgcgcgcggccggcggcggcgccgccttcgcccccgatgtacagcaacttcaaggagcaggcgatcgagtacgtgaagcaggcggtgcaggaggacaatgccggcaactacgtcaaggcgttcccgctctacatgaacgcgctcgagtacttcaagacccacctcaagtacgagaagaaccctaagatcaaggaggccatcaccgccaagttcaccgagtacctgcgccgcgccgaggagatctcggcgggccttgatgagggg

SEQ ID NO: 389088 - DNA, 862 bp, Oryza sativa
  unsure (1)..(862): unsure at all n locations
ccacgcgtccgcgtacgcgtcccctgctccagcgcgctcgccgccggccgccctactcccgctccaggcccgtcaccgccgtcgccgatccaacatgggtaagacacgtggtatgggagctgggcgcaactcaagacccacaggagaaaccagaggtgggccgacaaagcatacaagaagagccatcttggcaatgaatggaagaaaccctttgctggttcatctcatgcaaagggcattgtccttgaaaagattggcattgaagctaagcagccaaactctgctatccgtaagtgtgctcgtgttcagttggtgaagaatgggaagaagatagctgcctttgtgccgaacgatggttgcttgaacttcatcgaggaaaatgacgaggtgctcatcgctgggtttggtcgtaagggacatgctgtgggagacattcccggtgtccgtttcaaggtggtgaaggtctccggcgtctctctcctcgccctcttcaaggagaagaaggagaagccaagatcttaaatcctattcccctccattgcaagcagctggagcggcatggcggctataagaagtacaattagctacattcagctaatgaattctggggccttccttttctgcttctggcagctaatctctctctgaaattcagactcgatgttgtggtgaacatgtcaatcgtatttttaccccccctaatcacctgaattcaaattccatatagaagtagcagcggatttggtttccttcagcgcgattttaaaattcaaacctggaatgtcgtggagtgaagtngtgtcatcatatgcttgtgaatctctgcnnnnnnnnnnnnnnnnnnnnnnnnnnnnnnnnnnnn

SEQ ID NO: 389089 - DNA, 542 bp, Oryza sativa
cacaagttcacaacccaacacccaaaagcaaaagaaaagcagcaaccaaagatgtgcggcggacgatccttgcggactcataccgagcgcgccggcggcgaggcgcgtcacggcgggccacgtctggccgggcgacgccaacaaggccaagaagaagggcgcgcgcgccgacgacttcgaggccgcgttccgcgacttcgacaacgactccgatgacgaggagatgatggtggaggaggcggaggaggaggaggcgacctccgagcacaagccgttcgtcttccgcgccaagaaggcggcggcggcggcgtcgagcaggcgcaggaagccggcgcagtacaggggcgtgcggcgccggccgtgggggaagtgggcggcggagatccgcgaccccgtcaagggcatccgcgtctggctcggcaccttcaccaacgccgaggccgccgcgctcgcctacgacgacgccgcgcgcgccatccgcggggacagggccaagctcaacttcccttccgctaccacccctgacacccgcaagcgcggcc

SEQ ID NO: 389090 - DNA, 588 bp, Oryza sativa
  unsure (1)..(588): unsure at all n locations
aaaaagggattcaccggggggcgttaaagaataaaggaatccccgggtgcaggattggcaggggaacaacccaacaccaaaagcaaaagaaagcagcacccaaagatggggggcggagcgatcctggcggagtcataccgagcgcnccggcgggggagcgcgtcacggcggccaagtttggccgggcgagccaaacaaggccaagaagaagggcgcgcgccccgacgacttcgagcccgcgttccgcgacttcgacaacgactccgatgacgaggagatgatggtggaggaggcggaggaggaggaggcgacctccgagcacaagccgttcgtcttccgccgccgccgccgaccagggcatggggctctggagcttcgacgacggctgctgcctcgtcgacgtcgaggccagcttgtccttctaggctctagccgtcgtctccggcgaccctgtgactcgatcttgtaccatgtcatgtacatagaagagtggttttgccaagcaagcatgtgttcgtcctggttcctttcggtaatgaaaaattatgtgaggcttctcgttctcgtnnnnnnnnnnnnnnnnnnnnn

SEQ ID NO: 389091 - DNA, 559 bp, Oryza sativa
ccacgcgtccgcgcgctcgctacctcaggatggaggacgttgcgaacgcggacgagctacccagcttgttgaagaaaaggaagtacagatctcacaataaccatgcagaaagacaaaaaggtaaaggttcgatgaatatgccaacaaggaaatcagagaggctagctaagagaatgaaactcatgacatcagtgctcctcacacaaaggaaaaagattggagttggtgagcattttcaggcagaggtacctgactggactgaaccaccttcagatgaacttgctcgttacaaaaatgacccaaacatctcatagatgctaggaaccagaatttggccacctgaagggcaagttctacaaactgataaaaaaatagctggccagggaaggatggaatcatgtaactgttcatacccgggatccttcttctgcagacagcattacacagatgcagccagagatcagctaaggtgtgaactcggtagatgcttcacagaatggcgatttgattcaattgggtgaggagtgttctaaaatgttgactcgtgaggagcatctaa

SEQ ID NO: 389092 - DNA, 1053 bp, Oryza sativa
caaagctcgagctcccgctaggttttcgccgccgccatgccgcaggagatcacatagagcttcaccagaagcgccatggccggcgcctggactacgaggagcgcaacgcagagggggcggcgcgcgaggtgcacaagcgatccagggatgcccggcagttgcttggtgctaagggtaagaggttcgccaagaagcggtatgccgagaaggcacagatgaagaagaccctgaaaatgcacgacgagtcaacttctcggcagaaggttgatgatgttcaagagggtgctcttcctccatatctgctggaccgtgatcagacacaacgtgccaaggttctcagcaacacaattaagcaaaagaggatggaaaaggctggcaaatgggaggttcctttgccaaaggtcagacctgtggctgaagaagaaatgttcaaagttttacgaactggcaagagaaaaaccaaacagtggaagagaatggtcactaaggccacctttgttggacctgggtttacaaggaaaccaccaaagtatgaacggtttattaggccaactggccttcgtttcacaaaggcccatgttactcaccctgagctgaaatgtactttcaaccttgacataatttctgtgaagaaaaacccaaatggtcaaatgtactctactcttggtgttttgacaaggggaactatcattgaggtgaacgttagtgaacttggtctggtaacccctgctggaaaagttgtttggggtaaatatgcacaagttacaaacaacccagagaatgatggctgtatcaatgctgtcttactcgtgtaaggacgcaatgctatacacttcattcttctcgttgcgactctcaccccagatgtacccgttcagtgggtctttttgaccgatcattcagagtagcgtgttttaaactgtgggcacaaggctcatctgttatatgcctttaacatatctggaatacattttacattgtatgtcgtggtgcagaaaagatctttactagttacattttacaacctgttatgagagctacaagtctggtctc

SEQ ID NO: 389093 - DNA, 619 bp, Oryza sativa
cgacgaggagcaggaggggatctccgcccagtcgccggcccaggcgccgccctcctccgcctcgtcccttcccaaggagcaatcgcaggtggagctggagctgcgggtgcttcaggctctcgagttctaccctccgtccaaactgaaaggcattcatcgtcactttgttatctatggtctaatggaatacttgagaaaaagtcttgatagacaattctctgctgatgaagttttacaactactggaccgattcttcaacctagaaatgctgaagccagaggacgacgagaaggataacttcactcaaggagaagaattttccttacctgaaagtttctttaacaaggacgaatgatagcccagtaaccctgcagcgcaacatccttcgtaatttaacagaggggactacgaatcttatgatgtttccaatgattctcttgcgtagacatctcttgacggcacacttcgaactgaaagaacacattttgctcggccgtgtctttgtgttagtgcttactgtgacttgtacagcttctgttgacttaggatatgcagtcaatggtacgggatctcagtacccgttaactatcagtgccgtttcttcgctctaaaaaaaaaa

SEQ ID NO: 389094 - DNA, 654 bp, Oryza sativa
  unsure (1)..(654): unsure at all n locations
cccgacccacgcgtccggcaatcctatacaaagcaagtagtagcaataactggttcttgatcatttttatctaagttcttaatttcgatcgcgaagggccatggcgaaggtggcgttggcggtggcggcgatggcggtgctgctgctgctcgcggcggcggcggcgccgggggcggaggcggcgtgcgacgcgctgcagctgtcgccgtgcgcgagcgcgatcatcgggaacgcgtcgccgtcggcgtcgtgctgcagccggatgaaggagcagcagccgtgcctgtgccagtacgcgcgcgacccaaacctgcagcgctacgtcaactcccccaacggcaagaaggtcttggccgcctgccacgtccccgtcccctcctgctaaaaccaaaccataatactccagttctgcgtgccgtttatacgtgtgtgagtgcgcctgtcgcatggcccacctgccatagacgccgtctatatatggacgtacgtacgtgtctcgcttacttgatttcgtgtctgcttcgacgagttcgatcgtgccgtgtattgcgtacggttatactgctctgtattgggtatgtatgtatgtatgaataaataaagccacaaatgcagttgtacgaggttnnnnnnnnnnnnnnnnnnnnnnnnnnn

SEQ ID NO: 389095 - DNA, 480 bp, Oryza sativa
gaaccaactaaaccctagcccctcccctcttctcctcttcacaacctcctccccctcgcgccaccgcccaaccatctcccctctcgccggagtactcgccgccgccttgctccaaccaccggaagctccgaggatgatctccgcgatatcgtgggtgcccaggggcgccgccaagctcgtccccgtcgaggcggacccgcccacgcaggaggagatcgacgaggccatcaaggccatcgcccagcacacggaaggtgggagcgacgccgacgaggacgccgacgacggcgaggagaatggcaacatggaggtcgatgccgccgccgatgaggaggaggaggaggtagacgaggtcgcgcaggcaaaggccgcggccaaggcgctcgctaagggcgctgtcgatgacgtcgccgacgagctcaaggagctcaacatggacaactacgacgaggaggaggaaggtctcgagattttcagctc

SEQ ID NO: 389096 - DNA, 679 bp, Oryza sativa
ccacgcgtccgcggacgcgtgggcggacgcgtgggtctcaaagcccttcatctccttgtcatcttgagttgcttgagcttatagatttcgacaagatgtcttgcagctgtggatcaagctgtggctgcggctcgaactgcacgtgcggaaagatgtaccctgacctggaagagaagagcagcagcgcccaggccaccgtcgtgctcggcgtcgcgccggagaaggcgcacttcgaggcggccgccgagtccggcgagaccggccacggctgcggctgcggctccagctgcaagtgcaacccttgcaactgctaagaagccatttatttggctattatcatctgtgtgatcgtgtgtccgtgcgtgtgatgaatgaataataaaggagccatatctgctctggcatatgcatagtgcatatgcagtttgtgtgatcaatctgctgtttctgtccctgtgctgatacgcacacgtagctcctgaaactgtctggtatattaatttactggtgtgtttgtgtgggtgggtgtgatcgtatctgtatcatatcaaaccatgcatgtatctatctagtacctatagcttgctggttcacgagctgctattttgtttgtctgtctctgtgacttgaacagactgtgaggaatatgcagttgaaagaaaaggggatttctgcaaaa

SEQ ID NO: 389097 - DNA, 999 bp, Oryza sativa
ccacgcgtccgcccacgcgtccgcggacgcgtgcgggggtgaccaccatgaccctgtacaaaggcaccgcgatatcgagcccctggaaggcgccgatcagcatacacggcggcggcggcggcggcggcgtgcatgagagctggctcaagggatcgttcctcgccgtcgccagctgcatctgctggtccatctggtacatcctgcaggcttcgtcgttgaagaggtacccagcccagctgtcactgacagcatggatgtgcactgtgggaggaatacagtctgctgtcttcacagcgttcatgcagcacaagccggaagattggcgcataggcttcggcctcaagttctggtgcatcgtctactctggattcgcctgcaatggcttcacggtcttcgctcagctatggtgcaccgagaagaagggccccgtcttcgtcaccatgttcaaccctctctccacgatcatggtggccatcctggcctacttcatgtttggtgaaaatctatacgttggaagcataatcggaggagtggttgtcatactcggcctttacatgttgctgtgggggacagtcaaggatcaggaatacaacgcgatcattcagcaggaatccgatctgggctgcgagaagcaggcgaggatcaccgaattttctgcggcgcagaatgaccaggaggagcccaggaggacgaagaagtaaaaaagggatcagattcagttggtgctcaggaagaagcaacgccgttaaaattctgtacattatggttttctgatttggcctctggtgaacacagattttccactgcctcttaccacaagtccacgactcttcaacgggtcgtgtgacttgtgacaaacgtctgtcacaaagttcagagctgtgttgcaaacttgcaatgtgtttcttgttcttctgaattctgattggtcccttctgttgtaatcagccagtttggttgatttgtcttatgaattacgacgggccaattctaacaaaa

SEQ ID NO: 389098 - DNA, 916 bp, Oryza sativa
  unsure (1)..(916): unsure at all n locations
ccacgcgtccgcccacgcgtccgcccacgcgtccgcacgcacaaaccattgcaactgcactacactgcagcacacacaccccgcacccaccaagctaagtaattaatcatcaatggcttccgccgtggtgaagatggccgtcgtctgcctgctcctcctgtccgccggtcatctgatggcctccgccgccgccgcgcgcccggacaccgtcgacgacgcggcggcgctgctgcgcctcaaggaccgcatcgagctgcaggaggaggaggccctggccctcgccgaggagctcgccctcctcgacgacggcgccggcgacgccgtcggagccggctgctcctgcagcaccaccaagtgcaagacgtgcatcgccacctgcgggatcaagtgcttccccaagggaatcaaaggcttccccacctgcttcttcgcctgcgtcttcaccaccagcaagtgcttcgccttcggcgcctaatcgatcaatcgatcacgtcgtcgtctcggctcgtcatcaatcgcgatcgatcggtcgttttcacctaataataatataatcatatgtgtgtgtgcaaagaataacgaattaacctccccaagcttcatgtatgcatacatgcatcgttagtgcatgtgtccctgatcatgggtctctgggggaggatcatgttgtgtcgtgtgtcggctgtgtctcggttatcgtcttatcgatttcgatcatatcggccaattgttgtcgcgctggccacgtatatgtacttgatcgatgaccgagaaactcctaggtcaatctgtgtgttcatatatacatcagtccaataaatcgatcgttaattatattaataaaataaaaatactaatatatctttatttgtttattttcttattcttaaaatttattttctttnnnnnnnnnnnn

SEQ ID NO: 389099 - DNA, 902 bp, Oryza sativa
gcttgatgggatccagggcccggtgtacgtcgggacagggtgcgtgttcaggcggcaggcgctgtacggatacaacccacccaagggacccaagaggcccaagatggtgacctgcgactgctgcccttgcttcgggaggaagaagcggaagcacggcaaggacggcctcccggaggccgtcgccgccgacggcgggatggacagcgacaaggagatgctcatgtcgcagatgaacttcgagaagcggttcgggcagtcggcggcgttcgtgacgtcgacgctgatggaggaaggcggcgtcccgccgtcgtccagccccgccgcgctcctcaaggaggccatccatgtcatcagctgcggctacgaggacaagaccgactggggtctcgagctggggtggatctacgggtcgatcacggaggacatcctaacggggttcaagatgcactgccgcgggtggaggtcggtgtactgcatgccgaagagggcggcgttcaaggggtcagcgccggtcaacctatctgaccgtctcaaccaggtgctccggtgggcgctcggctccgtcgagatcttcttcagccggcacagcccgctcctctacggctacaagaacggcaacctcaagtggctcgagcgcttctcctacatcaacaccaccatctaccccttcacctctctccccctcctcgcctactgcaccctacccgccgtctgcctcctcaccggcaagttcatcatgcctccgattagcacgtttgcgagtttgttcttcatcgcgctcttcatctccatcttcgcgacgggcatcctggagatgaggtggagcggggtgagcatcgaggagtggtggagggacgagcagttctgggtcatcggcggcgtgtctgcgcacctgttcgcgg

SEQ ID NO: 389100 - DNA, 813 bp, Oryza sativa
aaccattgcaactgcactacactgcagcacacacaccccgcacccaccaagctaagtaattaatcatcaatggcttccgccgtggtgaagatggccgtcgtctgcctgctcctcctgtccgccggtcatctgatggcctccgccgccgccgcgcgcccggacaccgtcgacgacgcggcggcgctgctgcgcctcaaggtgctcggcggcgtggacaccaacttcacggtgacgtccaaggccgccgccgacgagaccgacgcgttcggcgagctctacctgttcaagtggacgacgctgctggtgccgccgacgacgctgatcatcccaacatcatcggcgtcgtcgccggcgtctccgacgccgtcaacaacggctccgaggcgtggggcccgctcttcgggaagctcttcttcgccttctgggtcatcgtccacctctaccccttcctcaaggggctcatggggaggcagaaccggacgcccaccattgttgtcatctggtccgtgctgctcgcctccatcttttccttgctctgggtcaggattgatcccttcaccatcaaggccaggggccctgacgtcaggcagtgcggcatcaactgctgagagagggcgtcagcgatttctgaagatttgtgcataggggggcagcaagaagatcgatttgtaaaagttttgtattgctcgtgttgagttcgtgctatgttcttctgtaatattttgggacccagaaatggtttaaacttttgaagagggaatggacagatggccatatttgaatgttaagcaacaagggctggtattctcactc

SEQ ID NO: 389101 - DNA, 490 bp, Oryza sativa
tcaagtggctcgagcgcttcgcctacaccaacaccatcgtctaccccttcacctccattcccctcctcgcctactgcaccatccccgccgtctgcctcctcaccggcaagttcatcatccccacgcttaacaatttggcgagcatatggttcatagcgcttttcctgtcgatcatcgcgacgggggtgctggagctgcggtggagcggggtgagcatcgaggactggtggaggaacgagcagttctgggtgatcggcggcgtgtcggcgcacctgttcgccgtgttccagggcctcctcaaggtgctcggcggcgtggacaccaacttcacggtgacgtccaaggccgccgccgacgagaccgacgcgttcggcgagctctacctgttcaagtggacgacgctgctggtgccgccgacgacgctgatcatcatcaacattggtgggatcgtcgccggcgtgtcggacgccgtgaacaacgggtacgggtc

SEQ ID NO: 389102 - DNA, 729 bp, Oryza sativa
gggacgcacgcgtccgcccacgcgtccgcccacgcgtccgcccacgcgtccggcgcctcaaggaccgcatctagctgcatgaggaggaggccctggccctctccgaggagctcgccctcctcgacgacggcgccggcgacgccgtcggagccggctgctcctgcagcaccaccaagtgcaagacgtgcatcgccacctgcgggatcaagtgcttccccaagggaatcaaaggcttccccacctgcttcttcgcctgcgtcttcaccaccagcaagtgcttcgccttcggcgcctaatcgatcaatcgatcacgtcgtcgtctcggctcgtcatcaatcgcgatcgatcggtcggtttcacctaataataatataatcatatgtgtgtgtgcaaagaataacgaattaacctccccatagcttcatgtatgcatacatagcatcgtctagtgcatgcgtgcctgatcatggctttctggcggaggatcatgccgtgtcgtgtgtcggctgtctctagggtctgcgctaatccactctcagcatatccgccaattgttgccgcgctggccacgtatatgtacttgatcgatgaccgagaaactcctaggtcaatctgtgtgttcatatatacatcagtccaataaatcgatcgctaattatgttaaaacaaaacaaaacttgccccaactgccaatagagttagcagtttaattgattaacctggccacgg

SEQ ID NO: 389103 - DNA, 765 bp, Oryza sativa
  unsure (1)..(765): unsure at all n locations
cgcctccaccgcctcaacccggacgcagcagccgcagcggaagagggaagcgaacgaagcgaagctcgaggggagatggcgcgcggcgtggcggcggcggcggggggcaagggcggcgccgggaagaagaagggctccgtcaccttcgtcatcgactgcgccaagcccgtcgacgacaagatcatggagatcgcgtcgctcgagaagttcctgcaggagcgcatcaaggtcgccggaggcaaggccggcaacctcggcgagtccgtcaccgtctcccgcgacaagaccaaggtcaccgtcacctccgacgggcccttctccaagaggtacctgaagtacttgaccaagaagtacctgaagaagcacaatgtgcgtgactggctacgggtgattgcatccaacaaggaccgcaacgtgtacgagctccggtacttcaacatcgccgagaacgagggcgaggaggaggattagatgcactgcctttttctatgtcttgtgaacttttgaacttgctggaacactatgctgtagtcactgaagagaagaattttgatgtttcatttatcaatgtttccctgtgtgcttaaaacctatgcttaggtaagcaagttgaagaattattggttctcacctttgcagttgagcagtgtgcatttttaaagttttaactggaacctgatggagctgttagtgctgttggttcatcagctgatactgaatcgagcacatcagcttttnctnnnnnnnnnnnnnnnnnnnnnnnnn

SEQ ID NO: 389104 - DNA, 666 bp, Oryza sativa
cggacgcgtgggcgccgccacacacccccaaccaagcttacaccagcgcgaagcggcggcgggggggcgtgatggcgcgcggcgtggctgcggcggccaagggcggcgcgggcggcaagaagaagggctccgtctcgttcgtgatcgactgctccaagcccgtggaggacaagatcatggagatcgcgtcgctggagaagttcctgcaggagcgcatcaaggtcgccggcggcaaggccgggaacctcggcgactccgtcaccgtcacgcgcgacaagaccaaggtcaccgtcacctccgacggggccttctccaagaggtatctgaagtacttgaccaagaagtacttgaagaagcacaatgtgcgggactggctacgtgttattgcggctaacaaggaccgcaatgtctatgagctcagatacttcaacattgctgagaacgagggcgaggaggaagactagagtgtattccacatatatcttagttttggagttgttgaattttgatacttcatcttagtacctctagttattcaatccatgttatgttatgctgtgggtcaacttggatggttaatttgaagaatccttatatttggtcgcctcaacttcaagagtgcctactgctaatgatgacttgtgaacctagaaaagcagtaccgtg

SEQ ID NO: 389105 - DNA, 793 bp, Oryza sativa
  unsure (1)..(793): unsure at all n locations
aaatcctccacatcttcttcgccgcctcgcgctctccgtttcactcgcgcacggtgctccgcggggactcgtcgggcggcggccatggaggaggtgacggaggcggtcggcaacctcaccatagccgcgggagaagccgccggggcgngcggcggcgcggcggaggcgcacaagaagaaccgcatccaggtctccaacaccaagaagccgctcttcttctacgtcaacctcgccaagaggtacatgcagctgcataacgaagtggagctctcggcactcggcatggctattgcaactgtggtgactgttgctgaaattctgaaaaataatggccttgctgtcgagaagaagattatgacatctactgttgacgtcaaagatgattcgaggagtcgccctatgcagaaagccaagattgaaatagtgctgggcaagacggacaaatttgacgaactgatggcagcagccgcggaagagagggaggccgcggcagcggaggctgaggccgaggagcaaagctaatattagaagccaaaaagcttcctgttgtagctttaattttagtattctgctgctaggtgttgtatttggaactccttgatacatcaagggcttgtgtaatcaattagtggcacagcttatttggtgtgcttttacttgattggttaagttttgatgccaacttatgacagtgaaggtgtatgagtacggtgctcatcttgatttgcccaatttacatttggaagatgtctnnnnnnnnnnnnnnnnnnnnnnnnnnnnnnnnnnnnnnnnn

SEQ ID NO: 389106 - DNA, 739 bp, Oryza sativa
ggcacgcgtccgcccacgcgtccggctgccgccgccggatttgctccccctcgcgattcctcttgcgccggcgccggattcgctcccctcgcgtgctcgtcgccgttgcgctgcgccgggttgtggttgttcttggcggctaggtcgtggggttttcttgtttcggaggtagggagaggtttcgttagggtttcgggcggggatggaggaggtgacggaggcggtgagcaacctgtccatcacggagccgcacaagaagaaccggatccaggtctccaacaccaagaagccgctcttcttctacgtcaacctcgccaagagatacatgcagcagcataatgaggtggagctctcggcgctcggcatggccattgccactgtggtgactgttgcggaaattctaaaaaataatggccttcttgttcgaaaagaagatcatgacatcaactgttgatgtcaaagacgactcaaggagccgtcctatgcagaaggcgaagattgaaattttgcttgggaagacggagaagtttgatgagctgatggcagctgctgccgaggagagggaagccgcggctgctgctgagggcgaggaacaaggctagctaaataaactattttaagttggctgttgagtttaatttagtactcctgctaggtttaagtttccgtttattgtggtcagcaagagacttatcttgtgtaatcaaaaagctctgcttatttgattcgtttgaatgat

SEQ ID NO: 389107 - DNA, 523 bp, Oryza sativa
ccacgcgtccgggaaaacaaagctaaagaaaaggatcataaattgaagcaagaatctgtatggaaacgcctagaagaggttgcatcagcaaaagccacaagtggcgaggccgtcctcatctctccatcccttgctcgcacatcatcacttgtgtaggaactttgttaaaggtcttggagaatcatgagatactgtacaggattgaatgtatatacaaggtctatgaaggtgtgcaaatgaaggggggaaaaattctgagaaggccagttgggtcagttagactagctttcatttttgtaaatcagatgtcttgggactcctggcttattttgttacttgtagtttgctatggcgaatggttaatctgccaaaaagggattctgtgtctttctttgcttgtttagttaaatatataggccctcaggattgtaaatggaagcaaatctagtactctctgagggagtgtttgtcataaaatgggggtatagtttatcgctttgtgattatcaaaaaaaaaaaaaaa

SEQ ID NO: 389108 - DNA, 780 bp, Oryza sativa
  unsure (1)..(780): unsure at all n locations
accacgcggtagcggacgcgagggcggacgcgtgggagaagtgtctaaaaatatggctggaaaaccaagtggtttctggcaatatgtgttgtaccgcttgtatgtaaatgttggtaaaaacacatattgccagccaccacttggttttccagccataatttttgacaattcacccacgcgtccgcccacgcgtccgcccacgcgtccgctctcatttcatccaactatacaagttcaagagtttacaagagacccagacgatcaagatgtcgtgcggtggaagttgcaactgcggttcctgcggatgcggcggtggctgcggaaagatgtaccctgacctggctgagaagatcaccaccaccaccactactgcaaccactgtcctaggtgttgcacctgagaaggggcactctgagggggttggcaaggcagctgaatctggcgaggctgcccatggctgcagctgtggctccagctgcaggtgcaacccctgcaactgctaaggccaaggcgatctatgactgaattgccaatgcaccagcctgtctacatgatgaataaataaagagtccatccagtgtgatggctcatgcctgtgtgagtgtgactgaatccatcagtgtgtgtgtgtgtttgtgtcaaccatgtgtgaatcaggtgtcaaaaatcgtggctggaaatccatgtggtttctagctttatgtaaatgttgtttgtgaaatataaatattgttttgtgtatgtgaaaaaaaaaaaaaaaagggcggtctnnnnnnnnnn

SEQ ID NO: 389109 - DNA, 596 bp, Oryza sativa
  unsure (1)..(596): unsure at all n locations
ccacgcgtccgatctctcattgcatacaagttcctgaagagtttacaagagacccagaagatcaagatgtcgtgcggtggaagttgcaactgcggttcttgcggctgcggcggtggctgtggaaagatgtaccctgacctggctgagaagatcaacaccaccatcactactgcaaccactgtcctcggtgttgcacctgagaaggggcattttgaggtgatggttggcaaggcaggtgagtctggtgaggctgcccatggctgcagctgtggctccagctgcaagtgcaacccctgcaactgctaaggccaagatgatctatgactgaattgccaatgcaccagcctgtctacatgatgaataaataaagagtccatccagtgtgatggctcatgcctgtgtgtgtgtgtgtttgtctcaaccatgtgcgaatcaggtgtcaaaagtccgtggctggaaatcaatgtggtttctggctttatgtaaatgttgtttgtgaaatataaatattggtttgtctatgaatttaaaaaaaaaannnnnnnnnnnnnnnnnnnnnnnnnnnnnnnnnnnnnnnnnnnnnnnnnnnnnnnnnn

SEQ ID NO: 389110 - DNA, 594 bp, Oryza sativa
ccacgcgtccgcccacgcgtccgcaatctctcatttcatccaactatacaagttcctgaagagtttacaagtgacccagaagatcaagatgtcgtgcggtggaagttgcaactgtggttcctgcggatgcagcggtggctgcggaaagatgtaccctgacctggctgagaagatcaccatcaccactactactacaaccactgtcctcggtgttgcacctgagaaggggcaatttgagggagttggcaaagcagctgaatctggtgagggtgcccatggctgcagctgtggttccagctgcaagtgcaacccctgcaactgctaaaggccaaggcgatctgtgactatgtgatgaacaaacagagcccttccagtctgatggctcatggctgtgtgaccctgtgaatccagcattgtgtgtgcgcgcgcgcgtcatgaattgtcaaaaattatggctggaaaaccaagtggtttctggcaatatgtgttgtaccgcttgtatgtaaatgttggtaaaaacaaagtaacatcgcttatctctgaatctctaacgtaagtggatgcttaccaaaaactatggatgataatcaatcg

SEQ ID NO: 389111 - DNA, 540 bp, Oryza sativa
  unsure (1)..(540): unsure at all n locations
ccacgcgtccgcaagagacccagaagatcaagatgtcgtgcggtggaagttgcaactgcggttcttgcggctgcggcggtggctgtggaaagatgtaccctgacctggctgagaagatcaacaccaccatcactactgcaaccactgtcctcggtgttgcacctgagaaggggcattttgaggtgatggttggcaaggcaggtgagtctggtgaggctgcccatggctgcagctgtggctccagctgcaagtgcaacccctgcaactgctaaggccaagatgatctatgactgaattgccaatgcaccagcctgtctacatgatgaataaataaagagtccatccagtgtgatggctcatgcctgtgtgtgtgtgtgtttgtctcaaccatgtgcgaatcaggtgtcaaaagtccgtggctggaaatcaatggggtttctggctttatggaaaatgtngtttgggaaatataaatattgggttggctatgaattttacctctactctgggaaaaaaaaaaaaaaaaggccggccctttta

SEQ ID NO: 389112 - DNA, 651 bp, Oryza sativa
  unsure (1)..(651): unsure at all n locations
ccacgcgtccgctctcatttcatccaactacacaagttcctgaagagtttacaagagacccagaagatcaagatgtcgtgcggtggaagttgtaactgcggttcctgcggatgcggcggtggctgcggaaagatgtaccctgacctggctgagaagatcaccaccaccaccactactgcaaccactgtcctcggcgttgcacctgagaaggggcactttgaggtgatggttggcaaggcagctgaatctggtgaggctgcccatggctgcagctgtggctccagctgcaagtgcaacccctgcaactgctaaaggggaaggttatcatgctgatgatctgtacaagtaaataaagaagccatttggtgtgcaatggctccagtgtgtgtgagtcagcttgttgttcatcctgatgtactaatgtggactgtgaatcttgtgaggtgtcccctttgtgttcttgtctgaatcttagatgctatgatatggccatttgtgatttggggcacctgaagttttcaggctacattatgtttgtgtcactatctcatctgagcgtttggttctgaaaatatactatggtttacttgtgtnnnnnnnnnnnnnnnnnnnnnnnnnnnnnnnnnnnnnnnnnnnnnnnnnnnnnnnnnn

SEQ ID NO: 389113 - DNA, 511 bp, Oryza sativa
tccggattcccggtcgaccacgcgtccgcggacgcgtgggcggctgcggcggtggctgtggaaagatgtaccctgacctggctgagaagatcaacaccaccatcactactgcaaccactgtcctcggtgttgcacctgagaaggggcattttgaggtgatggttggcaaggcaggtgagtctggtgaggctgcccatggctgcagctgtggctccagctgcaagtccaacccctgcaactgctaaggccaagatgatctatgtctgaattgccaatgcaccagcctgtctacatgatgaataaataaagagtccatccagtgtgatggctcatgcctgtgtgtgtgtgtgtttgtctcaaccatgtgcgaatcaggtgtcaaaagtccgtggctggaaatcaatgtgggttctggcctcccgtcaatgatgtttgtcccaccccttatataggtgtgtcagaaaaaacgtaaaaaagcgcgtgggctgcccatgcgtccgcggacgcgtgg

SEQ ID NO: 389114 - DNA, 374 bp, Oryza sativa
ccacgcgtccgcggacgcgtgggcctgcaactgctaaggccaagatgatctatgactgaattgccaatgcaccagcctgtctacatgatgaataaataaagagtccatccagtgtgatggctcatgcctgtgtgtgtgtgtgtttgtctcaaccatgtgcgaatcaggtgtcaaaagtccgtggctggaaatcaatgtggtttctggctttatgtaaatgttgtttgtgaaatataaatattggtttgtctatgaattttactcttactctgtgaaatataaatattggtttgtctatgaaaaaaaaaaaaataaaaaaaaaaactgaaaactatacaaaaaaaataatataaactcatcatgtacatatggat

SEQ ID NO: 389115 - DNA, 751 bp, Oryza sativa
ttgtccgcagccgcatcggctgccagccagcccagcgcggcggtggccaacggcaaggtggggaagaagcccgcgctgtcgcagagcgcgtcgctcccggcgagaggggcggctgccaagaaggcggcgacaccaaagcacgccaagacgacggacgggaaaggcgctgcgcccaatggatcggagaaggcggctgggcgagccgtggagaagaaggcgaattcagcccggacgcctgccgcaagccgctccttgcctgttaaatctggatcggtggacgcgcctccaaatgatgcttctcctgaaacccaagagtcaaacgagaacaccacaaatgctttggaacagactctgccagagaaaatggaggatgatgtgcactccaccacatcgagtaccaatactccccgagcagctgctcaacgcaagaatgctgctgctgctgctggttttagtttcaggctgcaggagcgtgctgagaagaggaaggagttctaccaaaaacttgaagagaagatccatgcaaaggagcttgaacaaacaaatttgcaggcaaaatctaaagagagccaagaggctgagatcaaattacttaggaagagcctgacatttaaagcgacacccatgccaagcttttacaaggagcaacctcctaaagttgagttgaaaaagatcccaccaacacgcgctaggtcaccaaagcttggccggcacaagccaaccaattctgctgctgctgcttctgttgatg

SEQ ID NO: 389116 - DNA, 643 bp, Oryza sativa
ccacgcgtccgtcttgctagctagagcttgaaatccctcctaactgtgatagatatacctagctaggctgatctccatcatctgatcaaagaggggcggtgtagaaagggagggagaagatgttccgcactggagccaagaacatgagcagcgatctcccggttgaaggtgtggtgagggtgaggaaggtggagaagatccaggcttacaacctcgtcaccaagccatcagcgaccacaagcaggatatcgccgataacaggtcaggccgaaagcatggccgtcaccgttgttcgggttggagctgtggctggaaaaccagacgacatcgtcccagtggctagaatgaacaactaagttatgatcggagaaatagacggtgtacgtcatcgtctagtggctatacataacaactaattagcacgcatggtttactagggaaaatgtgagtttctacttgggataactagggatgatggttataggctctgtcatatgtcatgtgtaactggccagtcatctaccacggtgtcgctagatgccatgaacgtaataatccatatatgtataagtttattatatgtcaataattgtgtcccatgcttgtaatgacatatatataagatacaaaagtggctactacc

SEQ ID NO: 389117 - DNA, 609 bp, Oryza sativa
ccacgcgtccgcacttgcactgcaaccagaagccagccactactcagtaggagattggagctgagagcagcagcagcagcagcagctaggaagatgaagagcctgcaaggtgaggtccacctgaacatccctgcatccaaggcatgggagatgttcaccaacaatgagaccctgggcaagatcagccccgaaatgctgtcgggcgccgagtaccttgaaggagatggcagccctggcagcctcaggatcttcaagctaggacctgcacttcatcactttgtcaaggaatctgttcagaaggttgagaaggtcgagacaggccggtccttcggctatgaagtggtcagcggtgagctgaaggaggtctatgatccctaccatgtcaccttctccttcgcccccgtcccggggaaggaaggcgagcagtgcgtcgctgggtggaaggctgagtttgagcccatcacccccacttccccgccaccagagaaggccaaggatgccgccctcgggtttcttaaattgtttgagacttgcgaagccactaactagtaaaatgacaaaagctgttgtcatcttaatgaagataagtatgaagaaacctatgggtag

SEQ ID NO: 389118 - DNA, 830 bp, Oryza sativa
aaaaaatctcatcttccaatcccaacctggtctggtggaattcctgaatccgggtcgatcgagagctcacgatgtcggccatggagaccgacatcaacgcgccgccgccccccgcccccgcccccgccggcgccggcgagggatcctcctctgccgccggcccctcctcccgcaagcccaacaagcgcttcgagatcaagaagtggaacgccgtcgcgctctgggcatgggatatcgtcgtcgacaactgcgccatctgccgcaaccacatcatggatctatgcatcgagtgccaggcgaaccaggccagcgccaccagtgaggagtgcactgtcgcttggggtgtctgtaatcatgcttttcacttccattgcatcagcaggtggctcaagactcgccaagtgtgcccgttagataacagtgaatgggaatttcagaaatatgggcactagacaccacctgctgtctgcgcttgtttgttgccacggctgcgcttcatacacaagccgtatcatctgccgaacagctccatcgttagcttcttttgatgccttacatctatcgctggacgtttatcgtgcgtacttgtcccatacagggattgtgtttggatgatttgtagagagggtactgtatggcataagatccttcatattaatgttctgtgggtcacatatcaacttgctattattgtattcagcggttctctctctattgtgccttaagctgtggtaccatattaagaccagtgctcgcttttgattgcttttctgagctttccaggacatggaatcgagcctgtgaatgtcggcggccggtttatcctttcg

SEQ ID NO: 389119 - DNA, 686 bp, Oryza sativa
  unsure (1)..(686): unsure at all n locations
gcggacgcgtgggtcctcgcggtcgcttctcgtctcgtcccaatctactcctcctcctcgcgctcccctcccaccctagggttcgccatggacaagggcgacgtcgccgtggccgtgcccccctccatcgccggcgcctcctcctccggggccaagaagggcaagcgcttcgagatcaagaagtggaacgctgtctccctctgggcctgggacatcgtcgtggacaactgcgccatctgccgcaaccacatcatggacctctgcatcgagtgccaggcgaaccaggcgagcgccaccagcgaggagtgcaccgtcgcttggggagtttgcaaccatgcattccacttccactgcatcagccgttggctcaagacccgtcaagtgtgccctctagacaacagcgagtgggagttccagaagtatggtcactagacaattctctttcgggagcaaaagcggcttcaagtttctcgtatcaagttttagcactaagtgataactaatgattacgatgggtaggctgcattgttaatgtttcagaagcttgtattttcggtagaaacatatcatgctggtagctcagcgaatctcctcaaacttattttcgctgaaatcaagntgcagttcgtatttactaagtttttttctgctnnnnnnnnnnnnnnnnnnnnnnnnnnnnnnnnnnn

SEQ ID NO: 389120 - DNA, 419 bp, Oryza sativa
ccacgcgtccgggcgggcggcgcgacccgaaggcgacggcgacggcgacagcacggctctctcatccggccggcaccttctttccgtcacagaaggctatagttcgtcatttggagcaatcactgatgttggattttatgtaattaaaatgtgatggtagcagcttcatgaagtacttaaactctcattttgggagatcctgggagaagtttgggttttgttgtgtatttagacttagctagtgcagcctgttttgagtttgctatgtgagatatttggaaagtgaaaataattgtatttattacgcaaccctcctactacacgaagtagtctaagagggtcccataatcgtataaaagtggagacaccccgtttaggggtgataatttaatataaaaaataaattttattaaaaaata

SEQ ID NO: 389121 - DNA, 795 bp, Oryza sativa
  unsure (1)..(795): unsure at all n locations
ccacgcgttcgcccacgcgttcggccacgcgtgcgaccacgcgttcgagctgttggggcagcaaaaggcctggagtatcttcatgagaaagcacagcctcatatcatacacagggacatcaagtccagcaatgttctccttttcgatgatgatgttgctaaaatagctgactttgatttgtcaaaccaagctcctgacatggcagctcggcttcactctactagggttcttggaacctttggatatcatgcacctgagtatgcaatgactggacagcttagctccaagagtgatgtgtacagttttggagttgttcttcttgagctattgaccggaaggaaacctgttgaccatacattaccaaggggacagcagagtcttgtgacttgggccaccccaaggcttagtgaagacaaggttaggcaatgtgttgactcaagacttggaggggactatcctcctaaactgtcgcaaagtttgcagctgttgcggcgttatgcgttcagtatgaagcggactttcgaccaaacatgagcattgtcgtgaaagcgctgcaacccctgctgaatgctcgggcaactaaccctggagaaaatgccgggtcataaaactttggtctaccttttgtatgatagatattaagttaagaagtatgagacatcgatattgttcttgcggatgtgtggctggctggaagtgtgtacatttgtgattattcgtcccttgttgtaatcaccaaggttctagcaaccgaaaatatttgattcttcgcaaaaaaaaaaaaaaannnnnnnn

SEQ ID NO: 389122 - DNA, 940 bp, Oryza sativa
tctgctgcatgccgcatgctcctactgctcctatatacatcccatcctcgccgcgatttccttcgccgccgccgccgaatatagtcttcttccccggcgccggggcacgcgaaaagggtttgcttctagcagaatatgtcgtgctttgcatgctgtggagatgaagatactcaaggagtaccagacaacaggaatccatacccagggaaccatccagcaaggagcgatgcatatcgcacagctgatccaactccaagaggtcctcaacctgtgaaagtgcaaccaattgcagtccccatcattcctggtgatgaaattagggaagtgactaacaattttggtgatgaagctttgattggtgaaggttcctttggcagagtgtattttggtgttctaagaaatggtagaagtgcagcggtcaaaaagctagactctagtaagcagccagaccaagaatttttggcacaggtatctatggtgtcgaggcttaagcatgaacatgttgttgagctgcttggttattgtgttgatggaaatctccgtgtccttgcttatgagtttgcgactatgggttctcttcatgatatgcttcatggaaggaagggtgttaaaggagctcaacctggtccagtcttatcatgggcacaacgtgtgaagatagctgttggggcagcaaaaggcctggagtatcttcatgagaaagcacagcctcatatcatacacagggacatcaagtccagcaatgttctccttttcgatgatgatgttgctaaaatagctgactttgatttgtcaaaccaagctcctgacatggcagctcggcttcactctactagggttcttggaacctttggatatcatgcacctgagtatgcaatgactggacagcttagctccaagagtgatgtgtacagttttggagttgtcttcttgagctatt

SEQ ID NO: 389123 - DNA, 528 bp, Oryza sativa
agtgttatttaccatggggctgccttatacgtctcagcatggaggtcagatcctctttgggcctactgacggatatctctacctcatgatgggggatggtggaggaaagggggacccttttaatttctctcagaacaaaaagtcgcttctgggaaaaattatgaggcttgatgttgataatccaccaagacagagtgaaattgctaaccagagcttgtggggtaactactccattccaaaagacaacccatacactgatgacagtgacttagaaccagaagtttgggcattgggtcttagaaacccatggagatgcagctttgattccgcgaggccttcctacttctactgtgccgatgttggtcaggatcaatacgaagaagtagatttgatctccaagggtggaaactatggatggcgtgcatatgaggggccacttgttttcaatccaccttcggcacctggagggaacacttctctcaatttcataaacgccaattcccctatcatgggctacagccattctga

SEQ ID NO: 389124 - DNA, 667 bp, Oryza sativa
ccacgcgtccggtcctaagacttaagggtagcacaaacttggaagcgattcaaattctgaagatacctggaggatccctcaaggactcctttttggatgaaggtttcattcttgacaagaaaattggtcttggacaaccaaagagaattgagaatgccaaaattttagttgcaaacacagctatggacacagacaaagtaaagatatatggggcacgtgtccgagtggattcgatggctaaggtcgcagaaattgaagctgccgaaaagcagaaaatgagagagaaagttcagaaaatcattggtcatggaattaactgctttgtcaataggcagttgatctataacttccctgaagaactttttgctgatgctggcatacttgcaattgagcatgctgactttgagggcattgaacggctagctcttgtcaccggtggtgacattgcatcaacttttgacaacccagagtctgttaagcttgggcattgcaatgtcattgaagagattatgattgggggaggacaaacttattcacttctctggtgtcgcgatgggccaggcttgcaccattgttttaagaggggcaagtgagcatgtgcttgacgaggctgagaggtccttgcacgatgccttatgtgtgctttcccagacaggaaatgacaccc

SEQ ID NO: 389125 - DNA, 575 bp, Oryza sativa
  unsure (1)..(575): unsure at all n locations
ccacgcgtccggccgaagcagaaccagcaagtactgcagaagaaagacttcttccaggccggccggcaacaagccgaggacaggttcaatagatctgtggttcgcgttcaagccctgttccgttcttacaaggcacaacaggagtaccggaggatgaagattgctcatgaggaggccaagattgagttcagtgaagggcagctaggagcagcatgcaggagttgaaatggtttttagggacagctagtttctctaattcttgtcttgtacattattggaaatgctagaacaacctgcagtttgccgacgctgtacattttaggaccatctgaatgatctgatacagcttttgctgaccccttatggctgatgaatttgatgttagccctgtagtaactgtggtggtttgcgtttggctggctttaagctggacataaacagcgtgtgcttcaatgtacatgtagatgcaatgcaagtacatatcatgttgtaaatgctaataagattagcnataatcagcaaagccctgagccnatgacaaggngtgtggtttttctcaaaaaaaaaaaaaaaaa

SEQ ID NO: 389126 - DNA, 950 bp, Oryza sativa
  unsure (1)..(950): unsure at all n locations
ccacgcgtccgcccacgcgtccgcttcgacatgccgtcgggccgccgcgacgggaccttctccaacgactccggcccgatcgacttcctcccgccgccgacgtccaacctcagcgacctcgtcgccagcttcgccgtcaagggcctctccgtggaggacatggtggtgctctcgggcgcccacaccgtcggccgctcccactgctcctccttcgtccccgaccgcctcaacgcctgcgtcttctccgacatcgacggcggcttcgcctggttcctcaggtcgcagtgcccgctcgacgcgacgcccggcggcaacgatcccacggtgatgctggacttcgtgacgcccaacacgctggacaaccagtactacaagaacgtgctcgaccacaaggtgctcttcacctctgacgcggcgctcctgacgtcgccggagacggcgaagatggtggtggacaacgccgtcatccccgggtggtgggaggacaggttcaaggcggccatggtgaagttggcgagcatccaggtgaagaccgggtaccaggggcagatcaggaagaactgcagggtcatcaactactgattaatctacaagtttagctgcgtgattcaattacctggtgaagtacgtgctcaacgatgacgacgtacacggtttgatagtttcacaccctccttgatcaagtcgcaagcgtacgtgttgatgatgttatgattggatgtgacttttgcttcacatttatgttctccctcttttgttaccattccttaattcctcatttgtgaaccccaaggtttacatgctatggatttctttgttttgacctaattgtgtaataaggtcatatgtacttggaataattgtaagttaagttttttgcaacaagtgcccgctatatattgatgtttatctgaaatttgaaaaaaacggggggaannnnnnnnnnnnnn

SEQ ID NO: 389127 - DNA, 620 bp, Oryza sativa
  unsure (1)..(620): unsure at all n locations
gcccacgcgtccgcccacgcgtccgcccacgcgtccggtcgccttcgccgcccgcgacgccgcctacttcctcggcagagtcagggtcaagatcaacgtcccaggtggacgcctcgatggccgccgctccctcgactccgacgccctcaacaacctccccccgcccttcttcaacgtgacccagctcgtcggcgtcttcgccgccaagggcctcgacgccgaggacatggtggtgctctccggcgcccacaccgtcggccgctcccactgctcctccttcgtctcggaccgcgtcgccgcgccctccgacatcaacggcggcttcgccaacttcctcaagcagaggtgcccggccaacccgacctccagcaacgaccccaccgggaaccaggacgtcgtcacccccaacgcgttcgacaaccagtactacaagaacgtcattgcccacaaggtgctcttcacgtcggacgcggcgctgctgacctcgccggcgacggcgaagatggtgtcggacaacgccaacatccccgggtggtgggaggacaggttcaagaaggcgttcgtcaagatggccgncgtcgacgtcaaaaacggctaccagggcgagatcaggaagaact

SEQ ID NO: 389128 - DNA, 587 bp, Oryza sativa
  unsure (1)..(587): unsure at all n locations
ccacgcgtccgcccacgcgttcggaggaagggactggaaggttcgatggcgtcggaggtggaggacgatgcggcggcggtgctcaccaacggcggtgccggcgccgcggaagtccggcggaggagggaccaagcgaaggagattctgtccaagcaggccgtcaagatcgccaccaaggccgaggagcacgagcgcttcatcttcaaggtcacacacttgctgggtgttcttggatttgggacattttgctacctcctgggtgccagaccacaggatgtgccgtatgtgtactgcctgttctatgtcatctttgttccgctccggtggatctactaccgctataagaaatggcattactatctcctggacttctgttactatgccaacacttttctccttgttatgattctcttctatccaaaggatgaaaagcttttcatggtttgcttctcatttgcagaggggccgttgcttgggcattaattgtgtggcgtncagtttggttttaagctcaatttgataaattgtagtgtcngatcacctttgctgggatagtatattnatatccgtggtggatcaaaaatttt

SEQ ID NO: 389129 - DNA, 541 bp, Oryza sativa
acccacgcgtgcggtaggagtgttaggtttagggcttccgccgccgcctgctcctccaaaacctcgtcggcgcgccgccgcggccaagccgctgtgctgtacaagaaccggttcggcgacaacgtaagttccgtgcccgacgagccaccaggtagatggggaaggcaaagcgtgcgtcgatttttatcaggcttgtttcagcagctggaaccgggtttttctatgtgaagcgcaagaatcctcgtcggatcacagagaagcttgaatttaggaagtatgatccacgagttaacaagcatgttctctttacagaagcaaagatgaagtgagatggtgctgggcaaatcttctccacaatgtgcaaagctgaataacctgcaaaaaaaactcgtgtcaggattcaagaacctgtctactgttaagaatgctatgatcagtttatcaccctgttctggttccagcgttttatgcagacaatttcaacaagtatgagttggtcttgattagcactggaattctgtgttatgcattgttgggttgt

SEQ ID NO: 389130 - DNA, 735 bp, Oryza sativa
  unsure (1)..(735): unsure at all n locations
ccacgcgtccgcggacgcgtgggcggacgcgtgggcggacctttccgcttctccgcgccccccccccccgccgcttctcccgaccgccgccgcgagaatgccgttcaagaggttcgtggagatcgggcgggtggccctggtgaactacggcaaggactacggccgcctcgtcgtcatcgttgatgtcgtcgaccagaaccgggcacttgtggatgctcctgacatggtcaggtgccagatcaacttcaagaggctttccctgactgacatcaagattgacatcaaacgtgtcccgaagaagacaactttgattaaggctatggaggaggctgatgttaagaacaagtgggagaatagctcatggggcaagaagctaattgtccagaagaggagagcgtcactcaatgactttgacaggttcaaggttatgttggccaagatcaagaggggaggtgctatcaggcaagagcttgcgaagtcaagaagactgccgcggcttagtagtgccatgttgagtttttggttccaagttggatcagcaatatgtttcaatggtcttagagccagaattagtactactgtttaatggaacctatttcatatttaaattgagcatggttgtgctttagagattttgtatgactgatggctgttaaatagtttccaacatatgatcactggtgatttgtgtggactctactcgttaccagttgaaacaaannnnnnnnnnnnnnn

SEQ ID NO: 389131 - DNA, 513 bp, Oryza sativa
ctcacgcgtccgcccacgcgtccgcggacgcgtgggcaaaccctaactcccagcctgtctccccaaacagccgccactcgccagctacacgggtcacaggagcagcacatcccaggattcccagcgtcgtcgccctacggcgccagcgccagcgccagccccgcttgcccgccgctgcccagcaccggcatctcgcgccccaagtccctagcgccaccgccactcggaagcatctcgcgcccgccggcgaccatgagcgcttcccggtggtgaagctgccgacgagctcgagctcctcccctggcgcatgtatgccatggcagtgacggcaccgtcgaccgtcccaggctcccagctccccctcgtgggcttacgctgctgctgcgctccctccccccctcgtctgtagcgtcgtccatctgctaatccgccatgttgatttgggtggtgattttgttcgcttgttctttcggctcgttgattctgaaaattaaccaggcttcagaagttcag

SEQ ID NO: 389132 - DNA, 540 bp, Oryza sativa
  unsure (1)..(540): unsure at all n locations
cggtacggcgtcagccgccccacactgctcctgctgcctctctctctctcccctccggcttctccgccgccgcgaacgcctctcgactccggcgagttcatcaccggcgttcacgaggatgactacctcaaggcgtcttgctgacaggaagagcgcaaagttccagaagaatatcacgaagaggggttcagtgcctgagactactgtgaagaaggggaatgactaccctgttggacccatggtgcttgggttcttcatttttgtcgtcattggatcatccttgttccagataatcaggacggcaactagtggcgggatggcttaaattggagctaaattcagttatttatgctgtgtctgagagagaggctgtacctgtactttgtagtgaagtttgttcctggatgatatcgtgtagagggtccatgttgtgtccgtttgcattttactaaatctaaactagatgttggtacctgaatcttacagactttaaacttaaatggatataattgaactttgatctggagactaaaaaaannn

SEQ ID NO: 389133 - DNA, 538 bp, Oryza sativa
  unsure (1)..(538): unsure at all n locations
ngggctgcaggattcggcacgagcaacagctgctgcttcaactctctctctctctctctctttctccggcgagatcaccggcggcggcaggccacgcgacccgcggagatgactacttcaaggcgccttgctgacaggaagactgcaaagttccagaagaatatcaccaagaggggttcagtgcctgaaactactgtgaagaaggggaacgactatccagttggacctcttgtgcttggattcttcatatttgtggtcattggatcatctttgtttcagataatcaggacagcaactagcggcgggatggcctaaaaacagagctgattcaagagatttgtgatacattgcatccaatgcaagtggcagcggcagctaaaatgtttggtgttgtcagtgttttgtatgcatttacatttctgaagcatcgagttgaagtacaatgtaacagaattacctgtcttacaatgttgaatggattagtataatattataccgttcatctccnnnnnnnnnnnnnnnnnnnnnnnnnnnnnnn

SEQ ID NO: 389134 - DNA, 486 bp, Oryza sativa
ccacgcgtccgaagagaaccattagtcaaaccaaattaccaacaaagtacacctctcccttgctagggtttgttccctctcccaatctccaaagtgtcatttcacattgacttcattcttcttcccagatcccccaatttctccctttcaccatgaagcttctccctcttctcatcctcgcaatggtcatggccaacgccttcggcgccgtcacttctcgcacggcgccgggggaggaggcgctgctggcgcacggcgtggtgaagacgacgacggcggaggggacgtccatcgacaaccaccacgcgataccgcggccggagtacgacagctggagcagcccggggaacatgccggggagtggccatgacattgggagcgaacaagctcagccatgatcgagctagatgcagcttacccagctctacccatgtcctgtacgtatatacatagcaagcttgccagccatgggttatacacttatta

SEQ ID NO: 389135 - DNA, 527 bp, Oryza sativa
cgtccgcccacgcgtccgggaatctgtttgtttggaaggagatattggtggtggcctagttctccagcgtcacatatccatcttgaaagataacccgaagattttccagattgactcaagcattcaagcaagaaatgttggagctggttctggtgggttttcaaggttggtatgtttgcgagttcatccaactggcgcacggtgtctacacccaacagaggtggttgtggcttttacggctatcaatggttcaaagcaagagatctccccagaatctggagtagtattagagggagacatgaggcccgacggggagtggatgctagtggacaactgcgtaggactgagtttggtaaatcgttttgatcccagtcaggttagcaaatgtttggtgcactggggaaccggtgatgtgaacatggagctttggtcggaggaaagaccagtttccaaggagactccgttgagaatatgccaccagtacgaggtgagacaaacaaactagactgaatcccgcctggatcagc

SEQ ID NO: 389136 - DNA, 718 bp, Oryza sativa
gttgaacgattgcaaacgaatggtgcatcacaagttgctggtcaggttcctcaggagtataactttgtcatgtttccgaaattgtatcaggattagctatgaattggtctttgctcttgtgattattgtagagttacacttcaagctcgtggatgccgctggtccatattctgtgattaacaacatgattaaaaaaagtaaggttacttcgattatgtactgctgcttgaacttcatttactataggtttacaggtacctgtggattgagagggtcactgggtcatcttttgaagttggtttggatgacctgaagctatcaggtagattgtggtgttcttttcctcaattatgtagaggggagttctttttctggtattggagttcttatgaaagccactgaaagacaatctttacattttgtaacgtattattacatttctcaatacattttgtaaatttcagtatatttcactgaaatacaatccttacatttcgtaacgtgttattacatttctcaatacatttcgtaaattttaagtgtatttacatgttttctatgatgtattataggaatacatctatttcacatgcaggattccaaatgatatattactacgatggattccaaatgtccaacatgctatataatttattgacaataatgattctctattatttctttttgtgtgaatttaaattatcttattatcattgct

SEQ ID NO: 389137 - DNA, 914 bp, Oryza sativa
ccacgcgtccgcggacgcgtgggcggacgcgtgggcagatacatagtaggacagaggctacaaattaaaatgaccacacaacttgttaagatcgggacatggggtggaaatggaggaggtcgtgtagacctatctgtactcccaaggagcttgaaaagcgtgacaatccgtagtggtgcagccattgatgctattgcctttacatacattggcacagatgggaaggaacatcttgcaggtccttggggtggtggcggtggaaatccaactacgattacacttggatctcaggaattcgtgaagggaatctccggaacttttaccaacgtcgtgacaaaccttaaaattgtcaccaatgtcaccacttataattttggacaaggtggtggaactgcttttagcctcccgctgcagagcggcagtgtggttggtttcttcggacgcgcgggagcacttgtggactctatcggagtttatgtccacatatgatatatattatctacatatgaatatatccttggatatatggttggatcagtgctcatgataaattcacccctaggtctattcgtttaatccctcaacaagaagttaagtgagatttgtaggagaataatttcacatttattgaggtgtggaattaatcccctcaattctctctaatctctctcttgggaatgaaccgaacaagacctaagggtgatatttctttcaatcactatataactatacatatatagtgtgcatgtgtatgtgcttggactaggtccaagggtttaccacactagtgccccgttatacctctgtcagtgtcgtatacatttatttgtgttgtattacattcgctatatacgtacgtggtttatatatgattatatatgaataaaagacttctgtgatgtattgtgcttaaa

SEQ ID NO: 389138 - DNA, 914 bp, Oryza sativa
  unsure (1)..(914): unsure at all n locations
ttgatttcataccgagatttggttggtgtggcctatacagaagaggaaacaaaagcaatggctgctgagattgaagtggttgacggtcctaatgatgaaggtgaaatgttcacacgtccaggtaagctgagcgaccgtttcccacaaccctacgcaaatgagcaagcagctcgattttcaaatggcggggcataccccccggatctcagtctaatcacaaaggccaggcacaatggccagaactatgtttttgctcttctcactggttatcgtgatccacctgctggtgtttcgattcgtgaaggcttgcattacaatccctacttccctggtggtgccatagccatgcccaagatgcttattgatggagcagtcgagtatgaagatggcactccagctacagaagcccagatgggaaaagatgttgtctcgttcttgtcatgggcggcggagcctgagatggaagagagaaaactgatgggagtgaaatggatttttctactctccctcgcacttctgcaagctgcatattaccggcgcatgaagtggtccgtctacaagtcgcgcaagctggtccttgatgtggttaattgaggactagttcttcattttcttcaaagcatcggctgataatttgaagtattggaataatgcgtacatgaatcatgatgtacattttgccgttggcatggttaacatgcacaatactcttttcctttgttacatttactnccagctgtgctgggcattattttaaaattttggcctgtcaaatgtaccagcaagcatctaacagtatagtcaaatagatctcataagcatatttatactccgaaccagtgtaatgttaattttagtcatcagtatgagatgatggagnnnnnnnnnnnnnnnnnnnnnnnnnnnnnnnnnnn

SEQ ID NO: 389139 - DNA, 682 bp, Oryza sativa
ttcttgatggaggctctggaaggtctcaccgggttcctcagtctgattcccagcaaataccctctggcgatgggaatgccgagagagaggcatcataagccctcctcggcctttcctcatgctacctcccattcttgactcttcagtaattatctccaacaaattcaaagagctgaagctgtacaggtccttgtccatcctttttctgcttctctgaatcaccacacaccggtgcttcatcatgtatcacattcaggcaggaaaatgttcttgcttgcccctccccgccccaattcctgcatgccccgtgaaaataaatggggcaaccattcttatttatccctaccatatatacacacacaagatacactcacctcctgacactcggttcggcgaatgatgtgccttgatccctctgttgtagttatacaggtggcctgcagtggacaaagcttaccaaactgactgtattggggattctgtttcgttttgctcttcttcctttctaggcattggggagtaagcgcaggacttgctgcttgtgcaagtgtgcatgttgaaaacaacggaaataatgctctgccttaattgtaataattgtaatttatgttctaccaactgaattatttgttcaataaaagaatcggccatggcttgcgcgatctgggtcattgttctcgaa

SEQ ID NO: 389140 - DNA, 469 bp, Oryza sativa
ccacgcgtccgcccacgcgtccgaccaaaatggcagccaggagctccctccatccttcctccatggccagcatcccaagattaattggcaccaggaaggcagccctaaggttcagagctcctgcccatggcggcaccagctcatcacagctttccatcgctgcagcaactgctaacaagaaggtgtttgaggaccagttgagagggattgtgtgctacagagatgacaagggagagatggtctgtgaagggtatgatgaaggtccaaggctcggaatgcggctgccggagaaggcctgcttcccatggcctatggaggttcagatcactgatttcattgagctggcgacgttccggctcttcgaagatgccgatgttcttcagatcaagaatgatcagaagaggcagatctgagaagaactgatcaatgatcatgtagcgcaaggcagctgttgtatagaagtgctcat

SEQ ID NO: 389141 - DNA, 488 bp, Oryza sativa
  unsure (1)..(488): unsure at all n locations
ccacgcgtccggagagattcgtctcgtcgccgtctagggttttagccgccgccgccgccgccgcgaaaccctcgccggctcgcctcgcctcgcagcggagtcaggatgttcctcggcgcgatcccgcggcggccgagcaaggaggtggcgtacaagcagctgcgctcccacctcatcgtcatggcctcctgcgttgccgccatccgcgccgccccctacatcctccacttcctcaaccgcgacggaaccgcctcgagctcaccctggagctctaggccgtaaccatcccccgtcccccgctagttgcttgcagcgatggacgaatcatcttcgccttagtgttccatggatggttgcaaagtatgtttggataggatttttgcagaccttataaaacttaatcctattatttttgcttgagaggcatttagctttctgtacgatactcaatgggcanactcctcgnttatctggtctttaagtttgca

SEQ ID NO: 389142 - DNA, 669 bp, Oryza sativa
ccacgcgtccgcccacgcgtccgcccacgcgtccgcccacgcgtccgcccacgcgtccgcccacgcgtccggcttgatctgacagcgtgcattctgacgagtcgtacgtgcatcctgacacggcgtcgatcgttccgcgtccgaaacacagctgcgctctacgccaacaactaactgtccgggtgcgagttgcgaccttgctggaaaacttgtacctagagctagctgaaggaagcaatatggccaccgtggatggcacaacggcgccgagctccggcggcaagacggcgacggtggcgttggagtcgggcggcggccgctacggtgggccggctccggcgaaatgctccggcgccaacctggccctgagggcgctgctcttcgccgtgtcgctgtccgcgctcgtggtgcttgtcaccgccaagcagacggtgatggtcccgttcgtcatccggccgccgcagttcatcctcgcgccggtccccgccaagtacacgcactcaccggcgctcatatatctgctggctgcgctgtgcgcgacgtgcttttacagcctgatcacggccatcagctcggtgaggttgctctccagctcggcttgctctgccaagacgctcttctaccttatcctgcttgatgtgttctacgcagccgtgatggcgtcggcga

SEQ ID NO: 389143 - DNA, 1445 bp, Oryza sativa
cccacgcgtacgcccacgcgtccgcgagcttgttgatggtctgcgtggtagtgatccatctatcggctctggttcacaggtagctagccttgaaacatatggtacattgggtgccattgtgaagagtcgaactggtaataagcaagtaggcttcctgacaaacaggcatgttgcggttgacctggattaccctaaccagaagatgttccatcccttgcccccgaatcttgggcctggtgtatacctaggtgctgttgagcgagcaacatcatttatcacagatgatgtttggtatggtatctatgcgggaacaaatccagagacatttgtcagagctgatggtgcatttataccgtttgctgatgattatgacataactagtgttaatacctcagtcaaaggagttggagtcataggtgatgtaaaggcaatcgatctacaatccccaattagcagtctcatcggaagacaggttgtcaaagttggaagaagctctggtttgacgacagggaccgttgtggcatacgctcttgaatacaatgatgagaagggcatatgcttcttcacagactttcttgttgttggggagaaccaacaaacatttgatcttgaaggggatagtggaagccttataatcttaacaggaaaagatggcgaaaagccacagcccatagggattatatggggtggcacagccaatcgggggaggttgaagctcaaaagtggtcagggtcctgagaactggacaagtggggttgatctcggacggcttctggatctattggagcttgatctaatcactacaagtgaaggactacatgaggccctagaggaacaacgaattattctagctgctgctgcagcagcagctaattcaactgctggggaatcgtcacctgttgctggtcctcaagaaaatgagaaagttgacaagatttacgagcctcttggaatcaacatccaacagcttccaagagacaattcagccacctccacaggacccgatgagttccatgtcgacacggtggaaggcgtcaccaacgtcgaggagcgccaattcctcattggcatgtctccagcacgcgaaggccaagaagccaatggcgacctgaacaaccttgcggagctagagaattcacctgaagacatttgcttctccctgcatctgggcgagagggagcccaagcgactccgctccgattcgtcgctggacatagacttgcagaaatgaaatgaagctgtgtgctgctgttccatcaccacccagctctgtataacctagtgaaggcagttccattctatgaacccaatagaaataaatatgggctaggtatttgtttcccgaaactatctagataggtatccggataatttctatcgttttcacaagatacaagccttactgtatttgtttctgtttttaaaaaattttctgaattcgtttc

SEQ ID NO: 389144 - DNA, 726 bp, Oryza sativa
ccacgcgtccgaagagttctttttcttaattacagtatcaatgttgtgcatggcatgtgcactagcagtgggtcattctagtattggctttgttctgtagccatatgtgattggggaatttggttaataaaaaacatgcatgcatataccttgtttgtttcttagagggggtggacatataaactcatcatgtggcccagaggccttaatcctttctctgtcttgtggccatctcaatcaatggaaaggagaaaaaaaatggaagtgccttttcatgtatttttcatactctgaaaaaaaagaggaaatatgattaacttgatgccattttatttgctatcctacatattatattgtccttcttgcccatgtgagaaatcatgctgaattgagacacaataccttgttgcgaatgaagatgagattggaccgactttactagtcctgaggcaagacattcagcaaaatgttcagagattacaggatgtgcttgcaagggacccttccaaatattcaagcctgacagcaatagtgacagaggaagtggaggaagggacctcaaagaaggccaatagctgcaccagagctattctttggttggctaggtcgataaatttctcaaaacatttactggagggggttgcttaacacctgtgatcagtcgagcctcagagagatcgtcgaaaaggcgtatattactacattgaagccatggcatggttggat

SEQ ID NO: 389145 - DNA, 1022 bp, Oryza sativa
  unsure (1)..(1022): unsure at all n locations
gctttataacaatgggttcccagcaactagcattcatggagacagaacacaacaggaaagagagtatgccctgagatccttcaagagtggagcaactcccatcctcgtggcaactgatgttgctgctcgtggactggatatacctcatgttgcccacgtcattaattttgacctcccaaatgatatagacgactatgtccatcggataggaaggacagggcgtgcagggaaatctggtctggcaactgcatttttcaacgagagcaacaccccactggcaaggccgctgagtgagctcatgcaggaggctaaccaggaggttcctcaatggcttgagaggtatgctgcccgttcatcgtttggaggcggcggcgggagaaaccgcaggtcaggtggtggtgctaggtttggtggccgggacttccgacgagacagaggcagtggtggtggagggtatggtggtgaaggtgaaggttatgnaggtgncgnatatggtggtggtgncggtgaaggcggctatggtggcggtagcagctacggaggtggcgggcaaggtttttctaagtgcttgggactgatcctgatccagagctgtcatgagaactgaaatttgaaacaatcgtgctctattggcctccctttggtgacatggaaatttgaaatttgagttgccttttgatgatagtatggtgtggcatcgccttcatcattggcggttctctcagtctggtgttgatttttccttttttgtgtactgtactagggattgcttgtgtttttttatctgcgaattgtgaactcatcttttaatggggcctcttttattaatttctcctttctactgtttcatttcgcatcgatgctttactgcctgtgtatgtttatttacctctttcatatccactggcaaagtattcatgttagtttaccatgcaatgctaaagctaaaagcatttgctagttattgcttcaactattccaataatcagagcagtatttgttccaataaaaaaaaaaaaaaa

SEQ ID NO: 389146 - DNA, 647 bp, Oryza sativa
ccacgcgtccgcccacgcgtccgcaagagcaacgcaaagcaaagaacagatacttcttctctccacctgcctcgcaagcttcttctgtttcttggatctcacctcgccacgccattgacgccataaggagcttgtgagaggtggtagccaagaaggaggaggaggagatggggttcgtgctggtgatctcgctgcccttcatcttcttctccatcctgctcggcttcggctgctacttcctcggcaagcacaagggccgcgaggagatgcgcaccggcgtcggcgcccaggtctacggcacgccgctgccgccgcccggcgtcggagcgccgccgccggagccgttcacggcgaagaaggacggccccgagaatctcgtctgatcagcctcggctgctgctgctgctgaatcggctcatttctttttcttgctatactgtactgttcgtgccgcggtggtgtacatgaagtggttaatttggttgttcttcatgttgagttcagtgtgataatttgtaatcacaatctatgtgtttctttttttcttttggtaaaatgggttcgaatccaaaatttgtaatcacaaattcgcaattagcgcccagacaagtgatttgattgattggctaaaaaaaaaaaaaaaaaaa

SEQ ID NO: 389147 - DNA, 1251 bp, Oryza sativa
gccgacgcgtccgctctcgcatcaccaattctaaccctaacgacaaccctactctctctctccaacaatcaaagattcgatggccgtgctggtggcgaggcaggggcgggagctgcagcggtacacgagcgccgggggccgcatcgtggtgggttgcatcccgtaccgggtgcgcagcggcggcgagatggaggtgctggtgatcacgtcgcagaaggggcacggcatgatgttccccaagggcgggtgggagctcgacgagtccatggacgaggccgcccgccgcgaggcgctcgaggaggccggcgtccgcggcgacaccgagacgtccctcggctgctggtactacaagagccgccgctacgacaccacctacgagggcttcatgttccctctccgcgtcaccgacgagctcctccagtggcccgagatgtcctcccgcaagcgcacctgggccacggtgcagcaggcgatggatggatgccagcacggttggatgcgtgaggcgctcgagcggctcgtctcccggcacgccaccaacaagctgcagtctgcgctgtaaacccaaccaaaatcaaagcgagctgagtcgcgcgagaagggaaacgggcgggctacgagcacagcacgggcggcggcgcgaagtcgccggcgtcgtgttcgctctcccggtgaagcggcaggccggccgggctcgatcacatctcgatcgagcaccatatattttggccgccctcaccggagagcgagacgacggcggacgaatgccccgcgcggagatcggagcacgccgacgacgacgactcttcatttggggttgcaggggtcgtcgtcgtgtatacgtacgtcgcggcgaaataacggcgcgagaattttagaaagtttgaagattcggcatcttgtaaaaaaagatcgaagctggaacaagccaattaatttaaaacaccacattgcgaaagcaattcgagattcttcctttgaagcaacaaaaagtgtcaaaatgaaccgcagtaattaccagtgccatttcgtgtcggtacaattaatgagctgattgatggtaattgaagtgttcagcaaaaagaaaatcaagcaattactcaccctactgacaccagacagctcataaacctgctggtaagctcatcgacagctacatgtggacacgctcttccttatctcagcgtgtgtaccgcgattatcttggttcttacccgtggctggaaattaaatgagattccttcgctttgc

SEQ ID NO: 389148 - DNA, 670 bp, Oryza sativa
  unsure (1)..(670): unsure at all n locations
gtgatgctagtggaaggtctaagcagagtaggagcgagaaaaagagcaggaaagccatgcagaaacttggcatgaagaccatcactggtgtgagccgtgtcactatcaaaaagagcaagaacattctgttcgtcatctctaaaccagatgtcttcaagagcccaaactcagacacctacgtcatcttcggtgaggcgaagatcgaggatctgagctcgcagctgcagactcaagctgcagagcagttcaaggcacctgacctgagtaacgtcatctcaaaggccgagccttctgcagcagctcaggatgacgaggaggtcgatgagtctggcgtcgagccgaaggacattgaactggtgatgacacaggccaccgtgtcgagatcgagggcggtgaaggcgctgaaggctgctaacggtgacattgtcactgccatcatggagctgacgaactagtggaatcacgaaacgttgtggtggggatggaacttgtgggttaaattttaatgttgagggcgcattgataggatgaaccctcctccttggttatgctatcttgagagcggtaggtagtgttacgaaacttcaaggcctatatcatcctttgataagatcgactgtttgctatttaatatgcctttttcattcactggtctcgctnnnnnnnnnnn

SEQ ID NO: 389149 - DNA, 591 bp, Oryza sativa
  unsure (1)..(591): unsure at all n locations
atcagcacggggatcaacccaaggccaagccctgcgtcctcttcgccggctacgcgcacctctcatctgccctcgcctgtggtctcgccggtctcgctgccggaatggccattggcatcgttggtgacgccggagtcagggcgaacgcccagcaaccaaagctgttcgtgggtatgatcctcatcctcatttttgccgaagcgcttgctctctatgggctcatcgtcggcatcatcctgtcatcccgcgctggccaatctcgtgcggattaggcatgtttcaacacgcaaacccttagtgggttcttgtttcatattcctgaaactacaagctgagctctaggggtttattctgtcttagtttctgttcttctgttgggtcatgaacaaaaaaacatctgtatccaagggatgtttgcccttgtggtgccattctttttcgctatggtggtgctggcggcggtctgaatcttatttatgcacagtttttttgggtctggctagacagtgatgtaatctggtgaataagcaaataattcgtaatgcaatgggagcatgagactcttttgttcaaaaaaaaaaaaaaaaaann

SEQ ID NO: 389150 - DNA, 678 bp, Oryza sativa
  unsure (1)..(678): unsure at all n locations
ccctagtgccagtggtnttcccattcaatgttaaccccaagatgaagccccttgagattgctgagaaagctagagatgctatccttagtggcaagtttgaccaggtccgcgttaacctcccaaatggtgatatggtgggtcacactggtgacattgaggccacagtggttgcttgcaaagctgctgatgaggctgtcaagatgattctggatgccattgagcaagtgggtggcatctatttggtcaccgccgatcatggcaacgccgaggatatggtgaagaggaacaaatccggccagccacagcttgacaagaaaggcgaaatccagattcttacctcacacactcttcagccagtgccagttgccattggaggccctggcctacattctggggtgagattccgcaacgacgtgcagacccctggcctcgccaacgtcgccgccaccgtgatgaacctccacgggtttgaggcccctgctgactacgagccaaccctaattgaagtagttgacaaataaattaaatgtaaacagcggattttgtcgctgtgattttgctatgggtcagagaaatggtctctgcgatgttgaatactccgtttttatgagcagtctgctggaacctacgagggtttttataaaaacgaaactgatttatgaaaaaaaaaaaaaaaaa

SEQ ID NO: 389151 - DNA, 668 bp, Oryza sativa
  unsure (1)..(668): unsure at all n locations
tcacgacgttgtaaaacgacggccngtgagcgcgcgtaatacgactcactatagggcgaattgggtaccgggccccccctcgaggtcgacccacgcgtccgcccagctcaagttccagaggaacaagaggtcagttgctgaggagagagctgggcgcaagttgggcggactcagggtgctcaactcctactgggtgaacgaggactccacctacaagtactttgagatcatccttgtggatgttgctcacagtgctatccgcaatgacccaaggatcaactggctctgcaagcctgtgcacaagcaccgtgagctccgtggtctcacctctgctggcaagaagtaccgtggtctgcgcggcaagggtcacactcaccacaaggccaggccgtcccgcagggctacctggaagcgcaaccagactgtctctcttcgccgttatcgttaagcctatgtgctttgatgttacgttactgtggaatccaacccttgcagactttgataatatctgtttgcacttttaaaattttggtacttgtgttctgaaaccagtgaactatcttctagaagcaatgttgctgttctctatttgcctgtgatgagatgaagaaatgattcagttatcgaatgctctgtgagctggttatgattagtttttaagtnnnnnn

SEQ ID NO: 389152 - DNA, 730 bp, Oryza sativa
aggagaggaggccggtggtggtggtgcccaccatgccggtgcggacgtcgagctgcaccaaggaggaggtggacgcgatcctcatccagtgcggccgcctcagccggagctcgtccgggagggccgcctcggctacaaggccaagcagggttatgtggtttaccgtgtccgtgtgaggcgtggtggcaggaagaggccagtgcccaagggtattgtctacggcaagcccaagcaccagggtatcacccagctcaagttccagaggaacaagaggtcagttgctgaggagagagctgggcgcaagttgggcggactcagggtgctcaactcctactgggtgaacgaggactccacctacaagtactttgagatcatccttgtggatgttgctcacagtgctatccgcaatgacccaaggatcaactggctctgcaagcctgtgcacaagcaccgtgagctccgtggtctcacctctgctggcaagaagtaccgtggcctgcgcggcaaaggccacactcaccacaaggccagaccttcccgcagggccacctggaagcgcaaccagaccgtctctcttcgtcgctaccgttaagcttatgtgctttggtgtttcgttacagtggaatctgtcccttgcagacattaattatctgtctattttcttgtgatgagagaaagaattattcagttatcgaatatactcatgatttggcaaaaaaaaaaaaaaaaa

SEQ ID NO: 389153 - DNA, 779 bp, Oryza sativa
  unsure (1)..(779): unsure at all n locations
ccacgcgtccgagcctctctctcccgctccacctccccgccgccgcctctcgccgctcgccgccgccgccgccgccgccatgggtgcgtacaagtacgtgtcggagctatggaggaggaagcagtcggacgtgatgaggttcgtgcagcgcgtgcggtgctgggagtacaggcagcagccggccatcgtccgcctcacccgccccacccgccccgacaaggcccgccgcctcggctacaaggccaagcagggttatgtggtttaccgtgtccgtgtgaggcgtggtggcaggaagaggccagtgcccaagggtattgtctacggcaagcccaagcaccagggtatcacccagctcaagttccagaggaacaagaggtcagttgctgaggagagagctgggcgcaagttgggcggactcagggtgctcaactcctactgggtgaacgaggactccacctacaagtactttgagatcatccttgtggatgttgctcacagtgctatccgcaatgacccaaggatcaactggctctgcaagcctgtgcacaagcaccgtgagctccgtggtctcacctctgctggcaagaagtaccgtggtctgcgcggcaagggtcacactcaccacaaggccaggccgtcccgagggtacctnggaagcgcaaccagactgtctctcttcgcggttatcgtaaacctatgtgcttnatgtaagtactgtggatccaaccttgagacttggaaaacnggtttgcctttnaaatttggaatgtggtctgaac

SEQ ID NO: 389154 - DNA, 419 bp, Oryza sativa
  unsure (1)..(419): unsure at all n locations
cgcaaaccctaccagcctctctctcccgctccacctccgccgccgccgccgccgcagcaagagacatgggggcgtacaagtacgtgtcggagctatggaggaggaagcagtcggacgtgatgaggttcgtgcagcgcgtgcgctgctggtgagtaccgccagcagccggccatcgtccgcctcacccgccccacccgccccgacaaggcccgccgcctcggctacaaggccaagcagggctatgtggtttaccgtgttcgcgtcaggcgtggtggcaggaagaggccagtgcccaagggtattgtctatggcaagcccaagcaccagggtattacccagctnaagttccagaggaacaagaggtcaagttgctgaggagagagctggacgcaagctgggtggactcanggtgctcaant

SEQ ID NO: 389155 - DNA, 447 bp, Oryza sativa
ccacgcgtccgaaagcttttctcagcccgagagatccgctgcgagggcgcccccaacccgacggtcgccggagaagcagcagccgccgcccacccacccatccagtcgatggcgccgccggataccagccgcgcgccggcgcaaggcgaggaagccgcctccacatccccgtggcctctccggaagctccagagttttacaccagggttgtgttcgcagtacaaagcttatgagaatgcatttgtggatatggctaaaggaactatttcggatgcaatggttcttgtgaacgagcaccagacagaggcaattggatgtgccactgtggcaggattcatcttattgagaggtcctcggggatttttataccgcaatactctggggcgtttcaagactgagaaggatttactgaatgatgctgagcaaagtatgatggagtacaaaaca

SEQ ID NO: 389156 - DNA, 709 bp, Oryza sativa
  unsure (1)..(709): unsure at all n locations
cgaggctgctcgctctgacgggaaggcggcccgtgaaatcncatgaagctgacccttttccgccagtactacgtggttgtaatttgctacatttacttcacacgtgtcgtggtttatgcgctgatgaccatcacctcgtaccggtaccaatggaccagctatntggccaaggagctggccacccttgcattctctgtgttcactggatacaagttccggcctgaggtgcataacccgtactttgcgattgacgatgaggaggaggaggctgctgctgaggcactcaagttggatgatgaatttgagctatgaggatttacaattgccggtcccttcttttgccactgatgatacagatattgtatgtgcctccaaaggacaaatggtatagactggtatctagtccatatccttttcttttcatttcaagttagttatatttttcttgctgtaactggttatggtcaaccttgtgtttgtgttaagaaatgcagcagcttggatttgccttggtctaatctaaaagcattgagatgagctgttctgattgtaccttcgtagcaaatgttgtatctagatgtttacttctcttgtaaaagaagttgactatgattcagtttgtttattcatttagtgctaactctgagtnttgagtccnnnnnnnnnnnnnnnnnnnnnnnnnnnnnnnnnnnnnnnnnnnnnnnnnnnn

SEQ ID NO: 389157 - DNA, 666 bp, Oryza sativa
  unsure (1)..(666): unsure at all n locations
cccaagtccattcccgtggatgttcttgatgagaaactcccagatgcctanaacattggagccaacccctactgtaaatgcctncaaaagaagatgccagttgaaaagattaaggaattactgatgggaggggtgtggatgttagctgtggaagccacttggtaaggcattgacattttctccagtgccgccaaaagtgtacgagatggaggcaaagctgttatgattggcccttgctgcccacaaatgtgatgggggaggtggatataacccgtcttgttcgccgacaggtgaagatcattgggtcgtatggtgcaagggccaggcaagatcttcctcagatagtcaagcttgcagagagtggggccttcaatcttaagaacaccatatcaaggaaatgcaagtttgaagaggcgaacagcgcctacgaggatcttgaccgtggcaagatcgttgggcgagccgtagttgagatcatgtcgtagtgatgagataattctgtggttcatagcctgggatcccactctgggtcaatgaaataagtaggctgtgacactacatattccatgaacaacctcactccctgatttgtgttaagatgtctgaaattgttgatgttgaactgcagggagatgattaaatcaagtgtgatttcaggtgtcatct

SEQ ID NO: 389158 - DNA, 348 bp, Oryza sativa
ccacgcgtccgagaacgccccatcaccagctcctctctcgcaacccgacctgtgcatccagctgatcagtgcagcaaaggtgaagctggagtgctccctgcctagcaagtcacaggggatcgaagatgggaatagcaatttaaaattagctggttaattaattacatacgttaggaaagaaaagccaggattgaactctgcaaattggattcttgattcttggaggagcctaagctaattgcttgctatgatcaagttagatgttgtttggttgcaagtattttcttgcagaaacactccgtgtattctccaatccatatttgaatgtcttatacatactttcgcaag

SEQ ID NO: 389159 - DNA, 1026 bp, Oryza sativa
tttgcggccgcgtgcggggccttcctgtgggacgcatccccgtccggctccaacccgagtgtggaagtaagcagctatgtgaacaccacctcttatgtcctcaaggaacctggcagtaataaacgtgtaaggtcagggtcttgtggtaggccaacatcaaaagcttccagggaaaagatcagaagagataagatgcttcctaggtttcttgaattggggactactttggagcctgggaagccagtaaaatctgacaaagctgctatcctaagtgatgccactcgcatggtaattcaacttcgtgctgaagcgaagcagctaaaggatactaacgagagtcttgaagataagattaaagaactgaaggcagagaaggacgagcttcgtgatgagaagcagaagctgaaagtagagaaggagacattagagcagcaggtgaagattctgactgcaactccagcctacatgcctcaccccacattgatgccagcaccgtacccacaagcaccacttgcccccttccaccatgcccaggggcaagccgcggggcagaagctgatgatgccttttgttggatacccggggtacccgatgtggcagttcatgccgccttccgaagtcgacacctccaaggacagcgaagcgtgcccgcctgtcgcgtaatgcttcatcggttgcgttatgtgaattaatcgtaacctgaaaccgcttagttgctcaatccattggttgggcatcgtcgtccctgattcacattcactattgttcttgtgttagtagttcgtttttgtatggaagtaagctgacatttgtggcgctctatagaggctactgcccccttttaatgtacaatacaatttttccggagaaaggaagaatgctcattcttgttctctgcagacacccggtgtcaaattcagtagcatcatatacaccatttcttatcacccaaattctgtttgtcttgtatgctgttttatgtaatttaaccaatcgatacaaatcttgttaaaaaaaaaaaaaaaa

SEQ ID NO: 389160 - DNA, 909 bp, Oryza sativa
ccacgcgtccgcccacgcgtccggttggcctcgcgagccctatctcctccttcctaatcccctttcccctccccctctccattcccctcgccgccgccgccgccaccgccgccgccgcggcgcgccgccctcctcctcctcccatccaagatgaatgtcgacaagcttaagaagatggcgggtgccgtgcgcaccggtggcaagggcagcatgcgcaggaagaagaaggcagttcacaagactaccaccactgatgacaagaggcttcaaagcaccttgaaaagagtaggagtgaacaacattcctggtatcgaagaggtcaatatcttcaaggatgatgtggttatccaatttcagaatccaaaagtgcaagcatccattggtgcaaatacatgggtagtgagtggaacaccacagacgaagaagctgcaagatctgcttccaacaatcatcaaccagttgggacctgataacctggacaacctcaggaggcttgctgagcagttccagaagcaggtacccggtgctgaggctggtgccagcgcaggtaacgctcaggacgacgacgatgatgtccctgagcttgtccctggagagacgttcgaggaggctgcagaggagaaggagcctgaggagaagaaggaagcggaggtggaagagaagaaagagtcgtcctagttttgttcatcgccgtcgtctattattgttgtgaagggttgttggttcaatgttaccccctaccatgcctgggacgtgctctcctatggactccgacctgccttactcgtttccatgtgggccggttttgtcttgtacgaggatttggtccaatccaacggtggaattgagttttacgacagttaaattatgcttccaattcgcaaatgttttataaaaaaaaaaaaaaaa

SEQ ID NO: 389161 - DNA, 464 bp, Oryza sativa
ccacgcgtccgggggaagggagcaagcaaggcaagggattccgcctcgcgagaacgatggggttcatgctgcgggtgaggctggcctccttcttcgccggcgccgccgccgccggggccgccggcgccttcttcctctacaaggactacaagctcgcccacgactccatggccctccaggtcaaaggcctacaagaccatgtggatgcccgttacaaagctcttgacaaacgacttgctacattggaagaccagaaaaccagcgagactgctccagacgtgggcgtgccatctgattagtctgttcattggctggcttgagtatggatgatttacgactgtttactttaacctgtgttatcgtctcttggaggcaaaagccgatgactgactgcaaaataatttagtgaagagttttttttttttgtgtgtggaattaagcttctgtaagtgttatagatgccc

SEQ ID NO: 389162 - DNA, 816 bp, Oryza sativa
  unsure (1)..(816): unsure at all n locations
ccacgcgtccgctgaagactatcaatgatcttgagaatgaaggagcacgtaaaactgacaaacttgtagctaatttagcaaaccaaattgaggtaaagaacaggcatttgcaggaacttgaagttacatacaatgaaagaactacatcacttgagaagatgatggggcaaagggaacagcttctccagaaatataatgaagaaattcgcaagatgcagcagctagctcagagacattctcagaagataatcgatgagaatcaaaagctgcgttctgaactggagtccaagatgagtgaccgccctcccggccccaaggagcttgatgagattgctgcaaaaagtgattatgaccgaaggatcattgatcaagagaagcagaagaatgctatcaaatcaagccatcttaagttggcaacgttggaacaagagagagctgatgaaaatgtgctgaagcttgtaagagaacataagagagagaaagaagctgctgtaaagaaaattttgaagttagaacagcaggtggatgcaaaacaaaagcttgaattagatatacagcagttaaagggcaaattggaagtgatgaagcatatgccaggggatgaagattcagcattgaaaaataaaattgatgaattgagtgaggagctgcaagaaaagatggatgaactagatgctatggagtcacttaaccaaactttggttattaaagaaagaaaaagcaatactgaaatgcaagatgccagggaggagcttgaaaatggcttacttgatctcttagatggtcatcacatataggnataagagattggcgant

SEQ ID NO: 389163 - DNA, 840 bp, Oryza sativa
  unsure (1)..(840): unsure at all n locations
acgcccacgcgtgcgcgtgtttagtgactgaatccgaactcgaacctgcaagttggcagaccttagtgagatgacgacacttggtgggagggactcactgggtgccatcatgcagagctccaacaacgacatgctatctcccaacaacaccctacgcaccattatcaccaaggtcaagcgccagggccttaacatcgtcgacgtcgtatccctctcaggtggccacaccattggcatgtctcggtgcaccagcttccgtcagaggctctacaatcagagcggcaatggcatggctgactacacactggatgtgtcctacgcggcacagctgaggcagggatgcccccgttctggtggtgacaacaacctcttcccgctagactttgtcagccccgcaaagttcgacaacttctacttcaagaacatcctgtctggcaagggccttctcagctctgatcaggtcctgcttaccaagagcgctgaaacagcggcgctcgtgaaggcgtatgctgatgatgtcaacctcttcttcaagcacttcgcacagtcaatggtgaatatgggcaacatctcgcctctgactggatcacagggggagatcaggaagaactgcaggaggctcaacaactactaccactgaggttgtcttgtgtgctgagttttacaaggtggtggtagtggcatgttttgtttaaataagtaaagctggttgtaatgcgtcaaggctgtttgatcatttgtgttattgtgattgcgttgcaaaacgtgtatgtttaataattcaatatataaaatgagttcatttggttgttctaaaaaaaaaaaaaaaannnnnnnnnn

SEQ ID NO: 389164 - DNA, 789 bp, Oryza sativa
cggacgcgtgggcggacgcgtgggaaacaaacagagagcaattctcttctcctacctagcaacctagtgcagtgcagtgcagtgcagcgaaggtttacttggcgacttccatgggttgcctgttgatgctctgcttggtttctcccctcctcctcgccacctctgtccacggcaacccgtggtatgggtatgggtatggcttgttcccgcagttctacgaccactcgtgccccaaggcgaaggagatcgtgcagtccatcgtagcacaggcggtggccagggagaccaggatggcggcatccttggtcaggctgcattttcatgactgctttgtcaaggggtgtgacgcgtctgtgctcctggacaacagcaccaccatcatcagtgagaaggggtcaaaccctaacatgaactccctcaggggtttcgaggtcgtcgacgagatcaaggccgccctcgaagcagcttgccccggcaccgtctcctgcgccgacatactcgccctcgctgcacgcgattccactgtcctcgttggtggcccgtctggggatgtgccacttggccggagggactcactgggtgccagcatccagggctccaacaacggcagcccagctcccaacaacaccctccccaccatcatcaccaagttcaagcgccagggccttaacatcgtcgacgtcgtagccctctcaggtggccacaccattggcatgtctcggtgcaccagcttccgtcagaggctctacaatcagagcggcaatggcatggctgactacacactggatg

SEQ ID NO: 389165 - DNA, 753 bp, Oryza sativa
gcagaaggccacaatgacaggtggtatggatccattgctactgaatggtatgtatgatcagggtgccgtgcgccagatgtcaatgcacaagtgacaactgggagtgccagcagcgttgctctacctccggctggacagaaaacacaagtgctggctctgccagcaccaggatggttcaatgcagaatgttggtggagacccgtttgcggcgtcccttagcttcccaccaccgtcctatgttcagatggcagagatggagaagaagcagcagttcttgactcaggaacagatgatgtggcagcagtaccagagggatggcatgcagggccagtcaagcttggccaagctcgatcgggcttacaacaatggcttcgcccccaacccagccatgccttatgggatgcctgcagcatataacacgaaccccatgccaatggcttacactgcaaatactgggtactactaccccacttactgagttattctttgttcatccttacagttgctgtgaattttgttctgtatcgtgatctcatagccttggggttgtccagtatcagttgttgttcccctgcctctggatcaaaccttttggtctcttatatgtaattctatttgtttggaaccaattgcggcatctaagggtggctatagttgattacataatcttatgttcttggtctttctcactggtggtggtattggaataactgacagtggtacaacatgtcacatcttataatcttacctgct

SEQ ID NO: 389166 - DNA, 1003 bp, Oryza sativa
gccggcggcttcccggaccacatcctctgcctccccaacgtcaagtacgtcgacctccgcttcaacaacttctgcggcgaggtcccgccggcgatcttcgacaagaagatcgacgcgctcttcctcaacgacaaccacttcgacttcgagctcccggccaacctcggcaactcgccggcgtcggtcatcgtgctcgccaacatcaagctgaggggttgcatcccctccagcgtcgggaggatggcggcgacgctgaacgagctcgtcgtgctcaactccggcgtgcggtcctgcatcccgccggagatcggccacctcggggagctcaccgtgctcgacgtcagcaacaaccagctgcaggggacgctgccgggagtccatggcggggatgcgggcgctggagcagctcgacgtcgcgcgcaacgagctcgccggccacatcccggaggggatctgcgcgctgccgcggctcaggaacttcacctactcatacaactacttctgcggcgagccggagcggtgcctccgcctccgccgcgtcgacgaccgccagaactgcatcgccgggaggcccgaccagcgcccggccgaccagtgcctcgccttcctccaccgcccgccggtgcactgcgacgcccacggctgttcgcgccgccgggccactactaaccgacggcggcggcggcggcaactccggcgagaagtgaaattcgttggtgaattattcctacacacaaaaatcagtcaatcactcaatcaagcatcgtatatatatacactgtaattttttttcttcttcttattctctttggattttttttctctttttttgttttctttttctttttcacagagaggttggtaattaataatgggatttgtaggaagagtacatgatacattacagtatatttgtgacttactgatcattgtttgtttgtctgtttgttgggtattttcgtatatactatagtagttaattagtaaaaaaaaaaaaaaaaaa

SEQ ID NO: 389167 - DNA, 876 bp, Oryza sativa
cgagtttgataattacttcttattgtttcattagcaattaagctatactagcttcagtgcagtttaatcgatcatggcggctaattcctccaacgacaccgtcaacgtggcctccgaggtgagcagcatcctctccaagctcaacgatcacctcgccggcgccgacgaggccaaggagccggcggggacaagcatcatcacgctggccggggagaacaacggcgccaccatggaggtggccggcgacgtggaggacctcgtcgtggtggaggccggcggcgacgaggacgacgacgaggaggaggagagcgtggtgagtgcctacaccaacagcaactaccaggctctgaacaactcggtgctcgtcgccggcagctgcgccgtcaaggaccccggcgtccacgtcgtcatcgtcgagcacgtcgacgagatccgcgactacgacgacgacgtccgggacgaataagcctgcaactcatctatcatctcatccatctgcaggtcatcaacaccatctatacatatgtatatctatcgatatatggattaaagtgatgatcaggtgatcgatcatgatcacctgcatcatcaatctacatcagaaattaatcgatatatacatcccatcgcatgatcaacagctcgatatatatgtatgttgtgcacgtggcttcggcttcctttgttaagtttcttaattaatttacaagatttggtagtcatatgtatttgttctggttgttgtagttgtgatctatatttatacatgttgcttctatatatgtaagttggtttgtatgtgttttcttccaataaaatcttgtttactccaatgtaaaaatgttaattaactataatgaaaaaaaaaaaaaaaaa

SEQ ID NO: 389168 - DNA, 398 bp, Oryza sativa
agctaattaaggtaccagcaactccatcacatccttaatttgcagcagcaggtaattgtacaccggcgaaggaaattaaaggaaagtaggagatcgatggccaagccaagcgccgccgcctggtccaccggcctcttggactgcttcgacgactgcggcctatgctgcatgacgtgctggtgcccgtgcatcacgttcgggcgggtggcggagatggtggacagggggtcgacgtcgtgcggcaccagcggcgcgctgtacgcgctgctggcgacggtcaccggctgccagttcgtctactcctgcgtctaccggggcaagatgcgcgcccagtacggcctcggcgacgaccccgtctgcgccgactgctgcgtccacttctggtgcaacaagttcgc

SEQ ID NO: 389169 - DNA, 741 bp, Oryza sativa
cccttttctccctgtcgagcaccgcttggccgccgtgcggcgaaaccctagcgattgtagcggccggaatcagaggcggcggaagccatggcggacgacgactacaacgacatggacatggggtatgaggatgagccaccagaacctgagattgaggaaggggctgaagaggaacctgagaataacgaggatggccctgatgaggttgtaggggcagaggctgaagataaggaacaagaaaaaactcagcgcccacgcaaaacgtcaaagtatatgacaaagtatgagcgtgcccgcatcctgggtacacgtgcattacagataagcatgaatgctccagttatggttgagcttgagggagaaactgatcctcttgagattgccatgaaagagctgagagcacgcaagatcccattcacaattaggcggtacttacctgacggaagctatgaggactggggcgttgacgagcttattgtggaggactcctggaaacgccaggttggaggcggctaagctgtgactgaggctactcaaaacgaacagcaatgtgctgcaagttgactttgcccttgtagtaatatggtctgtgcaactccattatgactggatgctgtatcagtgaactggcgtgatgatggcatgcccatgttgcctcgacatgtatgccctctttccgcattgaatcattttctatattattatctatttttatttatttttatttttaactcattttat

SEQ ID NO: 389170 - DNA, 1635 bp, Oryza sativa
gttgacaatctcggcggaaagcggcggcggcggcgacggcggcggctgcgggtccgatggatctggtggaggcggaggcggaggagcagccgccggacgaggacggcgacgaggaggggtacgtcgaggcggaccccgcaggccgcttcatccggtatgatgagatcgtggggtcaggggccgtcaaaacggtctacaaagccttcgataagctggagggtgtcgaggtagcatggagccaatcccggatcgatgactctgtcatggggtcctctaagaagatgaagcaactaaacacagagattcaacttttgaagacactcaagcataagaacattgagaaaatgtttgcttcatgggttgatggggagaagaagactgttaacataatcacagagttgttcacatccgggagcttgacacagtaccgcagaaagcacaagaaagtgaatatgaaggctatgaaacgatgggcaatacagatattaacagggctagaatatctgcacagtcagaagccagcaattatacacagggatttaaaatgtgacaatatattcataaatggaaatcatgggaaagtgaagattggtgattttggtttggcaacattcatgcagcaacagaaaaaaagtataaaaggcaccttagaatttatggcaccagagctgttaactgggcattacaatgaattggttgatatatattcatttgggatgtgcatgcttgaaatggtgacatgcgaatacccatacagtgaatggcaaggcatggctccatatattcaaaaagattgaggagggtgagaaaccagctgcgttctacaaaattaaagatgcagaagtaagaacttacatagataactgtttagctccagtagagaacagaatgtctgcaacagagctgttgaaaagctctttcctccaggatgatgatcttatctcagtctctctggtcaagaatatgtctgaagatgggcagcagcctgtcagttgcatgcttcgtaagggcgagtttctgctgacaggaaatgttgatgtagccagccatgttgatttatggctaagatttcctgatcccagcggttgtttcaagagtgttgaattcccattcaatttgactgaagatacaagtctttctgtggctgtggaaatggttgagcaatttggactgacacaagacagcagaccgatcatcgcgcagttgatcgatgcattcttggtcatcctgattcctgaatggacaccgtgtgtcgccatccgtcaggtggtttctgagggtgcaaacggcttgacaattgagaagcgctgaccgagagtgattctgcttccccaaccgctgctactaactaatagtcatagttggcttcgctggttatgtatccttatagtattttcttttagatggagtggaccttatgctttagccacctgtgggcactcatattacaatgccctcgagatgtgctgctgagcatggagttcctccggtggtgatgatgatgaaagttaggtctagttcagataatttatttgctaggaaggagcagcaaaaatgagagtaatcagtcggaaatgtggggttttttttcatctttaatgcaattgctgaattagttgtggctcttttttaatt

SEQ ID NO: 389171 - DNA, 1288 bp, Oryza sativa
  unsure (1)..(1288): unsure at all n locations
gcaatttcatatggtggagcaaagggtgggattggatgcgctcctggtgaattaagcacgagtgagctggagcgtttgacacgtgtatttacacagaaaattcaccgtcttattggagctcattactgacgtgccagctcctgacatgggaactaattcacagaccatggcttggattttggatgagtactcgaaattccatggtcattcaccggcagttgtcactgggaagccaatagatcttggtggatcattaggtagagatgctgctacaggaagaggtgtgatgtacgctactgaggctcttttggctgaacatggaaagtccatttctggatcaacctttgttatccagggttttggtaatgttggttcatgggctgcacgaatcatccatgagaagggtggcaaggtgattgcacttggagatgtgacaggctcaatcagaaacatgaatgggttagacatacctgctctgatgaagcacagaaatgagggtggtgctttgaaagattttcatgatgcggaagtcatggattcttcagagctactagtgcatgaatgcgatgttctcatcccatgcgctttaggtggagtgctcaacagggaaaatgcacctgatgtgaaggccaaatttataattgaagctgctaatcatccaactgatccagaagctgacgagattcttgccaagaagggagtgaccatattacctgacatttacgccaactccggtggtgtgatcgttagctattttgagtgggttcagaacattcaagggttcatgtgggatgaggagaaggtgaacatggagctccacaagtacatgaacaattctttccagcacatcaaggccatgtgtaaatctcatgattgcaacctgaggatgggggcgttcaccctgggagtcaaccgggttgcacgtgccaccctcttgaggggatgggaggcatgaggccattaacaacactcatatccatgtccgaaaatgttggacgaccaatgtctgatctgataaattcatcagaagtggccggcttggaaggagctcacttgcaataatattcaagatagatcggcgtcggcgtccttccaccgttccggcgaaaaataataataaatatattaagggtacctaacaaaaatgtgatgtttcttctttcgtttttacaaaaggccgattcaatcgtgcgtgattatagtattgacaaaaaatggtgtaagctctagaggcaatttgaatttcacaaaggttgtattctgtcattgtcaaannannaaaaanaaa

SEQ ID NO: 389172 - DNA, 635 bp, Oryza sativa
aattcggcacgagctccgtgttcttccctactgtggccacggctttcacgtggcctgcatagatatttgggtagggcaccattcaacatgcccagtttggtagaatttcgttgtgcgactaccctgatagcaagcacacgatgtctcctgtaccaagtgcagtgataataccattacctccatgttctcctgaagcatcaagatcagatcaatgcaattgcctattcgtcggaacaggtcattcgccaaggacatcgcaggttctcagaaatgaacctgaccaggtgaatcggacattatatactccaccggcggaaggggggaatagcttgccatcatcagaagttaacccccctggtgaaaaataacaaccagcaaaaacagtagagtcctcatattcatgacagatcatgatccactaagctaggaccctgcaactagctgcttgaaatttctgctgttctgtctgctctctgccaggtgaaactacctgtaatattagaaacatcgacacagggggatccgtggattgctgtcataggttagttttggagcgtgtttgatgtaaatatgagaaaccgttcaggtttcttgttaagaaaaccacatttgtttgtcatcatattcaagatccc

SEQ ID NO: 389173 - DNA, 943 bp, Oryza sativa
gccaaagcgcacgccaagtcgctaataccaccaccgccgccccgtgacgacctcccctccccgcctccgatctccggccatggccgcgcgccgccccggatcgcccgctcccaggtgggcgccatggcccctcctcgccgccgccgccgtgctcctcctcctctcggccgcgcgcggacggcgcgccccctccggttcgacctcgagtccggccacaccaagtgcatctccgacgagatcaaggtcaactccatggtcgtcgggaagtaccacgtcgtcggccccgaccccaacttccccgacaaccctctccccgactcccaccgcatctcccccagggtgacgtcaccgtacgggaacagcgtgcactacgcggagaacgtgccgtcggggaacttcgcgttcacggcgacggaggccggcgactacctggcctgcttctgggcgcccgaccacaagccgccggtctccatcgggttcgagttcgactggaggagcggcgtcgcggccaaggactggtccaacgtcgccaagaaggggcaggtcgatgtgatggagatggagttgaagaagctagaagaaaccatcaaatctatccatgaagaaatgttttacctacgtgaaagggaggaggaaatgcagaacctgagacaagcaaacgaactcaagaatggcatggctcgggttcctctcactcggaatctgcctatccgtcgcggggctgcagctgtggcacctgaagaccttttttgagagaaagaagcttctgtagttcttctccaagatcaaaagaatatattgcagcacgaaagcggctaggtgtactttttttttgtgtcaagtttatgttgcttagcgattacttgtaagcaacgatgtgtattatactctataaattatatttaaccgtgcgccctagctttgtccaaaaaaaaaaaaaaaa

SEQ ID NO: 389174 - DNA, 679 bp, Oryza sativa
  unsure (1)..(679): unsure at all n locations
ccacgcgtccggaaaagcgtattcgcagaaagcgtattggtgaggcggaggagtagaggaggagatcgagatggcgtcgtcggcgacggagacggagacggtgagggcgttgcacatcctgatcaagcacgagggctcccgccgcaaggcctcctggaaggatcccgacggccgcgtcatctccgctaccacgcgcgccgacgccgccgcgcgcctcgccgacctccgcgaccagatcctctccggccgcgccaacttcgccgacctcgccgcccgccactccgactgctcctccgcgcgccgtggcggcgacctgggcacttttgggaggaggcagatgcagaaacccttcgaagatgcgacatttgctctcaaggttggtgagatgagtgacactgtggacactgacagtggtgttcacatcatcctgcgcactgcttaagatgctgatatcgatcgtcagctggttggcttccaaatgttattttctggtagcctaaaacttcaaatcaaaatgaaccctgtaacgaatatgatatgttccgcgacccgcttttgtttcgacatttgagcacatggtatggcatgtttccgtgatgaacattttaatctcctnttgctcngttttctnnnnnnnnnnnnnnnnnnnnnnnnnnnnnnnnnnnnnnnnnnnnnnnnn

SEQ ID NO: 389175 - DNA, 729 bp, Oryza sativa
  unsure (1)..(729): unsure at all n locations
cgtcggaangctgcctttggactgcaccggacaccaatccctggaaccaaggttggcnccaggactgcaaactcactgcttccgatatctctgttgatgacagcaagatgaattttgagttgctgcctaagcttttcgatgaccaaggcacacctcagccaaccttggagagacttcatgtgggtcatccaacgctcagcgttgcactctgatgacattgtttgcttcatggccaaggccgaccaatgggacgacgatgcttgggtgcttgctgttgatatgaagaacaagaggctaaaagttgtggctgagtttggtgcagaaagaacccttggcattggctatgcctacatgagcagtaacatatcagggtatcttcgtacagctccaggtatagagggtagcctaaagcgacaaggggtttgttgaccgcaccctcacacaagaagcagacccatatgatgcatatgtctcctccctcttggaaaggtggagatcaacagaattctgtggggaggtgaagttgattacatggattttggatgaggaggggcatggctaaggggagagcattttcatgtagtattgctgttgtgttagacttcttattgcttgattatctactgttttgtcagttctatttacgagggggtattgctggtactttgtaccgaggatgactatctaagcacaaaatcttaagagtgtagtttatgcctctgtttattt

SEQ ID NO: 389176 - DNA, 382 bp, Oryza sativa
ccggaactgactgtggccgacccacgcgatcgcggttgccatcccatcatgcgcgatcctcctccaccatcggaggagacgctcaaactaccgagctgcccaatccatggcggcggcggaggcggaggcggccggtcctctccggcgggctctcttcgtcctcgccgtgctcgccttgctgctggtagcggccccggcggccgaggcgtggacgggggagatccgcggccacgtcgtctgcgacgtctgcggggacgccgccatcggccccgaggaccacgtcctcgaaggtgccgaggttgccgtcctctgcatcacgagatctggtgaagttatcaactaccaggccttcacaaactccaagggtgtatacattgttgcg

SEQ ID NO: 389177 - DNA, 626 bp, Oryza sativa
atccaggagggtaaaaaaaacgcaataaatttcaaaattacttcgaatctaccatccagtctctgtctaagcaacacggccttagccaatttaggcttcccccattgccagagttcccatcggagctgtcatctcatccggtcaccaccagcccaggagacactcctgtcgatcctgctgacaatgttgctgctaatgtacctgaggattctcgagaaggccatgctacttctggtgatgctgatgttcatgtccgttctccaatagacttcgttgccaaatgtgttgggaatggttgtgcagaatctccagaagaccaaatctgacgagagtttcatgattctagccatttctgtacttccttttgatgtgaaatttttagttcttgacacccctcgatggtggaacttaacagctaggttatgatctgttgataaacattgcatagccaatttagtcgggtaagggaaggcagcgacagtttttggatgaacaaatacacaaattcacgatggtactctagttatagattgacagcctttggatgaacaaagactgcttttggaattgacatttgggttcacactgcagttttcgctttcggcacatataagaacccactgtcc

SEQ ID NO: 389178 - DNA, 662 bp, Oryza sativa
cgatcgatcgatccaaccgaatgcatgggccagcgggtagcatatggcggcacactataaattggaggccacccctgtgcgtctcgtcccatccaactcatctcaggatcgagttgtgtacgtttgtagtgtgctgctctctctgctaccttgtgtcgagatggccggagtggtgatcaccgggcgggccttggtggccgccgtcgctgtcgtggtcgccgttttgctcggcggacggcggaggcgcagagctgtcccccaacttctactcgaggacgtgccccaacctggccaccatcgtgcggtccgggatggcgtccgccgtgcgaggcaagccccggatgggggcctccatccttcgcctcttcttccatgattgcttcgtcaatggatgtgacggctcgatcctgcttgacgacacgtcgacgttcaccggcgagaagagcgccggcccgaacggcaacttcggcccgcgggttcgaaggtgatcgacggcatcaagacgcaagtggaggcctcctgcaaggccaccgtctcctgcgccgacatcctcgccctcgccgcccgcgacggcgtcaacctgctgggtgggccaacgtggagcgtggcgctggggcggaaggactcgcgcacggcgagccagagcgcggcgaacagcaacc

SEQ ID NO: 389179 - DNA, 528 bp, Oryza sativa
ccacgcgtccgcggacgcgtgggtccgtcctcagcggcaccgtcgccctcgtcgccgagcgccacaacgcccacgcctggctcatcggcttcgacacccgcctcttcacctgcgtctacgccggtatcgtgtgctccggcgtggcgtactacgtgcaggggatcgtgtcgaggcagaggggcccagtgttcgtgacagcattcaacccgctctgcatgatcatcaccgccatcatgggctccatcattctcaaggaagaaatcaaccttggaagcgtgatcggcgcggtgatcatcgtgatagggctgtacgcgctgatctggggcaagggcgccgacaaagtcgagcagacagacgccggcgcggcggcggcgggcagcaacaagggcggcggcgagctgccattgacggcggtgcccaacggccacggcagcaagcacggcaacggcggccatgtcttacacgtcgagacgccgccggcggcgaacgggcactactagcctaagcacatgcagcagcagtccgtca

SEQ ID NO: 389180 - DNA, 535 bp, Oryza sativa
attcaggagcaatttaaattattcatattaagcctgataaagggacgaacaacaacgacaacaaaattgctctcgttctttccaagtccagataaagggcattgcgatttgagaaataaataaagggcattgcgatttgagaaataatcttatctgtcattagagcagaggggtgttgctcgattggggaagaaggagctgctgccgcttctcagggaatagagagccatcgctgctgctcggagaagaacgagcagcagcagccaccggctctgttggggagcagcgaccgcaaccagtgccacaagggagcagaagcagcagctgcagccgccggcaccgcaggggagcaccagccgcggtagccgacgtcgcatgggagcagcagccaccgctgcgccggcgcaggggagtagcagcaaccgtggccgccgccggcagcaggggagcagcagcacgaaagccgccaccgccgccgcgggttagatccactgtcgctgcatgaggggaggacggaggagcagggatggggacc

SEQ ID NO: 389181 - DNA, 787 bp, Oryza sativa
  unsure (1)..(787): unsure at all n locations
cgcgtcgcgtccgggaaattggagaggagagagagagagagaagctggagaggatgaggggcggcggcggcggcggtggcggcgacgggatgatggacgacgggcccaagtacgcgcagataccgacgagcttcggccacgagctccgcgcgtgcctccgctgccgcctcgtcaagacctacgatcagttcatggagcaaggctgcgagaactgccccttcctcgacatggaaagggatcacgacaacgtcgtcaactgcaccacccccaacttcacaggaataatctccgtgatggatcctggtaggagttgggctgctcgttggttgagaattgggaagttcatccctgggtgctatacgctggctgtcgcggaggagcttccggaggagtaccaaagcgtttgccaagacaacaatgtgcaatacttcccctccgaagcgtgtctgaacaagccatatatagtcccttcaagagaacagcgtgcctgaacaacctatattccttcggagcgtcacgatcctgaagcaaatactatgcacgtgtttttatctagatacattccttgccaagggaactgctgttacctgttgtgtccatgcttagagcagctaatcagcaattgaccgtgcaccttctgtacttgaacaactcaagagcagtgtttcaatctactctaacgcaatgtgcgcttcttagctaggaatacgtgcgcttctatgcgcattcatattacctgcnnttttcgttcnnnnnnnnnnnnnnnnnnnnnnnnnnnnnnnnnnnn

SEQ ID NO: 389182 - DNA, 766 bp, Oryza sativa
ccacgcgtccgcccacgcgtccgcccacgcgtccggccaacacgagacagaaaatggcaccttccaaggtcagcctcgccgccgtgctcgccgtggccatctcgctggccatggcggccaccaccaccacctcggcgcagaacacgccgcaggactacgtcaacctgcacaacagcgcgcggcgcgcggacggcgtcggcccggtgagctgggaccccaaggtcgccagcttcgcgcagagctacgcggccaagcgcgccggcgactgccggctgcagcactccggcgggccgtacggcgagaacatcttctggggctcggcggggcgcgcctggagcgccgccgacgcggtggcgtcgtgggtgggcgagaagaagaactaccactacgacaccaacacgtgcgacccgggcaaggtgtgcggccactacacccaggtggtgtggcgcaagtcggtgcgcatcggctgcgcccgcgtcgtgtgcgcggcgaaccgcggcgtgttcatcacctgcaactacgaccccccgggcaacttcaacggcgagcgcccgttcctcaccctcgacgccgcggccaagtagacgaccactcactcgtacacagtcgtgttgaactgcatgctatgtcgctgccgcagtacatttcatcgatgtttgtgactctgggatcgacgtccgtgaacaataaagcatgtaatgatcttaataataaataatttcttggtatatatgcacatcaacagctgatgcattataagcctttg

SEQ ID NO: 389183 - DNA, 560 bp, Oryza sativa
  unsure (1)..(560): unsure at all n locations
cgaaagcaagctntaataaagcgcaccagctcgtccntccccaagagtnccttccgaggtcgtcccaaccacgcagaggcccctgctgtctgtgcagtccgagggtnccaacatgacgacggcaaggcaggctgctgctggctgggtgcttctctgccgccgganccggaggaggcaggacgncggcggcggcgacaacgcaaggcaatagaagaggncgaggacaactcgagcgatgagtcggccggggaagaggtgattgtcagagtcgattctcccagcatgctcaccttccgtcagccctccagcgctgctgatcgatgatcaacgtcgcaacccaagtaattgttggaccagccaatggaaatactcctcttatatttaatactaatatttgcaatgcatttgctcatttcattctgttctagcgtatacatatgcatcttatatttgcatgcttggctcgtgcgtttacctctagtacagtaataaagaagaatccctgttcgttccgatgttgagctacatgattatttatatagatatatatttttgagatg

SEQ ID NO: 389184 - DNA, 812 bp, Oryza sativa
ccacgcgtccgcaccgccatctccaccgccaccatcgcctccaccgcctgcaccaatcttccacccaccggagccgccgccgccgccgccaccacccgcgccacaaccgcatccgccatgtccggagctgccgccaccaccaccgccgccgccaccctgcggcggcgcaacaccagcattgtcaccaccaccaccaccaccttactaccccgggccatggccacctgtccatggagtaccatatggctcaccaccacctccccctctgcaacaccacagctcatggccaccgatccacagcgtaccatatggatcaccacctcctcccccgctgcattgatagaatttctccgaagaatgtttggaaacatgcatgtgttccgctcttgctcctcacatccggcaaatcgacagcagcggaagtcgcacacaagtatacgtggtcattatcgttcttattagctactagtgttcttggtgggttgattgatgactaccggcgtgaagagcgtagtaaggtgcacaaaattttgtttggttatgatttgtcggcgtcagcatcgaaacagtttgtgttgctgtggtgttgaaagggattgggaagtggtgggggtgtggggatttggaggatttgggaacatatgattgatggctaattgggttgtgaataataaggaaaagtttgagagggacaggagggtttggcaaagaattgtaggtgcagggatatatgtggttgtatagatgagaatcatgagttcagttcagttaaattcagtagtagtaagccataagttttagaacacccaaaa

SEQ ID NO: 389185 - DNA, 514 bp, Oryza sativa
  unsure (1)..(514): unsure at all n locations
tcgccactcgtcattcctctcagctcgccgccccgattcatttgcttgccgccggatctgacgcctttggactcgtggccaacgaatcccgcggcgggaggaaggagagtgtgctgaatcccgttggattcggccgcctagaggccggcggacactggatccaaccgccttgaagccaaaggccgcccgatccacagcgcagcagtggcggcggcgacggcctcagcctagagctagcagtggtggtggtgacggcctcatcctccgacgagcagcggcggcctcccccttctccttgatggccgcatggtaggtgtggatcgaaggtgaccacggctgagagggagattgatgatggtgttggcggtgagtcagtttggttctcctgttattttgttgaatgtctaatatggcagaagaattttgatccgtgatttggttctgctgttgttgatgacgttgacggataattgaatcaatgtaaatttcctcttcttgattaaanaaaaaaaaa

SEQ ID NO: 389186 - DNA, 1481 bp, Oryza sativa
  unsure (1)..(1481): unsure at all n locations
ttccaaagattcttatcgattgaagaaaaaaaaaagccggagaaaaggatagagagggaaagcaaccagccatggagtcgctgactctccgggcatcgccgtcgacggccgcgccgttgcgccgcgtccccgggcggcggcacgcggcggtgtccgtccgcgcctccgccggcgccggcgagccggacctctccgtgcgcgtgaacgggctgaagatgcccaacccgttcgtgatcgggtcggggcccccgggcaccaactacaccgtcatgaagcgcgcgttcgacgaggggtggggcggcgtcatcgccaaaaccgtatccttggatgctgagaaagttatcaacgtaacccctcgctatgcccggctcagggcggaccccaatggatctactaagagtcctatcatcggatggcagaacattgaacttatcagtgatcggcctctagaaactatgctgaatgaattcaagcaactgaagaaagagtatcctgacaggatactcattggctcaataatggaggagtacaacaaggctgcatggctggtgcttattgaacgcgttgaagagagcggagtggatgctcttgagattaatttctcatgcccacatggcatgccagagcgaaaaaggggtgctgccgtgggacaagactgtgacttgttagaggaggtctgcggttggataaatgagaaggctacagtgcctgtttgggcaaagatgactcctaacattacagatattacaaagcctgcaagaatttctcttaagtcaggatgtgaaggagtttctgctattaacacaatcatgagtgtgatgggaattaacctcaaaactttgcgaccagaaccctgtgtggagggttattccacgcctggaggctattctgcgagagccgtgcaccctatagcacttgcgaaagtcatgcagatagcaaggatgatgaaagaagaatttgctgatggacagtcactctctgctattggaggcgtggagactggcaatgatgctgctgagtttattctacttggcgcagatacagtacaggtatgtacgggcgtaatgatgcatggttatggccttgtaaagaagctttgtgcagagctgcaggattttatgagacaacacaacttttcctcaatagaagatttccggggggcctctctcccgtatttcaccacacacaccgatttggtacatcggcaaagggaggcgatcaaccagaggaaggctattaggaagggcctggaatcagacaaggactggaccggtgatggattcgtcaaggagacagaaagcatggtgtccaactgattcgactctgaactcacacccccttccaccatacttccaacttgtgattaaacagggaccatgttcagcccaaaacagcagaaacttttgcatcatctcgttcaaataaaaagcataccaaattacttcnatcnnnnnnnnnnnnnnnnnnnnnnnnnnnnnnnn

SEQ ID NO: 389187 - DNA, 621 bp, Oryza sativa
  unsure (1)..(621): unsure at all n locations
gccctttatttcaaaggagcatggactgagaagtttgatgcatctaaaaccaaagatggcgaatttcgtcttcttgatggcaagtcggttctagcaccattcatgtccacttcaaagaagggggcagtatctttcgtcttacgacagcttgaaggtactgaagctcccataccagcaaggcggggacctgaggcagttctccatgtacatacttcttccggaagcacaggatggcctctggagcttggctgcgaagctgaactctgaaccagagttcctggagaagcatatcccaacgcggcaagttactgtcgggcaattcaagctcccgaagttcaagatatcgtttggatttgaggcgtctgatttgctcaaaagtttggggctccacctgccatttagctctgaagctgatcttacagagatggtcgattcaccagagggaaaaaacctgtttgtttcattccgttttccacaagtcgttcgttcaggtggatgagggaagggcctaggggctgctgctgcaactgcagcagtggatcacacttaggtcagctccaatagttggggcctttnccggggtccatcctttcnttttcntggtnccaaggagggcaatgn

SEQ ID NO: 389188 - DNA, 537 bp, Oryza sativa
ccacgcgtccgagaaaacaaaatgagtgaagaagctggagtgatcgaggaggatggttctgatgaggctaaagaaattagcaggtcaatcaagcgagcccttgcttcaacaagaaaggagcttgaaggggttagaggaaatattgaaaaggcaaaagacgaaaccaatttaataagagctattgcagaatcaattaagtcagaggtggataaagagaaagcttcacttgttacattgcagcagcgagaaggtatggcatccatagccgtctcttctctggaagctgagctcaataggacaaaagaagagatagaaatggtgtacatcaaggaagcggaaacccgtgaaaaaatggcagagcttccaaagatgctgcagcaagcagctcaggaagcagaagacgccaaggtggcacctcattctgcacaggaagaacttcgaaaggcgaaagaagaagccgagcaaaccaaggccgctgccgcgactgcagagatcaggttacgcgccgttctgaaagaaatagaggcctctaaagca

SEQ ID NO: 389189 - DNA, 515 bp, Oryza sativa
ttggcaccaataccaatctctgactcctccggcctccggcggccggcgagagagatcccaccctcaccgacgacggcgagcgaccaccatgtcctcctccaccttcagcggcgatgagaccgcccctttcttcggcttcctcggcgccgcctccgccctcgtattctcctgcatgggcgccgcctacggcaccgccaagagcggcgtgggcgtggcgtccatgggggtgatgcgcccggaactggtgatgaagtccatcgtccccgtcgtcatggccggagtgctcggtatctacggcctcatcatcgccgtcatcatctccaccggcatcaaccccaaggccaagccctacttcctcttcgacggttacgcccacctctcctccggtctcgcctgcggcctcgccggtctcgccgccggcatggccatcggcatcgtcggcgacgcccgagtcagggccaatgcgcagcagccaaagttgttcgtgggcatgatcctcatccttatctttgcag

SEQ ID NO: 389190 - DNA, 470 bp, Oryza sativa
ccacgcgtccgcagagtgccatcgctcacacggccggcggcggcggcgatggcgaggggcgtctcctacgtgtccgcggcgcagctcgtccccatgctccgggacccccggatcgccgtcgtcgatgtcagggacgaagagaggatctacgacgcgcacatcgccggctcgcatcattacgccagcgacagcttcggggagcggctgccggagctggcccaggccaccaagggcaaggaaaccctcgtcttccactgtgccctcagcaaggtgcgtggcccatcttgtgcgcaaatgtatctggactatttggcagaggctgatgaagattcagatgtaaagaacaatcatggtccttgaccgtggatttaatggatgggaactttcagggaggcctgtttgccgctgcaaggacgctccttgcaagggtgtgtgctcttgagtatccatatgaaactatgcatttacct

SEQ ID NO: 389191 - DNA, 575 bp, Oryza sativa
ccacgcgtccgcggacgcgtgggcggacgcgtgggcggacgcgtgggctggagatggagaggaagatcgacgagatggcgaaggggtggcccgggaagctgaagcacgagctgcacgatgagcatgagctcgtgctgactcgctgcaccacgtatggctgtgatggatgcgacgagatgggcagctcgtggtcgtacaggtgcagggagtgtgacttcgacctgcaccccaagtgcgcgctggggaaggagcagcagaagaagggcgatgacgaggctgaggctgaggctgacccagcatgcgagggaggcgtttgcaggaaggcctaaaagagacttgttcttccactggttatctactgctgatttaagcgtgcctggatgtttggatgtgaaattagagaattatgtagtgagtaataaatatggttttgtttacaaagtagtggtattggggttgctggtacattggtatttgtgttgatgaacattagttgagaccagagctttggattattcattattatgtgcaaaccaaaaccatatgtaagtatgagtccggattggtaattgggt

SEQ ID NO: 389192 - DNA, 765 bp, Oryza sativa
cgccgccttccgccgcaccagccctctcctgtccggggacaagccggcgacggtggaggacgtcatgcccatcgccacggggctggagcgcgaggagctcgcggcggagctcaagggggagaagcggttcgacatggatcctcccgtaggcccatttggtaccaaggaggccccagctgtcattgaatcctactataacaagaggatagttggttgtcctggtggtgaaggagaggatgagcatgatgttgtatggttctggttgaaaaaagatgaaccgcatgagtgcccagtctgttcacaatattttgtgcttaaggtcattggtgatggtggtgatccagatggacatgatgatgacgacgagcatcaccactaaggacgcccatgcctcgtggttctgataataagaatttgatgaggcagatgatttcatttaaacctttttagcaccagactgctctacggcgtccttgtttatgaatgcacacatttggccatcaagcaggtggtagttttttccttagggattttgtccaaacaaaaaactcatcgaggcttgacctgtgcatttccttcggagcatcatcgaataaaagatgactgcatcagctgcgtttttcttgtgtatcctaatggccatctggtgtgatggacctgttctattcagatcatgcaacagtttattttcagtgctcagtgagtccctgtttgcaagcagccactaaatctttaacgatcgtctcatagtccccaatttcctca

SEQ ID NO: 389193 - DNA, 807 bp, Oryza sativa
  unsure (1)..(807): unsure at all n locations
ccacgcgtccggcaagaaccatcagtaggcactgcagccatcggtggtccattcaatcttttgaaccatgatgggaaacctgtcacgcaaaaggatttctttggcaagtggactctgctatattttggcttcacacactgccctgacatttgtccagatgaacttcaaaagatggctttggcaattgataaaataaaggaaaaggcaaaaatggaagttgtgccagttttcatcacagttgatcctgagagagatactgtagagcaagttcgtgactatgttaatgagtttcatccaaatctaataggactaactggcacaactgatgagataagaaaggttgctcgtgcttatcgagtttactatatgaagacagaggaggagggttctgattatctcgttgatcactcaattgtcatgtacttgatgaatccaaagatggagtttgttaaattttacggcaagaactacgatgcagattctcttgctgatggcatcatcaaagaacttgaaagggcaccaataaagatagctgacccacaattaatctggcaaactatggtccgaatctctccaaaagatttcatctatgtacacaattgcaaacaatgggtggcgctcaaggtcaacccgtagttcgtagctgttttttctgctcatatcattcataaaaattaggatattcaaattttgaggccttcgacctcatcagattttggtgaaccatgttaaactttgaggcaaaaactctacacatttcataaataatactccatatatcagaactcnnnannnaaaaannaaaaa

SEQ ID NO: 389194 - DNA, 483 bp, Oryza sativa
ccacgcgtccgcgtggaccgaggccttcaacgccgtgtccatccagctcgccgccctcgccaccaaacccagcgaggtggacgccgtcgacgaggccgtcggcaagctcaaatccgtgctcgacaacggcgacggcgacctcgacgaggcggcgctgcgggcggcggtgcaggaggtggagaggcggacggaggagctgacggcgccgttggaccggctgtccgacgccgtcaacggcgtgttccgggcggcgctgtgcctccgcaacgcggagctcgggagcatcatggtgggacccgccgaaaagacgccgtgtaaatagccgtttccaccgtgtgtcgtccgtagccatactggtatgtcactgtataaatacaagtataattctggaagtagtacagttctacaggtacagggcaacatggggtggtgtctcagccaaatgcagtgggttggtgctttttctaccagctggtactacta

SEQ ID NO: 389195 - DNA, 621 bp, Oryza sativa
  unsure (1)..(621): unsure at all n locations
ccacgcgtccggcagaaccagatggagaatcagctgacaaggaactgcatcggcgcggcaactccggtgacccccaccggaaacctcgccggatcaggtgcgccgagcaagacgcggatcaggtggacgcaggacctgcacgagcggttcgtcgactgcgtcaatcagctcggcggcgcagacaaggcaactccgaaggggattctgaagctgatgaattcggatggcctgacgatctaccacatcaagagccatctccagaaatatcgcatagcgaagtacatgccagcgtcatctgaagggaagcaactggagaaaagagcaacaggaaatgacatgcagaatctggaccccaaaactggaatgcaaatcacggaagcactgcgtgttcagctcgacgtgcagaggcgcctccatgaacagctagagattcagagaaatctgcagctgaggatagaggagcaggggaagaggctgcagaagatgttcgaggaccagctgaaggcgagcaggagcgtgatggaaccgcagagctggacgacgtcgtcgncttcgccgccgngaccgnagacgacgacgcgttcgatgacgtcgacgtgcagctgntggccgtcgctggca

SEQ ID NO: 389196 - DNA, 983 bp, Oryza sativa
gtcgcttcccacctccgaccccgagccgcgccgccgcctataacgaccacttcacgtgccctatctttctccgcctcctcgctcacgagctcgtcctcctcttcttcttctccttccacggaagtctaggttcatctctcctctcctctcctctcctcgagcgccaagaaacccaaaccaccgacgtgtatggactccaggaagaaatcgccgccctccaccgccgccggggccgcgccggcggcggcgaacgggtacttcagcaccgtcttctccgcgtcgcccacggcaaatacgaaagacgcgaagcaggcggacctgtacgcgatgctgaacaagcagaactccaaagggcagaatggcggtggctttgcagatggcaaatcgcacagccctactaaagctcgtggtgcatacaaggatggtaaacattcatatcccaaacgagtcatcggagtcgccatattttggctcttctgtgcattacggtgctcgggagttttatggcaacactccaccaaagcagggtgatgcatcaccaggaaatcaaaaggagcaggagcagaatccagatggctccctggctaccagaggtgattggtggcaaggttcactctattactaagtactttgcagagggctctccttttgtcaaacaagaaataaaaggagtggtccaagccggtttgcaagtcatagtggaactatacatctgttctaccggtggaggcagtatttggatgcgtcatttcacctgagcagatgtggttgtgtgtgttactgtgcatgtgtgtgttgttttcctttttttttcctcttgccctttgttttgctgtttttacctgatgaagtataatgaaatggtagggcagcaacaggtagccctttgttttgctgttttcacctgatgaaatgtgatgagatggtagggcagcaacaggtagccttcaataaaagaaaaggttgctacttgcaacattact

SEQ ID NO: 389197 - DNA, 528 bp, Oryza sativa
ccacgcgtccgcatgtattgggttccaggtactgagcttcaaggaaaccctagcatcctaccagagcgtatattatatcggcacaattgttcccattgtagttgtcttgctgggttatgttatcaagccagccaggccagtgaagccaaaggctcggaaggcagaatgagcaacaagttgacctggtcaagtggtcattacatataggagcgacgaagaacatttaatgacgataatgacgaactagtgtccagctattctactgtggaatttcgcaggagaatgtgatgactcacctcttaaagttctgaactcccttgtgattgatcaaacattaaaacgtggcactcccgttggatttttcttctatgttatgactactactacaactacataggatatcggccttgcgccttcggttgttgagttctcttctgaccgactgtcattcaaagcgatgtattttttatccccttccctggcctggagccaaatggaggtgtgaatgggcatcatttcttggtcccc

SEQ ID NO: 389198 - DNA, 692 bp, Oryza sativa
ggtggagtccttcgggagatatgttgacatggttctgtggagtcaattgatatatgtgaaattgatcagctagttattgatgtttgtaaagatttcttcccagatttatctgttggattcaaagatcctcgtgttcggcttcatgttggtgatgctgtggagttcttaaggaatgctcctgaagggacatatgatgctattattgtcgattcatcagacccgattgggcctgcccaggaacttgtggagaagccattttttgacacaatcgcaagagctttgaggcctggtggtgttctttgtaatcaggctgagagcatgtggttgcatacgcatcttatccaggacatgctttcgatctgccgtgagacattcaagggttctgtccactatgcctggacgagtgtcccgacatatcccagtggtgtgattgggtttctgctatgtgccaaagaaggtccaccagtcaacttcctgactcctgcaaatccaattgaaaaactagaaggagctatggaagcaggaagggatattagattttataattcagagatgcatagagccgcatttgttctcccaacctttgcaaggagagagctagaggcgtattgtactaccgttgaaagggaacaacaagaagaaacaacggccgagcctctgaagatgaacattatgccgaacagtgaaattct

SEQ ID NO: 389199 - DNA, 442 bp, Oryza sativa
ccacgcgtccgcccacgcgtccgaagatttacggcaggatgagcgtgtaatgcagctttttggcctggtgaatgcgcggctggagaactctaggaaaacttcagagaaagatctgtcaatccaaagatatgctgtcatacctttgtctcctaacagtggtttaattggatgggttccaaattgtgacacacttcatgccctgatccgtgaatatagagatgccaggaagattttcttaaatcaggagcaccgatgtatgttgagttttgcacctgattatgaccacttacccctcatcgccaaagtagaagtatttcagcatgccctagaaaacagtgaaggaaatgaccttgcaaaggttctctggcttaaaagccgaacctctgaagtatggcttgagcggcgcacaaattatacgagaagtctggctgttatgagcatg

SEQ ID NO: 389200 - DNA, 1136 bp, Oryza sativa
tgttggtgctcctccagctggcggaaacaaacagcagggcaagctttctccccctgagataaagtgggaacaccgtaagattcacggcaaggagtcagtgctgaatcttgcggcagctcgtgcaacctatgggactggtgatggcagcacaatattgatttcttgctctgaagcaactgatatcaaaatttggcatgggaaaagtggaaaggagttgggaacagtcgacaccaatcaattgaaaaataatatggctgatatatccccaaatggccgtttcatagctgctgcagcttttacagctgatgtcaaggtgtgggagattgtttattcaaaggatagctctgtgaaggaggtcaataaagttatgcaacttaagggtcacaaaagcgctgttacttgcctgtgtttcgctctgaattctgagcagattattacagcttccaaagatggtacaattcgagtatggaacattaatgtaaggtaccatcttgatgaagaccctaaaaccttgagagttttgccaattcctctccatgattcaaaaggttctgtttgccagtatgatcacatgagtgtatctcctgattgagaaagttctggccacgacaagtggactcaacgctgcaatggttatgtgtggaaactggtgcagttcttgatacagctgagaaagcacatgaaggtgatataactggcattgcctgggctccacgaacaattccaaatggtggaactcctgcttttgttttagcgactgctggagtggacaaaaaggtgaagctgtggttagctcctaaggctatttcaacctgaatgaagtgtggttggatcctggtcaccctctacagcgcagattcggtgtgggcactgaaggaagagaaaaaaacgatgaaagataatgcagatatgttgcttgagttgagtccttactgacgggagtcgtcaaacataacatgcagagagagtttgtgaaggggagacactgcacttttctctaaatacatatctgtcaacattttggaaataggttgcctgctgctcacaattttcccttttcttgttagaacaaaagaaactagagtggaacttggaagtaacttatcgagttctcttgcaaaaaaaaaaaaaaaaaa

SEQ ID NO: 389201 - DNA, 649 bp, Oryza sativa
gcgcgtaatacgactcactatagggcgaattgggtaccgggccccccctcgaggtcgacccacgcatccgcggacgcgtgggcgcgcgccgcctcgccctcctcggctattcctcccctcgctttgtgccatcgtcgcctcaccctcctcctattgtcgttgcgccggcgccgccctccttgccagtggatccagccatccggaggaaggaagggtcacgaggccatcaagccatcgctgccctcttctcccctctcatctccagaccactaccgccttcctcttcctctccctatcctcggtgagctacagatccggtttggggtcattggaatcgatggtctcggcctccccactggtggatccgatcactggaatcatcggtgagctacaggtccggtttgggggtcagcggaattgatggtctcggcatccccactggttgatccgatcactggagtcacttgcggccattggtttcctttctggtgaatccttttgataccctttcagccacaatcgttttgtgcatacatttagcacaaaatccacaaggttctgtggagaaactgatgggctaggatgaggggtaggtcacagattacagagaagacgacttccatgctgcgcatctaccgtcatgctgagc

SEQ ID NO: 389202 - DNA, 207 bp, Oryza sativa
ctataaaaaggacttcctggagagggggaaagcctgtctaatccaaactgtaaagttgaggttgtgtgaatcctggtacctaagaagttgagattgtaaacttgtaagagtagcccacttttgggaaaatatgtgaagatcttacatgtagtaaactgaaatgctccgtttaataagtcaaataattcacgatgccgtggcttggtt

SEQ ID NO: 389203 - DNA, 739 bp, Oryza sativa
  unsure (1)..(739): unsure at all n locations
ccacgcgtccgcccgaaatccctcgaccctcgtgcagacagctcctcctcccccatcggccatggcgaccgccgcgagacgtctgctcctcccggcgctccgcaagtccctacccgcggccaacggcgccgcgcgaggcgtctccacggagagggcggtcggcgccgccgccgtcgtcggcagccacaccgccaagtggatgcaggacacaagcaagaagtccccaatggaattgatcaacgcagtacctccgatcaaggttgaaggacgaattgctgcttgtgatgggcgtcaggataaaggtcgtgaaactggttccctcggccatccgatcgaatatatctgccttgacctggaccagcctgctgtatgcaagtactgtggtctccgttttgttcaagatcaccatcactgagaagacaagatgcagtccttcaccacactgaaatttggaattgaatgtgtgtatttggtttaaaatgttccagtcagcgtgtcatgtattctgcctgatggcaagatgatgatatctttgacgatcatcgtactttgaatgacataataatgcccgctttaataacagtggatttctttttctttagttggcatctgttgcattttctgagtctatgcaatttctgtatctaattacccgctctgcgaatctgacaacctgagatcaaaattgaatcaattgcgaaactagtttagttatnnnnnnnnnnnnnnnnnnnnnnnn

SEQ ID NO: 389204 - DNA, 848 bp, Oryza sativa
  unsure (1)..(848): unsure at all n locations
taaaggctctcaccaatccgggggggcctagtaatcctttcttccatttctccccgctccatccatggggtctgcggatgcggcctcgccggcgcccggcgacgcccgccgcggcgcagcagcagctgcggaccgtggtgctgagggtgtccatccactgcctcggatgcaagaagaaggtcaggaaggtgctcaggagcatcgaaggcgtgaaggatgtgaaggtggacgccgcgatgcacaaggtgacggtgaccggcacggtggacggcgacacgctcgtcaagaggctgtacaagtccgggaagcaggccgtgccgtggcagcacccgcacgtggcgccggcgccggaggcggtcaaggcgatagaggccgcgccgcagcagccaggcaatgcagcagcagtggtcgccgtcgtacctgtacatgccgtacccgcactcgtcgccggacacctactaccgcgactactacagcccngccgggacggcgcacgcgccgccgctgcaggacgagtaccgcatgttcgacgacgagaaccccaacgcctgcagcgtcatgtgaacgccacgcgccgccgccgccgccgccggctagcaggccaggccggccgggagaagtagtagttgaggagaggtagagtagcttgtttacactctcctccattggagaggtcaaagctctccttcaccgagcattttcctttttcttttctttttccttttttttttcttcacttcctctcttacatgttctaattaactagagcatgtaattgtaatnaagacacgccanattatatatgtttttctcttatcattttggtataaggcaaagacatatacata

SEQ ID NO: 389205 - DNA, 955 bp, Oryza sativa
  unsure (1)..(955): unsure at all n locations
ggcgtctgcggatgcggtctcgccggcgccggcgacgtccgccgcggcgcanagcagctgggaccgtggtgctgagggtgtccatccactgcctcggatgcaagaagaaggaagcagagaagaaagaggaggagcaggaggcgaacaagcgacgaggcgaagaaggacgccggcgggagagcgaggcggcgccggaggcgagggcgaagggcgacgacgttggcgccgaacccgccaaagaagccgttcccgcggcggcggtgaaggaggctagcaatgacgacgaaggagcaaaggacgagaagagcaagcccaaggacgccggcgacgccgcgccacccgccgccgccacaacgacggagaggtccctgcacttctcgccgacgccggcggcgcacaagcagcacgaggagcactacccctacccgtactacggcgcgccgcagccggtgatgagctaccacatggcgcagccgacgacgagcgtctcctactacgcgccgcggccggagccggcgtactccatgcagcagcacccaccgccgccggcgtactccgcgccgccgccgcagcagcagcaatacccgccgccgtcgccgtcgccgcagccgcaggcaatgcagcagcagtggtcgccgtcgtacctgtacatgccgtacccgcactcgtcgccggacacctactaccgcgactactacagcccgccggggacggcgcacgcgccgccgctgcaggacgagtaccgcatgttcgacgacgagaaccccaacgcctgcagcgtcatgtgaacgccacgcgccgtcgccgccgccgccggctagcaggccaggccggccgggagaagtagtagttgaggagaggtagagtagcttgtttacactctcctccattggagaggtcaaagctctccttcaccgagcattttcttttttttttctttttccttttttttttc

SEQ ID NO: 389206 - DNA, 412 bp, Oryza sativa
actctcttcgaagaaaggctctcaccaatccaacggggctcgatccatccatccatccaatccgcctcgctccatccatggcgtctgcggatgcggtctcgccggcgccggcgacgtccgccgcggcgcagcagcagctgcggaccgtggtgctgagggtgtccatccactgcctcggatgcaagaagaaggtcaggaaggtgctcaggagcatcgaaggcgtgaaggatgtgaaggtggacgccgcgatgcacaaggtgacggtgaccggcacggtggacggcgacacgctcgtcaagaggctgtacaagtcccggaagcaggccgcgccgtggcagcacccgcacgcggcgccggcgccggaggcggtccaggcgatagaggccgcgccgcagcagcctgaggctgcgcc

SEQ ID NO: 389207 - DNA, 940 bp, Oryza sativa
ccacgcgtccgcggacgcgtgggcggacgcgtccgggagaatcagctgagccttgattgtttcttcatagctccttcctctttccataatcaacaaacccaaaaccagttgtgccgaaaaaatggcctattatgagattgctcctgtcgagtgcccacttcagcaaaacgagctgtacatgcacctgtacctacgccaagctgacaggggaccaaaccgtgaccaagaagtaatactgaacccaaaagtgcgacccaacgattttggtctcacagctgctactgcatggacaatatctgattctcttgatcccagtgcaaagattgttgcaagggcagaaggtttccatatgcagactagttacaacaatacaagctggtacgcttccttcaacatagtgtttgaggacgacaggtttaagggatctatgcttcaggtgatgggcactactccggcagaaggtcagtgggccatctctagtggaacaggggaatttgccttggctcatggcattatcaagcagaaagttatccagtcaactcctggcgaaaatgttaaagaacttcatgtccatgcattctacactccaatgaatgattctgtggttcctggcgctaccgatgggaagtcctggacactcggggcttaaaaccaaaagctacttccatgcatggttttgtgctgttccagtgtgttactttgtattgtgacgaacaataatttgggcaccaaagcattatttctcaagagtaggaaaaaatcatatcctacttctcaaatcgagtaaaatttgaagaatggttcatggaaacgacaggttctatatcgatcctggcctaactcaaagatccgttgtgtagttgtaattgtcatggtgatttcaagctctatggatgaaactagtaataaattgaagtgcagtttgttgtgtcgacaaaaa

SEQ ID NO: 389208 - DNA, 792 bp, Oryza sativa
aaagctcgtcagcagggaatcttcatctctagctctggagaccagcacccatgccatgagtggaaatggggcattgacttttgacttagaatacactagatggctcgaggagcaaaataagcagataaatgagttgaggacagcagtgaatgctcatgcaagtgacagtgaccttcgtcttattgttgatggcataatggcgcattatgacgaggtattcaaggttaagggtgtagctgcaaaggccgatgtgtttcatatactttcaggcatgtggaagacacccgcagaaagatgcttcctgtggcttggtggtttccgtccatctgagcttctaaagctcctagcaaatcacctcgaacctttaaccgagcagcagttgctgggattaaacaacctccaggaatcttctcagcaggcggaggatgcactttcacaaggtatggaagcactgcagcaatctctggcagatactttggctggatctctcggttcatcagggtcttctgggaatgtggcgaactacatgggtcagatggcaatggccatgggtaaactaggacgctcgagaatttcctttgccaggcggcaacctgcgcagggacattgcatcaaatgcaacgaattctgacgatccgccaagcctcgcgtgctcttcttgccatacacgattacttttcacgcaagctttgccccgctgtggcttgctaggccacgggagtaacaaaatggtcatgtgtgcttgtgacgaggttagacctcattttgattagaccgcagataattgggttt

SEQ ID NO: 389209 - DNA, 873 bp, Oryza sativa
  unsure (1)..(873): unsure at all n locations
aaaccatcaacaacccacacagggtcagccagtgcaatctagtaaccctggtgccccaaatgccattattccatcaaacattaatacaattccccagcaggctacttcacctgcagttcctttaacctgcaattggactgaacatacgtctcctgaaggttttaaatactactacaatagcataactcgagagagtaagtgggataagcctgaagagtatgtgctgtatgagcaacagcaacagcagcagcaacagcagaaactacttttgcttcaacagcaccaacaaaaacttgccatgcagcaacttcagtcaccacctcaggctcagacacatccagcaatgcaacctgtccaacaaattcctcaggcacaacaaggacagcaacaaatgcagatgaaacagcaggaattgaattatactcagctacagactcctggtgctattgatcccagtaggatacaacagggcatccaatctgcacaagaacgtgcttggaaaagttgagactgaaggtgaatgataaattggtaagctgttactcggaaatgagctccactcaacctgctgcctccatcaaatgccttgacggtgcctgatgcctgagtggtggccaagcggccatgccgatcgttgtaactctggatatagcttagattgatgtctaaaaagttgtagctccaatccgtgtaaaatggttgcagtctaggccttgtaccgctgtaacatttctgctgattagaatgttcgctttccttgcataggcaactgccagaggttcgtcgctagtatgattttgggcatttcatgacatgtccccngcaatcatcatttagattgtttcctccnnnnnnnnnnnnnnnnnnnnnnnn

SEQ ID NO: 389210 - DNA, 728 bp, Oryza sativa
  unsure (1)..(728): unsure at all n locations
ataagcagcagccattcgggtntctttttcttcttgtcattaattaattattaacgcggctaaggaaataaataaagtttagtagcactatatatgtaggagtatatatagctaggagatagagagtccagcgttaaataaactgaggagagcttggatttctcatctccattatcttgcattcttgttcttggtttgcatctcttcttgctctttggaggatttactactattgagtagtagtgatcatgagctaccaaggtcctcctcccggcactgcagcgtacccgccaccggggacggggtacccaccgccggcgtacggcgcgccgccgccagtcgccgccgactacggcgggtatcagcagcagcagccgccgccgccgccgcaggactcgcagagccgcggcgacggcttcttgaaaggatgttgtgctgctctctgctgctgctgcctgctcgacatgtgcttctgatgagaagatggcatcaaggatgatgtgatactctacttatagagcagcttgtgatcgtcttttcacatcatttgtgctgtgtcatgatcgagattttttaagtatgtggtgagatgtgtgcatctagtattatgtagttactgttcttggatcatttggatttcatgtgttgtcaaattcaaaaggggatcccatttggatcattcatcggaatctgggacacttctggttatcaatgatttccaatttagt

SEQ ID NO: 389211 - DNA, 573 bp, Oryza sativa
ccacgcgtccgcgatagatcgatggatcgatctgccaaatttccccgaggaaatttctgctacctccctaggcacacatacatacatataataataaccatatacatcaaattaatgatgtgttacttacagatgatttatatatattagctcatcgatctctcctgatgcaggcaaagggatccaccacaagcggcgcgcggcagccggccggtcgatcgataaccattatatatattcatttggaatgattactaatgctgcaggtcaatatatatcaagatgctgtgttatatttggtgaatatattgcgagttcttcgtcagggagagacggacaatcaaattgtcgtctcgtcttttcgatcaaagtggaggtgctggtggatcatagttaaattcgcaagtctgcgcattcatgaatgcctgaaaaatcgaaaagaggaaatatttattatcttagaatgttatatgcatgtaaatttggatgttgtgattatctcggcatcttataagagtggataaaaaatatttatatacagtacagtacatgttgcttggctatttgtggatt

SEQ ID NO: 389212 - DNA, 713 bp, Oryza sativa
  unsure (1)..(713): unsure at all n locations
ggcctccgacttcggcgccctcggggtaccctggtgcagatcaaaaactggaaagatagtggagtggacttcaaaggatctacttcgtggactggaagaatttgtaccaatatatgaaacacgacctatcaagaacaacatgtatggaatgggctttgaccacagttttggcctttggtttgtggctcgctggcttaagccagatctgatgattgagagtggtgcattcaaggggcactctacatgggttttgcgtcaggccatgccaaatactaagattatatcactctcacccagacaccctgagaaatatctgaagaaggggcctgcatatgttgatgggaactgcacttatcttgctgggaaggattttattgacttcggaagtgttgattgggggaagctattgaggaatcatggcatttctgatctcagcagagtgcttgttttctttgatgatcaccaaagttaaaacaggcttcaatagttggattccgacatatcatatttgaggacaattatgacactggtacaggcgatcattactccttaagacagatctgcgatcaggaacacatcagaggtggtggacatagctgcttttgggatagtgacgaagcaagattaaggtcgagacgaaagagtttttgggagaaactgtgggaaacaaaatgagccttttgggaaangatgatgcatggttggggagttaa

SEQ ID NO: 389213 - DNA, 1221 bp, Oryza sativa
gtttgcaccatcgtcgtcaagcccgccgagcccgcgcccctctccgctctgtactacgctcacctcgccaagctggctggagttccggatggagtgatcaacgtcgtcccgggattcgggccgacagccggtgcggcactctcctcccacatggacgtcgacagtgttgctttcactggctctgctgaaatcggccgtgccatcatggagtcggcggcgcggagcaacctgaagaatgtgtctcttgagctcggcggcaagtctccgatgatagtcttcgacgacgccgatgtcgacatggctgtcagtctgtcatcccttgcagttttcttcaacaagggagagatttgcgtggccgggtcacgcgtctatgtccaagaagggatctacgatgagtttgtgaagaaggccgtggaggctgccaagaactggaaagttggagacccttttgatgctgccaccaatatgggtcctcaggttgacaaggtccaatttgagagggttctcaagtacattgagatcggcaagaacgagggagcaaccctactcacaggtggcaaacccactggtgacaaaggatactacattgagcctaccatatttgtggatgtcaaggaggaaatgacgattgcgcaagaggagatcttcggcccggtgatgtccctcatgaagttcaagacggtggaggaggcgatagagaaggccaactgcaccaagtacgggctggctgccggcattgtgaccaagaacctcaacattgccaacatggtgtcgaggtcagtgcgggccggcacggtgtgggtgaactgctacttcgccttcgaccccgacgcgccgttcggcgggtacaagatgagcgggttcggccgggaccaagggatggtcgccatggacaagtacctgcaggtcaagaccgtcatcaccgccgtcccggactcgccctggtactgataaatcaaatcaagcagcagctatagctagagtgtaccatgtaccatgaatgctgcagcctgtgtagtgttttcggatgtttttctccttaattctgctgctgcttggtgtggttgtatgtagtttggttgtggggtgagatatggtgcagattaaaaggggttctgatgatcatgatctgatccttgtttggttgaacttgttgagaaatggatgtatagaactcatgtgccatcgtttgaaatcgtacaaaatgtgcctcaaagttca

SEQ ID NO: 389214 - DNA, 637 bp, Oryza sativa
ccacgcgtccggtgatgaatgatagaggttttatctctcgagtgctctgccccaaatttggaggataccttacttttggctctcttgaaaaaggaaaagaatctgcgcctgctcagcccacagtaacagacttgattaatgtgtacaatattaaacagattggtccagatactaaggtgtatggtattatcggaaaacctgttggccacagtaaaagcccaattttgcataatgaagctttcagatcagtgggtctcaatgctgtatatgtgccctttttggtggacgacctggctaactttcttaatacatactcttcaccagagtttgctggttttagttgcacaattccccataaggaagctgctgttaggtgctgtgatgaagttgatcctatcgccaaggacattggagctgtcaatacaatcatcagaaaacctaatggaaaacttgtaggctacaatactgactatgttggtgcaatttctgctattgaggatggaataagagcttcgcaaccaacggatactaccacttcaccattggctgggaggctttttgttgttattggagctggtggtgcagggaaagcactagcttatggtgcaaaagagaagggagcacgagttgtaatagc

SEQ ID NO: 389215 - DNA, 477 bp, Oryza sativa
caacaaagcatcgttcaattcagttcacaaatcacaacaacaacagcgcgagaaatttaaagaggagatcatcggatcaatctcatcaatggcgggtgcagcgaaggcgtcgtggatggtggcgatgagcgtgggcgccgtggagggttcaaggaccagggcggactctgccgctggaactacgcgctgcggtccatccacaaggcagccaaggccaacgccgccgggtcttcgcagggcaagaagctgcctgcctccgcggcggcggtggcggagaggaggagagcggagaaggccgaggaggggttgaggacggtcatgtacatcagctgctggagtactaattagtgtataaactcgagatactagtacgtagcttagagctgaaagtagcaaaccattggctttgagattttggccggttgtttcctttgattgtgtatatatatcaagatgatgatgaaattttttgttact

SEQ ID NO: 389216 - DNA, 523 bp, Oryza sativa
ccacgcgtccgcaatagttcactgcaaaccaaaagaagaaatcacaaacaatccggtccaattctcagcaagaaagaagagatcgatccaatggcgggtgcagcgaaggcgtcttggatggtggcgatgagcgtgggcgcagtggaggcgctcaaggaccagggcggactctgccgctggaactacgcgctgcggtccatccacaaggcggccaaggccaacgccgccggcgtcttcgcagggcaagaagctgcctgcctccgcggcggcggtagcggagaggaggagagcggagaaggccgaggaggggttgaggacggtcatgtacatcagctgctggagcaccaattagtatagctctgtctactatagctagctaatagtagtaggatagagtcgggtttggaaggggcaagcatggctgagacttgccggttgcttgttgaattcctcctgattgtatataccacgaagatgatgatgatgaaaacttctgttacttgagtaaaaaaaaaaaaaaaaa

SEQ ID NO: 389217 - DNA, 644 bp, Oryza sativa
  unsure (1)..(644): unsure at all n locations
cagcatcaacccactacagtacaacgagtccactgcaagcgaggaaaatttccacagatcaccagtgaatcaagtcatcaaccttcaatggcgggtgcagcgaaggcgtcgtggatggtggcgatgagcgtgggcgccgtggaggcgcttcaaggaccagggcggactctgccgctggaactacgcgctgcggtccatccacaaggcggccaaggccaacgccgccggcgtctgcgcagggcaagaagctgccagcttctgcggcggcggtggcggagaggaggagagcggagaaggccgaggaggggttgaggacagtcatgtacctcagctgctggggtcccaattagctaggccattagtgttagctcggatggatctcgatctgctctgctgggtgtccgtttgacggtagcagccatggccggagacgtaattggccggttgctcccagctgatcgtaatatatcacgatgatgatgaaaaattctgctacttgagtacaattgcttcatgggtcattttgcctttgtgattgtgtcgtctagaacaatttatgaactgaccacttttacggtcatgcacgcaaaaatccggccgtgtcatcaatttaagatccaaactttctggggaaaaaaaaaaan

SEQ ID NO: 389218 - DNA, 428 bp, Oryza sativa
tcgacccacgcgtccgcccacgcgtccgcaatcaccaatcacctatcagtagtacttcactgctcgctactagtcccctgaattcagcgatcagtataacagcgggaagctcaagaagagatcgtcgatcgatggcgggtgcagcgaaggcgtcgtggatggtggcgatgagcgtgggcgcggtggaggcgctcaaggaccaggcggggctctgccgctggaactacgcgctgcggtccatccaccgcgccgccaaggccaacgcgcgcgccggcgtctcgcggggcaagaagctgcctgcctccgcggcggcggtggcggagaggaggagagcggagaaggccgaggaagggttgaggacggtcatgtacatcagcttctggagtaccaattagtatagctgtgccttctactcttctactactagc

SEQ ID NO: 389219 - DNA, 774 bp, Oryza sativa
  unsure (1)..(774): unsure at all n locations
gttctttatacatctcttcctgtacttgtccaaggaaggaactggnatgttggtatacagtacctggagacatggaatatctttatctactctgtatagaaggagcatgctttgtgcaggctactcacttttgatagttggggatcgaaaaggagcggttttcggtgggttggttgaggccccattgcaaccattaataaaaaagaagtatcaggggaccaacaactgctttgtgttcaccaatatagctggccgtcctgttatatatcgtccaacaggtgctaataactatttcacattttgctccaccgattatttggcaatgggaggtggtggtcactttgcactttatcttgatggagaccttctgaatggttcaagttccacttcagagacatttaacaacccgtgcttatcacgttcccgggagtttgaagtcaaagatgtcgagctatggggcttcgtcaatgcttccaagtatgatgagatgctcactatctgccgtactgagaagcaagggatctggaatctgtgactgtctgtttacaattgatctgagctgtttagtgcttgtacctgatgccaacccatcctggtggtttgtacagttttgtagttctgtctgttaagtatagtatatataggccttgttggagttctgtctgtatggatagtaaaatgccccttgtaaaacaagttcatcaacggagttatggagcttaaaatgagtaactctgnnnnnnnnnnnnnnnnnnnnnnnnnnnnnnnnnnnnn

SEQ ID NO: 389220 - DNA, 760 bp, Oryza sativa
  unsure (1)..(760): unsure at all n locations
ccacgcgtccgcgacgtcctcggcctccacgcgggggccagcgcgcgggagatcaaggacgcgtaccgccgcctggcacgcgccgtccacccggacgcctccccgcaccccgccgccgcgtcctccgacgacttcatccgcgtccacgccgcctactccaccctctccgaccccgacaagcgcgccgactacgaccgccgcctcctcctcctcgccgccgggcgccgccgcgccaccccgtccctcggccgctcgccgacgttccccgcgcgccgccgccgcacgtgggagaccgaccagtgctggtgaggtgaacaaccacccgcccgtgttccgacgagctacacagaagcgtccaattcgttgggagacgcaaagattccggcagccactaggcacgcacactagcttagcttggggcagcgcactacgcttctagaagaaatggccctttactggtctttcacgtctcgttgtgaacttgtaaaaggaaaatgtatggtgcgcgtgacgttcgtctagcttggaagtgtccgcacgtatgacctggtgcgcggtgcttgatagcataggttaacttatactagtccggagataaggctgagagccacaacaataatggagcagagaccaggaagatagtgatttgtatgtctccttgcatactcttcttcttcttcagtgtgtggtgaatgcagatggtgtgggcagtttgtggnnnnnnnnnnnnnnnnnnnnnnnnnnnnnnnnnnnnnnnnnn

SEQ ID NO: 389221 - DNA, 512 bp, Oryza sativa
ccacgcgtccgcggacgcgtgggaaaaaaaaccctaatccatccactccaaatcgccacgcaggaagggaggaaaggaccaccagccaccgcgcgcgcccaaatcgtcgcagctgcttccccgaggagaagaacatgagtcgccacccgagcactaagtgggcgcagaggtccgacaaggtgttcttgacgatcgagctgcccgatgccagggatgtgaagctcaacctgaagcctgagggccagttcatcttctcggcgaagggccctgccgacgacaccccttatgagcttgatcttgagctctttgatgctgtgaatgttgaggagagcaaggcagctgttgcggcaaggtccatatgctatcttatcaagaaagcagagagcaagtggtggcctaggctgctgaagaaggaaggcaagccacctgtgttcctcaaggttgattgggataagtggcaagatgaggatgatgaagacattgggcttggtgacttcggtgatatggacttc

SEQ ID NO: 389222 - DNA, 451 bp, Oryza sativa
ccacgcgtccggattacactggaaccaggaaagtgaagtttgtggagggttcaagttctggaagccatggggctggctcgggctcactacagagatttgctgtgtcaagatctggccccctatcctgcaaataagatcatgttaacaagtaacaacagcattctactggcaatcatagtttgccagcatcagtatctagcaatttgtatttgagtggactccagtcaatgctcccattcgtctttgtagagcatctgagcatatatgttatttagctcctttgcgtgaagtaatatgtattctagctgtatttacgtacctagtgctcttgtaagtctatatgtatggtacctattgctcttgtaagtaaaccctcctctgttgctccatgaattagcaatgtgctagttgtatgtctgttaatgtaaatggattgtataattgccttctc

SEQ ID NO: 389223 - DNA, 557 bp, Oryza sativa
ccacgcgtccggctgaatctgaagtcctctccaaatacccaacctcaggtgttgtactgaggcctggtttcatttatggtaaaaggaaagtagatggttttgagataccactcgatgttgtaggacaaccattagaaaagctactttcctctgttgaaaatttcacaaaaccgctgagttcattgccagcttctgacttactccttgcacccccagtgagtgtggatgatgttgcctatgctgtgatcaatggagttatagatgacagcttctttggtgtcttcacgattgagcaaatcaaggaagccgcggcgaaagtaagagtgtaaactgggagtctttattgccaagatggaagattcccacatgcggctccttattaagagatatccctgttctgtcttgcactcttgcagtcttagatcatacattcaatggttaaagttaaattcaaaactttgtacagtgtatgaatgtggtgcttgttccctccaagcagagaggaagaatgggctttgatggcaaaggccaatgcgcttcatttcttacgaaaaaaa

SEQ ID NO: 389224 - DNA, 487 bp, Oryza sativa
ccacgcgtccgagagaaggaagcagagatctcccagttcttcgcaacccgcactaagcccgggtttaagagggcactaaagcagagcctggagaatgtgcggatcagcgcaaggtgggttgatggcatcaggggtgaagctgagcttgctcagactgtgcatgatcttctcatcaaactctgatttgatgcctccagaatttgatgcatttgctgtgatgccaactttcgccaaagcatacattgtcatagcagctcattgtgagaaaaacatgtaggagtatgccgtcagcttgagttcaaataattcctcctggatgcaaggttttcttaccatttattctttatcaataatggatgctaagtctttccttagtatcccacatgcttctttttttttttttgagaaaatcccacatgcttctttcaacatagcagctcattgttgccctgtttatgaagtcataattcaagaagtgtcgttatgt

SEQ ID NO: 389225 - DNA, 1151 bp, Oryza sativa
gcttcgctcttgaatagccttggactccaccgcggtggcggccgctctaaactagtggatcccccgggctgcaggaattcggcacgagattccaacttgcttcatcttcatctttcccacctccatcacctcaccaacagcaccagcgcaggtcgctgtctccgaaatatcatttcgtttttaattatcttttcctccccttcgctaatcaccatgatttgcctccgagccgccttccccttgacctcctcccctctccgccgcctcgccctcaagccctcctcctcccgcgccgccgccgccgccatgtcgtccgccatcgccgcgccggtcgagcacatcgtgctcatcaaggtccgcccggaggcggcgtcgtcgggcgccgccgcggcgatggtgtcatcgctgcaggcgctgtccacggcggtgcccgggctgtcgtacatccacgtcggccccgtgctccgcctccggtcgccggcggcggaggcgctgggtccgacccacgtcctccactcccgctacgccaccaagcccgacctggcggcgtacgcggcgcacccggcgcacgtcgccgccgtgcaggggcacgtcctccccaacgcgctcgactccaccgccatcgactgggtcaacgccgccctggtgccgtccccggtgaacccgggctccgccgtgcggctctccctggcgaagttgaaggagggtgtggaggcgcaccagctcgcggagaagctcgccgcggcgacggcggcggccgggcgaggcgaagggcgccaaggtgagcttcggggagaactttctcccccgcgcgggccaaggggtaccagttcgggatggtggcggtgttcgacagcgtggaggggctcgacgcggtggacggggacgggaaggtgcaggcggccaaggccgcggtcaggccgctgctcgacgacgtgctcgtgctggacttcgtcgtcggacctgccgccgcggaggctccggcgccggccaacctctgagaggtttgccttcggttcggaaactcttagttgccttgttcgaatcggtcgagaataatgcaatccttgtgattgggtgtgctgctgctgctgtggcgtgtgattggcaatggcaattgattttggaatgaataagaattgtacctgact

SEQ ID NO: 389226 - DNA, 475 bp, Oryza sativa
caaactcgcaagaggaaaaaaagaccattcgcgtcgcgtgcgtattctttgcttccgctctcgatagatcgcgaggaaaggagtagtacggcggcggcggcggcatcgtcggcggcgatgaggtcggccatgacccgcctgatccgttcctcgtcccccgtagtctcgccctcccgtctcagcgccgcaaacttgttaaagaacaataatgggaaggctttcttgagcgaggatgcttccaagcgtgtggaggagcctttcaaggtggaggaagcagaaaccgtgaaggtgccaccgccttccccggacaagcttcttgtgctaggtggaaatggttttgttggttcacatgtttgcaaggaggctttggacaaaggatttactgttgctagtcttaatagatctggaaagccatcaataagtgaatcttgggctgacaaagttatatggaacaaaggcaatctacttgaacctg

SEQ ID NO: 389227 - DNA, 514 bp, Oryza sativa
  unsure (1)..(514): unsure at all n locations
ggcacctgttgcgtcagactgaagccatttctggaagggctgcttatgcaaggtttagaacgtttcgcgacgtttgcgaaggaacgatatagcaagatccctcaaccttgacgggaatcaatcatttgcattcgaatactcatttctaaggattttagtctcattcaagagaagcccagcgaaggtcacaatcgatgtaaagaccagtagaccacctaatgccaccctagatgcagtggaaaattcatccaaagggaattacaagagttgactgctatgagaaataaaactgaaataaaagaatcatattgttgaccattctttttggtcattataatcaatgaaatgtaccagcattgaacatgaaactttgatagtatggcaaagccaattcatcctttgtctgagacaaattgcgctgagtcctctttgcaatataaatgcatgtttgcaggacagttctcgcnnnnnnnnnnnnnnnnnnnnnnnnnnnnnnnnnnnnnnnnnnnnnnnn

SEQ ID NO: 389228 - DNA, 717 bp, Oryza sativa
  unsure (1)..(717): unsure at all n locations
ccacgcgtccgcggacgcgtgggcggacgcgtgggccaacgcgagctcgacgaagccaaggagaggaggagagagagagagggagagagggaggagtgagaccgacgcgaaggcctccgcccccccgaatccggccaccgccattccgctagatcgttggcgcctcagcttcccttcctcccgcggtttcttttgttggagggatttctcgaggcatgcagagccagatcgtgtgccatgggtgcaggaacattctgctctacccgagaggggcaccgagcgtttgctgcgcggtgtgccatgccgtgtccagcacagcaccgtctccaggaatggatatagctcatcttatatgtggtggatgccgaactttattgatgtatactcgcaatgcgacatctgttagatggtcgtgctgcgatacagtcaatcttgtcagaccagtgagtagtatagctcacttgaactgtgggccagtgccagacantgttgatgtatccatacggagcaccttctgtcaagtgtgctanctgcaattttaatacaaatactgggatgatacaatgagacatttgccaccaaatgggaacttcatataangccccatcaaactctgcttccaaacaattcaaattcacagaatgttanngttgttgttggaaaatcctatggacgggtagatgcaaaaggggaaaagttgggtgaggcaaacggttg

SEQ ID NO: 389229 - DNA, 846 bp, Oryza sativa
ccacgcgtccgcccacgcgtccgcccacgcgtccgcccacgcgtccgcccacgcgtccgcccacgcgtccgcacaaggtggacttccgcgaggggaaggggctggagaagctggacgagctgctccccgaggaggcggcggcggggcgcgaggcggcgttcgacttcgcgttcgtggacgcggacaagcccaactacgtcaagtaccacgagcagctgctgcagctggtgcgcgtcggcgggcacatcgtgtacgacaacacgctgtgggccggcacggtggcgctgccgccggacacgccgctgtcggacctggaccggaggttctccgtcgccatcagggacctcaactccaggctcgccgccgacccgcgcatcgacgtctgccagctcgccatcgccgacggcatcaccatctgccgccgcctcgtgtgaggtcgagaccgagaccttaccggccgatccatccatcgctctcgcgtgattaattaacgtgtgttgctgtactcttctactgctacaactatactattacttccttaattgccgcttaaattttcctatacgtgtttcaatcaatgagattattatattcttcgagcatgagagagacggagttgtagggacatttgatgatggttgttactgtactacatgttgataagtgcaacatctctttccatggttgctactctaaaaaacgtgtcatgttggttgcggattttgatctcatctgcaagatggactactggggcccaaaatggaacagactggtccctcgatcctgcaggagcttgcacctgttgcaagggcctttttaactggctaactaggtgggtaagtaggg

SEQ ID NO: 389230 - DNA, 878 bp, Oryza sativa
cccacgcgtccgaaccaatcgactcgcaccaccaccagcagctcaagcagcaacagctcaaacggaggaagatctcatcgccatgacgaccggcaatggcgacgcaccggtgatcaagaacgcccacagcgacatcgacagcaccaacaagacgctgctcaagagcgacgccctgtacaagtatgtcctggacacgacggtgctgccacgggagccggagtgcatgcgcgatctgcgcctcatcacggacaagcaccagtgggggttcatgcagtcgtcggcggatgaggcgcagttgctggggatgctgctgaagatggccggagcgaagaggacaatcgaggtgggtgtcttcaccggctactcgctgctggcgacggcgctggcgctgccggaggacgggaaggtggtggcgatcgacccggacagggagagctacgagatcgggcggccgttcttggagaaggccggggtggcgcacaaggtggacttccgcgaggggaaggggctggagaagctggacgagctgctcgccgaggaggcggcggcggggcgcgaggcggcgttcgacttcgcgttcgtggacgcggacaagcccaactacgtcaagtaccacgagcagctgctgcagctggtgcgcgtcggcgggcacatcgtgtacgacaacacgctgtgggccggcacgggtggcgctgccgccggacacgccgtgtcggcctggaccggagtctccgtcgcatcaggactaactcaggctgcgcgacccggctgcgttgcagtgcatgcacgatacatgcgcgctgggagcagacaactacgcgactcatgttggtgtatacgggtgtgcttcactgtcacatcatactctatgcgtaatt

SEQ ID NO: 389231 - DNA, 525 bp, Oryza sativa
ccacgcacccacgcgtgggggaacgcgtgggcacgtgtcttacacggactcgcacggtttggggaccttgcctgtgtcgccgccgtgcgcacacaagccttgcagctcatatcattcggcgatgctatctcttcctccagccgcgctccggagcgcctcttccgagtggtggacatgtacgaggctgtgcgggaccttctccctgaccttgatcctgtgttcgccgacccgtactctgctgcgctccgtgcagaggtcacggcggtgtgcaacaccctcggctcatcgatcaaaggcatattcatggagttagaaaatctcatccgccgtgatcctgctcgagttgcagcccaaggtggaggcatacatcccatcactccgtatgtcatgaactatctccgtgctgcttgtgggtcgcggcagacattggaagaggtgatggaaggtgacttcggcgcttgtggtggagcggctgctgcagttgaccctgatcgtcccaactcgtcgcttgctgtgcacatagca

SEQ ID NO: 389232 - DNA, 754 bp, Oryza sativa
aagctgattcctcgactggaactgttgcaaaaggaaataatgcttcatctgcagaagtgtccaacaaggaatctgcaaggaatgataaggatgacgtcttctctgacagtgaagcagaagatggatcatccaagggcagaagggagaaggtctctaggaacgttgagggtactactaatgctgcaaaagcgtctgaaacaagctctgtgcaaaaggaggcgtctgctgctgcttccagaattgaaaaagtatcaataaccagcgaacaaggaagtgcaaggacacctgatgctgcacctctcaaaagtggagttagcagcaagagcagctccaccacagcaccaccaccacccccagcggctgctgactccagcatgagcgagttcaaggcaattgctgcagacgcttcggtcttctcgttcggagatgaagacgactatgaaagcgaataattcacacccttttgtgggcgcctggttcgccattgtatagtttggtgctttccagatcatgataggataccacctggaagcaacaggtagaaaagatgaaaagaattgctttgttctaccgttttatgtttcattgtagccctttttcaagctgtaatgttgtacaatggtgaactttgtaactccaaaaatgtcagaactttgttgatacttcgcttatttgtttacagagattctatacatggattcttacgaaacggattgattattgcgaaagggtacatgagctgtgtttagattct

SEQ ID NO: 389233 - DNA, 380 bp, Oryza sativa
ccacgcgtacgcccacgcgtccgcccacgcgtccgagataatcatggaatgcatccagagtgacccaacgaagagaccaggcatgagggagatcaccacaaggctgagagagaccatagccatttcgccggatgcagcaacgcccagattgtctaccgctctggtgggctgaagtggaggtcctctcaccagtggagccaaggtagaaacaatgataaatgtgcttctgaaaaaccaacatcctgcaggatgacgatcttgctgtgcatactgctgttcgtgcaacctttaccttgtgcaactccctgcccatgtttgatactgcccttgtgcaactctgctgcaaatgtcaaagatgagtactttctgtgtgtccgacc

SEQ ID NO: 389234 - DNA, 739 bp, Oryza sativa
ccacgcgtccggctagctatagctctagttctactctaattgcgcagtcgatcgaacgtacactgccaatcaaatcaactgcgagcttgcaatggagagaggagcgagctttgcagtggtgatggcggccatggcggtggttctggccaccacatcgacggcgcaggcccagaccacggcgaccgacatcgtcaacatccacaacgccgcccggagcgccgtcggcgtcccggcgctgtcgtgggacgacaacctggcggcgtacgcgcagggctacgccgcccaccccgccggcgactgcgcgctgcggcactccgatcgcaacaactatcagtacggcgagaacctgtcgtggaacccctccgtgcaggcgtggacggcggcgagctccgtcgaccagtgggtggcggagaagggctcctacgactacgccagcaacagctgcgtcggcggcgccatgtgcggccactacacgcaggtcgtgtggcgcgacaccaccgccgtcggatgcgccgccgtcgcctgcaacgccaaccgaggcgtcttcttcatctgcacctacttccccgccggcaacgtccaaaaccagaggccgtactagctaccgtatacgtatacgtatacgtacgtacgtaacgtatatgctatggaatatattttgctactactctagtatatattgtacgtataaatctttctgctctcagtagatatatatgcgcatatatgtacgaactac

SEQ ID NO: 389235 - DNA, 1235 bp, Oryza sativa
  unsure (1)..(1235): unsure at all n locations
cggtcccggggtcgacccacgcccccgccacagctacagttgctgcagcatcagcatggtgggcaacacaaggtcttctccctctttttcctccagctatagcttttccatttgttccagctcctagtgctcccttttccacagcagatgttcagcgagctcaagagaaagatatagactgcccaatggataatgcacagaaggaattgcaagaaactcggaaacaagataattttgaagctatgaaggtcatagtgtcttcagagactgatgagagtggaaaaggagaagtgtcgctccacactgagttaaagatatctccagcagataaggccgacaccaaacctgccgcaggagctgaaacaagtgacgtttttggaaataagaaaaagcaggatcgctcttcatgtggttccaacacaccgtcaagtagtgatatagaagcagataatgctcctgagaatcaagaaaaggctaacgacaaggcaaagcaagcatcttgcagtaactcttcagccggtgacaataaccaccgtagatttaggagcagtgcaagcacaagtgattcatggaaggaagtttctgaagagggtcgtctggcttttgatgcactgttcagtagagaaaggcttccccaaagcttttctcctccgcaagtagaaggatcaaaggagattagcaaggaggaagaagatgaagtaaccacggtgacggttgacctcaacaagaatgccgctattattgatcaagaactcgacacagcggatgagccaagagcttcctttcctaatgaattgtcaaacctgaagctgaaatctcgcaggaccggtttcaaaccatacaagaggtgctcagtggaagcgaaggagaacagggtaccggctagcgatgaggttggtaccaagaggattcgtcttgagagcgaagcatcgacatgatttgctttccacctggttgctggcctctaccaagtcagaagttaaatttacatccgagctaccataggacttcagaccttccaatgcattacctcacaaactcaatttattgtgtgttgtatcttaatgcttgccaagcagctcctatagactgcttttaaaccgtatctcatagacttttgattagcatttaagcgactgctaaactttcttcataaaagggtnttatccttnttatgcattatagtctggggaaggttataagtggnattttggttcaaaaaaaaaaaaaaaaaa

SEQ ID NO: 389236 - DNA, 696 bp, Oryza sativa
ggtggcgcctccgcctccacggccactataagagcgcggcggcggcggcggcgggggcggggggccatggcggggaagaaggaggaggaggaggctgttgtgtacaggggcgacaagctgatcctgcgggggctgcggttccatggcacccacggggtgaagccagaggagaagaagctgggccagaagttcgtcatcgacgtcgacgcctggatggatctcgccgccgccggggactccgacgacatctccgacaccgtcagctacaccgaaatctacaggatagccaagaatgtagtcgaaggcccgtcgcacaatctgttggaatcggtggctcagtcgattgcaaactcaaccctgctcaagttccctcagatttctgcagttcgagtgaaggttgagaaacctcatgttgctgttcagggagtcctcgactatttgggcgtggagatattcaggcagagaaaagcatgaacaacacctatacttgttcagaacctcattcgaacagatacgtacttagtgtacttgtcttatctttattgctcgttatcataccaatattattcactcagtatccatgtcaagaactagaaaattccctgtttaatttgcacgaagaggaatatatatgtaacgtagattgttgtggtactattaattaatactccctccgtttcaaaaaaaaaaaaaaaa

SEQ ID NO: 389237 - DNA, 709 bp, Oryza sativa
gcgagctgatccaggcctcatttatgacatcgatccaagcgattataacaagtttttccggtgcaccatcaagacatctgccagctgcaatgcaacaacgctacctgggtatcacctgaacctaccatcaatcgctcttcctgatctcagggatccaaccactgtatctagaacagtgacaaatgtaggcgaggttaatgcagtttaccacgctgaaatccagtgcccgcctggagttaaaatggttgttgagccatctgttcttgtcttcgatgctgcaaacaaagttcataccttcaaggttagtttttcacctctatggaaattgcaaggggactatacatttggcagccttacttggcacaatgaaaagaagtcggtgagaattccaatagcagtccggattaccattcaagatttctatgcagatgttgcataacctgggtccagggtgaaacatgcaggaaataacacagtgctcatagaaacaatagagtcttctacaggagataccaatttccacagaactacagaagtattggttttgtgtatttctttattaccagaatacaaaaatgttcaggtctatgtttgccaacttttgaaatatcatgtacctgcccctcccaaaaaaaaaagataaaaaaacaaaagaataaagaaaaaggatcatttgacagaaaaaaaaataaataaaaaggggcggccg

SEQ ID NO: 389238 - DNA, 676 bp, Oryza sativa
  unsure (1)..(676): unsure at all n locations
nngnnagcgaatnggggnnccatatctcagggagcctnggaattccccaactngaagagtctttctttgcaaatcccgttnccgggctgtatatgtgtgaaagcttaatgacgagtgaatatgtatatatttgacgatttctttaaccatctacgccacaggtcaggagttcaggatatatagtgcccctctgctccttgacagtgggtcagcagcaatatgcacaattatttagtcatgatcacttgaccagtgaattcgtgctgatgagagttcagagacgagacaccaattttcaggttcatcccacaaaagtttgctgcatgaagatcatcagatattgcaaatacgaaaaccatgtgagaagtctggcagctgctaatcaattttccagcagccagagcatgccatctgagaaggctggaacatcagagcaactgcaatcagtatacggaaggtaaataccgcggaggagattacacttacggctttgtattgccaatttgccatatcataggttttttggtgcacatggtgcttcccaatcttgctgttgctaagctgtattttgtgtagactcaatacaactgaattttgtcacttgtattttatctggatatattgaattaaacgaaagagattttgtctgaaaaaaaaaaaacaaannnnnnnnnnn

SEQ ID NO: 389239 - DNA, 612 bp, Oryza sativa
  unsure (1)..(612): unsure at all n locations
gcaggcgcagcatattagattataagactgtgcttaatacgattataactaatctgctacatttatctatctgtctgtccgcgccggcttcggcgccgcctcccctcgttttccgagagagagagagagagagaggcaggcggaaggggggatggacgactacgcgcgggagatgatggagctcaagacgctcgtcacccgcaccctcgagaagaagggcgtcctcgccaagatcagggctgagctaagagcaagtgtgttcgaggccatagaagaggaggatagggtagtggagaatgatgatggtgggaatcccgctttgcttggtagctgcaatgaccgagctaagcagctgcatgcttcaccatcaggtaggttattaacagcacttgtaagtgaatacttggagtgggcccagctaagtcacacgatgaaagtttatctgcctgaatgtaatctggccaaaggacttctggaagaatgaattaaaggatttttctaacaaaagcggagctgaagggagcaggagtgctgaaagtggtcccatgcttctagatgttcttgaaggatatctcaaatatgagaatttgtctcaaacaaggatggctggtn

SEQ ID NO: 389240 - DNA, 531 bp, Oryza sativa
cggacggggattgtggaaaggagattctgattgaactcattgcgaaaggtggaactgtcaagtctgtgatagaggagaaagatttggttcagatagcagatcctgcagcaattgaggcaatggtagatcaagtattagctgataatccaaagcaacttgagcagtatcggtccgggaaaactaaattgcaaggattttttgctggccaggtgatgaaagcatcaaagggtaaagctaatcctgttttgttgaacaaaatcctcggggagaaattgaaggccaatagttgagggggtttgtcgacaaacggagactcatgttgtagtccacgagtggacaatcgaactaaaccctgcaatttggggtctatttttcaatgatgaattctctgttagctccagtagttgtaaatgttactactttgtgggtagtttatttttcttcttttctgaaagaaaattttgtaaaagcagcataatttacataataaaaagatgaatatttatgcatccaaaaaaaaaaaaaaaaaaa

SEQ ID NO: 389241 - DNA, 1528 bp, Oryza sativa
  unsure (1)..(1528): unsure at all n locations
cagaaaaagaaaaaaaaaaccgaagcaccaaagaaaggctcagcttcttctcctcctccttcctcgaccgctcaaaccaccaacgctggcctttgcactcctcctgctcgggttcatcttccctgcaaatctttgagctctacgagtgccggatcgactgggttgcgagatttccatgaaaaaggcgcggttttgggacggtcctcgtgagcagagccgaccgcggtggtttccccaggggaggggtctcgctggcggcggggggttctgaatttttttgccccgctcttcccgttgttttggttcgtgtttttagccctcggattggtgctgagggggattttggaagacatgtcgaggttttgctgcttcggtgctggttgctccgagttctcggggccatgcatcaaccagctctggtaaagggaaaggtattcaaggccaagtgaaggtaagctatgggttttaccttgtaagagggatgacggatcatccaatggaggactatcatgtcgcggaacttgcagaagagaaagggaaacgaacttggtcttttcgctattttcgatggccatcctaaggagatactgttcctgcatacttgcagaagaacttatttgcaaacaattttgaattgaggaggagttttttgacacaaccagatagagcaatcataaaagcttatgaaaagacagaccaagcaatcctgtcacatactccagatttgggacaaggtggctccactgctgtaacagcaattcttttgaatggcaggaagttgtgggtcgcaaatgttggcgattcgcgagctgttcttttgaaaggtggtaggccaatacagatgtcgactgaccatgatccgaatgtcgagcgtagtgctattgaaaataggggtggctttgtttcaaacatgccaggagatgttccccgagtctgtggtcagttggctgtctccagagcttttggcgacaggaatctaaagtcactattgaagtcagagcctgatataaaagttgaagatatagattacactgctgagcttcttgtccttgcgagcgatggactttggaaggtaatgaacaatcaggaggtcgttgatgtggccaaaagattcaaggatccacaagcagctgccaagcaattaacagctgaggcattgaaaagagacagtaaagacgacatatcgtgcgttgttgttcggttcaggatgtaattggttgcaggcaactcgtgaaggtttggattgtcaccgaggcggaactgattatagagcaaatcataggttgcctgcgaagttagtggtgatccaaacaaataactcactgggatgttggttgtaaatgatgtgttggctccattatatgttcatatataaatgcgctagaagtatttgtttggcgattcaaaggtacatgtgtgaggctcatagctgtctaaatagctattatcttctgtaaataatggttgcagatatttggaagttcaccttgcttcattgtgtgngtnccnnnnnnnnnnnnnnnnnnnn

SEQ ID NO: 389242 - DNA, 965 bp, Oryza sativa
ccacgcgtccgcctccaccccggcctcaagcgcggccgcatcaccgccgacgaggagcgcctcatcctccacctccactcccagtggggcagccgctggtcccgcatcgcccgcagcctccccggccgcaccgacaacgagatcaagaacttctggcgaacccacatgcgcaagatcgcccaccacgccaagaagaagaccaattcaccatcgccggcgccgacgacctcctccggttccttgtcctcctcgctcaccacggcgacgacgacgatggcgacggctgcggcgctgcaagaaagcagcagctgcggcggcgacgacgaggccgtcgaccagctggtggcggcggccaccacgccggcgagccagctgctgacgatggactacaccatggaccagctctggaacgacatcgcggcggcggaagccgatacgagctgctacgacgcggcggcgatggcctcgccgccgtcgccggtctgggaattctgcaccgactactcgctgtggaggatcgacgacgaggagtactacaagaagatgctcgatgcctcgcaatagtactactcaaattgcaaacaagcaacgccttaattcaattgctgctcttagcttaattagctgacgatcgatcgacgacgactctcatcatctgatgaacgaactgcgaaatctatatttgcactgcatatccttgcatctgtctactgtaattacacctgatgatgcacgtattatgcattgcttgtcagacaactctgctttatatatatctagctatagcttgatcaatcagcatgcctagcttgtgtacatgtaggggagagagtattagtagttaagactgatgggatcaagtgctatatgtatattgctttaatttcatggtatatgtactatgattgtactatgtgtcatatattcagtgtaagcagtggtttgccattaaaaaaaaaaaaaaa

SEQ ID NO: 389243 - DNA, 567 bp, Oryza sativa
  unsure (1)..(567): unsure at all n locations
agctatctacttgaagattaacaacaaaattcctggtcttggtatgagactagatagaagtaatttgaatcttccctatgcagcaaggtactccaaggagataccagatgcttatgagaggctcttacttgatgccattgaaggagagcgaaggctttttatccgttctgatgagttggatgccgcatgggagctcttcactcccttactcaaggagctggaagagaagcggatagcccctgagctatacccttatggaagccgcggtcctgtaggggctcactaccttgcagcaaagtacaacgtcagatggggtgatttgaccacagaacagaaggcatgagacagatgatatctattttcgctccttttttttcttttgccattgcatttctgtaagattgcatgctcagttagtgggacagatggaaaataaggcaatcagttagcttaggttgcaaggcctgtaaccattagactataaatagctttgtggtatattcactattgggtagaattttgggcttcctggaaggcaaatataaggtcgcgaagtctttattttcn

SEQ ID NO: 389244 - DNA, 980 bp, Oryza sativa
  unsure (1)..(980): unsure at all n locations
ccacgcgtccggcagagtggtgggcagcagcaggcatatgattattctagttattatcagacccaagggcagcagcagggctactctcagcagactggatatgatcagcagggctatggaacttctggctatgggtccgccgctaattcaactcaggatgggtccgcaccaagctatggtgctcaaggtgtagctggtcaagcatctcctgggcagcaaacttcaactcctgctgctggaagccaccctggctattcaagccaaccacctactagcgctgcttcaagctacccggngcaagggtctgctcctcagtctggatatggggcgccaccaccacagactggctatgggacccagccccaaccacagggagggtatagtcagggcagctatggcgcacctccgcagggacagaaggctcctcctaacacttctccttacggacaggcgccgcctcctggatctgctcctggtgggtatggccagtatggttactctcagaaccagcaaggctatggcgcacctccgccttaccctggtgcacctgctgcaagccacccaggctatggtcagcagcagtcatacggtgatccttatggcagtggaagctacgtgcagcccgccgcttattctactgaagctacaactgccgctgcctcccaggaccaatctgcttctgcccctgcgaccggggctgcgcctgcgacaaccgctgttccggcacctactgctcctgagaacagtggagcccaaagtcctgctagttaaacctgcacctcaagctttaagcttcttttagagaggggtttccggatttatgtgttgaaattgttttttgtggctccttaatgttgacttgttttaaatatagactgttattattgtttagtattgcgttatgccatgttactttaaaaacacaaacaaaaaaaaaggaaggccgccaactaaaatgcaaccaaacgtacgcgtgcgtg

SEQ ID NO: 389245 - DNA, 1101 bp, Oryza sativa
gtcaaccaagacgccatgatcgtctgggagaatttctgttcaagagaggataccattttttgtggtgtttttgatggccatggaccaaacggccatttggttgctaagagggtgagagatcttctgcccattaagcttggtgcggatttggggacggatgaaggacgacagacatccactagcagcatcaaaagcaatggagatgaaacaggatcccctggaaacatgggcagagatgctgagcagaacggagagtacccagagatcttcacagcattgagaacttcatttttgagggcgttcaatgtcatggatagagatctcaagttacataaaagtatagattgttttttcagtggaacaacagcagtggcagtgctcaagcagggacggaatcttataattggtaacctcggggacttcgcgggccatcttaggcacacgagataaagatattcagcttatggctgtccaattgacagttgatctcaaacctaacattccaagtgaagcacagcgaatcaggcaacgcaggggcaggatatttgcacttcctgaggagccagaggttgctcgtgtttggcttccgaagtacaactcccctggactggccatggctagggcatttggagacttctgtctcaaggattatggtctaatctctatgcctgaagtctcgtaccaccgtatcacagaaaaggatgagtttgttgtattggctactgatggggtttgggatgtgctgtcaaacaactgaagttgttagtattgtcaacagagctacttctcgggcctctgcagcacgattgctagtcgaatcagctcaccgtgcctggcgtgcacgtttccccacttctaaaattgatgattgtgctgtggtctgcctattcctggatacagacgaattaagtgaaacatccagttctatggcccgcgatatgacaaatgctgtagaagttagcagtgggcagcactccaatactatccaattgagcactggagtatcttcagatgttgttactgcagttctaacaaatggtgatgatctgtctgctgtggatcagttgcaaagctggtactctcacgatttgccaacaatgc

SEQ ID NO: 389246 - DNA, 449 bp, Oryza sativa
ccacgcgtccgcccacgcgtccggccggccgccacctatgcctccacctccgccgacgcctccccccgcctcccggccgccaacgccaccgatgcctccctcacctccaccaccgaccgcgctagccgccggatccgacctccacgaggccggggatgcgcagataccgcctcctccatccccacccaccggacacctcgcagcagtggagtgcctcttcgagaccctccgctgcctccccggtggctgcgagcgcggcgcctccacctgcatctcctgtagctggttcatcatggaggacgacgaactgtcagccagtgtgccccttttgtgaatgatatgatattgttgtatgataaattcttgccatcccctttgtgaatgattgctatatgagatggtgatgcggtgatggaggataatgaactgttggtcagtttgaagtttta

SEQ ID NO: 389247 - DNA, 676 bp, Oryza sativa
  unsure (1)..(676): unsure at all n locations
ccacgcgtccgattcgaagcattctgtatggttttgttgccttcttttcaacatgcaacaggcatcggcttagcggttacaaccacattcaagtgtttctccgacgcctatctcgtgttttaactggtgcacagcataccacctcttgtgaaggcacacggaggtattctagtcaaaatcatcctcaaaggaaaactcacacgagataacagtgggcctggcaacttgacttgccaggtaacaacctcattcagggagcctatgccgcgggataaatagagatcagcccagtcgtgagctgaaaaaagtgtgtacaggaaacatttactaacacagagtcatacccggtcgactggacagaccttccaaaacaacttgcttggaattggaagagtcatgtacaggtttataccgaatgtttcatcacatagctttaatcatgtatcctatctgtaccagcgggcaagtagtgaaacaaaacgccgcaattgtacatacgcagaatctgttgtttgttcattctaatggcttgtatagcagcctagtaggtttgtgcatatcctcccgaaatgttcctctgaacaacaattttgtaattacatccgagtattagctaaatagctaagcatcaatttccataacacggttgncntaaanaaaaanaaaanaanaaaaa

SEQ ID NO: 389248 - DNA, 773 bp, Oryza sativa
  unsure (1)..(773): unsure at all n locations
cgccaagcantttggctggtatnaagcttccaanaccttcttgataatctttncaaaacttcgncatgctcctagcgtccaattttnaagagcgacccccctgagnctgagctacctgagcaagatgacgaccaagaggatcctgatgaaagncaccatgctgattctgatgtgganatggatgatgtcaaacctttggatgactcaggaaggaggagcagtattcagaatgtgagagttaagagagagtctgctgaaacagatgccgcagatcaggatggtaatagggtcgctgcagagaacaccaagggcacagaacctgcggctgatggagttggttcctcgaaacaaactgttcctaccgatgcaagtgcgatggccatagacgaaccaggctccctgaaagtcgagccagataactcaaacaaattgcaagatcaaccatcggtgcaccagaagacataatagttctctctaccttaaaacttagtaactgatgccatctatcatccattgattatattggagaaactcccaactttgaagcagagagttcatgccataccaaaagttatataccaaatttcgaatggtatgtacacctttcgaactggtggtgttttgtgcaatacatttatgccaggctgactattatgtggtatctattattagctttagtttaaccctgtctgctgtcgagcaatcggtatagtcgtgcaatatattctggatccatcaagcaatgtgagacagatgtcaaaccattggttgtg

SEQ ID NO: 389249 - DNA, 807 bp, Oryza sativa
aagcgaagaaagagcgcgtccgcgtcgtcgtcgtcgtccgcctgcctgcctgcctacccacgtcgcgctcgcgtgcgcgctgccgcttagtcgcgccaaaaaggcggggggaggggaggcgcgtgcctgcccccgatcgcatatcgcattctccactcgcttgcgtttgccgttgcgtttgcgttttgcgtagcaagggaagggagagagctcgtgcttttggattggccgcgatgagctgcgggggcgccgggcagagcgggtggctgctcgagtacgggctggtggaggaggagatccagggctccgacttcatctacatggtcgacgaccccgcggccgtctccagcgtgctactgggcttcgacgttcccaggaaggaggacggcagcggcggccaggacaactctgcctccaagaaaagatctcgtccagaatcgagcgcaccgccgggcaccaaggcttgccgcgaaaagctccggcgagacaggctcaatgaaaggttcaacgagctcagcgcgatcttggagcccggcaagccgccgagggccgacaaggtctccatcctgagcgacgccgcccgtctcctgagccagctgcgcgccgaggcccagaagctcaagagctcgaacgagtcgctccaggactccatcaagagcctcaaggccgagaagtcggagctgcgtgacgagaagacgaggctcgaggccgagagggtgaggctggagcaaatgctcaagggcgtctgcgctattacactgtctgatttaagacttttcgtttagaacacttttttttttgtttctt

SEQ ID NO: 389250 - DNA, 842 bp, Oryza sativa
  unsure (1)..(842): unsure at all n locations
ngccatggcattaccgccatggcctaagcttgttgctgcacatacaccccaaaaaaaaataacctaagaaaacatcacctcctcttcttctccaccatggatgcccaaaaaaaaccacaaaaaagcttttcttggattcttggtggagaggggaggagagtgaggaggagagagattaagccctaaatttaaccctaaaaaaaactactactacataatcaatccatcatcccatccttccatataatcccacaagtataattgagagtttaggtaatttaccaagaaaaatctttttgtatgtaaataaatctcaggtgtcaaggtccttgatgtaaattctatggggggtttagaaaatttagagggaggagacagggacaaaaggggttcatcaaggagagcccttttggatttaatcaaaaaaaatttttctcttcatctgtccctgtaaactctctttgggatttagtagctaattgaattagtaggtgggaaggggggttgggattagttaggtatctgtccctagtttattctatcatgatgatgatgcttatttttggtttttgatggaattgttttttgtccatgcaaccaagaaatgcaaaggccatggagatatgtacaaaagagtggctacaagaagagagtaagagagcagcttagctttaggttcaatcagtgtgagggagacatgaatgatgtatctgtgaaatctttttctttcttttttgtatattgtaatatcttgttggatttccaatgaagcaatctgtataatatgctatgattatcaattatcatcaccactacttataaaaaaaaaaaaaaaannnnnn

SEQ ID NO: 389251 - DNA, 632 bp, Oryza sativa
ccacgcgtccgcccacgcgtccgcaggaatttgtggggaacaacctagaggagccggcccagatgtgacttcatgtcttgacggtttcgatgatctggaactgccattttgggaatcttcgagctctcaagatgctgcaggcacacaggtgacagacaatcaatgcgaaatgcaaaatttcattgtcaaccatcaatttttgcacgagccaattttaggggttaacttgggtggaacagcagcatcaaacacactggaatgtgagcatgatggtgcgttacaagcttgtcagtcgagtgatcaagatggtgaccagaatcaaacatgccatgatgggcactccggggatttgacaaatcttagtatcattagcactcacgatagtttaactaatggcaaaaatgcttctcagaaaaggacaaactgtgaagatggcacggcaggtttagacggcccagttgtcaggagcgcgaatggcttgagaggagagatgccaccacttgggcaggagcaggatcgtacagttagacaaaagttgatactaacaatcgagtcagactctgattagcagctgatgctatttgatgtatggtccctgctatagtgctatgccccccagatgcatgcaccat

SEQ ID NO: 389252 - DNA, 550 bp, Oryza sativa
  unsure (1)..(550): unsure at all n locations
tatntnttttttgacttcacgacaaacgagtgatggtcatgtttagtcaatatatggtaattacaacagagacaaaatggagcagcaagagcagcagaggagatgttatctctctctctctctctctctctctctctctctgtgtgttttcacctagaagaaaagctaaccaatatccaagtgacaaaacgaaagaagaaactacagaggaggaggtgctcatttcatttccaagcttctgaagtcgagcatggctgtcctgagtcccaggaagctgctgcacttgcagtctgtgctcttggggagccccaggctgcagctgaagcagacgccggtctccctcttcaccggcttcatcatcatgggctcttcttgggaagggaggctggatgcagaggtccagattgaggtcagggcacttgagtggcttcccatggccccaatcggcggctgcctgctgctcctgtgccactgtctancgttcggctgatgaggatggtcctctcgccggaacacggcggccttgtcgtccctctccgccgccgcggcc

SEQ ID NO: 389253 - DNA, 390 bp, Oryza sativa
  unsure (1)..(390): unsure at all n locations
nnnnnnnnnnnnnnnnnnnnnnnnnnnnnnnnacttacttagcatcaagtattatttgtcatgattagtcaatatatggtaattacaacagagacaaaatggagcagcaagagcagcagaggagatgttatctctctctctctctctctctctctctctctctgtgtgtgttcacctagaagagaagcttacctatatccgagtgacaaaacgaaagaagatactaccgaggaggaggcgctcatttcatttccaagcttctgaagtccagcatggctgtcctgagtcccacgaagctgctgcacttgcaggctgtgctcttgggtgagccccaggctgcagctgaagcaaacgccggtctccctctttaccgggtttatcattatgggc

SEQ ID NO: 389254 - DNA, 1005 bp, Oryza sativa
  unsure (1)..(1005): unsure at all n locations
aaaggattcccggttatttaaaaccattcctttttttggaaggcaacacctttccaaggattattttttttttaccaggaaaggcaaccatcccactgcatgaccaccctgaaatgacggggttcagtaaactacttatcggatcgctgcacataaggtcgtatgattgggttgatcctgagcctgccttaagttgtagttcatcgtcgggggatcaattgagggtggcaaagagagtggtgaatggcgtttttacagcaccatgtgatacatcagtcctgtatcctacaacaggagggaacatgcaccggtttcgagctattgcgccgtgtgcaattctcgacattcttggccccccttattccacggaagatggccgagactgcacatattaccgcgctattccctactcacgtcattcggtgaaaaatggcgcggccgatcagctcaccggagtcgacgaagaaggccatcgcctctcatggctaacggagaccattccgcggatgctgaggatgcgccagatccggtacggcggcccgccgatctccgatgacgaatgaccgccggcttgtcctgatctgaaagagtgatattccgacatggacggccagcccagctgtgaatccgtcgacgtctaaccatgtagtagacagcagatagccatagatgcaaatgcgaatcaatcatgcagagttgagctttcagttcttgcatgcctgatgctgtctttcagtctcagtgatgcccttttcttaatctttggtcagtagttcgttcagtacttcagtacatgtatgcgtagactccaatatttcagttatgttggatgccctttttgtattgaaaagtaagaatcgatctattggggttaaaatgtaagggagtaaatttagacattctctctcttcttttaatttttcagaattgtaaagtatatggttgggatacgactgataaaccgtataacttttctnnnnnnnnnnnnnnnnnnnnnnnnnnnnn

SEQ ID NO: 389255 - DNA, 779 bp, Oryza sativa
  unsure (1)..(779): unsure at all n locations
cgcattgcttcttgattcttgattcttgctgcttcttgcttcttgttgctgttgttcttggttggatctttgatgaaggtggggaggggatcganggggggaggtggccgcgatggcggcggcgtggtggaggaggagaggagtggcggggtggaggcggcgccgccggttgaagaggaggcgggtggcggtggcgccgtcggctggggccggggggagcaggcgggtgcaggcggaggcgtcgccgctgcagcngctgttccgggcttnccgcgccgtcttcaggggcaccggcaccgtcccggcccccggccaggtcgacctgctctgctccatgctcgataaaatgaaacccgaagatgttggccttagggcagaccaagaattcttcacggctagagatgatgacgaaggaatcccgctcattaaaaacactacattatatgaatgcgacaactttacgatgattatcttcttcttaccacgaaatgcgatcatcccactgcatgatcaccctggaatgacggtgttcagtaaactacttatcggatcgctgcacataaggtcgtatgattgggttgatcctgagcctgccttaagttgtagttcatcgtcgggtgatcaattgaggttggcaaagagagtggtgaatggcgtttttacagcaccatgtgatacatcagtcctgtatcctacaacaggagggaacatgcaccggtttcgagctattgcgccgtgtgcaattctcgacattcttggccccccttattccacggaag

SEQ ID NO: 389256 - DNA, 567 bp, Oryza sativa
ggctcgcccgcctgcccgtaccggaccggcatgcccggcccagacccacccgtacgttccattctcctctgtctcctgcttctctctgtcctcctcttcttcacctcctcttgtctgtccatagatcgagccgctcagaccaaatcttggatgcgttctctcttctttctcgctgcgagggaggcgggttgttcgatctgcgggtgaaatcgagcgagagatccctagacctccccctacttctctgtagctgtacatatttcaagagaggaaattttgggctggtttctgatacggttcgagaagatttttggcaatttcttcggattttcctccccttgtgggttccttggttcattgagaagaatcaaatgggtgatgtgtcagtcaatcgaccgatcaaggcggagccagctgcaggcggcattgcttagggcaatcgaatcctggacatgatgtcgtcagggtggacagatgagcggcacatgcattatataagctcaatggaggcttctttcgttgagcaactctacaatcacgaacaaaatgatgctggcaacggattca

SEQ ID NO: 389257 - DNA, 428 bp, Oryza sativa
aattccattctcctctctctcctgcttctctctctcctcctcttcttcacctccttgtctgtccatagatcgagccgctcagaccaaatcttggatgcgttctctcttctttctcgctgcgagggaggcgggttgttcgatctgcgggtgaaatcgagcgagaggtgtgatttttgtttctcttgtttgtttcttgaagttgaaatcttgtccgtgtttgtttgttttttttttttgttttccctcttcgtaatcatccggtcgcgaggagatttactttgggttggtcgccgatttgcttcaagatccctagacctccccctacttctctgtagctgtacatatttcaagagaggaaattttgggctggtttctgatacggttcgagaagatttttgcaatttcttccgattttcctcccttggggg

SEQ ID NO: 389258 - DNA, 520 bp, Oryza sativa
cccacgcgtccgctggttaaatcgcttatccggtgctatggccagaagcgccatcacgaggatatgctcaagggttttgttctacaaggcattgcgcaagattcacaacgtaatgatgaagttagccgacgatttgaaatcatgaaggatgcttgtgagatgaattcttctcttttagctgaggttcggagactgaagacatcaattgatagataaatggccccaaaagcatttcacatgcactcagagaaggagcaatttttttggtgattgtaaatagtaacatgtgtcaatgacaaatggctagagaatagttgcattgttcgagtttactttgcattacaaaccaaccaaaggaaaacatcagtgtgtgtaggagtgctcccggttgtggcttgtgggttacattttaaaggacaatgaaacagactggtgttacagagatgctaactccaaccttatgctccagtatccaacattttctgcctctcttgtgttcttgaaagaagacatttattca

SEQ ID NO: 389259 - DNA, 832 bp, Oryza sativa
ccacgcgtccgcggacgcgtgggcggacgcgtgggggtgcacgcccattcgtctcaaacacacattctttgattcttccttcaatttccccttgtcaactctgtcatcaacttaattgttagaagcgacctaaagattttgcggccgatcgagcatggcgtccccttcggctctgatcgcaatgctcctcgtcatggtcgtcggctgcgccgccgtggcctcggcgatggagctgagtttcattgtcggagatgcgcagggttggaacaccggcgtcgactacaccgcttgggcgaagggcaaaaccttcgaggctaacgacacgcttgtattcagatacgccaggaagcagcacacggtgacagaggtgaccaagagcgactacgacgcctgcaccgtcagcggcaaaccgatcagtgatttcgaaggaggcgcgcttgtgacattcatagcgctcagccccggcgagcactacttcatctgcaaaatcggcaaccattgcgccagcggcatgaagctcgccgtcaccgtctccaactccagcgaccaccccgaggccgcaaccttgggttgggccttactccacgccagccagcgcgtccgcacacctgcacgccggtggcgccgtcgtcgcggcggccgttgggatcctcctcaatctcgccctcttctgagatcgcattgacgcgtcgagcggcatggacgttggcagggtggaggcaatgcatgattctttgtagcgtttctgatgaaatttgtttgattattttgtttacgttcgatcgtgtatacgtgcgtaataatgatttattggtcttgtgatttattctcc

SEQ ID NO: 389260 - DNA, 1266 bp, Oryza sativa
  unsure (1)..(1266): unsure at all n locations
cccacgcntccgccatcgcattcagttgcgttgatccgatggcgcagtagcaaaaccgagtctcctctcctccctccctccctcccttccctttgccatcaaacgcaagccgggagaagcaccaccacctagatagaacaataaaaattgctgcatccgtcagagctggccactacaaaaaccagctgcatcacaggagagagcaggcagagaggcagctctccagctcgcgtttggggttgaccagttactccggcgaaccgacggcaagccggcgccggcggggagggtcgtcgggagcggaagagagggagaaagaatggccaccaccgcctccgtccgacctcccctgctccgacaagcagcaggttcagaaaaagcctcactcctttgcaaaccaaagcagagagcttctgtcagaagaagaagcttcactgccagggccagctcgaatcctgtgagcatcccgaagcaatggtacaacctcgtcgccgacctgccggtgaagccaccgccgccgctgcacccgcagacgcaccagccactgaaccctagtgacctgtcccctctcttccccgacgagctgatcaggcaggaggtgaccgaggagcggttcatcgacatcccggagaggtcgccgaggtttacaagctctggcgcccgacgccgctgatcaagggcgaggaggctggagaagctgctgggcacgccggcgaagatctactacaagtacgaggggacgagcccggcggggtcgcacaagccgaacacggcggtgccgcaggcgtggtacaacgccgccgccggggtgaggagcgtggtgacggagaccggcgccgggcagtggggcagcgcgctgtcgttcgcgagcagcctgttcgggctcacctgcgaggtgtggcaggtgcgcgcgtcgtacgaccagaagccgtaccggcggctgatgatggagacgtggggcgccacggtgcacccgtcgccgtcggcggcgacggagtcggggaggaggatcctggaacgcgacccggcgagcccgggcagcctcgggatcgccatctcggaggcggtggaggtggcggcgagggacgccgacaccaagtactgcctcggcagcgtgctcaaccacgtgctgctccaccagacggtgattggggaggagtgcctggagcagctggcggccgccggcgacgtccccgacgtcnacatcggctgcactggcggcgggtccaacttcggcgggctggtggtcccggtcatgcgcgagaa

SEQ ID NO: 389261 - DNA, 1610 bp, Oryza sativa
  unsure (1)..(1610): unsure at all n locations
gaagagccgaagaggggaggtgaggatcagaggaggcagcctcatcgtcatgcttcagcactagtagtagtagtgccaccatttctttgccctcgatctttccccagagagagagagagagagagagagagtcttgattgggggaggagagagggagagagagaaagagagaggacagaaaatgtttgtggatcttgagtaatgccttctaataatgataatgctgttgcaagaaatggagaatcatcctgtccaatgcatggccaagaccaactatgattttcttgccaggaataactatccaatgaaacagttagttcagaggaactctgatggtgactcgtcaccaacaaagtctggggagtctcaccaagaagcatctgcagtaagtgacagcagtctcaacggacaacacacctcaccacaatcagtgtttgtcccctcagatattaacaacaatgatagttgtggggagcgggaccatggcactaagtcggtattgtctttggggaacacagaagctgcctttcctccttcaaagttcgattacaaccagccttttgcatgtgtttgcttatccatatggtactgatccatattatggtggagtattaacaggatacacttcacatgcattggttcatcctcaaattactggtgctgcaaactctaggatgccattgcctgttgatccttctgtagaagagcccatatttgtcaatgcaaagcaatacaatgcgatccttagaagaaggcaaacgcgtgcaaaattggaggcccaaaataaggcggtgaaaggtcggaagccttacctccatgaatctcgacatcatcatgctatgaagcgagcccgtggatcaggtggtcggttccttaccaaaaaggagctgctggaacagcagcagcagcagcagcagcagaagccaccaccggcatcagctcagtctccaacaggtagagccagaacgagcggcggtgccgttgtccttggcaagaacctgtgcccagagaacagcacatcctgctcgccatcgacaccgacaggctccgagatctccagcatctcatttgggggcggcatgctggctcaccaagagcacatcagcttcgcatccgctgatcgccaccccacaatgaaccagaaccaccgtgtccccgtcatgaggtgaaaacctcgggatcgcgggacacgggcggttctggtttaccctcactggcgcactccggtgtgcccgtggcaattcatccttggcttatgaagtatctacctgataatagtctgctgtcagtttatatgcaatgcaacctctgtcagataaactcttatagtttgttttattgtaagctatgactgaacgaactgtcgagcagatggctaatttgtatgttgtgggtacagaaatcctgaagcttttgatgtacctaattgccttttgcttatactcttggtgtatacccattaccaagttgccttaaaaaccctccaattatgtaatcagtcatggttttatagaaccttgccacatgtaatcaatcacctgtttttgtaaattgatctataaacgctataggctgctgtgttanctgcnnnnnnnnnnnnnnnnnnnnnn

SEQ ID NO: 389262 - DNA, 580 bp, Oryza sativa
  unsure (1)..(580): unsure at all n locations
cccacgcgtccgggtgtccatcctacaatcaggggagaggtctgggagtttttacttggctgttttgatcctgggagcacttttgatgagcacgcgaccgtaggcgagaaaagaagaatacaatatgccatatggaagcaagaatgcaaagatatggactcccatgttggtagcggtaaaattatcacagccccaattataactgaggatggaaaacctattaaggatcctttggttttgctcgaagctacttcagaccagcacacaatgcaaggtagttcatccagcagcaggaacgaaaatgaggtggacaagtccgaaaattgtgtggtggataaacaaattatcgaatggaagcttttgctacatcaaattggccttgatgtgctgcgcactgatcgatccatggtgttttatgagaacaaagaaaatctttcgaagttatgggatattcttgctgtatatgcttggatcgacatagaaattggctattgtcaaggaatgagtgatttatgctcaccgatgatagtgctgctcaacgacgagcagatgcattttggggcttngaaaattaagccgg

SEQ ID NO: 389263 - DNA, 709 bp, Oryza sativa
  unsure (1)..(709): unsure at all n locations
gagccaccccctctcgccgtcgccgtcgagtcccatggcgaagtcgcggccgcccaagcggatcctcgagtcctacaccatcaaagggctccgacaaagtcatcaagcctggggactgtgtgctaatgagggcatctgatacatcaaagccaccctatgtggcaatgagttgaggctatggacgctgcagggtcacgaggcacaaatgtgacagtacgggtgcggtggtactatcggccagaggagtccatagggtggaaggcgtccatttcatggtgccaaagaggtgttcctctcggatcactatgacctacacagtgctgacaccatacaggggaaagtgcaacgttcacagacttccgtagctacacaaagcttgattctgtcaatgctgaggacttcttctgtcggctttgagtacaaatcagccacaggaagcttcgtgccggaccgcattgctgtgttctgcaagtgtgagatgccatacaatcctgatgaccttatgatccaatgtgaggaatgctctgattggtttcacccttcttgcattggaatgactattaaagatgccaaataactanagcattttttctgccacaatctgtactgcggataatggaaagatggctgagaattctcatgaaagctacagcgcaatcccaaaaaatacaggtggagtccctaagacngaaaaagtgaatgcccccca

SEQ ID NO: 389264 - DNA, 967 bp, Oryza sativa
  unsure (1)..(967): unsure at all n locations
cctccttctcctcctctccgctttcgctttgaccaaacccaaaccacgcgcagcgctcccatcgcccagggcaacgccacgaaacctagccccaccgactcgcctcgcctcgcctcggaatcccccaacaccagagcgcggcggcgaccatggagccctcccccgtcggcggcgggtccgcctccgggtcggtggagcggtggcgcgcggaggcgtcgcgggcgttccagcactacctggatcgggcggcgccgcacacggcggggcggtgggccggcacgctcgtggccgcggcggtgtacgcgctgcgggtctactacgtgcaggggttctacgtcgtcacctacggcctcggcatctacctcctcaacctcctcatcggcttcctctcccccatggtcgaccccgagccccacgccgctgcctccgccgccggccccgccctccccacccgcggctccgacgagttcaagcccttcatcaggcgcctccccgagttcaagttctggtatgcaatcacaaaagcttttcttatagcttttgtgatgactttcttctctgtatttgatgttcctgtcttctggccgatacttctctgctactgggttgttctttttgtccccccgatgaagcgccagattgtgcacatgataaaatacaaatatgttcccttcagcgttgggaaccaagaaaatatggcgggaagaagagcccaggcaccagttcttcgaaaagactgaattggcagcctcccccactctggtaggaaaaatggaaggggcaagaagatccagtcgatgatatttgatgtgctccatcccaattgtaatatttcattcatatctagagctagaaggatattcccttgtatttcagactctggttcccggtttaaattgatattggggtagaatcctttcttggatgggtatatagtgtgactcgttnnnnnnnnnnnnnnnnnnnn

SEQ ID NO: 389265 - DNA, 1006 bp, Oryza sativa
  unsure (1)..(1006): unsure at all n locations
gccttnggcacgagattctagagctcatacgtgcaacaaaccccgacttccgggaggggcgcatttattagataaaaggctgacgcgggctccgcccgctgatccgatgattcatgataactcgacggatcgcacggccctcgtgccggcgacgcatcattcaaatttctgccctatcaactttcgatggtaggataggggcctaccatggtggtgacgggtgacgganaattagggttcgattccggagagggagcctgagaaacggctaccacgccgctgcctcctccgacggccccgccctccccacccgcggctccgacnagttcaagcccttcatcaggcgcctccccgagttcaagttctggtatgcaatcacaaaagcttttcttatagcttttgtgatgactttcttctctgtatttgatgttcctgtcttctggccgatacttctatgctactgggttgttcttttcgtcctcacgatgaagcgccagattgtgcacatgataaagtacaagtatgtcccattcagcataggaaagcagaaatatggtggaaagaaaggcccgggagccagtacgtctaaagactgagacctggattgcagatccctgtgttgctcttgaggcaacatgctggcatggtggttttttggtaccagctactgacagtggatgtacacctccattcgctagtcgagaggagcttaaagagactttgcatcggttgatgaccatttgtgttgtatatcagattcttctgtgcaatgactcgttcatttatagttcttgtgctgtgcggctcttgtgtggacgagtaatgaacctattgagtcaggtgcaatgcaaatcaaaactattggggcttgacatggatttgtactggaattcaacatgctcgtttccagacggggcccttaattactcgcatgttagtaacacatttgttattctatttagagtcctatgaaggttgtctgttttgtgtaaaaaaaaaaaaaaaa

SEQ ID NO: 389266 - DNA, 711 bp, Oryza sativa
  unsure (1)..(711): unsure at all n locations
aatcncctttcagcgnncnnnttgtttgngaccnncnntcggtnnggccntcttcgcttttacnccnnntngcnaacggncgnttttntnncaggcgattnccntggntatcgccacgntttnccccgtcangtcgttgtaacnnnnncntccngtggnnctcgcgtnatncgntcgctatnggncgaattngtaccgggcgcccccgcgcacgcgtccgtagacgccgccgccgacctcctcccgtgctcgcgacttctctcgacgccggtggagtgagagagagagagagagatcggagatggccaagtcgaagaaccacacggcgcacaaccagtcgtacaaggcgcacaagaacggcatcaagaagcccaagcgccaccgccagacctccaccaaggggatggacccaaagttcctcaggaaccagaggtactcgaggaagcacaacaagaagagtggtgaggctgaatccgaggagtaaggtggaggagccttttggttatgaatgtttcttgtatctctggatctacagttttgaacctatttcactgttctgtaagggcaaaggagattactatggtacttaagttttatcatgcgtagtttggctctgtgcaacccagttccatgctgttggattgcacctgaaatattatcttctataagaattggttatccatttttnnggtaaaaaaaaaaaaaaaaaaa

SEQ ID NO: 389267 - DNA, 462 bp, Oryza sativa
agctccgccgccgccgccgttcaaccgctcgtctcctcctccctcgcgagcgctcgtttcggattcgggggagatggccaagtcgaagaaccacacggcgcacaaccagtcgtacaaggcgcacaagaacgggatcaagaagcccaagcgccaccgccagacctccaccaaggggatggacccaaagttcctgaggaaccagagatattccaggaagcataacaagaagagtggtgaggctgaatccgaggagtaagatggaagttgtcctttcggaaaagcatgtctattttgccagttttaactcagcaaccttttagactatagtttcattaatgatggaacttctatgctattctgtatgatggaaagatcttttgttctacctgagcattgttgtgataatgctttttaagcttgatgctgctggatgaattaaaaaaaaaaaaaaaaaggggcggc

SEQ ID NO: 389268 - DNA, 522 bp, Oryza sativa
ccacgcgtccgccgatggccgtttcccccggacagcagccacgttctatgtagtatccaccacggcgaggttgctactggtgcagctcaaaccgagccgatcgagggacacacgactattaataccgactgcgcgtgtgttctgctcaagccgtggacagcgtttgatcgatcttctgcttaactgctttctacttttttggtagccatccgttatctcgacacagctccgaaaggttcggcgagatcgatggcaaccatgcctgctcctgtagcgacatgcttcgtccctgccacatcgggcgtcaggtgcagggcattctccacgccgatcaccaattatagcgcacggggcgtcgtcgctgatcccccgaagctgctgagtcgtccggggaacctgcagctaacgtcgggcggcgcgcggttctccggcaggttcagggcgtccgcggcggccgtgcacaaggtgaagctcatcgggccggacggcgcggagagcgagctcgaggtgcccgaggacacc

SEQ ID NO: 389269 - DNA, 492 bp, Oryza sativa
  unsure (1)..(492): unsure at all n locations
catcttcatgtgccttcagatgatgacaagcagaaaacactcaagataaaccttatagactgtcctgatcatcctagtagagtatccgactgtgagagtattccttgggaacgtcaagaacaggagagttaactatataccaacttgatgtagagttgaagacacctacctttctgccaacactcagaaagctcggtgccgatcggtctcgcatagcgatggccggttcggtgcttggcttccctctctgtagcgtgtgtttgggcggttggcacatggttcggggcgtgtgctctggtgcacatccttcctcgacagccagctgtcgatgtaaaacgtacatcctttctgccagctgtcgatgtaaaacttttcttgtaactttttcttcccatcttaattacattgaatgacctccgcgggccctcctttggtcattccggcaannnnnnnnnnnnnnnnnnnnnnnnnnnnnnnnnnnnnnnnnnnnnn

SEQ ID NO: 389270 - DNA, 902 bp, Oryza sativa
ccgcgcgtccgggctaggtggggagcggcggctgggcaatgggagcgcaggcgggtggcaccggagccagagcggcgacgtttccgccgtcggcgcaggcccagatggttgtgctaagggagctggcggcggtgggtcgtcttcctcgttgccggtcagcaccctcacccttcctggagctcctccccttcgctgtggggagtttctaggctggattgaggcggcagctcgtcagcgggggaagctcaggctgctgaagcaatgccatccaatcccgggttctccttcggccagatctggcgaggaggccggcgggtggtggaacggagaggtcctgggccagctctcagggatggtggttcgatgaagccggccgacggaggggcgtcggtcgggtgtggtggaagccatgtgccgccgatgttcagatggcggattcggattgggtgacgtaccacggtggcagggggtgccgagcgaaagcttagcccaattctttgggccaacagtgacttcgccttcggacgtagtaaccctcttgagggcactgttgaggtatccctcctccctcggcaaggagctctgggtgaaaaccttgtccagtctttggatagatgacgacggcgtcttttggcgtcgcgaccctcgtgagggcgtcattttagagtcttcgtgtcgtagtggtgtcgttagctcggtggcgatcggtctcgcatagcgatggccggttcggtgcttggcttccctctctgtagtgtgtgttcggacggttggcacatggttcggggcgtgtgctctggtgcacatccttcctcgacagccagctatcgatgtaaaatttttcttgtaactttttcttcctatcttaattacattgaatgacctccttcggtcattccggc

SEQ ID NO: 389271 - DNA, 1340 bp, Oryza sativa
  unsure (1)..(1340): unsure at all n locations
tccacgcgtccgcttctcgctggtgtcgaggagattccccaaaaacttggcccccatttctttcgcatcgtcgtctcgccttgccccgtccactaaccctagcggcaactgcgatctccaaccgctcgatctctcgccggaggctccagatctgcgggaggtagtcgacctcgtcgccggcggtggggtttccgaatcgggggcgaagatgacggaggcgtgggtgcggcacaagcccgggatggcgagcgtcaaggacatgccggtgctgcaggacgggccgccgccgggcgctttcgcgcccgtgcgctacgcgcgccggatccccaccaaggggcccagcgccatcgccatcttcctcactaccttcggcgccttcgcctgggggatgtaccaggttggccaggggaacaaggtccgccgtgcactcaaagaggagaaaattgctgcccgcaccgctttagtgccagtgctccaagctgaagaagatgaaagatttgtcaaagagtggacaaagtctcttatgtgggaggaaataattatgaaagatgtccctggatggaaggtcggccaaagtgtctataattccgggaaatggatgcctcctgccaccggcgagctgcgtcgtgaagattgatgaaatccaaggggcttgccgcagcctaccaaagatgccatcatgtcttttgggcatgcataaggcttttgaaccagaatacccaaaaaaaattgctacgaggaactcactcttaaagcactcgctgtgcatttgttgtgttgatgaaatcttggctaataattggacatgtcaaacagacatttgtttcacatgaactatgctcttttgtggacggaacatctgttttgccctgatgttctcccttctctatgttttatttttttctactctgtactaagcacttcttggtcagtgctttaccttactgtaaacattcgaatgtattcagtctttttagacaaagacacaggaggaacattcaatgtcaagcgcttggatcggatgggtatattaccgagatngtgaacggaaaactcaagaagtcagaatcaagcccgtgatcagatagggagagccaaaacagtgtcactgcgtactagngataaatgaacaagcaaaaggcaactcaagaagtcagaatcaagcacgtgatcagatagagagagccaaagagccaaaacagcgccactgcatgcgtacaggngataaatgaacaagcaaaaggcgaccgataatatgtattccattcgttttataatgtaagactttttagccttgccnacatacatatagatgttnnnnnnnnnnnnnnnnnnnnnnn

SEQ ID NO: 389272 - DNA, 1557 bp, Oryza sativa
  unsure (1)..(1557): unsure at all n locations
aagaaaagaaaatctgcagtctgtgtcgtctcctccggtccttgcgcgcaagaccgagtcgcggctgccgatctccatctgccgatcgagcagagcatagcaggggatcctggaaatggctgacggtgaggacatccagcctcttgtctgtgacaatggcactggaatggtcaaggctggtttcgctggggatgatgcaccaagggccgtgttccctagtattgttggccgtcctcgccacaccggtgttatggtaggaatggggcagaaggatgcctatgttggtgatgaggcacagtccaagagaggtatcctcacgctcaagtaccccatcgagcacggtatcgtgagcaactgggatgacatggagaaaatctggcatcacactttctacaatgagcttcgtgtggcgcccgaggagcaccctgtgttgctcactgaagctcctctgaaccctaaagccaacagagagaagatgacccagattatgtttgagactttcaatgtccctgcaatgtacgtcgctatccaggccgtgctttccctctatgccagtggccgtactactggtattgttcttgattctggtgatggtgtcagccacacagtgcccatttatgaaggatatgcgcttcctcatgccattctccgtttggatctggctggtcgtgacctcacagactcccttatgaagattctgactgagaaggggttactccttcacaacctccgctgagcggggaaattgtaagggacatcaaggagaaacttgcgtatgttgcccttgattatgagcaagagttggaaaccgccaagaacagctcctcagttgaaaagagttatgagctacctgatggtcaagtaatcacaattggtgcagagaggttcaggtgccccgaggtcctcttccagccatccatgatcggtatggaggctgctggtattcacgagaccacctacaactccatcatgaagtgcgacgtggatatcaggaaggacctttatggcaacattgtgctcagtggtggtacaaccatgttcccaggcattgctgatcgtatgagcaaggagatcactgcccttgccccgagcagcatgaagattaaggtcgttgctccacctgagcgcaagtacagcgtctggatcggagggtcgatcctagcctcactcagcactttccaacagatgtggatatcaaaggacgagtacgacgaatctggcccagcaattgtccacaggaaatgcttctgattttctcaagtgctctgctcttgtcatctgtagtatcgagttatgtttgattcgtttttctagcgatgtattggagatttgcaggctatgtttgttttctttttggagacgacttctctatgtgttcgatcagtgtaagaatgtcctatgtttgtgtcatctcagattgtttgtttgagttcacttgtcaaacttggttcgtttgattggtcagaactgtctgtatgagcttattgttctatacattgctccaagggtataattatgttaaattttggatctaaaaaaaaaaaaaaannnnnnnnn

SEQ ID NO: 389273 - DNA, 426 bp, Oryza sativa
  unsure (1)..(426): unsure at all n locations
ccacgcgtccggaggtgttctccggcaacgacaccggcatgatggccagcctcctgcccgccatgaaggcgatctacgccgcggtcggcgaactcggcctcggcggccaggtgaccgtgtcgtcggcgcactcggtgaacgtgctcgccaccagcttcccgccgtcgtccggcgcgttccgggaggacctcgcgcagtacatccagccgctgctcgacttccacgggcagacgaactcgccgttcctgatcaacgcgtacccgttcttcgcgtacaaggcgagccccgggagcgtgtcgctgccgtacgtgctgttcgagcccaaccccggcgtgcgcgacccaaacaccaacctgtgctacgacaacatgctgtacgtgagatcgagggcgtgtacggggcatgaaggcatgggganacggacat

SEQ ID NO: 389274 - DNA, 885 bp, Oryza sativa
  unsure (1)..(885): unsure at all n locations
ccacgcgtccgcggacgcgtgggggtaagcgaggtatcgagaaacaaccttttcaactccctgacttcatcgctgcaactggaatagaaaaaataagacaggcatatattgagaaggaggatagtaaaaagttgaaacaaaagcagcgggagcgtatgcaaccaaaaatgggcaagatggatatagattatcaggtcttgcatgacgccttcttcaaataccaaacaaagccaaaattgactagtcatggtgacctgtattatgaagggaaagagtttgaggtcaagcttagggaaatgaagccaggcatgctgtcgcgaagaacttaaagaggctcttggtatgcctgatggtgcgccacctccatggcttataaacatgcagagatatggtcctccgccctcttatcctcagctgaagattcctgggctaaatgctccgattcctcctggtgctagcttcggataccgacctggggaatggggaaaacctcctgttgatgagcatgggcgccccttatatggagatgtttttggagtcctacagcaggatgaacctaattatgatgaagaacctgttgatcgcagcaagcactggggagacttggaggaggaaagaggaggaggaggaagaggaggaagaggaggaagaagagccaatggaagatgaagacatggaagacggcatgcaatctgttgacaccatctcaagcactccaactggtgtggaaacacctgatgtgattgatcttcggaagctgcagcggaaagagcctgaaaagcagnccgagaagcaactataccagattcttgagcaaaaagaagaaagaattgctcctggggctatctatggatcaagccatannnatgngattggtgcacnnna

SEQ ID NO: 389275 - DNA, 434 bp, Oryza sativa
ccacgcgtccggtgaatagtggaataacgatgaagctttctttgcttggaaagatgatccaacaaactatgagaatcaactcgaggagttgaaggctgaaagagtatccaagtggctctcgcgtctcgctgaaagccctgatgtgaaagctttgccaaatggtctttcaattgttcttaacaagatgaatccttcaaagagggagcaggttattgatggtctcaggcagcttctgggttgaccaatgtgaattttgatatccagcatgaaccaaacagattcatactcaaacgctaacactgaagtttaattggcctatcattgatgcaatggaagaggttttttgcacataaaatgggaggttttggagatggcatctcaagaaccatatacatacaaggatatgattgggcctctgccctactggatggttg

SEQ ID NO: 389276 - DNA, 1344 bp, Oryza sativa
  unsure (1)..(1344): unsure at all n locations
agctgaaaaatcttcgtcttcatcatgcgccattttgagctcctcctcttcctcctcctctgctcgccgtgcctcttctcagtctccgatgggaggacggtgcggcccgcgaaacggggcgccccgtcgccccccattcgggcggtgaaccttggaggttggctcgtcacggagggctggatccttccctccctcttcgacgacattccaaacaaagacctcctggatggaacccagctgcaattcaagtcggtgacgcagaacatgtacctgtgcgccgagcagggcggcggcaccatcctggtggcgaaccggacgagcgcctcggggtgggagaccttcaagctgtggaggatcgacgaggacacgttcgacctcagggtgttcgacaacctgttcgtcaccgtcgccggcgacgggggtcaccgtcgtcgcgacggtggcgtcgccgggggcccgggggaaggcgtttccagattcgtgcgcaacggcgacaagactcgcgcgcgcatcagggcacccaatggcatgttcctgcaggcgaagacaagcgactcagttacagcagattatgatggggagacaaattggggcgacgatgacccctctgtgtttgtggtcactagggtaggcggtctacaaggggagtaccaaatatgcaatggatatggtaaagcaaaggccacacaagtgctcagggaacactggcgcacatacaatagttgagagcgacttcaagttcatatcaacaagtgggctaaacgcagtgagcaattccagttggatggtggattgctagcgaccccaatcctcctgctcctttcgttggaggatccctccaagccttggataatgcattcaaatgggcagagaagtataatttgggagtcattgtggacctgcacgctgcacctgggtcgcagaacccgtttgagcacagtgcctccagagatggttcacaggactggggcaccacggatgccaacatcgcccaaactgtccaagtcatcgatttcctcacacacagatacgcgagtaggcccaagctcctggccgtggagctcctgaacgagccactggcaccccggggtgactcttccgggctctcatgagatactacaaggacggctacancgccgtccgcaagtacacctngncggcgtacgtggtcatgtccaaccngcctntncgccagcaacaacggagctcctcgggntttngnnnccggcttttcccgggnngncngtcctcgncngtccaattantaaaaanctntttaaccaggaaggtttaaacggccttaanccnttggccaannanaattggcttcggtaanggccaacc

SEQ ID NO: 389277 - DNA, 470 bp, Oryza sativa
ccacgcgtccgccctctcttcggtttccccccttggccggacccttttctagtcatggggaatgctagggggagggcggaggctccggcttgctgtagaagtttgtggcggatagatggcgtttcgagggtggccaagggcccgtcttgccattggttacaatcaaggtatgattgcttctaagacgtcatgaactattctgcggccatcgatgtgggggtgcttgtatgggtgatgtgaagatgctggcgaaagccttgccgtgcttttggcgggttcgacaacgacggcgcccgtgggtgtcgtttccctccttggaggcgttgtcatggcactctttcatatcctcacaaatctctccaggtgaaaaccttgttccgattttcggacgagtggcggcggcgtcacgcgtcgtattctccttgggggcgtcgcttcggagaagttccaatgcatcgatgactattgat

SEQ ID NO: 389278 - DNA, 477 bp, Oryza sativa
ccacgcgtccgcgcgcaccagcagcagcagcagcagtagccatctcttcttcctctcgcctccgtttccgccgtcgcctgctcggttccagctgagaccgtgcgcgcgcgcgagggagcaacctcgagaggaaggggatggagatgaagaagatcgcctgcgccgtcctcgtcgtcgccgcctcggccgccaccgtggcgttcgccgccgaggccccggctcctgcgcccaccagcgccggttccgcggccgtggtgccgggcattggggcggggcccgggggcaccgggggcttggtcctcggccaacaacctgcagggggccaacccgaagaaggaaaaaggaaaaagaagaaaatgattccttggccagggttcctaaccgatccaaacaccccccaatatgggggtggcttgaattggggcaaccttgaagccccggcctccttcctcactttttataaaggggtggattttt

SEQ ID NO: 389279 - DNA, 431 bp, Oryza sativa
ccacgcgtccggcgcagcagcagcagcagcagcagtagccatctcttcttcctctcgcctccgtttccgccgtcgcctgctcggttccagctgagaccgtgcgcgcgcgcgagggagcaacctcgagaggaaggggatggagatgaagaagatcgcctgcgccgtcctcgtcgtcgccgcctcggccgccaccgtggcgttcgccgccgaggccccggctcctgcgcccaccagcgccgctcccgcgcccgtcgcgccggccatcggcgcggcgctcggcgcaccgtggtctcgttcttcgctactacctgcagtgagcccagccggaggaggaagagaggaagaggaggagatggattcatggccatggctactaaaccgatccaaacacggggataatgtgggtgtttgatttgtgcaattttgatgct

SEQ ID NO: 389280 - DNA, 539 bp, Oryza sativa
  unsure (1)..(539): unsure at all n locations
atgcttattganccaaatcaagnccaagaaatgttcggagatgatgtccgatctgactctgacggtgccgccgagcatcgaagattgattgctgaaccatctggtttctatcttctcatgatgctaggaacgccaatatctcagcttatgatgaattcttttcctggatgagggaacatgtgcagattgtttggatatgagtattattgttcatgcgaattcgctacagagccgagcaatcatttcctctgtcccggtagggtatttgtgtgttgatgcattgtatgcacgagaggtcgcactccgaaccttccctctggctgatcatcacagaagatattctttgacttctcagttcttgtagagattgaaatgtaccgaaaggtgtaccagtagcgaaaatgtagtatataattccagaaatgcagtctacatatactaaaaccctttcttggtcatttgtgtaagatacgtataccatatgaccattatatgaaattgtgtactattactatcnnnnnnnnnnnnnnnnnnnnnnn

SEQ ID NO: 389281 - DNA, 578 bp, Oryza sativa
ggttgaccaagaaggtgtcagaaccttagatgatgataacttcattgatgatactggggttgatccagctgaccgttatggcagcgataatgatggccactcacctcggcattaccctcaggcagaggaaggggaagaggatgatgaaattgagcggctctttaagggtgggaagaagaagaaaaagaacgatcgacctcgtgctgatattggtcttatagtggaacaattcattgctgagtttgaagtggcagctgaagaagatgccaacttaaataggcaatcaaaaccagctattaataaacttatgaagcttccactactcatagatgtactctcaaagaagaatctccagcaggaattccttgatcatggagttctcactcttctaaaaaattggcttgaacctttgcctgatggtagcttgccaaatatgaatattcgaacagctgttctgaaattattaactgattttccaattgatttggagcaatacgatagaagggagcagcttaaaaaaagtggttcttgggaaggtcattatggttttgtcaaaatctgatgaggagactacttct

SEQ ID NO: 389282 - DNA, 666 bp, Oryza sativa
ccacgcgtccgcccacgcgtccgcccacgcgtccgcggacgcgtgcatcgtaagtgagatcgagggagctaattaatcaactagctagcttgcacaaattaatggcgtccaacaaggctttcgttgtgttcactctcctgatgctggtggctgcatctgccgtcgtcgacgtcgcctctgccgacggcaagtgcgggccttgcaactgtaaaggctgctgcgactatgacggcaagtgcatgagctactgcagcggccatagcggcccatgctgcaagtggaaaggcaagtgccacggctgctgctcatgagcacgacgaggcaagaaccgaacgaataatggattatgacaaataaaaacgcacacataaaaccttacagatatatgtatctgctatacatgcatgatgatgtgcttgtatagctacttaattatccctatagctgtttgcttggtcaataaaggattgcatctgctgtgtgtatactgtgtacacacggctagctagtatgtatgtatgtatatgctcttatacaagggctatacgtacgcaacaatccgtgcctttggtgtcgtcagtcgtagtgtcgtgtcaggtattgtagtattggtaaatttgtgctgatctatgaataaaatgcgttataataacgcttctataaaag

SEQ ID NO: 389283 - DNA, 915 bp, Oryza sativa
cgctgttcgccctgctcctctgccatggctgctgccgcggcaaggtgggccccggtcgtcggcctattgggcctcctcctgctcccgttcgcgcctgctccggcgggagccgcaacgcccgcgaggtcgccgccgtcgtcggcctcctccgccgtgttcctcctcagcggcgacgtctaccccaccgggcattactatgttactatgaacattggggacccagcgaagccgtacttcctggatgtcgacaccggcagcgacctcacctggctgcagtgtgacgctccctgccagagctgcaacaaggtgccacatccgttgtatcggccaacaaagaacaagctagtaccgtgtgcaaattcaatctgtactgcgttgcacagtggatctagccctaataagaagtgcaccacccaacaacaatgtgactatcaaattaagtacaccgacaaggcatcttctctcggtgtgcttgttatggacagtttctcactgcccctgaggaacaaatcccgtgttcgtccgagcctcagttttggctgtggatatgaccaacaagtggggagaaatggtgcagcaccagcaacaacagacggcttgcttcgggcttggtaggggattcagttagcttgctctcacagctcaagcagcaagggatcaccaagaatgtactcggccattgtctcagcaccagcggagggggattcctcttctttggggatgatatggttcccacttcacgcgtaacttgggtatccatggtccggagcacgtctgggaattactactcacccggctcagcaacactggactttgatagacgttcactgagcaccaagcccatgggggttgtatttgacagtggtagcacatatacatacttttttgcgcaagcataccaaacaactatttttt

SEQ ID NO: 389284 - DNA, 510 bp, Oryza sativa
gatttgtttatggtcttaaagagtgcaacatggggtaggttgtcatctaccggtgccggcaaggggaggagtaagcagtcaagcaacaaagtgactcatggattccacttggtggaagggaaatctgggcatgacatggaggactaccatgtggcagagtacaagtatgacaagagccatgagcttggtctctttgccatttttgatggtcacttgggagacagtgttccaagttacttgaaagctaaccttttctgcaacatactgaaagagcctatcttctggactaaccctcaggaagcaattaagaatgcataccgctctacaaacaaatatattttggagaatgccaaacaacttggacctggtggttcaacagcagttactgctattgtcgttgatggaaaggatatgtgggtagcaaatgtaggtgattcaagagctgttgtgtgtgaaagaggtgctgctaatcagctcactgttgaccatgaacctcatacaactaatgaa

SEQ ID NO: 389285 - DNA, 892 bp, Oryza sativa
  unsure (1)..(892): unsure at all n locations
ccacgcgtccgagaaaaggctgtgcagtacaagttgctgctgagaagggcctttttgcattggcagtaaatctacaagttcctggcacaactaactatagtatggtattctattttgttacgaagaaactgataccgaactccttattgcaacgcttcgttgatggtgatgatgaattccgcaatagtagggttaaccggattccatctgtccccaagggctcatggattgtccgtcaaagtgttggcagcacaccttgtctgctgggaaaagcagttgacattacctatatccgtggtccaaattatttagaaatagatgtggacatcggttcatctacggttgcaaatggagtcttggggctagtgtgtggtgtgatcacgacactagttgttgacatggcttttcttgtccagggaaatacatatgaggagctcccagaacgactgatcggtgcagttcgtgtttcgcacattgaactgaaatccgcaatagttcctgtccttggggattaacaaacttactactgctgcctactgcactgatgatcgcaacgttgggcaccatctacttgactcctgacagcatacaacaatacaacacatgtgtacagagatagaggaaccaactaccggcgctcatgtcatgtcaaacaatgtggcctattctgacttgaagtgaacaaaatggatgaatgtttcaatgtatgtaattatgctttgtgctcaatcattctggtaggtattagtacaattgcgtggcaaaaagaaagaaaggagattaaaaactagaaattaggagactggagagcgaggcccaggttagggtcagctcagcttgaataaaaatagccatgtttacttgagtttnnnnnnnnnnnnnnnnnnnnnnn

SEQ ID NO: 389286 - DNA, 800 bp, Oryza sativa
  unsure (1)..(800): unsure at all n locations
ccacgcgtccggcgacggcgccgccttcggcgacatgttcacgtacctgcagaagccgttctaattaacggaacgtgacgcctctgcaaacgctaattagctcactaaccactgtcaggtcgatcgtgtaattcttttaccagtctagggtacagccaaaaaaccaaaaattaaccgtgctcgatcgatcgatcgatccatggatcgatgatcgcctccaccggcagatcaaaatcgaagcaaaaaatcagggagaattcttggtacttccagtacctctcgtcgacaccacgtgtcgggttttctgcaccgcggatcctcgctggccgcatcgtaacggcgagcgaggttaaaaatagtggagaattcaagaacacatccctgatttttgtttctgccggatggggagtaccgtgagcatggtagaaatgactggtaaaattttcgttgatgataggtagccagagtcgatgtaaccagtcgattttttttttttttttggttttagttgacatgccttcctgatagattcagaacaaacaatagagaagagaggagaaaaaaacacagaggagaaattcagagaccaaagttcaaagttttggaattttcaggggcgccaccagctgatggtattgtcagtcgtgtctaggttcgtagaggaaattaaaatgtagaagancgggtacttnagttcacttcaggttcgttcgtgccaaacaggtntttgacactttagtnaggtttgatttttttncccttttttncgggttttttncgtttgggaatgnaattaaagg

SEQ ID NO: 389287 - DNA, 541 bp, Oryza sativa
  unsure (1)..(541): unsure at all n locations
cgtttttctgtgataaaggaaactataacaaaggagtatgagaatttcaaatttcggcaaccatatcagcaagctttctactattgttcattgatattagaggagcaaacgtgggcatgggatgaagaacttgctgcagtatctcaaattgaagctagcgatctcgagaagtttttgcctcatctgctggggaaaacatttattgagagctactttgctgggaacatggaaccgggtgcggtaaaaggtgttatgcagcatgttgaagacatcttattcaatgcacctgtcagtctgtgcaaagcattaccctcatcacagcatcttacaaagcgaattgtaaagcttgaaaggggtttgaggtattattatccagcattatgcctaaatcaccaggatgaaaattcttgccttctgcattatattcagattcatcaggatgatctcaaaaaaatgttatactccagttgcttgctcttgntgctaagcaaccagcttttcaccaattaccgtcagttgagcaacttggctacataacact

SEQ ID NO: 389288 - DNA, 519 bp, Oryza sativa
ccacgcgtccggtgatgggtaatgctcctgagataggtgatgctctactccagagtacacaggtcaccgagattacattcacagggtcaacagctgttggcaaaaaactgatggctggatcagcaaatactgtgaagaaggtttctttggagcttggtggcaatgcaccttgcattgtttttgatgatgcagacattgatgttgccattaaaggcagtcttgctgctaagttccgtaacagcggacagacatgtgtatgtgcaaacaggatattggtgcaagaaggtatttatgaaaaatttgcaagtgcgtttatcaaggctgttcagagtttgaaggttggtaatgggcttgaagagagtacatcacagggccctctgatcaatgaagctgctgttcagaaggtagagaagttcataaatgacgccacttcaaagggagcttatgttaagcctagtggtgaggatcacattctagctcctcgccagccagagctcaaacccccaaagcagcactttt

SEQ ID NO: 389289 - DNA, 1270 bp, Oryza sativa
  unsure (1)..(1270): unsure at all n locations
attcagaaaaatgaatggagatagtaaggtccgtgcttcacactcaaccacttcggtgatttcaaactccaataacagaactgttgaacgaagctctcactatagtatgattcccagacatttacaaagcccaagactaggaagacatgtcaataatgctaataaccaagaacctgcaaattcaacattacccgtagaagatagcattttaatggaagaatgtcatgatgccatgcaaagttcagctgacttgaagtgccctctctgtagaggttctgtatctggctggattcctgctggagaagtgaggaagtatcttaacgagaagttgagaacatgttctcatgattcctgcaaatttgttggaacctacgagcagctgcgtgaacacgctagaaccgcccatttgcttgcaaagcctgcacatgtggatctttcgaggaaaaggacttgggatcgccttgagcgtgaacaggaggttggtgatgtcataagtgcaattaggtcacagaatcctggggcaataatagttggtgactatgttattgagactagagatgcgatgtctcctgatgaaaacactgggagatgaaagcaacgatgagtggtggcgcgactcaatagaatcacctgataacaggtataactcccctaggctcttgccgaatgaagctccagaatcatcaataatctgggcagatgaaaggcatggactgccaaggtttcagcctcagaataacagagtgttgccccggttttcgttcaccaataggagcagctcacggtcagattggcaccgtatccgacggccgagtagacagagcctagcgcgtcgaggcttgttgaatcgaccctacaggaacaacagcgactatcatggctttcgtccccagctatttgatcagccgaatggtagtagccatcgttcaggtatcaacaggagccttgatgacccatcatttgtgcccagacggcagcgtttgagatacacccacaggagccatcatatccgtgattgatctaaagcagcattgctcttgctgtataaattaatttggcaaacagccaaagctatccttgtaaatagtaatgccaaactcaaatttatttttctttagttggtctacgctatatatcaatgtatattatccagcagtctagtctagatgcaaaactttgctccttaaatatcatcttcggtaccgtcactttcgaatgcaattctttgttggcttgnnnnnnnnnnnnnnnnnnnnnnnnnnnnnnnnnn

SEQ ID NO: 389290 - DNA, 533 bp, Oryza sativa
ccacgcgtccgaaaccaactcactcggtaccagggtaagtcagtctggttgcttgcttatattgcttttgtaacatcatggccactccttggttccttagcttttatcgcatttaggaaaaagttcaggaataatttgctagctaagtggctgagaagataaataagttgtgttccaacagtttttttttttcggttgcatcatgtaaaactcagaattgtttaaaggcttgaaaagccattcgatctcaaaaaaaaaaaaaaaaaaaaaaaaaaaaaaaaaaaaaaaaaaaaaaaaaaaaaaaaaaaaaaaaaaaaaaaaaaaaaaaaaaaaaaaaaaaaaaaaaaaaaaaaaaaaaaaaaaaactacttcaaaaaaaaaaaaaaaaatataaaaggggggcgccctttaaaaaaacaaaattttaatacccgggcgtgtcaaaattaaatttttttttttgggccccaaaaataaattccaggggccggcgttttaaaaaagcggaaatgagaaaaaccctggggctcccc

SEQ ID NO: 389291 - DNA, 1322 bp, Oryza sativa
ccacgcgtccgcccacgcgtccgagaaagacatttttttaatcctttttttttttgtttagctgatcggggcatgtaatgctccaccggtcttttgtgtcatcactgagttcctgtgcggggggtctttgagagctttgttgcgcacgctccagcgccaaaagcttcctttggagaagatcatttgcattgctttggatattgcacatggttcggagtacattcactcgcaaagagtaatccatcgtgatgtgaaacctgagaacatcttgtttgatggagaatgctgtgccaaggttgttgattttggagtggcttgtgaagaagtatactgcaactcattggaagatgacccaggtacttacagatggatggcaccagagatgtataagcgcaaaccatatggtcggaaggttgacgtctacagttttgggcctcgtattgtgggaattgtttagtggctcgatcccttatgaagagatgactccattgcaggcagcttttgcagttgttaataagaacttaagaccagttgttccttcaagctgtccggcgcaacttcgaccttttggatcgagcaatgttggtcttgtcaaccagagaagagacctgagttttcccaagtagttcagatcctcaaaaatctcaaggaggccctggatagagatggaacgcttgacaagatcccaagcaccaactgccaggaacctcctgatcagaccaagaagagactgtccaattggatccaaagactctcgtacagtcaggccgatttctccggacctcctccgccaaagttattgtaattatatgcattcctctcttccataaatatcgtagcatctgctagatgtctctgtaaatcataaggttcttcttggtgtataaactccgcacatttttttagtggacagttcattcttgtttggcttagtaattttgcctgcaaccaaccaatggagtcttagttcccggcgggtggggatgaatcattttgggcattgaggtagcaatcttgtagcatcgggttgaaggctatttattgctcatgcttttttaggccgaggggctaatattgacgtgttattcatccaaagacttgcataaaagtgtaaatggtccaaagactaatattcatgcattttttccaaagttacgactaacgaaattttggaccaaggggtaatgtttatgtgttttgggccaactggtaaatgttaaatgttttcaccaatgtatgtatgtaactcatgaaattttctctcaaaacaagtatatcgtgtaattttggccccaaaggggtttaaaaggcccctttttttg

SEQ ID NO: 389292 - DNA, 1083 bp, Oryza sativa
ccacgcgtccgatcgcgatcacccaccaccacatcacgccggagaagtagtcggcggcggcggcggcgaaggcgaagatggtgtgcatacggcaggcgacgatcgacgacctgctggcgatgcaggcgtgcaacctgatgtgcctgccggagaactaccagatgaagtactacctctaccacatgctgtcgtggccgcagctgctgttcgtggcggaggattacggcggccggatcgtcggctacgtgctcgcgaagatggaggaggacccctcggagccttgccacggccacatcacctccctcgccgtgctccgctcccaccgcaagctcggcctcgccaccaagctcatgtccgccgcgcaggctgccatggaccaggtgttcggcgccgagtacgtcttccttcacgtccgccgctccaaccgcgcggccttcaacctctacacctccacgctcgggtaccagatccacgacgtcgaggccaagtactacgccgacggcgaggacgcctacgacatgcgcaagcccgctgcggcagccgcagcccaagaagcaccaccatcaccaccaccatcatcacggccccggtggttgttgctcacacgatgctcctcccgcggcatctgggtcttctccgccgtcctctaattcgccagagaagaccgattcatgatggaaggaaatggagaggctgaaggagttggtgagcccgttggacttgcatctggtgcactcactcttttgataagaagtccagcgaaatcatttcctaaggaaacaaaagatatgtactgtgattatgtgtgtttgtaggcatctttgttggccgatgattcacccatgggccagggtccactgtaattctgtttgatggacgtacaaatacttttgttagctacttggcatttgctgtcgtgcctgtaatatctccccatacttgcggaattttttttggcacatctggggcatatgtacttggctacattctgtagcacgcataaagtcatttttggtgtatctccttgactcaaaacacctgcgtgaagttattgtttgccaaaagaagtcagatgaccttatg

SEQ ID NO: 389293 - DNA, 570 bp, Oryza sativa
actcgttctcaccatgccgctcctcctccgctgctcgccggcggcgtcaccgcctctgctcccgcgccgccgcagcggctccctcctctccgctgcgccgccggggcgccggccgctgctccccgccgccgcaggccgcgtcgtgctgggttgcgggctggtgacgctggactacctcgccacggtggacgcgtacccgcggcccgacgacaagatccgcagcggcgagctgcaggtgtctggaggtggcaacgccgggaacgcgctgacaggagccgcccgcctgggcctcaacacgaggctcatctccaaggtggcaaacgatgaaattggaggaaccgttctttcggagcttaaggaagctgggattgatatatctcatgttataatttctgatggtggaaacacaacatttgtatatgtcactatcgataagcaaacaaaaactcgtacgtgtataatcacatcagggtaccctccaatgatacctagtgacttgagaatgtcaagtttgtcagctgcactgcaagacgtaagcttactatacttagatggatattcagatgagat

SEQ ID NO: 389294 - DNA, 545 bp, Oryza sativa
  unsure (1)..(545): unsure at all n locations
ccacgcgtccgatctttctgtcgtgtatccgtcttcccctctgcgtcgaaggaaatctcccgtctcgtcgtcgcgccttgcgccgatctccatcccgcgagtcgcgagcagagagcaggggaggggaggggaggggcgcagtcacccgtcctgctgcatcctgactatgctctttctaatagaggtaacatagttggatggatgatgtttatggaaggatagaggtcttcccccagcacttcttaccatcacaacaatccatggagacccctgctgatggtctctccacaagtaagactaacctggattctccaccaagttcacgtagacgttcctggactccgaaacgagtaatgggagctgcatcacttttgcatttattgtctcttcctcgcataagatggtcttccagcactgagggatgatgacaagattgagctaaccagagctgaagttgggatcattaagnaccgagatttcttgatcctnaagggaggggattttcagttaaaagctccggttnggaaatatttntgaaggtttta

SEQ ID NO: 389295 - DNA, 603 bp, Oryza sativa
ctctgatgataatttcctgctggggccttggccttgaagatgcaaaaacccttgcctggactgaaaatggaccgaaagcagtatgagtggaatgcctagaacacaggtaacaatgtggtatgacaatacaaagaccgagcagagtaaactacacgactatgccaataaattttggagtggactgctgaagagctactatctaccaagggcatcgaaatacttcagtcgattaacaaaaggcctacaagagaaccagagttttcagctggaggaatggacgaaagattggattgcctactcgaatgaatggcagtccgggaaggagctctatgctgtgaaggctacgggtgatgctttggcaatttccagctcactattcaaaaagtacttcagttagctgcaattgtccacttcgaattattagatgattgaaaatatcacatttccagcccctgcactaggtgcacacgccctaactgttggaataaagccaactgtctactttgttgatgtggtaaataattcatacatcagaaacacactgtttagaagcttgagaatcgtgcaaatgaaggtcgaaaatataaaatgagtaaaaaataa

SEQ ID NO: 389296 - DNA, 605 bp, Oryza sativa
cacctcgggagggtacacggcgatcgagtagctcgagaacgagacgtggcaatggcgggagacggcgagctgaagctactggggatgtggaccagcgcgttcgtgctcagggtgcgcttcgtcctcaacctcaagtcactgccgtacgagttcgtggaggagaacctgggcgacaagagcgacctcctcctcgcctccaacccggtcaacaagaccgtccccgtcctcctccacgccggccgccccgtcaacgagtcgcaggtcatcctgcagtacatcgacgaggcctggcccgaccgcccccccgccgtgctgccctccgacccctacgagcgcgccgtggcgcggttctgggcggcatacgtcgacgacaaggtgcggctggcgtggctggggatcctgttccggagcgagacggaggaggagagggcggcggcggtggcgcatgccgacgcggcgctggagacgctggagggcgcgctccgggagtgctccggggggaagcccttcttcggcggcgacggcgtcgggctcggcgacgtcgtgctcggcggctacctcgggtggttcacggcgatcaagaaactgatcgggcgcaagatgat

SEQ ID NO: 389297 - DNA, 855 bp, Oryza sativa
ttggataattcgatgccacaatacaagagtccgcttcctgctacaagcccaccacagccttcatcagtggtctccggatttggaggttttggtagctcaaataatattcctggaaatttcggcttaaatcagaatgtcccctctgcacccacaactatggggtttgaagaagctttaagcacacagttcaaagataacagtcaatacattgccttgcagcagaacgacaactctgcaatgtggcttcatggagctgctggttcaagggccgtttcagcggtaccacctggcaacttctatggtttccagggccagaatcagccaggtggcttccgccaggggcagcagccctctcaatacggtggccttgggtacccaagcttctaccagtcacaggctggtttaccgcaggagcacccgcagaaccttactgagggaaccttgaacagctctcagaccactccatctcagccatcgcaccagatctggcaacacatcttctgagtcctgccctcgtgggagaagcccctctacactgccaggtgatctggtgacctggcatgccccatgaaatgagcagactagctgagctgccgtcttgcgcgcggagaagagtggacaatgctttctacagtttcgaagtatgttgctgttttttcttcttttcttcttcacttgttgcgtgtgtccggggactaatttcagctgttacgagtttactcgatagtgagttgctatgttgtaacggtaagtcctaatttcatctaacaagagctgcttcttataccctgtgtgattcaacctttatgttcttgatgccccactaattttacatgctggtcgctgcacatctca

SEQ ID NO: 389298 - DNA, 917 bp, Oryza sativa
  unsure (1)..(917): unsure at all n locations
ggatcccgccgcggnggccatacaggctaacctttgatggactggatatggcacccnccgtcggggctggcaattctgcgcctcctggctcgtacaaggggactgcaatgactatggaagcgcatgctggaaacatcatttcccaggcattcatgttatcttgcacaattaccctccaccnttccccaaacgtgtacttggcaaacttgtgccaattcttcaggttggagccattgcaacaataatggctggtgatcatattttccccagacttggcaatggttccacccccatggtactacctccctgcgtgccaatagatttggaaccatggcaacaatctggctatttggcaatttttgcgcaatctttcctacaaagttctggtgcctttgaagtttactgcaatggagatttggttttctcaaaattagctgagcagaggttccctagtgagtttgaactgcgggatctcatcaacagcagattaccagattctctggttgggaaaaatgtgggaaaatccttgtcttagacaatgacattggaatatcacatgccaatgcgacatcttgctatcaaggtagtactatattgtttgctgtttgacgtcgagcagtttggaagctctgcagcttgtctgtgaacactactattcaattaaatggcttgtaaaggataacctagagtgagatagtgactcaattgtatgaacttattagttatgccacaaaaaaaatcatcatttcctgtttattttctgagaggttgataaaatattgtagtattcgtcacctttggtgtgattcatactgttttatacttgtatgcattatgtatttctgggaaatttctatgcatgctcaagcgggcatgagaattgagacagcgctgaaattggaaaaaaaaaaaaaaaa

SEQ ID NO: 389299 - DNA, 490 bp, Oryza sativa
  unsure (1)..(490): unsure at all n locations
ccacgcgtccgcccacgcgtccgcgcatcaccaacccttcaatccaactcgcctcttcctcctcccctacgacgccgggaaattcctccgctccgcgcctcgcctcgccgcctcggcatccgcgcccactcgtcgccgcctcgccgccgtcccttcgcgtgcgccggcgcgcggcggcggcggaggccgccgtggggagcgtttccgcggcgacgcgcccagacttgcaagggaaacaatggcgcgtagtatgaggacatgtttgcacagtggaagacttgcgcttcttgcaatactggtttctggtggaattgtattgcagattctggcctgtgctctgtataacaactggtggccaatgctaacagttcttatgtacctcatactaccaatgcccctcatattttttcctgggcttccaacagcccctcaatgatgtctaatgatggggatantttgggtgagtttanaaaatttttgaggggggatc

SEQ ID NO: 389300 - DNA, 642 bp, Oryza sativa
ggcctgtaccattttgttaaagttaccggtgtcactgctaagagtttacataatagatttaaccgaaaaagtgttagcaacacagcatcagaggagggtgatatggtttcattagatgatctacaacgtgatgaggtattcaagaggggtactgtcccttcttggatggcatacagtggttacttcttgctaagcatcattgcggtaatcaccataccgataatgtttcgacaagtgaagtggtactacgtgatcatagcctacgcgctcggcccggtgctaggattcgccaattcctacggagcagggctcacggacatcaacatggggtacaactacggcaagatcgctctcttcgtctttgcagcttgggctggcaaggacaatggcgtcatagccggccttgtggttggcaccctggtgaagcagctggtgctcgtctctgccgatctgatgcacgatctcaagacgggacatctcaccttgacatcgccgaggtccatgctcgttgggagagctcatcgggacaggcattggctgcttcatcgcgccactgacgttcatgctgttctacagggcgtttgacatcgggaaccccgatggctactggaaggcgccatacgcgctgatctaccgcaacat

SEQ ID NO: 389301 - DNA, 757 bp, Oryza sativa
ccacgcgtccgggctcaccaacacggcgatcaccgaccgcaccgacgtgtacagcttcgggatggtgctcctcgagctcgtgcgcggccgcaagaaccgcatcgagcacgtgagcgacggcgccggcgccgccaccggagacgactccaactcctcgaacgggacgacgggcagctcgtcgcgcggcgcccggagcgattacttcccgctcatggcgctggaggggcacgtaggcgggcagtacgccgcgctggccgacccgcggctggagggggaaggggtcgccggcgaggtggagaaggttggaaaggggggctctgctgcctccacgaggacccgcagctgcggccgagcatggcgatggtggccggcatgctcgagggcaccatggaactgtgggagccacgcgtgcagtcgctcgggttcctccggctctacggccgggggttcgccggaccggccgacggctcgggcggcagcggcggcggcatcaagcaagccatggcgggttccaatggggaccacacaaggtcggggacgacgacggtgacgacgatgagcgggtggccgtcgtacatgtcgtcgtcgcagctctccggtccaagatagggcggcgcacaccggcgagaagattgtgttgttagagatagattatacggttgcattgatcattttggttgatttgtaaacagagggattaatttgtgcattcgtgaggtctatacaaattttgtcctgttttcccaaaaaaacaaaa

SEQ ID NO: 389302 - DNA, 1054 bp, Oryza sativa
  unsure (1)..(1054): unsure at all n locations
cccacgcgttcgcccacgcgtccgctcagctgtactcgcagatgatatactttccccttcagctggtcgggaacatatttctctggatgctcctagggggaggtacaatacaactaatttgcctgtttctggtcttggttcaagcagaggctctcagttcatggcaagctcattcaatggcaatcatgacatagtctcaaacaacaccctgcaaaatatagctggagttcaaacaggacctgcttggcttgaagctgatactgcagcaaacatgtttttggaatcaaaggatgaagctcatgattttgcaagcctacggcatgcgcttctggaacaggataggcaggttcttttaactggtgccaatcctttagcaaaggaactaaacatcaaggagctttacaatttgcaaagcagactagctcaggaaaaggctagagatgtatatcgccaaagatttcaaatgccagaatttcaaggcctggttcaggagcaaaataccccaattgacctgtgtggtcttcacgtaagcgaggcgatacacgccctgaactatgagctccaccaacccggcggaagattgctcgatccacaggccgtcgtctccaggtgatcataatatcaagcacacgtactccggcgaggctgaccgccgccgtcgagcagtacctcctggagcacggcattcagtatacgcaggcacagccgggccttttccgtgtcctgttacagtgaagtaacaggatggtaggctcatcatgtttgtgtacacctttgaaagaagaagaaaaaaaagaggaggaacaaaaaagaattgacccctgtactactgtatatggcagagatgagtagtactagcagaatagaaatttgaaatagctgttgtaatattcgtatagcaaggctttttttttttgtcagcaaaaaacgttgtaaaatttgcggaattaggcgatatgttctttcaatgtggcgtccctagctgctcgttccaatctaacacgcatgcgatgcaggatgctatttggactggnnnnnnnnnnnnnnnnnnnnn

SEQ ID NO: 389303 - DNA, 445 bp, Oryza sativa
  unsure (1)..(445): unsure at all n locations
ccgggcgtccgcccactcgccgtccaatccatccatgcgtcgcgcctttctatacttcatgatcaattccggcgagggtatcgccggatcgacgcgccgccggctggagccagccgcacagtggagcttggaataggcagctttctactgtgaatcaacagcgtgatgaacaaagataaaggtcatgacaaggagactcacagaacgagcaacgatataagtcataaaacatctgtggacaaggttaaggcccccaatctgtttgaacgagccaaggaagaggtcgaggctctcgttggagctgttcatgataagatggagcacaattccagtccccatggaaataatgcttgacctgcataaggactcaaaggatgaaagcaaggtgtcaattgaccaaaatggagacccacaagaatgaaacttcatggtacaagcgntgtat

SEQ ID NO: 389304 - DNA, 433 bp, Oryza sativa
aaggcaagtatttgtcaataatccggttttcgacaggagtttatcgggttttgttgttcatctcttcatgtgtacatggaaaaataaagaaccacatttgtcggctattaatgatagtgacgagctaaggaaacttttttttgctaaatctactgatgtaccaacaaaatgagtgtgaaagcaatattcctaacggcgcacaagattttctgaagtgtataaaaaatgcacaacattagggtagttatttaactatatggagtgatttaatttgaggtgatcatccattagaattaccgtatctagaaatgctggatgttccatattttttgcttgtgctttatttgtatgacatcatcaaattttcatagcggtcttctatctatggggctttttataatttaataaacgccatgagattgttttatgcgcc

SEQ ID NO: 389305 - DNA, 1849 bp, Oryza sativa
  unsure (1)..(1849): unsure at all n locations
cccacgcgtccgccttccttacccccaaaatcgaaatccctaattcgacgccatggccgcgactggcggcgccgccggggagaagacggccagcagcctcctgctcggcgtccggggctacacgtccaccctcaagaacgcctccaccgccagctgcaggttgagcgccggccatcccatcgaggtgactttgtgggaggcgtccccgcctgccctctcccacttctccgtccactgccccgatctcccatccttcaatggcaatctgcttggcgcgcctaaagccatcgccgccgccgtcgacgacgccgacggccagctcctcctcctcctccgagtccccatcgatcagcttggtgccccgcatgacaacgactacttggtctaccatccggatcccccgtctccgaaactggatctgctccccaacccgcctccccctaccctcggtgaccaccagctcgccatactcagctgcggcgacgaccgctacgtcgtggccgccctccacgtctggagtgagttcacttccacgctgcgcctgtacagatcttcttgttcgtctgggagttggacatcggaggaggtgtccgtggaggagccggtgagggacaggctgtgcccgatcccggactcagccaagaggcagctgtaccacgtcaccaccaagaccatcacgctcggaggtgcgaagggcaccgtgggctgggttgatctctggcgcggcatcctcctctgcgacgtgctcgacgaaatgtctccaaggaagctccgcgacatgccgctgccgtggccggccaagggcaattggaggatgtacctcaatggagatgtgtccttttgtcgggacatcgccatcagccaacacaaggattccatcaagtatctggagatggagatcgtttcaccaagaacggtgaccaccaccatacccacctccacctctgcagatcctacttcataccttgaatgggttcgccgcagcagagaacctcagccgacacggcgacgctccgtgttccaccctggttcgtggagaatcactacatggagcatgcctatcccggtcacttcatgggacgactggcgccgtgactgcactgctgaatcgcgtgaagtccatcttgacaccaacccaagtcaccattacgagttgctttcatagcctcatgctcagcaacagcggtgatgaacacagggaggaggctcaaggtcaaggggcaacctcttccttgtccctaggtcgcctgcgtttgtgttacccggccttgagttgcatcgatgatgatgttgtttacctcttgggcaacgctgctggcaggggtgctaagacgggaggaatgatggtcgctgttgacgtcaggaacaaggagcttgcgaggagtggccaagcttgaccccgaaaagaacaccctctactccatgcgatgctaccttgcaactgggatctccaaacgcctcaacactaccacagacacaagagttggacgacctgaggaggatgcagaagccgccgagtagaatgtgcgaacccagtgacatatatgcatcatactgcagcctgcctggatgcaaatattatcgtatcagtggtttgttggcttgaatgggggttaaggagttgtgctgttgctgggcatatatagttttgtgacaagaatcttatccaggttgcttactttgggttgatgataaaagtaggagtagacgtgaataacattaatatatgttggcttattttttgaggggatgttggcttatttatgtggcactaattgtctttatgcctttgagttaaacacaaaacaatgatccaactctttgaaccnnnnnnnnnnnnnnnnnnnnn

SEQ ID NO: 389306 - DNA, 707 bp, Oryza sativa
cgcacgcgtccgtgagaatgccagcaacaatgtagcgatgtatgacccttcgctgaaaaaatggcaccacccgtcagttcccctggctggtgcggagatagtaattccagtggcatctgcaggtggccttgtctgtttattggatcttagccacaggaacttgtacatatgcaatccgctaacacaatcactcaaggaaattccgcgcaggtcagtccaggcatggtcaagagtggcagtagggatggtgatgaacggaggaacctctaatgaaggttacaaagtaatgtggttaggaaatgatgggaattatgaagtctatgattctatgaagaatatgtggtcttgtccaggcacttttcctccaagcatcaaacttccgcttgctctaaattttaggtcacagcctgtggcggttggcagcatgctatacttcatgtgtgcagaaccagagggtgttttgtcgtatgatgtaagcactgggatatggagacaattcgtcatcccactgccacttcatctgactgaccacacacttgccgagttccagggaagggttatgctggtgggtctgctctgcaaaaatgcagcgacatgtgtctgcattttggagttgcagaagatgactctcctttggaaggaggggacagaatgccaaatatctgggcttagaattctacggtagcacattgagatgacatgcctgg

SEQ ID NO: 389307 - DNA, 547 bp, Oryza sativa
  unsure (1)..(547): unsure at all n locations
cgcacgcgtccgccacttcacaagccaaagtgcatcgcactgtaccatcaacagttgtcttacaacatcacagagtgtgttgaaaaagatggcgagctcgcatatactgttatcagaggcctcataaaatactggcctatcacaaacagcacaaaggacgtgatgtttttgggggaattggaggagatactcgatgcaacccaacctgcagagttccaaaaatgtatggttccccttttccgccagattgcatgctgccttaatagctctcactttcaggttgccgagagggcattgtttttgtggaacaacgaccacatcgagaatctaattagacaaaacagtaaggtgatattgcctatcatcttttctgcactggagaaaaatgtaattgagcactggaaccaggcctgtcaacaagtctctctcttaacgtacaaaagttattccctgatcgtgaccctgaactttacaaagaatgtttgagggaagtatgaggaaacaaagctaaagaaaggntcataaattgagcaagatctgtatggaa

SEQ ID NO: 389308 - DNA, 974 bp, Oryza sativa
  unsure (1)..(974): unsure at all n locations
cccattcccaaaagcaaagcgaacctaagctcgcttcgtctctctctcggattcgatcatggcgcagagggagaagaaggtggaggagccgacggagctgagggcgccggagatgacgctctgcgccaacagctgcgggttcccgggcaacccggcgaccaacaacctctgccagaactgcttcttggctgcctcggcgtcttcttcttcttcttccgccgctgcctcgccgtcgacgacgtcgttgccggtgtttccggtggtggagaagccgaggcaggccgtacagtcgtcggcggcggcggcggtggcgctggtggttgagcggccgacggcggggccggtggagtcgtcgtcgaaggcgtcgaggtcgtcgtcggtcaaccgatgccacagctgccggaggcgggtgggcctgaccgggttccggtgccgctgcggcgagctctactgcggcgcgcaccggtactccgaccgccacgactgcagcttcgactacaagtcggcggcgagggacgccatcgccagggagaaccccgtcgtccgcgccgccaagatcgttaggttctaaaaggataatacaaggggaaaccaacctgaattttcctccttttttctttcttttttcttcttctttccttttaaaaattaaagttgagggtattattttttcttttcctgagagcttcttaaaggtgaaaggggaaaaaaaagaaagaaaaagaaaaggagatgagatgggtgactcaagatgcatcaagcaaaggaagaacaatatgatgatgatgatgttgttgttgtagtggtggttgaggttggaagttggatggaaagagggaggaaggaagaagatggggttgttgtgttgtcctcccacaaatctctatttaattttaattcccttttgtataaaatttattattatctgtggagagcattattatccccaaaaaaaaaaaagggcggccnnnnnn

SEQ ID NO: 389309 - DNA, 554 bp, Oryza sativa
acacagcaaacccaaaccgacgagcggaatcctcagcctgctgagagagcctgagaccaagagggggattcttttttggttattgacgatggcgcacgcgacaagaaggatcaggagccgacggagctcagggcgccggagatcacgctgtgcgccaacagctgcggattcccgggcaacccggccacgcagaacctctgccagaactgcttcttggcggccacggcgagggacgccatcgccagggacaacccggtggtgcgcgcggccaagatcgttaggttctgagaggcaaacaaaattaaaaaaaaaatctactgttttagcaagaaatggagaaaaaaattgggaattgaaggtgtggatgttattattatgctgttctcttctcgcaattgtttttccctttttattctttttaattgcaaacgggaggataagtggtggaaaaggaatagtgtaacaataatggtgatgtgaggtggttgagggaaaaagaatcgaagaacaaatggattgggtgtgtatttgtctcgcaaaaaaaaaaaaaaaaa

SEQ ID NO: 389310 - DNA, 864 bp, Oryza sativa
ccacgcgtccggatctctcctgcaatcctcatcacacagcaaacccaaaccgcgagcggaatcctcagcctgctgagagagcctgagaccaagagggggattcttttttggttattgacgatggcgcagcgcgacaagaaggatcaggagccgacggagctcagggcgccggagatcacgctgtgcgccaacagctgcggattcccgggcaacccggccacgcagaacctctgccagaactgcttcttggcggccacggcgtccacctcgtcgccgtcttctttgtcgtcaccggtgctcgacaagcagccgccgaggccggcggcgccgctggttgagcctcaggctcctctcccaccgcctgtggaggagatggcctccgcgctcgcgacggcgccggcgccagtcgtcaagacgtcggcggtgaaccggtgctccaggtgccggaagcgtgtcggcctcaccgggttccggtgccggtgcggccacctgttctgcggcgagcaccggtactccgaccgccacggctgcagctacgactacaagtcggcggcgagggacgccatcgccagggtcaacccggtggtgcgcgcggccaagatcgttaggttctgagaggcaaacaaaattaaaaaaaaaatctactgttttagcaagaaatggagaaaaaaattgggaattgaaggtgtggatgttattattatgctgttctcttctcgcaaatgtttttccctttttattctttttaattgcaaacgggaggataagtggtggaaaaggaatagtgtaacaataatggtgatgtgaggtggttgagggaaaaagaatctaagaacaaaccgcctgggtgtgtatttgtctcgc

SEQ ID NO: 389311 - DNA, 396 bp, Oryza sativa
  unsure (1)..(396): unsure at all n locations
gctaacccattcccaaaagcaaagcgagcctaggctcgcttcgtctctctctcggattcgatcatggcgcagagggagaagaaggtggaggagccgacggagctgagggcgccggagatgacgctctgcgccaacagctgccagaactgcttcttggctgcctcggcgtcttcttctggggggtccgccgctgcctcgccgtcgacgacgtcgttgccggtgtttccggtggtggagaagccgaggcaggccgtacagtcgtcggcggcggcggcggtggcgctggtggttgagcggccgacggcggggccggtggagtcgtcntcnaaggcgtcnaggtcntcntcnggcaaccgatgccacagntggcggaggggggtgggcctgaccgggttc

SEQ ID NO: 389312 - DNA, 1053 bp, Oryza sativa
ctcgagaatcaggtgatgctctgatccatttgatcagttcgttagatggtttgatgaagctgttactgctggtctacgtgaaccaaatgctatggctttaacaactgccgataaggagggaaaaccttcgtcaagaatggttcttttaaagggtgttgataagcagggatttgtttggtatacaaattatggtagccagaaggcacatgatttatctgagaatccaaatgccgctctgcttttctactggaatgagatgaaccggcaggtaagagtagaaggttctgttcagaaggttccagaagaagaatctgagaagtatttccacagccgcccacgagggagtcaacttggtgcaatagtcagcaagcagagcactatcattcctggaagggaagttcttcagcaggcgtacaaggaattggaacaaaagtattctggtggcggcgtgatcccaaggcctggttactggggtgggtacagattaacaccaaaactttttgaggtctggcaaggcccacagtctcgactgcatgaccggcttcagtattcactgcgagaaggagataggagcacagtatggcacatcgagagggtgtccccttgactagtaaccccatcccagctctttggtaataaaaaggatctcatcttattatcaagaatcaaatcttatcccagctgcaaggagtcccaattgctcgatgatgttagtgccatgattaggtcgcgtgtttgagactgtgagtgcctgaagctctgctttttgacatgcccttcacacatctgatgttctctgaagcacagagtggatgaatccatgaaggcccttctcttggtcataagatttttctgtaaatgccattaaattttaaccgtcctgtagaaagaattatgatgagaatctcattatctcagcctggagaagactgttggacataggtcgacatcgtagtatatcgaagaaataatgttctgggaggaaataagtatttatcagcatcaagcatataagtcaataaagttgtgtgctgcaatggcattgtctgcttt

SEQ ID NO: 389313 - DNA, 661 bp, Oryza sativa
cgcacgcgtccgcatttatagagcagcttgtagaagatgaaactcatatggagggcgtacctcctgggtggggaaaaattatgaattgtgatctggatctggaagacaagaatgccatctacctgaacgggtggcaaaccactcaaaacctggatgtaattattcctttgaagaaggaagcaaggcccctactatagctccttgcttaccttgcagatcctcttttcgatgtggctgaaaagaaggaatgtatttcaagtcataccaaggcgccacaaaaactgaggtgggtcatatataccagagtgccatagaaactgaagtggttcttttggcttgtcatcttatcgaaagtcagataggatggtttgtggattaggtgtgcatacaacataaacacaggaagaaatctgcgcttacttttcacatctaacatgtaaagatgctaatcctgatggcaattttgtttattctaaatccttagtggctgtctgccccttacctccatggccttgctattttgtctgctgcaattttgcattttgtttttgttttttcatgtgtcctcgacagtgcggggggtaagttttcagtcagtcataagtttacatctgatctctacattatacaaaaaaaattatggaaggggcggccgacaact

SEQ ID NO: 389314 - DNA, 620 bp, Oryza sativa
atgggatatcgggtcggggaacttcggggtggcgcgggtgatgcgtaaccgcgagacccgcgagctcgtcgccgtcaagtgcatcgagcgcggccaccggatagatgagaatgtgtacagggagatcatcaaccaccgctcgctgcgccaccccaacatcattcgcttcaaggaggtgtggctgacgccaacgcatcttatgattgtcatggagttcgcagcaggcggggggctgttcgatcgaatctgtgatcgtggacggttcagtgaggatcaggccaggtatttctttcagcagctgatctgtggagtgagctactgccatcacatgcaaatatgccatagagatttgaagttggagaatgttctcttggatggcagcccagctccacggcttaagatatgtgattttggctactccaagtcatcagtattgcattcaagacccaaatcagcagtggggacgccagcatatatcgcaccagaggtgctatcccgccgtgagtatgatggaaagcttgcagatgtatggtcctgtggtgtgactctttacgtcatgcttgtgggagcctacccatttgaagaccatgacgaccccaaaaacattctcaaaaccattc

SEQ ID NO: 389315 - DNA, 751 bp, Oryza sativa
gggcgcgcacgcgtccgcccactcgtccgcccacgcgtccgtccacgcgtccgggccaccgaaacaatcaaagggtggggtgccaccacctgcgggtgtgtgaagctccttcttccaagaagggacatcacatgggcgacttcattcctcaagaagaacttgaaaaggttatggcacgttgtaacgatgctgctgcacaaaaagctaccaaagaagctgcagagaaggctaagattcaggctgacaatatcggacacaaacttctgtctaagatgggatggagggaaggtgagggtcttggcagtgagagaagtggacgtgcagatcccattatggctggagacgtgaagaaagaccatcttggtgttggcgctgtccaacctggtgagggcacatctgaagatgatatctatgagcaatacaagaagcgaatgatgcttggctaccgttataggccaaacccactgaacaatccaaggaaagcatactactgatataatgggaggtcatccaaggggcgatcagagaagccaagaagttcatttattcagcatataatctttgaatgccagaggcttcccggtgttctgcagtagctttggttttacgtagtgttacatctatgctactttcaacatgtcatttggtgtgtgtttccccttttgtttcacatggtgatgtattcatgttgctattgatgaataatgtatcttcatgattattcaactcatattgaacttatgtcacgtga

SEQ ID NO: 389316 - DNA, 720 bp, Oryza sativa
  unsure (1)..(720): unsure at all n locations
gcgacgcgtccgcccacgcgtccggagatttggaaactattggtgaagagctgagactcaaagacattgagtgtgtgcaaaacaaaattggtgagcctttgaaatcaatgaagagaagcaatgattagcagctgaaactcgagcatgaattatttgagaaggggaaagcccatcttgaaaatggaaaggatgtccgcttttgagattggaaaagtgctgacattgagatcttgaataccttccagctacttacagcttaaccaggtgtctatttggtgaacatgagtgagaaggactaccagaggaaaaagaacaagttcctacctaagatacatgcctgggttcaggaacatgggggtgaaactattattccttttagctgtgcttttgaaaggttgctagcggatatgcccccggatgaagctgctaaatattgtgctgaaaaccagattgcaagtgtgatcccaaaaattatcaagactggttttgcagcaatccatcttatatactttttcactgctggccctgacgaggtaaagtgttggcagatcagacgtcaaactaaagcacctcaagctgctggtacaattcacactgattttgagagaggcttcatatgcgctgaggtaatgaagttcgacgntctaaaaggactgggtagtgaatctgctgtgaaggcttctggaaaatacaggcaggaaggggaggcctcgtggacag

SEQ ID NO: 389317 - DNA, 693 bp, Oryza sativa
  unsure (1)..(693): unsure at all n locations
acagcagcaaaactaaactgatcatacacacaaattaagttgtgatcatccgagcaaaagcaaagcaagagaacggtagctagctagttgacacaatgagggcgggcaggttggtgatcctcgtggcggtggcggtggtggtggtggtcgccggcggcggggcggcggagggcgccggcgagtgcgggagggcgtccgccgaccgggtggcgctgcggctggcgccgtgcgtgtcggcggcggacgacccgcagtcggcgccgtcgagcagctgctgctcggcggtgcacaccatcgggcagagccccagctgcctgtgcgccgtgatgctgtccaacacggccagggtcgccgggatcaagccggaggtcgccatcaccatccccaagcgctgcaacatggccgaccgccccgtcggctacaagtgcggagattacacgctgccttgacccttgaggccttgagggggactgtggcacttatcgatatcaagacgtacggatgccgtgggagcttaggctttgtgtcggaataagcgagagtccttcatgttcggggctctgccacttatatggactatgcacgtggtggttgtgaaaatatgtatcctgtgtttcgtctgagtaaactggtaaatataataagaatatacaaaagcttgcttgacnnnnnnnnnnnnnnnnnnnnnnnnnn

SEQ ID NO: 389318 - DNA, 658 bp, Oryza sativa
tttggacggacgcgtgcgcatggagctcattggcgccgaacatatagccaacaagtttattcaccgttccttgttgctgttgcgcgatgaggacgaacgcgggtggaaatccaacaatattgcaaaagcaagtacggtagaaggaaactatagtcttcctgataatgttgcaatcatcaccttgcagagtcttgatgatggcaccacactccttcgattggcgcatctttttcaggctcaagaggacacacaatattcagtaatggcaaaggttgaattgagaaagctgtttggaaagaggataatcaaagatttgactgagactagcctatctgcaaaccaaaagaagtcagagatgaagaagctcaattggagagtaaccggggagagcaaaactgatcctgcaccattgaagggtggcccagttgacagccacgcccttgttgttgagcttggaccgatggagatacgcacattcttgctgaaattctgaactgcggttgttttggccttttattcttctctcttttgctgtgagggaaaggcttaatttggatagttgcctggatttatctgaggatgatgttgctgtcggtcactggtaataagagatttataagtgcttccagcaaatgaaataaaggaaaatattcttgtt

SEQ ID NO: 389319 - DNA, 442 bp, Oryza sativa
ccacgcgtccgaatgcgtagtggaagacattccaccagaggagcttcatgcaaaaatgcaagatcctgactgtcttgaagaagctcagtggattgatgttcgggagcctgatgaagtagataaagcttctcttgaagggtttaaagttctacctcttcgacagtttggaacttggggaccagttatgacagatgaatttgatcctcagaaggacacttatgttctgtgccaccatggtatgcgctcaatgcaggtagctaaatggctgcaatcacaggggttcagaaaagtttacaatgttgcgggtggcgattcacgcttatgccgtttaagccgatttctttcatcccaacttactagacattttcatgttcaccaatgcatcgtcagagccttttctacgtgttcgtttttcatgccaaaccaaaagcatgcttagtat

SEQ ID NO: 389320 - DNA, 734 bp, Oryza sativa
ccacgcgtccggtggcactgtcgggcgcgcacaccatcggcgtgtcgcactgcagctccttcagcaaccgcctctactcgtcgggccccaacgccgggcaggaccccagcatggaccccagctacgtcgccgcgctgacgacgcagtgcccgcagcagcaggggcagcccgcggcggggatggtgcccatggacgccgtcacgcccaacgcctttgacaccaactactacgccgccattgtcgctaaccggggattgctcagctccgaccaggcgctcctcgccgaccagaccaccgccgcgcaggtcgtcggctacaccaacaacccggactcgttccagaccgacttcgccgccgccatggtcaagatgggctccatcggcgtgctcaccggcaacgccggcaccatcaggacaaactgccagggtggccagctgatcgatcgccctaagcatgatgtatagctcgtggcaggcttgtgtgagttgggattgtgatgagattaaattgaaaattgtacgtacgacgacgtagctagctagatagagtgttgtaaacttattggtttgatcattcatttggtctctctgtattacgggctagctagctcaattagcttgctcgggcgtcccttctcccctcttcccgtagattattttactcggccctcgggacttctctgtgacattatagtgccaatatagttttattgttccaaaaaaaaaaaaaaaaaa

SEQ ID NO: 389321 - DNA, 840 bp, Oryza sativa
ctctctctggctgccatggcagaagcggcgaagttccacgggtctccgcctatatatccccacccccaagcccgcgccttgccgacctctactcctcctaggcgtgtggcgggtttgcctttctgactttgggagggagatttgtccaagaagaattccgttggaggaggattcggagagctccattggtctgtgggtcggtcggtccagcttgctggagaataagaagggggtgttgttgcgttgcgggcgagggaaggaggggaggagaggaggcgtcttgccgttggggttctgatccctcttggggctcccgtcgaggaggtggcacgatgaagacgccatcactgcttgttcagtgtttccctggcttgcttcccagcaaggctacgagttgtgtgccaattgtatcagaaagggatctacagctaccatcaccagctgtcgagataatcccatcaaagagtgctcatccttacaaatatgctggcgagaaggttgatgttcaaggtcttgacattttcaaggggaaggtcagtgtagcggatatgatagccttctccccttctgaagtagtcgcatccaaatatgatggatctctgaaatattgggagagttccattactctcgtcaacattattaaaaatgagatccgtgatgggcagttgagcttcaggggcaagcgggttctagagcttggttgtggatctggtctggctgggatttttgcctgtttgaagggtgcatccacagttcattttcaggacacatatgcagaaacaataagatgcagagcaatacccaatgtgcttgcaaaccttgagcaggctcgggacaggc

SEQ ID NO: 389322 - DNA, 571 bp, Oryza sativa
  unsure (1)..(571): unsure at all n locations
ggcagggggcggtgtccgtgtcggcggggaaaaaggagctaacgtgcattggggtgaagtgctacaaggattccttcttgatcgtcgccggggtgacggtggccgcggcggtggtgatgacggcgctcgcgtggcggaccaggaagttctactgccggggacatctacgcgcgncttcagggaggaggcggctgccggtggcggtggcgctggcccgggcaccggcgccggagaagatgagaaggtggaatccaaggaggagaaggcggtgatgacgccgacgagcacctgagctgcaattctgctgctcgatcagaagatctgagagatagaggagcaaaaaggactccttttttctttataactgttcttttagtttttaagaagtgctatactacaacattgcaacacccacatttagagggataattgacccacattttcaacttatctgggctagcccgattcctccaaaacaaaaccactttttatggctggcttataaggggaaggattcaatcggctggtcaactggagaaatttaattnnnnnnnnnnnnnnnnnnnnnnnn

SEQ ID NO: 389323 - DNA, 737 bp, Oryza sativa
  unsure (1)..(737): unsure at all n locations
ccacgcgtccgtcctcttcgcacacctccaccgaccgccgccgatcgtgcggtgcggccggcgtcatggcggcggccggcgacctcaccgacgaggagcgccgcgcgctccgggtgcagcaagttcgcgccgcttccagcgcctactgccccttcccgcccccagcccaggatggctcatcctggaggaccactaactacaaacaaggctgctgctttagcaaaattccttgagagaaagcttcagcagcctgatgggctggaatctctgaacccagaccttgtcaaattggctgtgagaaatgcaaaagaaacaataaaggctagcaagggtgaaccgtcaacttcaggaagaatagtacggcacgtttcatcattcggagattcttctgaggattctgatgattcaaaagatggagaagaaaccaagggggtcaaaagaaaaaggaagaataagaaggataagagttttcaaaacggaggagaacagagcaagaaaaagaagaaaaataaaaagaaaaatctaaaggctgctaaagattccaagtcccaaaaagcatcgaagaagaaaaagttgaaatccctatgattctttaacttctctggtattagggagctgaaggcgttgctgttgtcatttttcttgatttcacttttttgtgagtcccatttcttgtaagcattgtaagcacttgctcttcctggcattntgacactggaaatcccatttgcgggctg

SEQ ID NO: 389324 - DNA, 773 bp, Oryza sativa
tctcaaggtattctgtcaaggttgatggtgtgagatgcttcacatttgatgaaatggctgcagcgacaaatgattttactgattcagctcaaggtggtcaagggggttatggaaaagtttataaaggaaatctaactgatggaacagctgttgcaatcaaacgggcacacgaaggttctcttcaaggttcaaaggagttctgcacagaaatagaattgctatcaagactacatcatcgtaatttagtttctctggttggctattgtgatgaagaagatgaacagatgctggtgtatgagttcatgccgaatggtactctgcgtgatcacctttctgccaagtcaagaagacctctgaactttagccagaggatacatattgccctgggtgctgcaaagggaatcctctatctacacaccgaagcagatcctcctatatttcaccgtgatgttaaggccagcaacatcctcctggactccaaatttgtagcgaaagtcgcagactttggtctttcaaggcttgcgccagtaccggatgtcgatggaaccatgccagctcatatctccaccgttgttaaggggaccccaggctaccttgatccagagtacttcctaactcacaaactgacagacaagagcgacgtgtacagcctcggcgtcgtgcttctagagctattgactgggatgaagccaatccagcatggcaagaacattgtcagagaggtgaacacggcataccaatcaggcgagatcgccggagtgatcgacgagcgg

SEQ ID NO: 389325 - DNA, 994 bp, Oryza sativa
ggaagatggatggtgtgattgtgtttgcggatgacagcaatgttcatagcttggagctgtttgatgaggtgcagaaggtccagtggatgggtgcggtgtctgtgggtatactcgcacatactggaacagcagaccagccacgacttagtgaagaggacaagcagaatatgcctcttccagttcaaggccctgcctgcaactcttctgggcacctagccgggtggcacacatttaactcattgccttttgccgggaaaactgccactgttgttggagaggcagcaccggttctaccaaggggtttggagtgggctggttttgtgttgaactctaggattctttggaaagaggcggagggaaaacctgattgggtgaaggatctggatgctgtgggtgagaacggcgaggaaatcgagaacccccttattttgttgaatgatccatcctccgttgagccattggggaactgtgggaagaagatcctcttgtggtggctccgtgttgaagcgcgagctgacagcaaatttcctcaggggtgggtaattgagccacctttggacatagttgttcccgccaagcgcaccccatggcctgaaactaccgctgagctttcggctgaattagtagattccaaacaagatcaggagggtaggcggttgtcaagaaccgacagatcatctcggtcccgaagcaccacaaagcggaaggagaactgaagcaaaataaacacatcttgtaatgtatatcttacatctgcacaaactacaataggaaccatgtctggttaatctggtgggtattatgtttattttttttcctgatgttttgctaatgtggcagcgcttcatactcgtatgtcttctgtagaagactgtttttttattggtagctgtattatctatgttgtaatatacagtgcaatctgaatcaaggaaatggaagctggatcctggatatcatatacgctccctcccaaaaaaaaaaaaaaaccaaa

SEQ ID NO: 389326 - DNA, 448 bp, Oryza sativa
aaacggattcatctgaggcatacggagatggttttcgagctgccaatcgggctgtcgaaagctatggcctgagaagtacccttaatcatatgaaaatgacagccgctttcccatattgatcattcctcaattgtgaggattgatgcatatttggagattattggagttacatataccctcatcatggtagcattaatttacagtaaattgagaaaagaaagaagaggattgaataggacataaattgcaccaatgctttcttgttgtctttgaaataatacatgtaagtcttcctatagagaggttttatagtttttcacagtgaacacatccttggaaaagaacaggcaatcagaagataattttgctgagttatgtacttatgtaacaccttttggatctgaatgtatttatttcattcactccaataatttcatttttaaacaaa

SEQ ID NO: 389327 - DNA, 987 bp, Oryza sativa
cccacgcgtccgcccacgcgtccgggcacgcgggcgacctggaggagcggtgcgttctccttctccctccccggcccctagccgccgcacccccaccctcgcccgcctctcgccgtcgccggaacggaaaatcatgggcgcggaggcagagcaccgcatgtctccctcccccgctcccgctcccgctccccctacccctgttgggaggaccgacggcgacgcccctcccatggtgctgggcctgcagctgtcggcgctcatcgaccacgtcgcgcgcgtcgactggtccctcctcaaccgcatccccggcgaccgcggcggttcacagcaggtctgtattgaggagttgaatcatattctggctgaagtgaatgctcaaatcctcccttgccgtgatgacctttcttcaataaggactatagccggtggtagtgtcgccaacacaattcgaggtctctcagcaggttttgggatatcaactggaataattggagcttgtggagatgacagccagggcgttttgtttgtcagcaacatgagctttagtggagtagacctcacaagattaaggacaaaaaaggggcacactgctcagtgtgcatgcttggtcgatgcaagtggcaatcgcaccatgcgcccttgcctatctagtgcagtcaagctccaggccaacgagttcaaaaaggaggacttcaaaggctccaagtggttggttgtacgatatgcaagacagaacatggaacagatccttgaagctattaggattgctaaacaagaaggtctctcagtatcattggatttggctagttttgagatggttcgtgactataggacacaactcattgaccttttggaaactggcaacattgacctttgctttgcccatgaggatgaagctagagagcttctatggggagagctgacatttgatccaaaggaggcacttgctttcttggccagtactgtaaatggccgggtgaccctagc

SEQ ID NO: 389328 - DNA, 1324 bp, Oryza sativa
cctggacatccattccacttctggcttactgtaccttgcctgccatatgcttgctcactgggaagtttatcactccagagctcaccaatgttgctagtctatggttcatgtcgcttttcatctgtatttttgtcactggcatccttgaaatgagatggagtggtgtggccatcgatgactggtggaggaatgagcagttttgggtcattggaggtgtttcttcacatctcttcgctgtattccaaggacttctgaaagtccttgctggtgttgataccagcttcactgtgacatcaaaggccggagatgatgaagagttctcagagctatacacgttcaaatggaccaccttgttgatacctccaactacactgctgctgttgaacttcattggggttggtgctggagtttctaatgctatcaacaatggatatgaatcatggggacccctgttcgggaagctcttctttgcattctgggtgattgtccatctatatccgttcctcaagggtttggttggaaggcaaaacaggacaccaacgattgttatcgtctggtccattctactggcttcaatcttctcacttctatgggtccggatcgatcctttccttgcgaagaataatggccctcttctggaggaatgtggtctggattgtaactaagcagcctacactccatatatgcggcgatacgagcttgaagaaattattttgcaggcggcgaatcaagcccaagtttttaaattctttcctgtagatagaaatacagatctccggcatttcttttgttccacagtggtagggcagcttcatctgtgtgtattagggcaaaccagaagctatgtcaattcttgtgcagtgctaccagagaagtcaaatctactcctgtggttgatccaagattatttatttatttggaggggatttccatcatcgctgagcttacttggtggaagctgcagcatgtgtaagctaagttacaaaggcgttgccttgccatttggacagaaggaaggaagatgccaattgtttattttagtaaattaaaattgaattgaattatgcacattccggagttcatttgttccactcaataccatacacagctggctggtggtacatttagcatgaacagatttgtaggtgtttagcaaatgtacctaagttggattcatccggtgtgtggtgttgtacaagtggccatacagtagcgcaagtggtggtgggcacttcactcctgtttgttttgtgtaaccatacagcatacagatgataaaactcttgttcacattttacagagagggaaaaaaaaaaaaaaaaaa

SEQ ID NO: 389329 - DNA, 432 bp, Oryza sativa
agtgctaccgcttgacctatgccatgtcaatcaatccaatacctgacattgttgtggctgctccatcaactgacccatcacaaggcgaggcattacatcaatcaccgattctaacccggaggcaggttggaagaccaaaggaaaagccagctgatcctcgaatcgcaatcaaaagggcggtgcgctgcagcaggtgtaagggttatgggcacaacaaggcaacctgcaaagtccctatcgcagcataaaacccttgccatatgttctcaagtgtaaattatgttgtgccttttgttgcccttttatgaactcgttctagtggaacctgtgcaatgccatcatgtatcttttatcagataacgtgtgaaacataatcttattcggtggttttagcttcaagtatggtttgcctagcactagcccgtactttta

SEQ ID NO: 389330 - DNA, 336 bp, Oryza sativa
tttgcccttgattaattaaggataatccatccttccttccttcctagctctcgtctcggctagctagtgtgtgctcttcttgtctagcagtacaactagttgatagggactagctagctgatcatcggcagatggattaatgtttcgtctggtgcgatcaaccgtgtgtctaatcttgcgatcagcggacagcagatgtgcctacatgtgcatcacgtgacgctgtgcgtgcctcacgctttttgtgttggtatgtttgtaaaattgtaaaaaatgtaaatcaggtgtgtgtaactatgtgttcccagtgtcttgtatttactcctccagttagtg

SEQ ID NO: 389331 - DNA, 424 bp, Oryza sativa
ccactgacctctgcggcggcggcgaggagaggagaggggagaagccgaggaggaggcagcggggagagaggatgccgcggccggaggtgcaggcgccgccggagatattctacaacgagtcggaggcccgcaagtacaccacctcctctcgcatcatcgaaatccagtcgaggattaccgagagggcgctcgagttgcttgcgctacccaacgatggcgtccccaagttgcttctcgacatcgggtgcggttctggacttagtggcgagacattgacagagcagggccatcactggattggttatgatatttcgaagtccatgcttgatgttgctctggagcgtgaagcggagggtgatctccttcttgcagatatgggccagggtttaggcttgcggcctggagttattgatggagcaatcag

SEQ ID NO: 389332 - DNA, 1593 bp, Oryza sativa
cccattcgtccgtattatactagcttgcttgttcaattcaatcgagcagtagctaattgcatagtgatcgatcgatctgtatagatggtggtggccggcaagaagcagggacggcattctttttctgcatcatcatcgtcgtcttcgtcttcttcttgttcagtagtgcagctgggtcatcatcagcgcccacagggtgaggaccctctcatcggcatcaaagcagcagcagcaggaggaggaggaataatgagaaagggcccgtggacggagcaggaggacgtgcagttggtttggttcgtgcggctgctgggcgaacggcggtgggatttcttagcaaaggtgtcaggtttgcgcggcggcgggtgatgagcatatgcgtgcgtgcatctaatctatcgattaattgttgatgatgtcgatcagatggatggatgcatgcatatgccgtacatagtagatttgatgatagtaactgacataaatataatgtatgcgtgcgatcaacgctggttgttggatcgtccgtcgtgtgtatgggtggtgtgtggctgatgcaggtttgcagcgcagcgggaagagctgccgtctccggtgggtgaactacctgcatccagggctgaagcgagggaggatgagccccgaggaggagaggatggtggtgcagctccacgccaagctcggcaacaggtggtctcgcatcgccaagagcattcctggccgcaccgacaacgagatcaagaactactggcgcacccacctgcgcaagctcaagctcaaacagcaaaagcagcagcagtccgacgaccaccacaacgacaacgacgacgacgacgaccgcaactcctcctcctcttcgtcctcctccaacagcaacagcaacctgcagcagcagccgcagccagaggatgagtcgtcggccagtggcagcctgcaggcccaacatcatgaggaccagcaccaactgttccttcatcctctctggaacgacgacatcatcgtcgacgtcgactgctggagcagcagcaccaacgtcgtcgctccgccgccgatgcccgcctcgccgctctgggatatcgatgacgccttcttctgctcggattattcgctacctctctggggatagtatatatcatccatcagccgccaagacgatgacgactacatcaactcgatcgatcgatgcctcctaatcatgtgggagtactcagctcatctcaattgttacatccttgctacagctgctaattactgtaattactagcttgcatatagggatcgacggaggaattaatatatacatgttagtaactcgttctatagcgcaacttgcagttgcatctcaatctctgatcagtactatataaatatatatatgtaacagctgctagctatagctagctgcgtacacatccatatgaatgtgtgtgtgttcatgcttggactgcctcttgtagtatatgcacatatacgtgcaagtgcaacagacggctgctggctgatatattttgatcagcgcgccacgtgcacgtgcatacgtttcttcatttctggcaaattcatatgtatcatgttatacactgaactgacccc

SEQ ID NO: 389333 - DNA, 421 bp, Oryza sativa
ccacgcgtccgactagaggtcgtcaacggaacgaaaatgattggcatgacctgttcatgacagcaggattcagtgactataagattgtgaagaaacttggtgctcgagctgtcttcgaggtctatctgtaggattgcttctatctaatatgcgcaatggacgtggatcgtgtgatgtgacgaaataaataaatggtgcaccataataatgactttggaatggaatttcacagatcatgcatgaagcggactgaaatcttaagctcggatacttcatgaactgtgcaagggttcatttcaaagatatctagcagtcgttgcgctagctttactgcacccatggcttgtgtttgttgtcgtatatgtgtggactgccccagtttattggaaatgaatcttaagcctacgttagaattgccaat

SEQ ID NO: 389334 - DNA, 591 bp, Oryza sativa
aaatcgggcgtaacacgatcaactgtcctcccatcgacaattcttccaacactacatttcatgatacagcaaattactatgctgaaggaagtgataagttgactgatcttctccaattgaggaaatatctgatgctgctgatgcaagtacaactggttcatctcagccatctggagtgcatttcagagagaaggaactgcagtcgtacatcgccaacttgcagcaaagtgtcaccgaacttgctgaggaagttcagagattaaagctcaaaaacactcagctcgaggagcatgatcaatgcattgcccaaaaaagatgaaaggttacgaagagaggatacccgacaacaatgatatgcacaatgcacttgtaacccccgctgtaaaatcagttccccaattttgaatttggttagcaaaattatttgtattttgttcgaagtcaggcctggtgtatctttgtaatttgtaattattttagcaaggtgaaattatagttattttcatttgtacaggatatttcaatctataccaaagttaaaagcttggtactagaaaataccaaatcatctttcctaaaaaaaaaaaaaaa

SEQ ID NO: 389335 - DNA, 488 bp, Oryza sativa
tgtccaggaacgcaagagagtgatggagcggactggtgagatccggtgcgccatggaccacatcctcgaggccgagaggaagggcgagatcaaccacgacaacgtcctctacatcgtcgagaacatcaacgttgctgctatcgagacgacgctgtggtcgatcgaatggggaatcgcggagctggtgaaccacccgagcatccagtcgaaggtgcgggaggagatggcgtcggtgctgggcggcgcggcggtgacggagccggacctggagcggctgccgtacctgcaggcggtggtgaaggagacgctgcggttgcgcatggcgatcccgctgctggtgccgcacatgaacctcgccgacggcaagctcgccggctacgacatccccgtcgagtccaagatcctggtgaacgcgtggttcctcgccaacgaccccaagcggtgggtgcgccccgacgagtttaggccggagaggttccctgaggagg

SEQ ID NO: 389336 - DNA, 474 bp, Oryza sativa
ctcgggagaaggcaagtaacttccgacgccgcgcggcgcacccgggagcgcgagagccaccgccgtgccaccgccggcgacagcacccgccgccgccccgccgcgcggactgaagcgagaattctcgccgcctgctgagaccgcgctacctttcttcaccaacggcttcgtcgacctgacgaccgccgcggcgccgccaccggccatgatgatgacgagctccttcaccgacagcgtcgccacgtcggagtccggcgggagccccgccaagaaggcgaggtccgacgacgtcgactcgtccgagggcagcgtcggcggcggcagcgacacgctgggtttcaccgaccagctggagttcgacccgttcatgctgttccagctcccctactccgacggctacgagtccatcgacagcctcttcgccgccggcgacgccaacagcgcgaacaccgacatgaacgccggcggtaacct

SEQ ID NO: 389337 - DNA, 934 bp, Oryza sativa
  unsure (1)..(934): unsure at all n locations
ggatcattcaggtatcgagaaccattggtgatgtttacttgaagaaacaagagtatagcatggatcccgtgtttcgtaacgttggtccccctattcctttgaagcggccagctcttagcgcagaaccatcgattcaagttcgcaagctcaaaccaaatgatctgttcctgatatttgcttcagatggtctctgggagcatctcagtgacgacgctgcggtgcagattgtcttcaagaatccaaggacgggtatagcaaacagattggtgaaggccgctttaaaggaagccacgaggaagagggaggtcagcttccgtgatctgaagacgatagagaagggagtgaggcgccatttccacgacgacatcagcgtcatcgtcgtctaccttgaccgccaccgcggtcgccgtcacacaagggtcgtcgactcgagcagcaactgcaccaacgcccccgtcgacatctactcctccaactccggccaatccgtggagactcttcaagcccatcggggctccggttggtagaagaagactgggacgcctcccttgaaaagatcaagacggtctcttgttaattagtaaaaacatgtagagccgctgatcagtaacactagctgcagtggcatcatcggaagaaacgcgggaatgtacataaattagtagcggcgcgtggcattttgatgtggggaagaatatttgattttttttccttcctttttgggctaatttaattgcagagattactttttgctgttcttctttggtttatatttctgctgaaccagcagttaactgttgactgggaattaccgcatttatgtgcggcaagataatatagtagtggtataatggtattacactgtaacttgctgagattatattaactaaaaggtgaatcttaatggagatcttacataaaaaaaaaaaaaaan

SEQ ID NO: 389338 - DNA, 729 bp, Oryza sativa
  unsure (1)..(729): unsure at all n locations
ccacgcgtccgcggtcgagcaggtggcgatcaccccgcgcgtggagcagctcgtcatctaaagcgcgcgacgcacagtgaagcaagcaaaccaagccagcaatggtcgacgtcatatcaccttgaccccccaacggatggaccagcgagcacgagccagccatggtttggcacggcccgggacggcaaagggaccaggcgatggaaccccgtgaggcccgacggcccaggcaaccagcagcatccccgcgaaaggtccaccggatgcaaaantgcaaacgcgataagctcgcgggtgcaactggtgaaattgggtggtgcaatcgtgtgtgggcgagctctagcagatagtagcgtggtggtggtggtggtattgttgtcccggcgcaactcgcccaagtgggggggtgaggaggatactctgtgtctactagcgtgttcttgtcagggaatgcacggtgtcgtcaagtgtgcaaatcctaagggtcataattcgcgtcattgtcactagtggatcacccgagtgagtttgtgagggtttcagtgaaaaaaaaaaactgtacaaacgatgtcttgtggtgtggagaagcagcagagatgaagaacaatcaatcatcccctttgttcttttgatcttaggagtccaaatgataggtctaatcagtaatcacaaggtcgcaaacatttaaacccagaaaaaaaaaaaaaaaaaaaaaaaaaaaaagggcgg

SEQ ID NO: 389339 - DNA, 1260 bp, Oryza sativa
ctcatcctttgatttgggtggttgccattcatctccatctctcgatccatttctccccccaaattcttctccaatcagctcgattccgtcctcttcgagcagatcagctcccgctgatcgaatcggtgtcgaattttggttgtggttgctgttcttgggttggatcttggtggtgagaaagatcgtgatttttgttgttgggatttgggaggaattgtttgcgctggagggaggagttgagctcgctggccatggtttgccgaggcgagcagagaagaaatctctgagctttatgaagatcgccactcacctgcgccgctcctgcttcctccactccttctcggttgtcttcctctactggttttatgtgatctcataattctgggggaatcatcttctccgcgtcaatccgccattgttactagtagtagtagagctctcttgttgttgttcttcttcttcgtgttcttcttcggttgattaaataatcgtagcagcagaagaagcagctgtttgtagacaaggtgtttgtggaaatgtcgtcgtcgtcgctgtcgccggcggggtcgtcggacggggactcggcgggggtggtggtggcggcggaccaccggagggagaagcggcggctgtcgaacagggagtcggcgaggcggtcgcggctgcggaagcagcagcacctggacgagctggtgcaggaggtggcgaggctgcaggcggacaacgcgcgcgtgctggcgcgcgccagcgaaatcgccgggcagtacgcgcgcgtggagcaggagaacacggtgctccgggcgcgcgccgccgagctcggcgacaggctgcgcagcgtcaacgaggtgctccgcgtcgtcgaggagttcagcggcgtcgccatggacatccaggaggagtgcccccccgacgacccgctgctccggccatggcagatcccctgccccgccgccgcgcacatgctccagtactgaacgaacgccgcgccatgggagagtgagctctgagctaagctgtggttggcatcaagaagtcttcatcttttttcttctcttggctgctttgagaatttcaaggctttaatctgctgctgctctatggtcttcttctactactcttctgatgatgattttgtgtctgaataagtgatggtcttttgtctgtgtccatgtggtgttttgtaagggttaattatgttgtttgtgttatgtaatgttataaactatgtcattatatcaattcctcttgtgatcaaaaaca

SEQ ID NO: 389340 - DNA, 392 bp, Oryza sativa
tcgagatcgagagacgcgagcgcgactctcctccccaggcgccgcccacgcggccggacgatcaagacttgggtttctttgccaatttcttgggcatcttcatatttgtcttggtcatcgcttaccactttgtgatggcagacccgaagtatgagggaaactgatgccatttttgttgagcaaagggatcatatgatcctcagatcaaaatagtgcgatgtatgccagttaatgatagcaatagtgcttgactgttattgtaagttcttacgcgaaatctggacctgcaatttctggcattttgacattacacatgtttaatcgattgaaatagtgaatccaggatattccaaaaaaattgattatacttatctaaaaaaaaaaaaaaaaaa

SEQ ID NO: 389341 - DNA, 738 bp, Oryza sativa
cacctttcttcctcgtcgacgagatcatcggcatggcggcggcggcagtagcgttgctcgcgttcctcctcgccgcggcgtcagcggcgtcgtcggcgtcggcggcggcggcgacgctggtggagggcggcgtggtggggcgcgcggcggtggtgatgaggcggggagggaggacgtgccgtggcacggtgggggagtgcatggagttcctcggcgtcgacggcgagggggaggacgagctggcggcggcggcgacgggcaagcggcgggtgctgcagggcgggtcggggtacatcgggtacgacgcgctgcggcgcgacagcgtgccgtgctcgcagcgcggcgcgtcctactacaactgccagcccggcgccgaggccaacccttactcccgcggctgctccgccatcacccagtgcaggggatgatcgatcgatcgatcgaccgagctagctaattaatgaaattaaatccaatgccatgtagttcgcagcaagaacacacgcacagtgtccccttgatcatagctgagcttatatgctatagctgtcaagatctcagtgttgtccttgcatgcctctcatgcttgattgattagatgtgtaatggtcctaatggatggatggtgttgtttgctatgctgcttgggtgaaattaaagtgatcaagattatgtttttttgtatctatatgcatgcaaattaactggcgcttgcccctttgcttcagttttttgttt

SEQ ID NO: 389342 - DNA, 781 bp, Oryza sativa
cgcgcgcgacgtcgaccaaagcaagcaaccaattcctcctcctcctcctcctccctcctcctcttcctcctcctccgcgtcgagcgccatggcgagacccgccatcgtggcggcgcccgcgctgctgctgctggcgctgctcatcgcgctggccaccgggggagccgacgcggcgccgggcgaggtgccgctgagctgggagctcggggttgtcggcgccgacgacgcgttcggcttcccgggtgaggaggcggcggacagcgccaccgcggtggtgcggcgggtgctgcagcaggggagctacatcagctacggcgcgctgcggcgcgacacgacgccgtgctccgtgcgcggcgcgtcctactacaactgccagcccggcgcggaggccaacccctactcccgcggctgctccgccatcacccagtgcaggggatgatccatccatccagctgccaccaccaaaactgttgaaattgggatttgtgattcaaagttcgtctcgtctactctatacatattttgtttatttttgtcttcttttattgttcgtctccttttgaaatgtgaacgaattggtagggattggtgcccgctaatctaaagtcaagagagatgtacactgtacatgtgtccggtactcctactctgtatcaattataaataaatcgtgtattctcctaatttgatggatggattcatcaattcatcattcatggatgattagctgtcctgtcctttgtgaattattacttcttgttccaaataagccatttctctc

SEQ ID NO: 389343 - DNA, 667 bp, Oryza sativa
ccacctccgagcaagcaaacaccaaaggcaggcagggcgggaggcgaccgaatccgaaggagccaatggcgaaatccctactggcggcgtccgcgctgctgctggcgctgctcctggcggtggccgggggagcggcggcggcgggggaggtgccgctcgcctgggagctcggggtcggcggcggcggcggcggcggcgaggaggacagcttcgggttctcctccgaggatgcggcggccgacggcgccgcggtggtgaggcgggtgctgcaggggcaggggtacatcagctacggcgcgctgcggcgcgacaccacgccgtgctccgtccgcggcgcctcctactacaactgccgccctggcggccaggccaacccctactcccgcggctgctccgccatcacccgctgccgcggctaacccacctccgccaccacccgctgctctgctcaaaccgggattattcaaagttcgtttgcctcgtcttctactttttctttttctttttgcccccccttttctttcgtttccttgtcgctgttttaaccgtgaaagaattggtctgggtcggtgcccacgaatcgaatcgagtgagaactgagaagaagatgtgtgccccctgtatattgcgattggattcttatattattatgaattaagtcgtgtat

SEQ ID NO: 389344 - DNA, 726 bp, Oryza sativa
  unsure (1)..(726): unsure at all n locations
ggggnccagcccctccaaagttagatncttgagcctgaagcatttgggtntaactgcattgctcaganctcagatgtggctcactccccagtatgatgttatcaggagcacgcagcacattggngttcaagtatgcacacattcctttggcattggaggctacaatcaaggtcaggattactaggggttcaactgatttctgtggaaagttcattgcacatactgctagtatcaaggaagatgtcatattgctggactctggagaagaaatggtggctatctcccatgatggagccattaatttctcccgcagtgtagttgcagttgaaggaaatggcggagttctgactgttggtgttcatgcaaggcagagtggtggtgagaatatgagatgttcttataaagagtttatccggtaagatgtggacggagtcatgacacacttgatgttggattttgccagatgagcgttgaagttgcttggtcgctcatcttttaatattgaaaaaagtctaggcccctgataatatttttcttgcatatgacaatacttaatattcggtattagtagtggaagtaatagatgtgctccgtggcattgtaatacactaatatgacagtactgagtttggaccgggggcctcacgatccatgccattgtaaatttgctactctatatcataaaaatgctattattattcccctnnnnnnnnnnnnnnnnnnnnn

SEQ ID NO: 389345 - DNA, 1111 bp, Oryza sativa
ttggacacttgatcagtttagctctcttgctcctctagctgaccactctactatacacacacatatatacttttttcttggtgtattagtaagcacacctcatcgacatcaatggccaccgtagaggttgagaccccgaccaccgtgctggccgaggaggcgccagtggaggcgacgccggcggccgccgccgccgaggtggaggcgccgaaggaggagacgccggcggcgccggccgaggctgtggccgaggaggcggcgcccgccgaggccgaggtggcggagaccaaggaggcggagccagctgcggccgagccggcggcggaggaggtgaaggaggccgagcccgagccggccgagccggaggccgagcctgccaaggaggaggtggcgccagagcccgccgccgccgccgaggcggaggccaaggaggccgagccggcggcgcaggtggccgaggaggtgaaggaggaggaggcggcgccggcgccggccgccgaggaggtgaaggtggaggaggcggcgccggtcgcggagccggaggccgagaaggccagcgagtgagtgcatgccggggaaggctggctcgccgtcgtcgtacaccgtggagtacatgcatggcccgcgcgcgccgccgccgccggcgactcgccggagttgtacgtacgtgtgcgtgtagcgagtgatgagttgagtgagctggagtggtagtactcgactccgtaggtgtgtgtgggtacgcgtgacgtggggctaaataaaagagtttgtcatcgagggcggtggggcccagcgtcagtgacgcggtgcccctctctggcccccacatgcctccgtcgtcgcaggcgttgtttgtcggtcttttgtgctttttttttttcgtgtttgattggttttcatcgtgtaatgggtgcgtttctgagagtacattgtctgtctctatgtgtgtgcgatctcagccgttcatggccgtgtgccaaccatttctcgccgtcggtgaacctaccgtcttgtgtgttgttgttttgatcggttcgtcgtgtatatatgggtgtgtcacgttatcccacccaaaaaaaaaaaaaaggggcggcgctcaaataaagaccga

SEQ ID NO: 389346 - DNA, 562 bp, Oryza sativa
  unsure (1)..(562): unsure at all n locations
gtgctgcaagcgattaagttgggtaacgccagggttttcccagtcacgacgttgttaaaacgacggcctgtgngcgcgcttaatacgactccactatagggcgaattgggtaccgggccccccctcgaggtccaccccacgcccccgcgcgccgccgccgccggcgactcgccggagttgtacgtacgtgttgcgtgtagcgagtgatgagttgagtgagctggagtggtagtactcgactccgtaggtgtgtgtgggtacgcgtgacgtggggctaaataaaagagtttgtcatcgagggcggtggggcccagcgtcagtgacgcggtgcccctctctggcccccacatgcctccgtcgtcgcaggcgttgtttgtcggtcttttgtgctttttttttttcgtgtttgattggttttcatcgtgtaatgggtgcgtttctgagagtacattgtctgtctctatgtgtgtgcgatctcagccgttcatggccgtgtgccaaccaaaaaaaaaaaaaaaaaaaaaaaaataaaaacaaaaaagggcagccgcacgcgatctag

SEQ ID NO: 389347 - DNA, 292 bp, Oryza sativa
cggtttttccgtcgtttctcttcttgaagacgccgttttggcgtcccctagggggcgatctcacctgtgtacctttgttggtctagcggcggtcgatcacgcttagcggcggctggtccggtgctagtcttctcctgggttgtgtgttggcgctgttggggtgtgggtggtggtatattttttcctttttcctggttacgaccctccagggttgtaatcttgtaattttttttcctgctctatcaatagaacttcgcaccgtctcgtgcgagtcgttaaaaaaaaaaaaaaa

SEQ ID NO: 389348 - DNA, 745 bp, Oryza sativa
  unsure (1)..(745): unsure at all n locations
ccacgcgtccgcccacgcgtccgaaccctagctccccccgcgccgccgccgccgccgccgccatgaagcgcaacccacgcgtgacgagctcccggcggaagtgccggaaggcgcacttcacggcgccgtcctccgtccgccgcgtcctcatgtccgccgccctctccaccgagctccgccacaagtacaacgtccgctccatccccatccgcaaggacgacgaggtgcaggtggtgagggggagctacaagggccgcgaggggaaggtggtgcaggtctaccgccgccggtgggtgatccacgtcgagcgcatcacgagggagaaggtgaacgggtccaccgtcaacgtcgggatccacccatccaaggtcgtcgtcaccaaactcaagctcgacaaggaccgcaaggccatcctcgaccgcaaggccagcggtcgcgccgccgacaaggccaagggcaagttcaaccgccgaggacgttgccgccgccggcgccgccggggcctcgctcccggagatcgattaggctcggggagatatatccctttcctctctgttcgtaccgtctctcctattattatcatcatctagttaattttaatgctacttgaaatctgctactttatccctgatgaaactgtttgtcaacgtgagttttggnactttatgtggatctagtctgatgccttggattttgatngatcaagaactgaactnattacatgttttaaaaaaaaaaaaaaaaa

SEQ ID NO: 389349 - DNA, 445 bp, Oryza sativa
  unsure (1)..(445): unsure at all n locations
cttctggatactgttcccgtgcactgatgctttgctacagcaaccgtgcagctaccaggatgtctctcgggagaatgagagaagctcttcaggattgtttgattgctacatcaattgatcctacctttctcaaggctaaagttagagctgcaaactgtcaacttgcactcggggagatatatccctttcctctctgttcgtaccgtctctcctattattatcatcatctagttaattttaatgctacttgaaatctgctactttatccctgatgaaactgtttgtcaacgtgagttttggaaccttatgtggatctagtctgatgccttggattttgatagatcaagaactgaactcattacatgttttnnnnnnnnnnnnnnnnnnnnnnnnnnnnnnnnnnnnnnnnnnnnnnnnnnnnnnnnnnnnnnnnnnnnnnnnnnnn

SEQ ID NO: 389350 - DNA, 1017 bp, Oryza sativa
  unsure (1)..(1017): unsure at all n locations
ccacgcgtgcgcttctccccaatctagcccgtgacctcctcgccggggctacttctccatcgccatcgacctcgacctcgccgcctcctcctcctcctcctccccgtgcgaactccgggctcgtgccgagggggtggacgcgccggtggtgagagcggacgcggtgcggtgggccatggcggtggggtggcggccggcgatgctggtggtggtggtggcggtggcggcgtggcgcggggaggcgctgtcggtgacggtgaccgacacggagtgcatccacgagttcgtgccctacgagggggacaccgtgtcggggaacttcgtcgtcgtcgaccacgacatcttctggagctccgaccaccccggcatcgacctcacggtaacttcaccaggtggcaacactgtgtatacattgaaggggaagtctggtgacaaatttgaatttaaagctccaaggggtggaatgtacaagttctgcttccataatccatatggagcacctgaaaccgtttctttctacattcatgttgggcacatacccaacgagcacaatctggcaaaagatgagcacttggaccctatcaatgtgaaaatagcggagctgaaggaagcattagaatctgtcactgctgagcagaaataccttaaagcccgtgaagctcgtcaccgacacacaaatgagagcacaagaaggcgtgtcatgttctacacaatagcggagtacctagctttcatgggtgcaagcgctttgcaagttgtttacatccgtcgcctattcagcaaaaacgtggcatacaacagggtgtagaacagagtctacttcaaggcagcagaaaatggttggagcaggaaaaaaatatttccaacatattgtgttagcttttgcagccattttttttgggtttagtctaaaacgtggcacttttaaatttattgccttgtactttagaacttcagtgagatatgaagcacatttgttgctgaacaagtgaacacagatccgtaactaatcttcnn

SEQ ID NO: 389351 - DNA, 628 bp, Oryza sativa
  unsure (1)..(628): unsure at all n locations
ccacgcgtcccgccccgcgtccgcccacctcactagagatagccaccagctagctagctccaccaggtaccaatcacctatagtcactagctagctcgatccagctcctcacctctccagcagccgacggcaatggcgaaggcggtggcgctggctgtcctcgtggtggccgtcgcggcggcgctgctggccgtggcgccggcgccggcccgcgccgtgtgcaacatgagcaacgacgagttcatgaagtgccagccggcggcggcggcgacgtcgaacccgacgacgaacccgtcggcgggctgctgctcggcgctgtcgcacgccgaccttaactgcctctgctcctacaagaactcgccgtggctcagcatctacaacatcgaccccaaccgcgccatgcagctgccagccaagtgtggcctcaccatgccggctaactgctaataagtttgctactgttttactgccaagatttgcaggcactgcaacaaaggacataacgtacgtaatatgtgtgcctcctactcctagcctggcgtttgatatagaaaattaatagcataaaatggctagaactgctacagggatagcnctactgtatgacaaactgatgttcttgtcttat

SEQ ID NO: 389352 - DNA, 662 bp, Oryza sativa
ccacgcgtccgaattaatcctagcgcatggagatggttctacaatattgtcggggactctcgatgccctatctccgacacctggtggcagactgaaactggtggcttcatgatcactcctttacctggcgcctggcctcaaaaaccaggttctgcaacctttcctttctttggtgttcagcctgtcattgttgatgagaaagggaaggagattgaaggagaatgcagtggatatctttgcataaagaaatcatggcctggggctttccggactctctatggagatcatgatagatatgagaccacttacttcaagccatttgctggctactattttactggggatggttgcagcagggacaaagacggttaccactggctgactggaagagtagatgatgtcatcaatgtcagtggacaccggattggtacagcagaggttgagtctgcgttggtttcacacccaaagtgtgcagaggctgctgttgttgctgttgagcatgaagtgaaaggtcaaggaatatatgcttttgtaactttggtggatggtgttccttatagtgaagaactacggaaaagcctcatattgacagtccgcaaccagattggggcatttgcagctcctgacaagatccactgggcaccaggacttcctaaaacgag

SEQ ID NO: 389353 - DNA, 706 bp, Oryza sativa
ccacgcgtccgcccacgcgtccgagattttctaaggtcatcgaacatttccgcttggttgggcgagtgatggcaaaagttttgcaagatggaagacttttagatttgcctctatcaacagcactttataagcttatacttggacaagagctggtcttatttgacataatctcatttgatgctgaattcggaaagacattgcaagaactgcaaattcttgttgaacggaagaggttccttgaatccacttatggcatgaatcagctagaagtcacggacttgcgtttccgtggcactcctatcgaagatttgtgtttagattttactcttccaggttatcctgattatattcttaaagaaggcgaggaaaacacaattgtaaatatttacaacttggaagagtatgttactttggtagtggatgctacagttaaatcagggataatgaggcaagtcgaagcatttagatcaggatttaaccaggtctttgacatctcatccctgaaaatattttcacctgaagagcttgactatctaatatgtggtcgccgagaaatttgggagcctgattcattggtggataatataaaatttgatcatgggtatactgctaaaagtcctgcaattgtaaatctactcgagatcatggctgaattcaccccagagcaacaacatgcattctgccagtttgtaactggtgctcctcg

SEQ ID NO: 389354 - DNA, 762 bp, Oryza sativa
ccacgcgtccactctaccacaaccattacgctatccgccacgagcaagcgagcgagagcgaggcaaagcaagaaggcgacctcaccaaataatcccccaccaccacaagaagcaggggcgcgccatggcgagagccgctaccgtggcggcggcgtcgtccgcgctgctgctggcgctgctcctggcgctggcgtggggagccgcggcgggggcgggggaggtgccgctcggctgggagctcggggtcggcgtcggcggcggcagcggcgacgacgacggcttcgggttctccggggcggcggctgacggcgccgcggtggtgaggcgggtcctgcaggggcggggctacatcagctacggcgcgctgcggcgcgacacgacgccctgctccgtccgcggcgcctcctactacaactgccgccccggcggccaggccaacccctactcccgcggctgctccgccatcacccgctgccgcggctgaccggcctccaccaccaccaacccgctgttcgaactggattcaaagttcgttcgttgctcctctccgtctactcgctagttcgtcttcttcatttttttctccccttccttactctttttttttctccgccctgttttaaccgtgaaagaagaagcacaattggtctggatcggtgcccaggaatcgaatcgagtgaataagatttgtgtcactccagtcctgtatgtggattctaataatattaataatcaagttgtgtataaaaaaaaaaaaaaaaa

SEQ ID NO: 389355 - DNA, 1532 bp, Oryza sativa
  unsure (1)..(1532): unsure at all n locations
tcggtgaacccccgcgtcgcccacgcgcaggcgacacggggggcgaaacctagctccgccgcccccttgttccccctttccccacctcgccgccgccggagctcaccgccggaaagttggccggcgagttaggagggcggcggcggggccttctcctgtggtggcgtcccctcttggcgcgggggaggcggcgaaaaccggcggcggggagtggcggcggcgagctctccgggcaagacgatgacggatctgcggttgctgtcaccggatctggcctggcccaggccggatccggcggaagcggccggcgttgtggcgcagcgcgaacgaaggaggtatggctggcagcggaggggcgcccctctctggcggcggagacggctcgcgaggccggcgcgcgcgccgacacacgcaagcggggcgcgaggcgtcgcccggtggagccgtcggcggcggggcacatcggcggctctgcaccggtggttggggcgacactgtcctagccgccgtggcgtccgcccccttcggcctgccccccctcccccttctccttgagttggcggcagggtcggccggtcgggcggatctgtgggcggtggcctaggctgattgctgaatggtcaatgtggcttgcgacgttccttgtgcaggttgcgtggatttgaatggggtatcgcgggtgaaagccctgctgtgccgttggccggcttgacgacggcggcgtctttcggcgtcgttcccctccttggaggcggtgctatagcgttgacccctttcttttccttaccgttctccgggtgaaaaccttgctccggcttccggatgaagcggtggcggcgaccacgtcgtgtccttcttggggcaccgctttggagaagctttctcgtacaaggatatcgttggtctttgcattggcttcgaagctttttagtcctaggtttcgacgaggcctttgctcttctagtttcactttttgtttcgcggcgggcgacctttgctccttgtttgattttgctaggtgaagtcggagctgcttcgttgtggtaatgaagctgggtaacgatgacacactacagtttctttctaggggtgttgttgctgaacatgaataggatgtggcgcttaggcagcttgggctgatgtccattgtgggatgttgaggccgcttgatcattatggcagcgtgttaggtatcgatgttgtattctaaagtcggagctgctgtgtcgcttggcggtaagctcggcaacgatgacagattgcaaagtcggaacctcctatattgctcttggtcaaatttggtatcgacaccctatgttgggctccatcagtggtttttagttgtagtgtgttgtggcgagtgctgtgtgttcagccngtcggtggttgtttnttcttttcttgtaacccgtctagggtttttactcctgnttnttgaaaatataattggcngttctcctgccngtttngtttnnnnnnnnnnnnnnnnnnnnnnnnnnnnnnnnnnnnnnnnnnnnnnnnnnnnnnnnnnn

SEQ ID NO: 389356 - DNA, 839 bp, Oryza sativa
tatatgcgttttggtcctctccgttactttgtagccggttttctgaaattcttgtgcttgccaaagtatagctttgaattggagtatcttccaatatcagatggtggtggtggtgagcataaaattgtggaagggcaagataaagttgatgcatcagacctctatgatgatgtagttcggaggtcgcgagtagaatgtctacctcgtgcctcaagtttatctagcattgattcaatcatgtctacaggaataatgtcaggtggagatctagaggtttcgagtccacatgctaataatgaaccctctgaacttgttcgtgcacttgacccaaaatcaaagcgcctatcattagggagaacaagtactttcaaagaaccagaagaagtgatccatcctcaggctcatgtttcatcgactcccaactggcgtagatccaaatcgaaatcaaggacagaaaaggcatggccaggctcgggtgctacaaatgatgcaaattcctctcgtggtaccacaacacatgacaaagaagacgcctcctccacaatttcagatcctgggcctgtgtgggattcaggacccaagtgggatgatgagcctaaatgggataatcaacctaactgggaaccagagactcccattgacttacctggtccattggatgatattgaacttggtctgactaaggaactagtcccaagcttagatgaaagatggacagttaggaaggggcggtatcttggtgtactggtatgcaaccattcatgcaagactgtgcagagtttaagctctcaggttattgctcctaaggctgaatacgatgacaattgcctggacctact

SEQ ID NO: 389357 - DNA, 870 bp, Oryza sativa
ctcgcatcgcatcccatcccatcccatcgcaccgcgcaaaaccctaacccaaaggcaagggagaagaggagcggacgccatggatgcttctcgcgttggcgagctccgcactttcgtggaggcctgcaagaaggacccctccctcctcgccgaccccaacctcgccttcttccgcgactacctcgagagcctgggcgcccacctccccgccgccgccttcaccaaggccacccccaagcccaagccgtcctccatggatgacatcgacgatgaatacgacgacgacgacgacgacgatctcaacatgagggatgccactccggagccggacgagcttgaccaggacatcgtcgagtccgatcttgaacttgaaggagacattgtcgaatctgaccatcaggaccctccgcaaaagatgggagatccttctattgatgtcaccgaggaaaatcgtgatgcctcacaggaggccaaaagcaaggccatggaagcaatgtcagaagggaaactggaagaagctattgaccatcttacaaaggcaatactgctcaatccactctcagctatcatgtatggtactagagcttctgtgtttatcaaaatgaagaaacctgttgctgccatccgtgatgcaaatgctgctctagagattaacccagactctgcaaaaggctacaaaactcgtggaatggcttatgctatgcttggaaaatgggaggaagctgcccatgatcttcacacagcatcgaacatggattatgatgatgagatcaatgctgtgctcaagaaggtggagcctaatgcacacaagataatggaacatcgcaggaaatatgaacggctgcgaaaagagagggaagaaaagagagc

SEQ ID NO: 389358 - DNA, 771 bp, Oryza sativa
atcgggaaaggggaataagcggagggcaaattccggcgccgtcgatggactctccggcgacgaatcaatccgtggaagacaaagctccagcaattgatccttcggaaaggcatcccttggaggaagacaaagcttcggtgatggatctttcgggcaaaggtaaggccttggtggtagatccttcggacctaggagtatgtagaaccgaagtgaaaatcccggcgtctgcggtgaatccctctggcgaaggcaaggcgccgatggagaagaagaagaagaagaagacgaagacgaagatggcgcgatttacccaagcgcagatccaacaactgcatggctttcaaggaagagatgcccgaccttcgacaacatgccggagtatcatcgagatcctcggcgacgaccttgccaaatgttcgcaggaatacattgatgagctgaaggcgatcgacgacagccgagaggaggataagaaattctggatagagatgaaccgccaaatccgcgaggaacgggagggcatcctcaaccagtactacaccaaaggctacgccgagtacgaggtcgacgacgacgaagacgaagacgaaggcaataaaggtcatgctcgagttgctgctacctccggcaggagaaggttccgtcacggggtcgccctgaagaagaaccaatcaggaggaggaagcattagaaagatatgatgaataaatatcagtgtaggcatcgatccaacttagtgaactgaataatcatcagtgttgtggcatcgat

SEQ ID NO: 389359 - DNA, 815 bp, Oryza sativa
  unsure (1)..(815): unsure at all n locations
ggacgtcngngnatcggtgggncggacggtgggccgatcccacccactccggcggcctctcgctcggcctcgccctcgcctccgatcgattcgcccctcgtcttcctcctcccggatcccccaagccaagcccccgcggccgcgccgccgccaacgcgcgcggcggacacgaggaagggaaacaggcgacgacgagaagagaggatcagctgggggtgatgaattgttacgctgcatggacggagcaagcgagaagcctccccacaaggactattacaaagttctggaggttgattacgatgcatccgatgacaccatcaaattgagttatagaagattagctttgatgtggcatccagacaagcataagggggataatgatgtcacagctaaatttcaggagatcaatgaagcctacacagttctaagtgatccagctaagcgccttgaatacgacctttccggatgttatgagttaaatcgatatactttgcgtgagtaccttacaaggtttaagggtatgatacttacctgcaatggtcttggcatagaccattcttcaaaatgggcccggcatttgagggaattggagccccattgatctataggtacatcttatttgtccatgagcttcttcagtactttctttgaggccaattggatgcttagctgtttcttttaacacaactatggatacggcagggcatctctctgttctttgtaacacaacaatggattctgtcgtatactaatgtatttttgctgcaagaaatgcatgcacgcngtttccnnnnnnnnnnnnnnnnnnnnnnnnn

SEQ ID NO: 389360 - DNA, 826 bp, Oryza sativa
ccacgcgtccgcccacgcgtccgcttcttcttcttcttcttcttcttcttcttcttcttcttcttcttcttcttcttcttcttctaggctagcactgcacgtgcccaactaacacatacattcatcatatatacacctcctcctccttcttcctctaagttgtgtgtgcatatataatctactagtagagagcagggctaggctagcaattgcaatggcgcctccctatgaaaccagcgccgccggctctgaatcgccggtgccggtggtaacggtggatgtggcggcggcgagcgaccttatcacctcggccggccaccgttacgtcgacgtcaggacagaggaggaaatgaacaagggccatctacacaactccctcaacgtgcccttcatgttcgtcacgccgcaagggagggaaaagaatcctctgtttgtggagcagttctcgtcgctggtgagcaaagaggagcatggggttgtggggtgccaaagcgggaagaggtcgcagctagcatgcgttgatctccttgaagcagggttcaagaacgtgaagaacatgggaggaggctacgcagcgtggctcgacaatggattccccataaacactcctcctcatacaatgtattaacgctttgcagcaccgatgagatgagcgagtgataaacacggactctactgtatctactgtatctcattccaacccctcttctcatctgcctgctagccgctgcttcgtgtgccctgccatgtatatgtatgtgcgtcctgttttcctgtttgtactactggtattatggaggcagccaattgaataaaattgatcatc

SEQ ID NO: 389361 - DNA, 1267 bp, Oryza sativa
gttccgaaagtgggctggtccatgtcgacttgaacggctgcgagaatctcacagatgctactgtttctgccttggtgaaggcacatggtagttcgcttgcacgcctcagtctcgaaggttgcagcaggatcactgatgcaagcctgtttgccatttctgagggctgtaccgatctcgccgaacttgatctctcaaactgcatggtcagcgactacggtgttgcagtgttggcgtcagcgaggcagctcaaacttcgtgtcctctcactttctggttgtttgaaggttacccagaagagtgttcctttcttaggcagcatgtcggcatcgttggagggcctcaatctccagttcaacttcattggcaaccacaacattgcatcgctggagaagcagctctggtggtgcgacatccttgcttagaggaacaacaactagttgctggaggtgctgggtcatccatctccagatgcaaatatacgaccgtagcggtagtactcctacttcagtcaagcttcgcagcagcagagttggtttcttgggtcctgtctttgagtcatggtggacttccttcgtcttagagccggttgttttccggggggcatttttagccgagtgctcgttttttgcaggtatcctcttgggatagtgcctgttccttgagccttcggctgccattagcgtggcacccctgcccctctatcccaaccttggtccttgttgattacagtcattacatcatgctgttttttttccattgcgtcgtgttcggagctcaaatattgtcaaagcgtgttcttcttttccggtaaatcttgttagtcgcggacatcaaacaccgttccgtagaaaacttggctgcctccaaagtccttcaagtgtcccaggtgttcgcgaatctcctcgggtgcgtatgtttgttcccaagttcaaggtcttgtgcggcttgcggtatcgtgggtagtgtgtgtgtgtgtgtgtgtgtgtgtgtgtgtgtgtgtgtttgtgtttgcaatgggggttgcttcttatggtgtttgtaggggtctcctgatattatccttggggatccggcctttgcaaggtgcattctgaagggccttgccattgacaaccctgtgtggttgtttttctactccggatccctggttttgctggcagattgttgaatgctgtaatctttgtaaccttcccagattaaataaaatgtggtgtttcagttaaaaaaaaaaaaaaaaaggggggccgctcgcgatctagaactagtc

SEQ ID NO: 389362 - DNA, 1623 bp, Oryza sativa
tgtcgttctcctatcctctacgtctaaacccggttcctttttcgcctcgttgactccgacgccgccgacgccgtcagatccagcagcttcaggtcggggctgaaccttggacttggagcggccatggcttcggacaacattggctcgagagatgtatgtgttgttggggttgcacgcacccctatgggtggtttcctaggtgccctgtcttccttgtcagctaccaaacttggttccatagcaattgaagctgctctgaagagggcaaatgttgatccagcccttgtgcaagaggtcttctttggtaatgtgttgagtgctaatttggggcaagctcctgcaagacaagctgctttaggtgcagggataccaaacacagttgtttgcagcgcagttaacaaagtttgcgcatctggcatgaaagcgacaatgtttgcagcacagtcaattctattgggcatcaatgatattgttgtagccggtggcatggaaagcatgtctaatgctccaaaatacattgctgaagctagaaaaggatctcgttttggacatgacactcttgttgatggcatgcttaaagatggcctttgggatgtatacggtgattttgccatgggaaattgtgctgagctttgtgctgacaatcatgctctgacaagggaagaccaggatgcctatgctattcaaagcaatgagcgtggaattgctgctcggaacagtggtgcttttgcatgggagattgttccgattgaagttcctgttgggagagggaaaccaccggtacttgttgacaaagatgagggcctggacaagtttgacccagtgaaactgaagaagctccgtcctagtttcaaggagaatggtggtactgttactgctgggaatgcttctagtataagtgacggtgctgccgcattagtattggtgagtgggcagaaggcacaagaacttggactgcaagttattgcacgaatcaaaggatttgcagatgcagctcaagctcctgaattatttaccactagcccggcacttgccatacctaaggctcttgctaatgctggcttggagtcttctcgtgttgattactatgaaattaatgaagccttttcagctgttgcacttgcaaatcaaaagcttcttggaattccttcagaaaaaattaatgtacatggaggagctgtgtctttaggacatcctcttggatgcagtggtgctcgaattttggtcaccctgcttggtgttcttagggagaaaggtggcaaaatcggagttgctggtgtttgcaatggcggaggcggagcatctgctctcgttctcgagcttgcataagaagccttgtgatccatctccagttctccaggacgtttgtgtactctagtttatttgattttctgctttagctgtttggacattcttttatcttaataattgggtaataaagtgtgtttgtggtgccaaagttaatctggtttgtactttttgtcaaaatatttctcctgtaagtggtaataatgtggtatgcagcagtctttaggctcaatcaattgtctatagaagttctaaattcttttttctgctacacaactggtaacgctcaaatgaagcttttgtgttagccagccc

SEQ ID NO: 389363 - DNA, 759 bp, Oryza sativa
ccacgcgtccgtttttgtattcttgaagggaaggcagtggagcgattggttgtttgtcttagccatcaaaacaagaaggtcgttgaagcctctttggctgcactttgcaccctacttggggatggcgtggagatcactgaaggtgtttcggtgctctatatggccaatgcggttgaaccaatatttgaaatcttgaagggaaacccaacaggcacacttcagcagagggtgacatgggctgtcgagaggattttgcgggcagagaacattgcaaaagcagcttcaagcgaccgtggcttgagttctgcccttgttcatgctttccagaatggggattccagaacacgacgtatcgcagaggcatcactgaagcacattaacaagttgccaactttctcccaaatcattgataagcatccctcgagacgaggttcgtcaattggaagcatggagcgttactttaggtctgatcgctaggctatgaaattgtgaagtaaccgaatgccatgacctgcctatgccttatggacaaggaatttttttgccatttcaagttaattttgttgatttgctaacgtttggaattagggattttagtttttgtgtcagaaaaaaatagtagttaggcattgatagtcttggtaatgtgcatattgttctgtacttgtaataaattttgtagatcatgtgtatatattgttttctgtacttctaattttgataatctgcaagtctaatgaaggcaaaaaaaaaaaaaaa

SEQ ID NO: 389364 - DNA, 522 bp, Oryza sativa
ccacgcgtccggctcaacgtcgaccgccactgcgtcccgcacgcgcccaaccagcggtcgcacgacgagtgcgccgcctgcgtccaccggaccaagacctccgcgtgcccctgcaacacctacgtgccgtgtggccacaacaagcactccgccgccggcgccggcagcgagcaggacacggcggcggcggaggaggacaagtacaggacttactcggcgctgcatccatgagcgcgagaaggaagggcaaaagcactgtgcttctcgtgaacgtgacacgattattgattgattcggttgctcttggctggttgtgttaattgatgtgttgtgtctacttttttgttacttttgtttcctttctcatccactgttacgtacggccaacttagtttcacatatatctgcatgtttaggtaaggtaatggagattttattttgatgaaccacagaagcttgtaataattcagatcaccatgaaagatcagctttaaatttccctgcaaaaaaaaaaaaaaaaaa

SEQ ID NO: 389365 - DNA, 787 bp, Oryza sativa
ccacgcgtccgatccacctcctcttgatgcaaacctggtgatggctgttatgtcaatgtggactaggttacaaccgctttatgctgcaaacatgtggaatgaagcccttaacaaacgacttgggactgaggggttggaccttcatgggatcattgttgaaactgaaagacgtgggatgtcttttgatcagttgctcaccatccctgagcaagatgaatgggtttacagtgatggtaaatctacaacatgtgttgcctttattcttgcaatgtacaaggaggctggaatattcacgccttttgcagagtcgattcaggtgaccgagttcactatacgcgacgcgtacatgctcaagattttcgaagataaccaggccagacttccaagctggtgcaacacagaatctgacaagctccccttctgccagatcctgggggagtacaggatggagctaccggagtacaacacaatagaaccgtatgccaaaatgaatgagaactgcccatctttacccccaacgtacaagcggccagcgcgttgctgacactgtgcccccacaactgaaagtaggatgttgtttgaaagtttatcatgtaagtaaatcatattgtatataggtgtttgatagatcgcagttttcacacgtaaggaaggtgaccctcaggtttctgcctgttacgagagctgttcttgagctcaggcatccaatatgaaggactgacctgtctaagaatttgctcacaacacagaactttgaaatgatatctactgaaaaactggctctgat

SEQ ID NO: 389366 - DNA, 731 bp, Oryza sativa
cggacgcgtgggcggacgcgtgggcggacgcgtgggtagggaagctcctagattgtgctcttgggcataatgaatctgcactttttaggcgagctcaacttaaagctcttgtctctatccatagcaaagaggctggcaagggtggagagcttacccatgatgagactacaatcataagtggagccttggacttgactgagaagactgctgaggaggctatgacacctattgagtcaactttctcattagatgtggactccaagttggattgggaagcaatcggcaaaatccttgcccggggtcatagccgtgtgcctgtatactctggaaaccctaggaacattattggtctcctgctggtgaaaagtcttctgacagttcgtgctgaaacagagacaccagttagtgctgtttccattagaaggattcccagggttcctgcagatatgcctttatatgaacatactgaatgagtttcagaaaaggaagtagtcatatggctgctgttgtgaaggctaagcccaaaattgtaccactccctgacaaaactgaaccaaacagggaagtaagtggggcaccacagctgactgctcccttactatccaataatgaagaaagggtggaaagtttggttgttgatattgaaaaaccacagagcaggcaggttaatggaaacaaaccctgttccatgcagcagaatgagatgccatatgcaatgtctcggtcatcag

SEQ ID NO: 389367 - DNA, 752 bp, Oryza sativa
  unsure (1)..(752): unsure at all n locations
attttgaaagggcaatcttcagtggtccatgttcgcatgaaacgtcatncaatgagtgngatnccaaagtcagaagaccgatgtttcaaaatggtccaaagacatctttgtagcaaaggatgcattactggataagcatttggcgacaggcacttttgatgaggagattagaccaattggccgcccagtaaaatcattgctggtgactttgttttggtcatgtctccttttatatggcgccgtcaagctcttcctatggactcaactcctgtcgacatggaaaggagtcgggtttacggcccttgggctcgcactggtgacggcggtcatgcatgtcttcatccatgttctcgcagtcagagcgatcgagctcagccaaggcggctcggaaccgtgtcaagaaagattgaaagagatgaagatagagtctgcagcttatcaatgggagctaccaattaattgggtattgaattcatgtaggcaacaaaattgagggcctaatctttcctgtataatgcaccaaaagggttcttacagaactgaatgcctgaatagagagattctaggagatttggtgaactagcaactctgagctctgttgtgctgtattttcagagaatgtttttttttggcagaacaggaattgtactacttgtatttattggaacttctacatcagtctggatttgttcagaagacctttagtgatttatgtatcagtgaaacttaaaaaaaaaaaaaaaannnnnnnn

SEQ ID NO: 389368 - DNA, 425 bp, Oryza sativa
ccacgcgtccggccagggatgcttcaacataacaaccgtgttcagccactcccagactgttgttgtgtgcccaggctgccaaacggtgctctgccagcccacaggagggaaggccaggctcaccgagggctgctccttccgccggaagggcgactagagtgtgagtcgttcattcagaagacgatgtttttgtgccaagcaagtgttccacctccaaggatgtagtcttcgagttttgctctagttagcacagaaatatctattttgcaagtgttatgttatgtatcccgagctacttctgaacattgtcatcatggaggtctaattagttgggtttaatttgaagattggttcgatgaaactataatttggtggttgatagtctcaggggcaaactgtttgaattataaggctggggtgaagat

SEQ ID NO: 389369 - DNA, 912 bp, Oryza sativa
  unsure (1)..(912): unsure at all n locations
ctccgggtgcaggcttcggcacgagcaagctcaagaanatggcattgagggttattgctgaaagcctgtctgaggaagagattggaggactaaaggagctattcaaaatgattgatactgacgatagtggaactataacttttgatgagctgaaagagggcttgaaaagggtgggttcagaattaacagaacatgaaatccaggctttaatggaagcggctgatatcgacaacagtggaaccatcgactatggtgaattcattgcctgctactctccacatgaataagctagagagggaggaaaacttagtatcagcattctcatttttcgacaaagatggaagtggtttcataactattgatgagctgtcacaagcatgccgcgaatttggccttgatgatcttcaccttgaggatatgattaaagatgttgatcaaaacaatgacggacaaattgactacagcgagttcacggcgatgatgagaaagggcaatgctggtggagctggaaggagaaccatgaggaacagcttgcagttgaatcttggtgagatcttgaaccccagcaacagctaaactcctacaggaaggccatggctgttacatgccatcattgtctgaatctctgcacgcctcatcagctggactaatctctaagagggcaaagccgttgagtgaattgtgctttggcgttacatgagacgctgaagaattttcgtagcagtaatagctacagctactagagtgtaagagaaattggcgttatgtgatcgtaatatcctatcagtgtaactgatcttagatgatgctggagatgatagtacaatgaacagcttatatgtattcctgtccttgtagactgaacattgttgatagttggggaatgctcttggcatcaaaaaaaaaaaaaaa

SEQ ID NO: 389370 - DNA, 562 bp, Oryza sativa
ccacgcgtccggaagaatcggatggaaaggatgaactggatgatcaagatgaggactcctctgatgaggatgatcccaaatttcagcaggaaacagcctgtgagtgtagggaactgatcaccatccacgctggcaaaccaaaaggccatttgaaggatgcgcttaaggtggatcctgacaaagtcaggcgcctttctttgagcgaaacacagctagctaaagcaacagcttctcatggtgccgatgttataaggttcacccagaagaatatactcagggtgtatccgaagggtacaaggattaattcttccaactatgatccaatgaatgcctggactcatggtgctcagatggttgcatttaacatgcaggggcatgacaaagcactccggttaatgcaaggattttttagagctaatggaggttgtggctatgtcaaaaagcctgacttcttgcttaggacaggtccaaatggtgaagtatttgaccctaacgcaagtatgcctgtgaagaaaactctgaaggtgaaagtatatatgggagatggatggcgaatggattt

SEQ ID NO: 389371 - DNA, 715 bp, Oryza sativa
ccacgcgtccgcggacgcgtggggttcccaccaccaccgcggcgactgctccggcgatctctccggcgagtgaccaggcgaacaagggcgccgtttccgtcgattcaggtagaggagatgagttccgcgggcggcggcggcgggagggggaagtcgaagggctccaagtcggtgtcgcggtcgtccaaggccggcctccagttccccgtcggccgcatcgccaggtacctcaaggccggcaagtacgccgagcgcgtcggcgccggcgcccccgtctacctctccgccgtcctcgagtacctcgccgccgaggtgctggagctggcggggaacgcggcgagggacaacaagaagaaccggatcgtgccgaggcacatccagctggcggtgcgcaacgacgaggagctgagcaggttgctgggcgccgtcaccatcgccgccggcggcgtgctgcccaacatccagcaggtcctgcttcccaagaagggcggcggcaagggcgacatcggctccgcctcccaggagttttgagcgggtttttctcatcgggtggatgaagaggggatcgccctttcgccaatctcttgtctggatcgttcatgcgatgcttttttttgcccatgtttccgtgtggtttgggggtgttgaacttcgtggcatgtaaaaaactctgggttcattaaaggtggatgaatagatgatataaacaagaaag

SEQ ID NO: 389372 - DNA, 563 bp, Oryza sativa
  unsure (1)..(563): unsure at all n locations
ccacgcgtccgcgcaactcgcaaccctaatcatccaattcccacacggactctgctaccatcggagtcagatccattcctcctcccattctcgatcgcgaggaggaggagaccccgcccgccagccaccccggatccgtcgatcgccatggcggatgaagaacctgttgatccaaagaagtaccttgaggagcgctgcaagccccagtgcgtaaagccactctatgagtatgagaagtgcgtcaagagagtggagaaggatgatactgggcataaacactgcactgggcaatatttcgactattggtcatgcattgacaaatgtgtagcaccgaaactccttgagaagctcaaatgatgaccggctgctacttttggatcagtgacttgttctatttgcgtaaccttgttcgcacttgaaactgaatgagttaattgtgtctattgtgactgtttgggtttcatgacttgtaataaaagccaccatttcccatatcaaagcatgtggatttattcggtctgaaaaaaaaaaaaaaaannnnnnnnnnnnnnnnnnnnnnnnnn

SEQ ID NO: 389373 - DNA, 463 bp, Oryza sativa
ccacgcgtccgcccacgcgtccggaattttggagagaggctgctataatctcaaaacttcaccatccaaatgttctagcactttatggtattgtaaataatggacctgggggaacattagctactgtaacagaattcatgatcaatggatccctcaagaaagtcctccttcacaaaaacaaatatcttgattggcgcaagcgcataatggttgcaaaggatgcagccattggaatggaatacttgcactccaaggacattgtccactttgatctgaaatgtgataacttgttggtgaatattaaggatccctctcgtcccatatgcaaggttgctgattttggtttgtcgaagatgaaacaagcgactcttgtttctggtggaatgagaggaactcttccttggatggctccagaattgctgacaatgagtggcacaaaagtatccgaaaagaatgatgtata

SEQ ID NO: 389374 - DNA, 809 bp, Oryza sativa
cccacgcgtccgatttcgaacggatccgggcgcagggtgcgagtgcgtgaggcccaatccccaaatcccccccccccctcgccgccgccgccgcccgtctgcacgcaggcctcctcgtcgcttcacttcatcaacaatcaagatgagtcgtggtgggagtgccggtggtggccaaagttctctgggttacctttttggaggcaatgaggcccctaagccagctgctaaaccagcacctgcagctgcacctgcaccagcgccagcaccagcaccagctgcggctgtggctgctcctgctgagaaaccatcacctgcaaaggctgatgccaccaagcagattccagctgggattcagggcagccggagcaataacaactaccatagagctgatggccagaacactggaaactttcttacggatcgcccttcgaccaaggtccatgctgcccctggtggtggatcttccctgggctacctctttggtggaaactgaaggagtgatcctggtgcactgtagcaccggatgaagaaggaagtctaccgctatccttgtttatcagaactgggaacccccattgttttatcattctctatgcatgtcccgtacctatgactccgtggcaaacaccctgcctgggatcatgatcctgtcgcttaaatttcgaggcaaatcgtatgcctgaatcttccaaaattatcgtgtgcctgtgccttggtttcagtcacgttcatgtctatgtttttgctcaggattatatgtatggtagtaatcgttatctggatgtgcgcccaaaaaaaaaaaaaacaaa

SEQ ID NO: 389375 - DNA, 691 bp, Oryza sativa
  unsure (1)..(691): unsure at all n locations
gaanaagggcccccaaaggttttggaccaaccccnttggatttacaaggccgggancggttncnttcgngggaggancnaccgacattcaggggccagcgacttccagggttgcctcccccttccggccgccggcccgccgcgtgtgcccccggcgcccagctcggcatcaaccctcgtcgcctcccatgatcgggcacctccccccaccagttccgagtggtctctccccgagggcaccaggccggaggacgtcaacatgatggagtccaacggcgtcgtcacgttcatgagcacgtcgctgcaggtcatcgccaagcccaggctcgacaacccggacctgtacaagaggttccctgtcgagatgtgatcgaacagtttgctttgctgcctgctgctgctggttatacagacagactggagttctgctttcaaagtttcagctattgctcatgatgttgttgttgtaaaatttgaggtgttaattgccttgtgaatgaacgaatcaatcaatctcgtaaagttatcgagagcagatcgacttttgtaatttgtacaatatgactatgtacttaaggtgttttgttcagatagaattttgtaatatgattaacacgacaagcgatgtattttgaggtgtcattaatgaataataataatgtaatgtaatctgcaatttttctttttttttc

SEQ ID NO: 389376 - DNA, 1160 bp, Oryza sativa
gaggccctccgtcccatccgcgaggacgaggtcaccgccatggtcgagtccggccaccgcgccgtcacccagccaggtagtgaacataaaccaatcgtagtgaggaatcaccttgctatggcggccttcaacaatataacaaggctagctttcggcaagaggttcatgaatgctaatggtgacattgatgaacaagggcgtgagtttaagactattgtcaacaatggaatcaagatcggtgcatctctttctgttgctgagtacatttggtatttgaggtggttgtgtccacttaacgaggagctttacaagacccacaacgagagaagggatcggctgaccaagaagatcatagatgagcatgcgaaggccctcaaggagagtggtgccaagcagcactttgtggatgctctgttcactctcagagaacagtatgaccttagtgacgacacagttattgggcttctatgggacatgatcactgccggaatggacaccacagtgatatcagtcgagtgggcaatggcagagctggtcaggaaccccagggtgcagaagaagctgcaggaggagctggaccgcgtcgtcggccgcgaccgcgtcatgtcggagaccgacttccagagcctcccttacctgaacgccgtcgtcaaggagtcgctccggctgcacccgccgacgccgctgatgctcccgcacaaggccagcacgaacgtcaagatcggcgggtacaacatccccaagggcgccaacgtgatggtgaacgtgtgggcgatcgccagggaccccaaggtgtggagcaacccgctggagtacaggccggagcggttcatcgaggagaacatcgacatcaagggcagcgacttcagggtgctccccttcggcagccggccgccgcgtgtgccccggcgcccagctcggcatcaacctcgtcgcctccatgatcgggcacctcctccaccagttcgagtggtctctccccgagggcaccaggccggaggacgtcaacatgatggagtccaacggcgtcgtcacgttcatgagcacgtcgctgcaggttatagccaagcccaggctcgacaacccggacctgtacaagaagatccctgtcgagatgtgatcgaacagtttgctttgctgcctgctgctgctggttatac

SEQ ID NO: 389377 - DNA, 530 bp, Oryza sativa
  unsure (1)..(530): unsure at all n locations
nnnnnnnnnnnnnnnnnnnnnnnnnnnnnnnntttgggttgagtgccttttgagggaaggcaaaagcgcatctgattttttattattccacaacccaacactatgacactaacaacagccacagcctcaagaattgagcacatcactcactctcatcgttattgcattcccccaccacaaacaaatccaccccaacaacatgtgtatgtagtactacatgatcgccatctctctcgtcacgacggcgtcacgtcccaaccaacgtcactctccaccgacatcgccgccgcatcagctgctgtgcgcctgcgtggtgaggccgtagccgaaggggaagagcgggtcgtagtgcgcgtcgccgacgttcatcggcagctggtccacggacttgaaccacgtccgcgacagcttcccggtgaacccgtagtcgccgaacagcacgtcggccacgccctgcccctccgtccccggcagccacgccgccacgaacgcgtcgatgccgccgatgtacggctccaccaccagcggcc

SEQ ID NO: 389378 - DNA, 718 bp, Oryza sativa
  unsure (1)..(718): unsure at all n locations
tgcttccatgtcgaagnagagaacttttgacaaatggttgcaatggattagaacatacagaccctgctgcaaatgtcgtcaaaactactcagtatccctctgttaaacgtcgagataagttacctgagccaaaagnnaaagaaaacccagtagggttgtggtcaataattaaagaaaatattggaaaagatctctcgggtgtttgtctgcctgtttatttcaatgagccactgtcttctttgcaaaaatgttttgaagatctcgagtactcttacttggttgaccatgcactacagtggggaaaacagggcgatagttgatgaggacacttcatgttgcggcatttgcagtatcaggctatgcttcaactgaaggtcggcaatgcaaaccgttcaatcctttactgggtgaaacatatgaagctgattatccagataaaggacttcgatttttctctgaaagggtcagtcatcacccaatggttgttgcatgtcactgtgaaggaagaggttggaagttttggggggattcaaatctgaaagggaagttctggggtcgatcaattcaacttgatcctattggtgttctaactctccagtttgatgatggggaaacgtttcaatggagtaaagtaactacttccatatacaatatcataataggcaaaatttattgtgaccactatggtacaatgcgcatcaaaagaagtggcgactac

SEQ ID NO: 389379 - DNA, 762 bp, Oryza sativa
  unsure (1)..(762): unsure at all n locations
tatccgaacaacaacatctcgccacgaagaggagggcgagagctgcacgagtccgaaatccccaatccgggttccctgcttctcttcgcgccaagatggcggctgcctgggcggcggtggtggccgtgatgctcctccttgcgcaggtgtcagccgcggctccggtgatggggcctgccttcctctgggcgcccaagaactacggattctcttctgatgaggctaaagaaatagtccattatcagacagtatccccgaagagcttagtgaaatctgttcttgaagaaggtggttggtcaaacttggtgtgttcaagggaggatcatgcaaagagtgttgatgttgcagttctttttcttggctcgaagctacaatcgtcagacatttctaaagataagcaagctgattctaactttagtagacacgctgaagaactcgtttgcaagctccgagttttcgatggcattcccctatgttgccatgtcagatgatgacaaattggagaagtcattgctatctggatttgctgagaattgcaacaatggtctcggagataatcatatcacctacacagacacctgttctgtaagtgaagatctgaacaacatcacaacatggattccattcatggattggtggcatcacaaactaaaaggacccgagtggacagctgatctggtggcttctgtatggtggttcaagggtacacaaatcagaggggngtactttctagctggtactctntgaggaggctggggctaa

SEQ ID NO: 389380 - DNA, 645 bp, Oryza sativa
  unsure (1)..(645): unsure at all n locations
ccacgcgtccgcccacgcgtccggatgacgttcctacgaagacagtgcacgtcaaattcgtgctgcaaaagcggtgcgcgttcgggcagcgcttcctcgtcgtcggcgacgtcgcggcgctcggtctctggaatccggcgaaggcggctgctctggattggtccgaagaccacgtgtggacagtgaagaaggaattgccagcagaaagatcgatcgagttcaagttcttgctgcaagatcgatcgggacatgtcgaatggcagcacggtcgtaacagaatactgcatgtagctgacacctcgaacaccttgattgtctgcgaggactgggacgaggcgaagaatcagcaagtatcagaagagattggtgacgcagatgggatattttcaggaagcgatggcgtcttccaggaagatgagcttcaactgggtgaagaacaagagaccaacaagggtgtgactgtaggtgtggatgatgcaaaatcggctttagtcacttatatttacagggaaatgatgggagcaaacgacgcgatccagccacaggtaagttgcctggtgacagtattgttctgtgtaaaagggcagcaaacatttatgtncaacaatatactactccctcagtattttaatgtattacgccgtt

SEQ ID NO: 389381 - DNA, 506 bp, Oryza sativa
tcggttgagagctccagattggaatctcgagagagggaggaagggggaaatggcggactgggggccggtggtggtggcgacggtgctgttcgtgctgctgacgccggggctgctgtgcacggtgcccgggagggggcgggtggcggagttcgggagcttccacaccagcggcctcgccatcatcgtccacgccgtcctctacttcgcactcctcaccatcttcctcatcgccatcggggtccacatctacgccggctagctatgtactactcctttcactgattgattttggtggattggttggttgtctggtgaattggggatctcgcgtgtgtgtttgctgtactagatgtcatactgtcatgtcaggtcgcttgtgttgtactagtacggcagaatcaaagggtgtgtagtaattctcttttgttcatctgattagtactagtactactaatttggtgctgtactactgtgatattgtttcagtgtttttggttgtcctagct

SEQ ID NO: 389382 - DNA, 521 bp, Oryza sativa
  unsure (1)..(521): unsure at all n locations
ccacgcgtccgcccacgcgtccgcacccatcacttgtccttcagacagcgagagcgatagcgctcagagagagagagagaaggggggaggatttggagcgcagattgaggagaagcgatggcggattgggggccggtggtgatcgcgacggtgctgttcgtgctgctcacgccggggctgctgttccagctgccggcgcacggccggatcgtgggcttcggcaccatgcacaccagcggcgtcgcgtcctcgtccacgccgtcatctacttcgccctcatcaccatcttcctcatcgccatcggcgtccacatctacgccggctagctagtctacccaagcccctcctgatttcctgcagctttaattaattatctgccttttccctactctctatgtgcttaattaatttattactgcctctacctgctactctatgctagtaggaaccgtttgttgctgtgtncttggaagacatgcatgggtggtataactaatgtgttgtatttgggtgattccctc

SEQ ID NO: 389383 - DNA, 799 bp, Oryza sativa
  unsure (1)..(799): unsure at all n locations
catttgancccgccttaatacgacctcacctattagggccgaatttggntaccgggcccccccctttcgaggtcggaccccaacgcnttcccgccccacggcntcccggctattgagcttcagtaatgatgatcttatcgcgtcattgaacctgaacaacaagggagatagtctcactgcatcttattaccacattgtgaaccattcggccacagctgttggagctgagctgacccacagcttctcgagcaacgagaactccctcaccttcggtacccagcacactctcgacccgcttaccgtcgtgaaggcccgcttcaacaattccggcaaggccagcgcgctgctccagcacgagtggaggccaaagtctgtgtggaccatctcagcagaagttgacaccaaggccattgacaagagctcaaaggtcggcattgcggtggccctcaagccttgatttttctcagggtgtacttacatttcaaagatgaaattgagatgagttgaaaaacatcttggcgcatgcgcatcttttggttgttgcagtctattagattccaagaactgccatgtttaatttgaggattttttttttctgttatcggtgttagcacttgttcaatgagcaacccttgcaccccaataattcaagctcggcaaaattatgaaacttgcttctaggtgacaattttttgttactattttcacactgtcattgtccacactgtgcttgtggttatggtgctccaattaaactaactgtttatatgcttgtcaaggtgtctagtaaagtggtttt

SEQ ID NO: 389384 - DNA, 872 bp, Oryza sativa
gcgccgtgttttttttttcctccgcctttattttctcctctcctctcctctcccgcaacctccacctcctatccgccgccgccttcttcttcctcctcccacccgcgcaagctatccgccgccgcatcgcgtcgtcgacgaggagatggtggggccaggcctgtacccggagatcggcaagaaggccagggatctgctgtacagggactaccagaccgaccacaagttcaccctcaccacctacaccagcaatggcgtcgcaatcactgctaccagtacaaagaaggctgatctgatttttggtgagatccaatcacagataaagaacaagaacatcactgtagatgtgaaagcaaactcagactcaaatgttgttactactgtaaccgttgatgagctaacaccaggattgaagtccatcttgagctttgctgttccggatcaaagatctggaaagtttgagcttcaatactcgcatgattatgctggtgttagtgcaagtattggtttgactgccagtcctgtagtcaatctctccagtgtttttggaaccaaggctcttgctgttggtgctgatgtctcacttgataccgccacggggaacttgaccaaatataatgctggattgagcttcagtaatgatgatcttatcgcgtcattgaacctgaacaacaagggagatagtctcactgcatcttattaccacattgtgaaccattcggccacagctgttggagctgagctgacccacagcttctcgagcaacgagaactccctcaccttcggtacccagcacactctcgacccgcttaccgtcgtgaaggcccgttttaacaattccggcaaggccagcgcgctgcttcagcacgagt

SEQ ID NO: 389385 - DNA, 1448 bp, Oryza sativa
tgttaaaaaccccctcgaaacccaaggcggcgggcgtggtggtggactggactgttttcacctcactccgcctcgtccccgccccaaaggccacgctcccctccctcccaccaacccaccaccagcgtcacccatggcggcccagcgactcgccgccctccacgccgccgcgccgtcggccttctcctccacctcctccgcctcgcatggccgccccgcggcgcgatccagcaccaccgctctcctcccggtggccctcccgcgcgcctccgccaccctccgcgccgcaccttctcggctcctcccccaggaggcgaaggcggcggggagcggcaggtcggtgatgtgcatggcgtcggcgtcggcgtcggcggcgtcggcggcggtggcgtcgggcgcggcggagctgaaggccgctcgcgaggccatcagggagctcctcaagacgacgcactgccaccccatcctggttcgtcttggatggcatgattcccgtacgtatgacaagaatattaaagagtggccacaacgaggtggagctaatggaagcttgagatttgatgttgagttaaaacatggagccaatgctgggctggtaaatgctctaaagcttgtccaacctatcaaggacaaatacccaaatatctcatatgcggatttattccagctggcaagtgctacagcaattgaggaagctggtggtccaaagattccaatgacatatggacggattgatgtcacaggtcctgagcagtgtccacctgaggggaagcttcccgatgctggcccaagtgcacctgcggatcacttgaggaaggtattttacaggatgggtctcgatgacaaggagattgttgtgctgtctggagcacatacacttgggaggtccagacctgaacggagtggctgggggaaaccagaaacgaaatatactaagaatggccctggtgcacctggtgggcaatcgtggacagctgaatggcttaagtttgataacagttatttcaaggagataaaagagaaaagagatcaggatctcctggtcttgcctacggatgctgcattatttgaggacccaacattcaaggtctatgcagaaaaatacgcagaggaccaagaagcattctttaaagactatgccggagctcatgctaaactgagcaatctgggtgcaaaattcaatcctcctgagggattcacgttggacggttaatgcgatgcgcatgagccagatcgctgaagtggccaaccacttttacagaaaggatcaagagagaaacactacacaatccaatttcctgctccaacgttgtgtcatcattccagatgaagcttttcctgaccacgagtcatattggatttggaaactgagtattcgaataaaaaaacagactggctagagaggcaaatttgagccgaacttgcggaccaaattcgatgagaaacca

SEQ ID NO: 389386 - DNA, 1822 bp, Oryza sativa
  unsure (1)..(1822): unsure at all n locations
ccacgcgtccgtggtatcaatattgctgagactctgctctcaaggggctttgctagaacatctaaacatcgggactacgaagaaaggtcacactattttgacctgctgttggcggctgaatcacgagctgagaaagcaaagaaaggagttcattctgcaaaagaatcacctgtcatgcacataacagacttgacaacggtttcagcaaagaaggccagagacttccttcctttcttacagcggaacagaagacattccgcaattgttgaatatgtcttcagtggccaccgtttcaaactaacaattcctaaggagacttgcagcattgccttctctttctctggtgttagatgccctggtaaagatgagccctactcgaacgaagctattgctttgatgaggaggagaattctacagcgagatgtggagatagaggttgaagcagttgatagaactgggacattcttaggttccttatgggagtccaaaaccaacatggcttctgttcttctggaggctggtctggccaagcttagttcatttggcttggataggattccggatgcaaatgttctaatgagggctgaacagtctgcaaagcagcagaaactcaagatctgggagaattatgtagagggtgaagaagtttccaatggatctgcatctgaatccaaacaaaaggaaattctcaaggttgttgtaactgaagtccttggtggtggaaagttctatgtccaaacagttggtgaccatagagtggcttccattcaacaacagcttgcatctttaaaacttaaagatgcacctgttattggtgcttttaatcctgtgaagggggaaatagttcttgctcagtttagtgctgacaactcctggaatagagcaatgattgtgaatggacctcgaggagctgtatcatctcaagacgacaagtttgaagtattctacattgactatggcaaccaagaagtcgttccttacagtcgcatacggcctgctgacccatcaatttcctcttcgcctgctcttgctcagttgtgcagccttgccttcataaaagtgcccaacctagaagatgattttggccatgaagcagcagtctatctgaatgattgcttgctcaacagccaaaaacaatacagggcaatgattgaagagcgtgatacttctggtggaaagtccaagggacaaggcactggaactattctgattgttacactggttgacgcagagacagaaaccagcatcaatgctaccatgcttgaggaagggcttgctcggcttgaaagaagcaagagatgggatactagggagagaaaggctgctctccagaatctggaacagttccaggagaaagcaaagaaggaaaggctgcagatctggcagtatggtgatgttgaatctgacgaggaagagcaagctccagcggctaggagaactggagggcgtcggtagatgagagaaggctgctcaagacagcaatggcgtcggtaagctatcatcaagttttggacaccgggtcagactctaccgggagctttagatgaaaaacatagagaaagaaaatgaggattaccttatttatgcagttagaacagaacttagcgaggcgaaacttccttagtttgagcactgttgcttgatgctgaactattattccgttttacaccgtaatgttgaggttaagatacattgtttttcccctaaacttaataatgtcgtgtacttggtgcactgcagttctttgtagacacaacataataccgagagcgcagtcaattaaaattcaggattgaacttnnnnnnnnnnnnnnnnnnnnnn

SEQ ID NO: 389387 - DNA, 397 bp, Oryza sativa
  unsure (1)..(397): unsure at all n locations
ccacgcgtccgcctagctccaaaagacaaatgatgagcaaaagcgcaagcttcaaagcacagaacgtgctctgaaagttgccgaggaggaactgatgaggctgcatttggaagcaacaactaagtcaaaacagctgacagaggttcatggagcatggttgccaccttggttagctgcgcactctgctcattatatggaggtgatctctggtcactggaatgaacatggaaaacctgctatcaacagttttctgcagaaggcatcagaaaaatcagcacaggcaaaaaaatgggctgagccacatgtggagactgctaaaatgaaatgggttccagtgaaggaaaattggttgtcctcaagaaaacacagaaccttatgtccaaaggnctcatcaaat

SEQ ID NO: 389388 - DNA, 457 bp, Oryza sativa
  unsure (1)..(457): unsure at all n locations
ccacgcgtccgcccacgcgtccgcttcctcctccgcctccggtgatccggtctcgctatctctcttccgcatctcgggacgcgatggcggcgctgctgggccggaggttcgggatggcggcggcggcgctcatcgccctcgcggcgctcggatccgccgcctcggggacggcgtccaagtcgtccttcgtgaaatccaccggcaaagcccacgacgtcgtcatattctccaagtcatactgcccgtactgtagaagagccaaagctgtgttcaaggaacttgaactgaagaaggagccgtatgttgtggagcttgatcaacgagaggatggttgggagattcaggatgccttatctgacatggttggcaggcgaactgttcctcaagtttttgtccatgggaagcacctgggtggctctgattgaaactgttgaacatatnagaatgggaaactagc

SEQ ID NO: 389389 - DNA, 693 bp, Oryza sativa
ccacgcgtccgcttgattctttgaaacggaagacatatgatgatgagctaaggagggaggagcttttgaactacttcatacggtttcagagtgcttctcaaaagaaaggaggaagtggtatttttcgacaagggtttagcccttctgaaggtgttgatgaaggaccttatggtttatcaagaagaatagcctgcaagaaatgtggtgacttccacctgtggatttatacaggaagagctaaatcgcaagctaaatggtgtcaggactgcaatgattttcaccaaactaaaaatggggatggatgggttgagcagtcttttcaaccagttctatttgggttgctgcacaagcctggattgcctcatgcatatgtttgtgctgaaagcatcattttcgatgtcaccgagtggttcacctgtcagggaatgagatgccccgcgaacactcacaagccgagcttccatgtcaatgccagcttgttaaagcagaatagtggcaaggggagcacctcggcgcagaggggtggagggatccctaatggtgtaaacatggatggcggaatcgatgaagaggagttcttcgagtggttgcagaatgcactgcagtctggcatgtttgaatcgtttggcgcgcaaaacgagcccccttcccctggaagtggaagcaatgccaagggtagtaatagcagtagcc

SEQ ID NO: 389390 - DNA, 583 bp, Oryza sativa
ccacgcgtccgcggacgcgtgggcttcaggtagtggaagcacatctttctggggatcaatatcaatattttcttctactagtgatgatcgtacacattcttctgcaaaagacaactcatcgaacaaatcttatacagcttctacttcccacctggagcattcactctctacgatacagttgagagagccaccagttgtcttgaaaccttcagaaagccagtctgagcaggaggcgcttgaaatagcaataactaagttgctactgaagtcatattacaatatagtgcggaaaaatgttgaggacttcgttccaaaggcaatcatgcattttctggttaaccacacaaaacgggagctgcataattaccttataactaagctttatagagacgacctctttgcggacatgctcagagaacccgatgaaataaccataaagaggaggcaaatacgtgacaccctcaaggtccttcagcaagcatacaagactttggatgagataccacttgaagcggacacagttgagagaggctattccctggatgccgatgcaacaggtctaccaagggctcatgggctttct

SEQ ID NO: 389391 - DNA, 426 bp, Oryza sativa
gaacagaaggtatcccataaaaaacataacattttgtctggtgttgccgcccacgcgtcccatcaactagcaaaagtgaagaaagccatcataggtaaacctgggcacacaaagtctgaatcaccaaaatcataaaattgattcaccttagagcatgtaattcttgtacaatatgtatttttgtaaggaatttatgtgaggtgtaggatattgcaatgggtttagtgaaccatctgtaattttgtatgaacgattcattcaaaggttgtgttcttaaggacgcttgtaaatataggcaggcagtgtgtagttcaagtttccataaactttgtaattgtttcaccaacttggtgtgaggtgaacaacatgtacatggcatattgtttttgttacttcctcattgatatgcatgtgttgttttgtggt

SEQ ID NO: 389392 - DNA, 536 bp, Oryza sativa
  unsure (1)..(536): unsure at all n locations
ggccgcgtccaggtggtcggcgccgacgggaagcgcgtgctggacacccacgtcgagggcggcaacctgttcatcgtgccgcgcttctgcgtcgtctccaagatcgccgacgcctccggcctgcagtggttctccattatcaccacaccaaacccgatcttcagtcacctggcggggaagacgtcggtgtggaaggcgatctcgccggaggtgctggaggcgtcgttcaacgcgacgccggagatggagaagctgttccggtccaaaaggatcgactcggagatcttcttcgcgcccaactgagcagcttccctttgccattgcgtcgtcgcgtcggtgtcgtcttaaattaggattaagtcattaataatttcatctcttatcatgagatgttactaccttctgtcagtcttatgctattgcggttgaactgtggtgattcgccacttaaaattctattctattcgagagtgccttttggtgcaannnnnnnnnnnnnnnnnnnnnnnnnnnnnnnnnnnnnnnnnnnnnnnnnn

SEQ ID NO: 389393 - DNA, 672 bp, Oryza sativa
aatccccgggtcgacccacgcgtccgcccacgcgtccgggaaacgcccgcacacgccgccgaccacctctccgtttccttggatctttcagcttcctgttcctcacgagatcgagaaggggggaaaaagaaaacgtcggtttttagtctcgtttgcctcgatcctctcgttcttggttggtcggcgccatgagtaacaccctgcttcgaatctacccttccgagctgaagatacccttcgagctcaagaggcagaattcggggatcctggagctcacgaataagaccgatcatcatgtagccttcaaggtgaaaacgaccaaccctaggaagttctcggtgagaccaaccaccggaatcgttctgcccagagggtcttgcggaatcacaatatctatgcaaccgccgaaagagatccctacggattataactgcaaggacaagtttctcatccaaagcgtcgtggtagaggatggcacaacgcagaaggacattcacagtgacatgttcagtaaagaggcaggcaaggtggtcgaggagttcaagctgagggtggtctacatccctgccaatcctccctcccctgtgccagaggaagaagaggatgagattgattcccttgattcagatgtggaccatgaagtgcaaatgccatctacgttcgatgctgcat

SEQ ID NO: 389394 - DNA, 965 bp, Oryza sativa
  unsure (1)..(965): unsure at all n locations
cccgtttctcacttcgcaacactaggctttttgcccgaagcgactcgactctacacccctcaccctaccctaccctagcaacgaggcggccatggcggacgaggagcacgaggtgtacggacaggagatccccctcgacggggaggacgtcgacatgggcgcccccggcgacgaggccgccaagatgcaggagctcgacgagatgaagcggaggctcaaggagatggaggaggaggccaacgcgctccggagatgcagaccaaggtcgccaaggagatgcaaggtctggatcctaatgcgtcctcatctgaatcaaaagaggaaatggacgctcggtcggtatatgttggaaacgttgactatgcatgcaccccagaggaagtccagcagcattttaattcctgtggaacggtcaacagggtgacaatcctgacagacaagtttgggcaaccaaaaggtttcgcgtatgttggcttccgtgaagtagaagctgttcagggaagctgttaagttgaacgaatcagaactgcatggtcgccaaatcaaggtggcgccaaagaggactaacgtccctgggatgaagcagccccgcggaggcagaggattcggtggtcatccttatatgaggccatatggagcaccattttacaatccctatggttatggataccccagattccgccgtccacgcaggccatacttttgaagctgtcttcgtggagtcttcagcacatgacattagtccaatagcccaaagaatccgtcgttgttgctgtatttcgatacttcatagttagcaactataaagttcgatcactttcttcacagggtgttttttgttgtttaaagatatgtgcaaattcaggcagcagcattatgtactattaacttcgtttatgtggaagtgcgcactattttgggttttggctgccnnnnnnnnnnnnnnnnnnnnnnnnnnnnnnnnn

SEQ ID NO: 389395 - DNA, 387 bp, Oryza sativa
ccacgcgtccgcggacgcgtgggcggacgcgtgggcggacgcgtgggccggacaccgggagcatgtcctcactatccttggaacctagcaacacagccaccccatcgtcgggatccaggatgatggtttcatcgtcatctggggttggaaatgatgatcaccatcactacaacatgtcatcatccgatgtctccggcagtaacctcctcagcggtgttgtacctagcatcaattcctcgctgaacattatttgttatataccccatagtgcaagacacgcacgtatttaaaagatttaactttaaaaacatctgactaaacaagtagtgtaattgtaaatcgaaattttatttgctggaaaataatatcaatgggattgggtatttc

SEQ ID NO: 389396 - DNA, 466 bp, Oryza sativa
  unsure (1)..(466): unsure at all n locations
accagccgaaagtaaagctgcggcggctggggtgaatggctccctcctctccccgccgcgacctcgacggcgaggggaccggcggcgggagctcggcggcgagggagaaggagcggccgaggtccttcgacgagaagacccggtcggcgtgctggcggaaggcggcggtggtgatgggccggcacccggagcggtggcggcaggacgccgccggcaacgtcgtgtgccgccgcttctggagctgccacggctgcctctgctacgagtacgaccacatcgtccccttctccaaaggaggggagtctactgttgacaattgccagattcttcagacaagggtgaatcggtcaaaatctgataaagcatggatagagcaggcagaaatgcagggattttcttgtgatatcaagttcactgataaagaacttgatgtgattgaaatggctgtctatgnggatgtcatccg

SEQ ID NO: 389397 - DNA, 646 bp, Oryza sativa
ccacgcgtccggaacatcagtccagagatgatgtcaagcatgagtgagcagtttggaatgaaaatgacgaaggaggatgctgccaaagctcaagaagccttgtcttcattatctcctgaggctttggatagaatgatgaaatggatggaccgagcacagcaaggagtagaagctgcgaagaaaaccaagaactggctgttaggcaggaaaggattggtccttgctatcgtcatgctgatcctggccttcatccttcgccagcttgggttcatcggtgggtgatgtcctgaatgcagagatcggctgtaactagcttgcaatttgcaaataatcgtcgggtagcgatattgcgtgcttccgctttctaacacctgctgaaattctccatgggaaggaaggggtatgaattcgatggatctgctgctttcttgtaacactgttcgttcttattctttttgtcgtgtcgagtcataattatttgtagcatcaattcatcggattcttgtatttcgagagcgtgaaggaatcgacttcaaattgaggtagcactgttattcagattcagataacttgccgacatgtaatgactaaatgagataccactgttgttattatgcacctgagatggttgagaattttttgctgg

SEQ ID NO: 389398 - DNA, 1408 bp, Oryza sativa
gatatgatatgatggcttctttcaggcctttctccctctcgtcgccgatgacaacgacgatgctcctgctctttcttctcctctgcacgaattccgccaccgccgacgtcgccggcagcaatggcggctgcggcggcttcaagcgcatgttcagcttcggcgactccatcaccgacgccggcaacctcgcgaccatcagccctcccgacgcctccttcaacaggctcccctacggcgagaccttcttcggccaccccaccggccgcttctgcgacggcaggctcatcgtcgacttcctagcggatgatctggggctgccgttcctgacgccgttcctccgggcgaagtcgccggaggacttccggcagggggccaacttcgcggtggccggagcgacggcgctgagccaggacttcttcaagcagatggggctcaacctcaccatcatacctccattctcgctggacgtgcagctcgagtggttcaagagcgtgcttaattctcttggctctacagaccaagaacgcaaagaaattatgtctaaatccctatttctaatgggtgaggttggaggccatgactattatcaccccttcttccagaaccgatcatttaccaatgagatcacgccattggtgccaaaagtcatagccaagattgaaaatgccatcaaggtcctgattgatctaggagccaagacgattgtggttcctggaaattttcctatagggtgtgttccaagttatcttactatgttccaaagtaagttaagttctgacgactatgatgccttcggatgcataaagtggttgaatgacttctctgggtattacaaccgtgcactaaaactcatgttgcacctgatccgtcgtgatccaacagttaccgtactctttggtgtttacttctacaccgctttagaggtcgcccagtcaccctgctgtccatgggttcaagaaggagactgtcttggttgcatgctgtggggatggtgggcccctacaactccaactcattgttcagttgcggtggcccgtcaacaaatctttgcactaacccatcgacatacatctcgtgggatggagtgcatcttactgaagccgcttacaaatttgtggcccatcacatgttacatggcctatatgctcatcaaccttccttatctcccaaatgaagaaatgatctgcatgtacaataggcttttaaaaagaacatacaatagtgccaacaactttaaatggtgtatcgaaggtgtgtgcgtctaatatattgtaatttaaaatagtttttggtgtgtctacatgtctagttgtactctgaaaaataattatttgtttgtcaaatatggtataagttttgttctcataaaaaaaaaaaaaaaaaaaaaaaaaaaaaaaaaagggggggg

SEQ ID NO: 389399 - DNA, 561 bp, Oryza sativa
  unsure (1)..(561): unsure at all n locations
ccacgcgtccgggcaaaccaacagttggggtaaatgaggttgcacgcaagatcgaaggcttccacattcccaaggaggaggagcagcagcagcagcaggctgaggggtaggactacaaggttggcaaacatggcagtgcttggtgcttactgggagatgattgcttgtcgatgctcctctccttcccgtttctcccttgctttgttgatgcccttggttcccgacgcaaggggggagagatcttgtcctccgtgaccaaaacggtggatttctgtatggggccctcaccaaatagacagtgtcagggtagtatctatctacagtgccaaaataaaccaagaggaaagcaagttggtagtttagtatcgttgattgcattcacagaagtgaaagtcttgtattccgctggtggccgtgatacagcagatgccattgtgttcaccggtttttgcctcccctacccttctatggactcttttcttatcaggaattgcttctttttattattgccgctgtcctcacttcttatgcaaaacaaaannnnnnnnnnnnnnnnnnnnn

SEQ ID NO: 389400 - DNA, 1130 bp, Oryza sativa
ccggccaatcttgcattgttctttctttcgttccataagtcgttgcatcaatattagcctgattttgagctatcaaagtagcaaaacgatggcaagtgctagctcaccggaaggtgcaagttcgagctctcctgaaaaggtcaagatggtcaccgtcctgagcatcgacggcggcggcgtcagagggatcatcccggccaccatcctcgccttccttgagaaagagctccaaaaactggatggtccggatgctaggatcgctgactacttcgacgtcgtcgccggcacgagcaccggtggcctcctgacggcgatgctcactgctccaaacgagaacaaccggccactgttcgccgccgacgaattggccaaattctacatcgaacactcgcccagcatgcttcccacagaagaactgggtcttgtccaagatcgccggcacgctgaggatggtgagtggcccaaagtacgacggcaagtacctccattcgctgctccgagagaagctcggcgacacgaggctggacaaggcgctgacgaacgtggttattcccaccttcgacatcgctaacctgcaaccaaccatcttctccaaattcgagttgaagtacaagccactgaagaatgctctcctgtcggacatttcgatcagcacctccgccgcaccgaccttcttcccggcgcactatttcgagaccaaagacgacaatggccagacgagggagttcaacctcgtcgacggtggggtcgccgccaacaacccgacattgtgtgcaatgagccaagtgtccaagtatatcatcctcgaggacaaggaagattgcgacttcttcccggtgaagccgacggagtatggcaagttcatggtgatctccatcggctgtgggtcgaatcacgatcagaaatacaaggccaaggacgctgccaagtggggaatcttcaactggctcatcaagggtagctcagctcccatcatcgacatgtttacttctgctagtgctgacatggttgacatccaacctggtgtgctcttcagcgctcttcaatgcgaaaagaactacttacgcatacagtatgatcagttgacgggcagtgccggctcgatcgacgactgctccaaggaaaacatg

SEQ ID NO: 389401 - DNA, 531 bp, Oryza sativa
ccacgcgtccggaagattgaaatgaaaatggcaatataatttggtggctaagctgggacccccagtcactatgtgagcttggagaaacttaagcaggaaaaccttatgcgaacatcgcactagcttactttttttttttagtggtggtgctggatgttcatttggacctatgttctccatttatccgcgattgtacttttatctcggtcgccgatctaaaccctacgaaaacaccggtcactggctcccccttttaatttggaccccagtgaatgatgtttagaagccttgtttcgaagttgaacaccatgttggaagaggcccatccgggcgttatgtgtagctcggcgaatggattgtcatgtaccctgactgcgacaacacattttggtcattttggtgaagcttccgagtgcctctggtgttgctggacgacacctactaattgtctccatctgagatttttctttccacatgtttggaactccagatgatgggtgatgatgctgacctgtggatttggagttgttc

SEQ ID NO: 389402 - DNA, 596 bp, Oryza sativa
ccacgcgtccgggcagttttggagggcggctacgccgggaggggggatggcggtggcggcggtggccagatgcggacctccgacgcgcgcggcggacggcgcgaagacggcgaacgttttatcttccaatgttctaagtcactggaacaagaacgacatggcagagaggataagaagagaaggggtgtccttttctctgaaaagataagaatagctctcttcaagtatgttcaagtaggctagcgtgaaggttctcaaggaggtgaccaagacgaggaaggtgcctgtgctggaggtgcccttggcgttgaccaagatcaagaaggcaaatcttgagacatcctcattctttgagactcttagagggacagagttcccggtcaggacatggatgcgcatctttgtgaaggttagaaatagatgcatgattgcttgcaagagcagttgatttggtttttctaaaaggacttttttttgcttgcttacttgcttagttcgttgggtaaaaatgtcaggatcagctgaagaaagggtagtgtacaatgtttttatgctgcatgagctccttaattaatcatgttcttcattaaaaaaaa

SEQ ID NO: 389403 - DNA, 458 bp, Oryza sativa
cccacacctttgccaagaagccttcttcttctagctgccactttcatcttgcttcaacataccaccaatcaccaagagatttgttctttgatctttctctgccagtgctgacatgggcaaggtgtgctgcaccgaggagtccgaagaggaggccgcattcaacctcatggggcttctcgtcgctgcgatcatcgccttggtgctgatgctcatctgcacaccgccacggcggcgctcagtcaccatctacccttgctgctgaggtggaggagtacctgcaggactgtgagtcctctgatgggagaagcttgattgcttctctgaagaatcaaagatgtgcagggtgaaggttgttggagaaagcaggaaggcaaggcattggctcctgattttctcttagttaaataattgcttaaattgtaatgcatcctattgtaaggcatgtttaattgggataa

SEQ ID NO: 389404 - DNA, 414 bp, Oryza sativa
caccggtttcaaatagagttccactacactgcatcatccccaaaggagattacctcagcccctcaaattctaaccatggaagccccttttgagttctcatggcctgagccaccaccggcaatggagatcgcgctagcaccagctgttgctgttgtatagcttcctgatggtgatctgtcctgacatcagtccactgcatgcatacttgctggagattttgtgtcctttatgtttgcgctcgtatcctgcctaatatgaactaactactataggtttttgtccaggcctaggagctttctgcctgcattttgtataaataggtgtttgctcctacatatttttctcaagtgccggatttgtaaccatcaagaaccttgtgtttctaatcactcagtaatgcacttaagttagccc

SEQ ID NO: 389405 - DNA, 1257 bp, Oryza sativa
atatattttagggaagtaagagatctgaacaactggtggagcaagaaaagagtgatgttataagtccagtcgatgccatccgtcctgctgatgttgaggagctccgtgagcaggataacgagtcaaagcctgccccagagggggagaattcaaaacccgacaggcaagtctccccagacaagctcttaagagcagccctccttaggagtcgttatgctgatgtgattgttaaggcacaggggattctcagccagggtggagacaaacaggaggagctggaaaagctccagaaggaagagaaagcaaggctgttggctgaaggaaatgcagctatggaagctcgaagagctgaagctgaagctgaagccaagcgtaaacgggaccttgagagggagaaagctcgccaggccctgcaggagatggagagaacggtggaaatcaatgacaacctccatctaaaggatttggaaatgcttggaacggcaaccacagaacatattgtgagttctgttgatgagactagtcctgagcattcccaggatggcatgcccagttttcttcctggatcaggcaatccattggaacagctgggactcttcatgaaagcagatgaggaggaagaggaagaagatcctagcagtgtccccagcactaaagatgcagaggaaggagagatcaactagtcccagtgcttgtgggctagttgctgaattagctgtgcatatggtagacgctccttccttctgcttccaaactagctcgaacaaggccctcaattttgatgctgctggatgtcgtaaattatgcgcctggagtatcgcggtaacctgccctacaaatcatcatatgtgcttggaggatggcacagccataatggccgcgacttgcggtactccgagctgttgtcgggtgtatgtatgtagccatctttgaagtgccatggccaggccgcaaggtgggtaagcaatgagaggaccaaatggttctttgcacatagtgaattagtgatccaggtgctaaagctcccagcggcaaaaggtgttgcccagcggcttatagatttttcgttcgttcttctctagttttgggtttgtccaattgcttcctgctgtaaattcgaattttgatgtagtggaggaagcgatagttgtttgctgggcatatgggcaaataggaaaaagcttctgcttttcttgtttacagggaaaaaaaaaagaaaattcatgggtctttcaccccaatttgttgtcacaccaa

SEQ ID NO: 389406 - DNA, 862 bp, Oryza sativa
  unsure (1)..(862): unsure at all n locations
ccacgcgtccgcccacgcgtccgcccacgcgtccggtatctcccaaaccagatgatggtactattggaagaaagattctggaggagattgtagtgggaaaccatcggccaccacgtcctccaatggattgtagtacctatcccaactatttgtcatatttctgggctaacagcaacaacacacgggaaaatcttggaataaaaaagggaactgtggatgagtgggtgaggtgccatgacgatggactaccttattctccggacatagagagcagtatttaagtaccatcaaaatcttacatctagaggctatcgtgtcttggtatacagtggcgaccatgattccgtggttccatttttgggtacacaagcctgggtaagatcactcaactacccaattgtggatgactggagagcctggcatatccgatgggcagtctgcaggattcacaatcacatatgcaaatgacttgaccttcgctacggtaaagggtggtggacacactgcaccagagtaccagccggagaggtgtcttgcaatgtttgggagatggatttcagagaaatcactttgacgattgtgtatatcagttatgatgagagctgctttgattattatctaatgaatgatacatcccttggccagttcattgggcaaggaggtagctcaggtgaggcgcattatggtagaacatgccacagaggaccagaacaagctttagatgattactaaagtgaatatgaaaggatacaaataatcctgagatctctcagtgatactctcttcgtttttttaatagatgacaccattaacttttnnnnnnnnnnnnnnnnnnnnnnnnnnnnnnnnnnnnnnnnnnnnn

SEQ ID NO: 389407 - DNA, 545 bp, Oryza sativa
ccacgcgtccggctggttgctgcaccaagccctcctcctgctggtgctccaactccttcgcaacctggtccggccgaccccgaaaaggttattctgcagtttggaaaagttgcaagggatatgttcacaatggactaccgctatcctctctcctgccttccaggctttcgctatttgtttgagcaggttcgacacgaaattggcatgtgaataattgttggaagaaggaaaaactggagaagggcaagaaaagagttcagatgtctggggatagggtacctagttgatgtttgcatttttttttcttgttttctcggttgtaattgtgcttgttgtagccttgaactagacgtatatgcaggaaagcatgtttttatgtgccctcatgcatgatagaggtaaggagccacatatcatccactgatccatactccatactgtgatgatgtatctgctgtgccattgccaacacaactgtgaaaggttccctccattcttctgttatccagcatatatattccgttggctacaaaaaaaaaaaaaaa

SEQ ID NO: 389408 - DNA, 902 bp, Oryza sativa
aattcgaaaccactagtagccacttgagcttcttcttcgccactgaggggaaggggaagagggatcggaggagatggcgagcaacggcggcgaggagaagagccgggtggcggcggggtacggcgggggagggtacgggtacggcgggtacgaggggcgggacgacaggaagtggtggccgtggctcgtgcccaccgtgattgtcgcctgcatcgcggtgttcatcgtcgagatgtacgtcaacaactgccccaagcacggcagcgcgctcggcggctgcgtcgccggcttcctccgccgcttctccttccagccgctccgcgagaacccgctcctcggcccgtcttccgccactttgcagaaaatgggagctcttgactggaacaaagttgttcatcagcaccaaggatggcgtctcattagctgtatctggctccatgctggcctaatccatttggttgtgaacatgctgagtttactgtttattggaatccgccttgaacagcaatttgggttcgttcgcattggtgccatatacctgctatctggttttggcgggagtgtgttgtctgcgcttttccttcggaataactacatctctgttggagcctctggagctttatttggactgcttggatcaatgctttctgagcttattatgaactggactatttattccaacaaggcagcagccataataactcttctatttataatcgcaatcaacttggctattgggatactacctcatgccgataactttgctcatatcggtggatttgtgacgggcttccttttgggatttgttttgttggcaaggccacagtttggttggatggaacgacatgagtggccccaaactaatcagcctctcaaatacaaagcataccaatatgttttgt

SEQ ID NO: 389409 - DNA, 620 bp, Oryza sativa
  unsure (1)..(620): unsure at all n locations
ccacgcgtccgcccacgcgtccgcttgaaggatatctcaaatatgagaatttgtctcaaacaaggatggctggtactggtaggagaataatcaattccgagtcggatccggctctaaatgctgaacataggaacacgaggaggccaccgtcgtcttcttcagttacaggcttgcctcctatgggaaggccaatgccatcgtcacagatgtcagaccgcagaggggggtcttcggcttccaatgcaaggaaggatgaatacaactggagatatgatgctgatgatatctctgaagaagtgttgcgagcatcaagtgctctagaaaacgtccagctagaccggaaagctcgcaatctgacgacttcttggaggcatccaggcgacggtgctgagtaaaatcggaaggtgggatgggtccaattcaccattgcgctgcttggacccccttgggccatttgtatcgttttggttgctgcggtgggattgtgcgcttgcgtagaagaatgctcagtgttgatcatgcctactgtactcctagctcatttgtttatgcaccatatatgggatttgatttctgctggacaaaagaaaaaaaataatgtaaaaattctttattatatn

SEQ ID NO: 389410 - DNA, 655 bp, Oryza sativa
  unsure (1)..(655): unsure at all n locations
ttcgacaaactggaactccaccgcggtggcggccgctctaaactagtggatcccccgggctgcacgaattcggcacgagcaacaatacgccaaacggtgaacacaacctggttgaatgggcgcgtccttatcttggacaaagacggcgattctatacgcttgtacacccccgtctggaggggaacttctccataacacgcgctcacaagacagctcagctggcctgtgcctgccttaaccgggatcccaaggccaggcctctcatgagtcaagtggtcgaagtcctcaagcccctcctgaacctcaaagacatggccagctcctcatacttcttccaatccatgcagcaggagcgtgccgcaagcctcggcaacccaattggcagccaaagcatgaaggcacagggcaccttcccgcgcaacgggcagcagccaatgaggagcctctcctatggcccgcacgcctccccgtaccggcatccccaaggcccaacaacgcaaattgcaattaaaaaatccttggttgctcatcttgccatccattccacaatnatcaattncaaaantggattccctntcccaccttgggttcattggtgttcacccaaccaactaccatggnccttgggacnccttttttcttgnagaaaccggtt

SEQ ID NO: 389411 - DNA, 885 bp, Oryza sativa
ccacgcgtccgaatttatgcctcgtggaagcttggagaaccatctttttaggaggtctttacctctcccatgggccatcagaatgagaatagcacttggtgctgctaagggccttgcttttcttcatgaagaagctgaaaggccagttatctatcgggatttcaaaacttcaaatattcttttagacgcggactacaatgcaaaactctctgattttggactagctaaagatggccctgagggtgataaaacacatgtatctactcgagtcatgggaacttatggatatgcagctccggagtatgtcatgacaggtcgcgtgacatcaaagagtgacgtgtacagctttggagtggtgctactggagatgatgtcaggcagaaggtcaatggacaagaataggccaaacggtgaacacaacctggttgaatgggcgcgtccttatcttggagaaagacggcgattctataggcttgtagacccccgtctggaggggaacttctccataagaggcgctcagaagacagctcagctggcctgtgcctgccttaaccgggatcccaaggccaggcctctcatgagtcaagtggtcgaagtcctcaagcccctcctgaacctcaaagacatggccagctcctcatacttcttccaatccatgcagcaggagcgtgccgcaagcctcggcaacccaattggcagccaaagcatgaaggcacagggcaccttcgcgcgcaacgggcagcagccaatgaggagcctctcctatggcccgcacgccttcccgtaccggcagttctcaaggcccaacaacggcaaactgcaatgagagagtccttggtgctcattctgccatccattcaacaatgatcagtgcaagactggact

SEQ ID NO: 389412 - DNA, 683 bp, Oryza sativa
  unsure (1)..(683): unsure at all n locations
nccacgcgtnccgcggacgcgtgggtctccgtctcgtgtcccacgcacgcacacctttccccccctctctccctccctcctccgccatccctagcagccgccccgcacccgcgcccgcaccatgacgagctcctcctccccttcccgcaaggtgctgagcaagatcgcgtgcaaccggctgcagaaggagctcgcggagtggcaggtcaaccctccctccggcttcaagcacaaggtcaccgacaatctccagaggtgggtcatcgaggtcgcgggggctgcgggcacgctctatgccggagagacataccaattgcaggtggacttccctgagcattaccccatggaggctccccaggtcatatttcttcatccagcgccaatgcatccgcacatttacagcaatgggcatatctgtttagatatattgtatgactcgtggtcaccggcgatgaccgttagttctgtttgtatcagtatcttgtccatgttgtcaagctcaccagcaaagcaacgtcctgccgacaatgatcgctatgtcaggaactgccgcaatgggaggtcgccgaaggagaccagggttggtgggttcatgatgacaaagtgtgattggttccaacttccgggtggcttttcctaagaaccctttacccgcaacctaccttaatgggggcctccatggg

SEQ ID NO: 389413 - DNA, 1199 bp, Oryza sativa
  unsure (1)..(1199): unsure at all n locations
ccacgcgtccgcatctctctctctctctcgctctcgctctcgccgcggagttggaggtttgggtgagatcggagcagcgaagcggaggcagccgcagccatggcgttggccgctcgcctcgtctcccgctcccggcagctatactctgctcaagctgccttggcaaatggaggtgccactcaagtccgcttgtatgccaaggaggcagatcgtactcccgtcaatggtgatgacctattgaagggcatattttttgaggtaaagaagaaatttgagactgcccttggtgtacttaagaaggaaaagatcactattgatccagatgatcctgcagcagtttctcgttatgcccaagtcatgaagactgtaagacaaaaggcagatcttctatccgactctgagaggattaaatataccatcgacacctttacaaagggcatccctgatgcacggacttacttgaatactcttcaggagatcaggataaagagtggccttatagatgatatgggtgctgaggctatgatgatggaagcccttgagaaagttgagaaggagattaagaagccacttctgaggagtgacaagaagaatatgggtctcctcttggcagagtttgagaagataaacaaaaagcttggaatccgcaaggaggatcttcccaagattgaggaagagcttgaattggaaattgccaaaagtgagctgacggagcttaagaaggaatgtgttgaagcaatggaggttcaactaaagagggaggagttcaaagacgaggagatgcctgatgtcaagaagttggacatcagaaacttcctgtaggccataaatctctcaaggcattttgaaatgctcggacactccataatggttttcttttccagtgacagccggcgctgtaagcataccaatgaatgttattcttgctttttgtaataaaaactgcaccgaagtacaaagacaagtcaacggttgagttggattgcttgttaccttcctgcgtggagaattttgttttttgtattggcaatgtgaacgccaagcagcttactgtctccctgatgatgcacctgtgttggtttctctgatgatatggacacaccaggttgaggcttaggcaatggtttactgttttcgattacattttgattngaatantttgtttcctctaaaatcattatcctaaaaaaaaaaaaaaa

SEQ ID NO: 389414 - DNA, 571 bp, Oryza sativa
  unsure (1)..(571): unsure at all n locations
gctctagaactagtggatcccccgggctgcaggaattcggcacgagaagaagttggacatcagaaacttcctgtaggccataaatctctcaaggcattttgaaatgctcggacactccataatggttttcttttccagtgacagccggcgctgtaagcataccaatgaatgttattcttgctttttgtaataaaaactgcaccgaagtacaaagacaagtcaacggttgagttggattgcttgttaccttcctgcgtggagaattttgttttttgtattggcaatgtgaacgccaagcagcttactgtcaaaaaaaaaaaaaaaccaaaaaaaaaaaaaaaaaaaaaaaaaaaaaaaaaaaaaaaaaaataaaaaaaaaaaaaaaaaaaaaaaaaaaaaaaaaaaaaaaaaaaaaaaaaaaaaaaaaaaaaaaaaaaaaaaaaaaaaaaaaaaaaaaaaaaaaaaaannngggggggggcccttttaagggacccaagtttatttcccggggttgggaggttaaatttttttttttggggccccaaaaataaaatcacggggccctgtttt

SEQ ID NO: 389415 - DNA, 489 bp, Oryza sativa
  unsure (1)..(489): unsure at all n locations
ccacgcgtccgcccacgcgtccgcccacgcgtccgcccacgcgtccggtgagatcggagcagcgaagcggaggcagccgcagccatggcgttggccgctcgcctcgtctcccgctcccggcagctatactctgctcaagctgccttggcaaattggaggtgccactcaagtccgcttgtatgccaaggaggcagatcgtactcccgtcaatggtgatgacctattgaagggcatattttttgaggtaaagaagaaatttgagactgcccttggtgtacttaagaaggaaaagatcactattgatccagatgatcctgcagcagtttctcgttatgcccaagtcatgaagactgtaagacaaaaggcagatcttctatccgactctgagaggattaaatataccatcgacacctttacaaaggggatcctgatgacgggcttacttaanctctcaggggtcaggtaaaggtgcctanggtgaatggggct

SEQ ID NO: 389416 - DNA, 884 bp, Oryza sativa
  unsure (1)..(884): unsure at all n locations
aggaaaggatattagtccttgctgcaacgaacaggccctttgaccttgatgatgcggtgataaggagatttgagcacagaatcatggtcggcctcccaacgttggagagtagagagctgattctgaagacattgttgtcgaaagagacggttgaaaatattgatttcaaggagcttgccaaaatgactgaaggatacaccagcagtgacttgaagaatatttgcgtgacggcagcttatcatcctgtcagagagctacttcagaaagaaaagaacaaggtcaagaaggaaactgcaccagaaacgaagcaagaaccaaaagaaaagaccaaaattcaagaaaacgggacaaaaagttcggatagtaagactgaaaaggacaagcttgacaacaaggaaggtaagaaagacaagcctgctgacaagaaagataaatcagacaaaggcgatgctggagagactaccctgagaccgctaaacatggaggacttgagaaaggcaaaggatgaagtcgccgctagcttcgctagcgaaggcgttgtgatgaatcagatcaaggaatggaatgagctctacggcaaaggcgggtcgaggaagcgggagcaactgacatacttcttgtagtgaagaattcattacttgtatatacatttgtagtgtttgtggttggcatctggcccccggatgactggatgtactgaagcagagaagaacatagggaaaaaagaggcatttaggagtagtagtcgtcagacccgataatttgattgtcattccctagttgatttattgaataataatgctgaaccttcttgattcgggaatacaattggtcgattactgattaaaaaaaaaaaaaaaannnnnnnnnnnnnnnnnnnnnnn

SEQ ID NO: 389417 - DNA, 858 bp, Oryza sativa
cggacggccaccagtactagtacggctctaatcagttcgcgtttgctaattaactctgccatcatggctggagtacatggacttgcagctgcaggtctggtggtgctactcctcgccgccgttgcgccggctttcgccgtggactacaccgtcggcgacacatccggctggagcagtggcgtggactacgatacctgggcgaagagcaaaaccttcagcgttggtgactcgctcgtgttccagtacagcatgatgcacacggtggcggaggtgagctcggctgactacagcgcgtgtccgccagcaactcgatccagtcctacagcgaccagaacaccaagatcgcgctcaccaagcccggcacccgctacttcatctgcggcaccagcggccactgctccggcggcatgaagctcgccgtcacggtctccgcggcggccgccaccacccccaccccgacggcgtcgtcgtccccgccgtccaccgcgacgcccgccacgccgtcatcggaccccggcatggacacgccctcgtcgacgccggacgcgaccacgacgccgacgacgacgacgacgaagtcgacgggcagcaccggcggggccagcggcagcgaggcccgttcggtgatgggcctgctggtcggggccgtcggcctcgccatgatgggctaggctaggcaagaggcagtgctgctcatcttcatccagttcggctattatttctccgcgacgtttaatttttccttattagtttacgcgctccgtgaactcgtctttgtattgtactactacgaccgcgatttcgtattggaactttgattactccctttgcaaaaataccctccgtaatattagcact

SEQ ID NO: 389418 - DNA, 487 bp, Oryza sativa
ccacgcgtccgcggacgcgtgggtttttttttttttttttttctactattaacaatgaacttatcaattgaattctcctaaaccccaaatataaaaaaggagatttgaggaagtaatcctcggtggtaaaaaaaagttggaaaagatatgaacaagaagatgaaagttctaagttttttttcttcttccctaattatgattttctgggatgggcaatgatgcctccgcaccagacactcacgagatggacggccgagatgagacgacgacagctcaacagaggatggcctccacgccccctgtccggacgcaatggcagacggggcacgccatggccacgtccacgtcgccggcggcgaagcaatcgccgcagaggctgaggtgcctgcaggggaggagcaccacggtggccggcctcaggcggcaggtgaggcatgcgcggtcagacccgctgtggcgcgggtccacgtacgccgacgaggacgac

SEQ ID NO: 389419 - DNA, 918 bp, Oryza sativa
  unsure (1)..(918): unsure at all n locations
aataaagagcctattgcatgggtcccctgctgggttatagtttaattcatgcctcggggctggaacttcccatcccttccatgcccaaaatcttgaatcctctttgcccctaaagtccaccgcaaaagggacggcctttgcacccgaaagctttgtagcaaaatcctctgcctcaggcacttgagcattggccttatgggatttttccccagcctatgactatttacccctggcttcttatatttatgctgcaccttctctggagacttttgacttgaatgtaatgcagcggaacgtgcagagtgtttcaatttttgcacatcctgcagatctgagatcaatacgagaagagaagcatcacaaccttaagagtgtgacggttacatcattcatctctgtaaagagcttggttgagctgacatgccatatccttgagagtacagcttcactcgagtgcttgacattggatgcttctcagactggttttaggtgtgatactccaggcagcaaaatcagcaaatgccccccactagatagggacattatcatggaaggtcacagaggggtcttggctatcagaagatacatccagcctagggtaccttccacagtgaagctgactgttttggagccctgcagctgccattccactgaactttagatgtcatgtttatcttagttattcgatgtttaatcgtgctgctgctgatgatgattctgtagattcttagatgggtcatggtttctaaagtttgctcttaatgattactactagttgatatcataaccaatgcacatgatatccactagtaactctagtttccacctagcagcagtgttgtatgcacattaaaaagttcttcttccttaaaaaaaaaaaaaaatcnnnnnnnnnnnnnnnnnnnnnnnnnnnnnnnn

SEQ ID NO: 389420 - DNA, 876 bp, Oryza sativa
ccacgcgtccgcggacgcgtgggtgcgtccgcgccgaggtccaggcgcccgagcacgtcaagcggctgctcggcgacgtgtgcacgcggctggcctcgcagtgcgcgcgggttctcagggaggcgtccacctcggtcgccgccatgaccagccccaagacgctggacttcgccgtggcggacatgaacacggccgtgcacgagcttcagggcgacctgcgcgcgctcccgcccgtcctggccttggaaccggcggcggagatgtcgctgatggacgcgatgccgctcttcaccgtggcgtcgctgctgatagagatatcggcgaggatcgagggcgtcgtcgacgccgtcgagacgctggccagcctcgccagcttcaagcaggtggaggatgatgacgacaagaagggacaaaccgagatgaaagtgcacccgctgaacgtgccggatgatcacgacgcgtcgacacatgaaagccagactacaacgaagcaccctgaacaggtctaaactttaaaaacgtccatcaaatcaaaccgcacaaaatcaaccagcgggacgagtcagaccggaaggacacacggatacatgattgaatctaaactggctgagccaccgctctttgctagcttcttctggtgattaacagaataactctatcgatttacagtggagagaatcttggcaacttcataccacggcttacacgacgaataaaaccggcttaccactgtcataaaagtcggcatgtatcgtcgcattcatgatgtactactaccttgtacatatattaacagaacattatttgatatttttacaggaacactgcaaggcatatgagctcagatgttcccctctccttaaaaaaaaaaaaaaa

SEQ ID NO: 389421 - DNA, 777 bp, Oryza sativa
ccacgcgtccggacgcgcgccgtggtgaagcacagcctccccggcgccgccttcgacctcgaccagctcaacaagctcttcgccaccaacggcctcacccagaccgacatgatcgccctctcaggagggcacacgatgggggtgacgcactgcgacaagttcgtgcggcggctgtaccagttcaagggggcggcgccgcagtacagcccgccgatgaacctggcgttcctgcggcaagatgaggcagacgtgcccgctcagctacagcccgaccaccgtcgccatgctcgacgccgtctcgcccaacaagttcgacaatggctacttccagacgctgcagcagctcaagggcctcctcgcctccgaccaggtgctcttcgccgaccgccgctcgcgcgccaccgtcaactacttcgccgccaaccagaccgccttcttcgacgccttcgtcgccgccatcaccaagctcggccgcgtcggcgtcaagacggccgccggctccgacgccgagatccggcgagtctgcaccaaggtcaactaataacgtagagcagtatagctcacatttgggtggtagagagggtaaattggtgaattcttctctgtgtctctcttcttcttcttcctcttcttctccatgatgatcttcgattctcactgtccatgttcacaagtccaccgcgcacagttgttgtatttgttcccgcctattcttttcttgattcttataatcataaaaagtgtcatacattaattaggataaaaaaaaaaaaaaaa

SEQ ID NO: 389422 - DNA, 909 bp, Oryza sativa
cgtcatcatatctattctccagtttatgtcccacccatggctatgccaaactttccaacaaatatcccctatccatcaaatggaaacaattatcttcagatgccaggaggaggttcacatttagcagcaggtggcatgaagtatggagtttcacaatataaacctgttccagctggtagcccttctggttatggaaattatactcatccagctggttttacatttagctctcctggtgttggtgttattggaggggctgttggtgtcgatgatgtcaataggatcaaatacaaggataacaacctttatgcaccatccccacaggtggagggatctgatatctggattcagacacctagagagatgccgactttgcagtgtcccccatatttcaatttatcaggtcaagcaacatctggtgcttttgtgccgaatcctgggaatgcatcattcaatgctacagctcaatcctcccatgcgcaattcccaggcttgtaccatgcacagcagccttcggcaattgtaagtccacatcccatggtgcatcaacaagtccaatcggcaattggtcccaacggtggagttggtgtggctacaccagcccctcaggtaggggcttatcagcaaccccagcttggtcattggagacctggcttttaaaggtttattaattatctgtaattagggggtcacaagagcctttatgtaacaaaagaggctacttttaacaggaagcacatttgtttttagtgcagctctttctgatctatttaaggtataacagggttttgttagctttcccccaaggtgaattcagtatcccatctgaactggtttgatgtagattgtgagctaaacattggcttagttctttcaagagcacagaagttgaatgccgttttattcttt

SEQ ID NO: 389423 - DNA, 1114 bp, Oryza sativa
ccacgcgtccgcccacgcgtccgcaaagaagcagtagcctttcagccctcttgctttagtttgttgatccccgactaaatctcattggaaaacaagctagaaagcatggaaggagtgaagagtttgatcatgtgtatgctagtgctaggcttagtcctgcaacaagagaagatccaggtggaagcaaagagttgttgcccatccaccacagcaagaaacgtctataactcatgccgtttcgcgggtggctcaagagacacctgtgctaaactttctggctgcaaaattgttgatgggaactgcaagcctccttacgttcaccatacccttcacccagaagctgaggaatcggaggtagttgacttctgcaagctgggatgtgcttcgtctgtgtgcagcaccatgagcactctttttgccaatgaagaagccaatcatgccgtcgatcgttgcaacgaagcatgccgccgcttctgtaccaaggaagctgagactgtcaccgttgtttcctaagcaagtgcaacatgcaagcataaggggcttcacacatggaagcccatggtaggctatgccaccctggagtactcataaataaaatggatatcatgatatccaatccagtgtgccatcgatctctcttgatttctgtcacgttgtatttccaataagctatgataatcacgatctgccatcatatattatcttttcttgaggatgtgagcatatgtagagtgatgatatcattgcctaagaaataaatcttgtcatcgggatggatcccttttgttaaaaaaaaaaaaaaaaaaaaaaaaaaaaaaaaaaaaaaaaaaaaaaaaaaaaaaaaaaaaaaaaaaaaaaaaaaaaaaaaaaaaaaaaaaaaaaaaattaaaaaaaaaaaaaaaggggggcccctttaaaaggaccaaagtttacttacccgtgcttcaaacggaaaagcttttttatggggcccccaaaattaaatacattggccgatgtttaaaaacgtgggaacgggaaaacccggggggtaaccaaatttaatggctttgcagcaaatccccttttcgcaagttggattaataaaaaaaaggcccgaaccgatcccctttcc

SEQ ID NO: 389424 - DNA, 1007 bp, Oryza sativa
  unsure (1)..(1007): unsure at all n locations
ctcgagtcttccttggactcgccggagagatgggcgacgcggcgtcgtcggcgtcggcggcggagatggtggggcgcgcggtgggtgaggtgcgggaggcgctgaacgagcacgccgacgtggtggcggantctttgggcgcgtctcctccgacctccgctccggattccgccccgccctcgactccttcctcggcttcttccacgccgtcgactggaaggaaccttggttgatcagcatgttaatttttcatgccattctgctgctggtaacaatcatctcaaggagaaatgtcaacttccaacttatcttgtcagctttaacattttctggtgtatttcctcgctgagagaataattccattcttagggcaccactggaagagcttctcaagccagaattattttgatccccaaggtctgttcatttcagttgtctggtctgggcccctccttttgataacgatccttattttggtgaacactcttgtcacactctgcctgctgatggtaagatggaaaagggcggagcttaggcaccgtgctcgtgaggttcgtaacaagcaggattgatcttaagctacctgaaaagctgaaactacgctgtttggtggccagcagacaagttgcttcccttggactgttgatctaaccgaaggaatttttttgtgtgaacctaccatgtgtagacatgtagcagtcggtcacaaaaacagtgtttatttagggaatcatttcacatttgaagaaatcatggccagaggcccagagcttgactcttttgcctgtagcttgtgtattcccacgcattcttgtttttcatgcgaaggcaggagtcgagttactgtatttgctgaaatatgtgtaatagggcaaatcctttttccattgagaatctggctccatgaatgacagggtattttgcaattgtaatacttattcaataactcattttgatttaacacctgtgtcttctctgagtgtgattnnnnnnnnnnnnnnnnnnnn

SEQ ID NO: 389425 - DNA, 832 bp, Oryza sativa
ccacgcgtccgcacaactgtctgttgaaattagatcagctgcagacccttctagaatagaatctgtactccctgttcctctctcgtactacttcgaagtacagaatttgccaaaaggaaagcatcttgttcagcttcgttctggtcttccatcacatacccatagatttgagtcagagatagttgaagttgacttggacaagcaacctcagattccatgttggtcctcttaaatataaaaccgaagagcgacatcacaaaccaggaattaactccagcccctgtatttcctcttattgtcggagtttccgtgattgcattggtcatcagcatgccaaggctaaaagacttgtaccaaagtgctgtgggaatgactaccctaggttctgcggctgcgccgataaaaaaggagccaagaaagacaatcatgagaaagagggcgtgaggcataaattagcttcagattaggtgttgaaaaaacgggtacttacagttgatcacgtcaggagtagaaaatagccgtttctttgcatttaaggggtaattttgcagataaaaattggcagtcgatatttattaacgactacaaattttgatgccaatgttgggcatgtagtcattcgaaatgttgtacgatagtactgtgtacagttttcaggtgccagatgaagttttgagagcctggtctatctttcctcagctcagtatatttgtttagttttagtgtctggtctcgtttatgctactatgttgtagataaacacgttggcatttgcttcgggcatagttactgccttgtactttggcattaatttttcaaaaaaaaaaaaaaa

SEQ ID NO: 389426 - DNA, 692 bp, Oryza sativa
  unsure (1)..(692): unsure at all n locations
gaagtacttcttttgtctgtggtggggcttgctgcagcttagttctagtggaaatcctcttcagacaagtgcatacatcgcagagaacacatttgccatagcaattggtgctcttagtctcggactctttgctcagctgattggcaatatgcagacatacttgcagtccatcagtaaaaggcttgaagagtggaggctccggcaaagagatatggaggagtggatgagacatcatcagctccctgatgaacttcaagatcgtgtccggcgattcgttcaggttaaatggcttgcaacacgaggagtagaagaggaatccatcttacaagctttgcctgctgatatacgccgggatgtacagcgccatctttgtttggaccttgttcgacgtgtcccatttttctcggagatggattaccaacttctagacgccatctgcgagcgtctggtgtctttcctgtgccctgagcgcacatacatttctcgtgagggtgatcctgtgaatgagatgctcttcgtcatacgcggtaagctagagagctccacaaccaacggaggccgcagcaacttcttcaactccatcatcctgcgccctggtgatttcgctggcgaggagctgctcacatgggctttacttncaaagaccaatgtccatttcccgctttcgacgaggacaaggcagagccttacag

SEQ ID NO: 389427 - DNA, 598 bp, Oryza sativa
ccacgcgtccgcgcgtctcgtggcggaaatgaggcgcggcacggactgggccagggagaacgccacggcggcgctcgtgctgctctgccggcgcctgggcgcgccggcggtgacccaggtcatggccgtgcccggcgtggaatgggcgatctgggagctgatgagcatcggcacggagcgcgccccggcggaaggccgcctcgctcggccggatatgccggcggtgggcagccgcctccgccgccgacggggagcgaggcggcggttgccccgttgccaccgtggtgccccctgccatgatggcttcgtgaaaaccaatcacaacttgcctcgtaggataagttcagaaacataatttttccccccttcttgctgtacagagtcttttttaggctgtcaagattctttgctccgagagataatggtgagtgtttgatcaactgtgcatacgagcttcagtccaatgtaatcccctccaattccaactcaaattgcgccctttcttttctcgaaagataaacgaagatagaaagtatttttcacatgcacatttctgtactgccattcgtaaggatacccggatttttccttcacctta

SEQ ID NO: 389428 - DNA, 1163 bp, Oryza sativa
  unsure (1)..(1163): unsure at all n locations
gacgcggcttcgaaaagcggttccccaagaactcatctggccaaaaacccaccaaaatcctctcgatccatcgccaatggggcttcctccgcagcttttgcagcgtgcctgctcgcgtgcgcgcttctcttccagatgtgcgtcgcgtcgaggaagctcaccgcgctggtgcaggaccagcccatcacaatgacgtaccacaagggcgcgctcctctccggccgcatcgccgtcaacctcatctggtacggcaacttctccgcgccgcagcggcggttgaatcaccgacttcgtctcgtcgctgtccaccccgccgtcgccgcagccgcagccggagccgtccgtcgccagctggttcaagacggcgcagaagtactacgccaactcgaaggcgcgcttcccggcgctgtccctcggccagcacgtgctcgaccagtcgtactccctcggcaagcggctcggggagaaggacctcgtcaggctcgccgcccgaggctcgccgagccgcgccatcaacgtggtgctcacggccgacgacgtcgctgtcgacggctctctgcatgagccggtgcggcacccacggcgcgtcgccgcggtcccgcgccgggcggttcgcctacgtgtgggtgggcaacccggcgacccagtgccccggccagtgcgcgtggccgtaccaccagccggtgtacggcccgcaggcggcgcccctcacgccgcccaacggcgacgtcggcgtcgacggcatggtgatatccctcgcctcgatgatcgtcggcaccgtcaccaacccgttcggcaacggcttcttccagggcgacgccgacgcgccgctggaaggccgccaccgcgtgcgccggagtgtacggcaagggggcgtacccgggttacgctgggtcgctgctggtggacccggccagcggggccagctacaacgcgaatggggcgcacgggaggaaatacctggtcccggcgctcgtagaccccgacacgtcggcctgctccaccgtcgggtagatttgttggaatggagtagaggactgttgttttgttaccacggtggagagtgttccacgcggctaaaatttgtacctgggggtagtggtgaaattctttcatttgttcaatgaaaaaaaatattagttaaaaaaaaaaaaaaaaaaann

SEQ ID NO: 389429 - DNA, 777 bp, Oryza sativa
tcggcgcacgcgtccggcggcactttctaataacctgagccaggcattccggtatggaatgtacagcaatgatgacattgaagaggcacaagtaattgaacgagatgatgaggatgtctactttgatgatgaatcagctgaagtagtaatatcttcgttgcgtttgggtgatgatcaggacagcagctccctctttacgaattcaaactggtttacctttgatggtgatagaggaataaatgaccgtttagctgcctctgtcccttcttcatctcccaattctgaagaaacttctctaaacacggaggaaactgatgaggtgcaaattggtgaggacactagcatcgagccacaactggaaagtgtctctcttgaaaatggccctgttgaggaggccggggacttagcagatgtaagtaaacccgcggacgcgtgcgcggaagacgagaaactattgtgcactgaagaggaagatttgtccaaagaagctgaagaatctgagcgacacgtggatgttcgagatggccaggtagacatacaggcagaagatgcagctgaaggatcatgcggggatatgggtacagggatagcagtggatgaacctgtcagcccatcatctgagcccaacaatgcttcggctggagcttcaccagacacaggtgatatccatactgctggctcaactggatccaacgattcaggtgcagagttgcatgccaaggaagattcacaggatggacagaaaactgatgagcccacaacaacagagtgaaagta

SEQ ID NO: 389430 - DNA, 1041 bp, Oryza sativa
  unsure (1)..(1041): unsure at all n locations
gcgtccgcggacgcgtgggcggacgcgtgggctaatccggaggatatgttttttttcttagttttttgagtcttaatgtccacgagggggggggaattctccactaacatgctctgttgtgtgattctcagttctatcttgtggtcacaacactaactggcaactgctcactcctctcttggctcccatattagaaccaacactatttgttgacactttaacatttggtgatatttatcatgtgcactgtttaatttatgaaatttgtaagacaattctattccatcaattactgtttctccttgctcatgggtgaggtgtaaatgatccaaatacatgctatataaaaaaattatatgctgttaaatttatttctcctttgatattggacgggtgcaccgtagcgcgcagttatttctagtttgtttcaaatgccccgttgctagatttgcctggtgtttttgtagagacgcccttggccagagtagaattcctcatgattttgatgactctctctgcttgggtctggggaaaacaggctttaaaaattctagagttggatgccttcttttagctgctttatgttggaattctttggtcaactagacatgacatggtcttcagggataagatggtttcctcacctctaattattcttttttcgtttgattggcttactgttgtagtggaaatcatttctgaancctgatgacgttgctactctggagtccatggcggcggcattacaagatgctgtcaacggtcttcgtccctcgcgagctggaataggctaacatcggtgttaccggtggtttagttttgcttttggcttttgctggcattctggagtttggagcctgggagcaactactataattgatgtactgtccttaaaagcatcatatacgattttctttttaacacgagtgtcacgtacgattgagtgatgatatacaggaatacttgatgtgctgttttaagagtgtcacgtatgatttatttattttttttgnnatgnnnnnnnnnnnnnnnnnnnnnnnn

SEQ ID NO: 389431 - DNA, 594 bp, Oryza sativa
gggacgcgtccgcggacgcgtgggcgcccgtctccaaggatacccgtgaaatgttcagaatgtgggcatccctctgggggtcggctccctcaggtgtccacactagatgatgttcaagtagacgtggctacgaaagccaacgcccaagcttttaacaatggtcttatcagtcgtgcactattcggagccaccggtatgcctgatgtctccgtatacatctttgctcttttcaacgagaatttgaagggcggagcatctgtagaacaaaactttggcttattctacccagacgggacggaggtttaccaagttgactttcacaatggtggtggtggtaatgtttgccctacaaaagcaagttggtgtgtggcaaattcagcagttgggagcacccggctgcaagcagcgttggattgggcttgcagtaatggtgcagattgtggtgctatccaaccaggcaagacatgctttgcaccaaacaccttggtcgcacacgcatcttacgcgttaatggctactaccaacgtaagagccaagctagcggtacatgtgacttctctgggtgctgtttttattgtctacaagccttcacca

SEQ ID NO: 389432 - DNA, 469 bp, Oryza sativa
  unsure (1)..(469): unsure at all n locations
gggtcaagcagccaatctacgtcctcaccactggcgccaggaagagtccctttaggaacatcgaggccattgctgagtgccttgctaatgagctcatcaatgccgccaagggctcatccgccagctatgccatcaagaacaagtataagattgagcgtgtagccaagccgatccgttgagtgctgaacccatctcagtgtgctcgaggtattgccttgcactgttgccagcactttttgctagtctttttgggctttgccagagtgacctgtgattttctggttaatgataagtgctgagaaaatgtagtagtctgttcgccccccacactgttttattacacgcccaatccgtgttcctgcnnnnnnnnnnnnnnnnnnnnnnnnnnnnnnnnnnnnnnnnnnnnnnnnnnnnnnnnnnnnnnnnnnnnnnnnnnnnnnnnnnnnnnnnnnnnnnnnnnnnnnnnnnn

SEQ ID NO: 389433 - DNA, 553 bp, Oryza sativa
gagagagagagagcaagaagaggaggaggaggaagaagaagacatactgtccatccatggcgggattgttgaagaggttgctggtggcgctggcgcttgccgtgctcatgttcacggccaccgcggtggccgggcacccggctccggcgaagaagcacggccacacgccggcgcaccaccacccggcgaagaagcacggggcgcgcaagacggcggccatggcggccacaccaagcctcaccaccgcatgtaaccggatgccgacgcgcgcacgcatgcagcaatcagcaatgccatctcgccttcattctttttcattcttcttcttgttgttttgattagcgcccttactttatgatcatttggtttaatttgtacgcttaccatgagttgatttgatcttctccttcttctacctacgcgtatgtgtcatgtgggatgagtgaaatgaaatccatggaataaaatcagatgctcctcagcctgctctaatgtcagactactgttgtcatgcaggacccccaacaatctgttcttcaaaaaaaaaaaaaaa

SEQ ID NO: 389434 - DNA, 707 bp, Oryza sativa
ccacgcgtccgcccacgcgtccgggcaaattaacacaagatagcctaaaacttctcaattggggtgcacatattctgataattggatttgccagtggagatgtaccaattattcgagcaaacatcgctcttgttaagaattggacaattcatggtttgtactggggaagctacttcactcatcggccacctgtactcattgactccctcaatgaactcttttcatggctttcaaaggggttgataaaaatccagatttcccacacttacaggctccctgaggcacatctcgctttcgcagccctgagagacaggaaggccgttggtaaagtgatgattgtgatgggctcaccagcaaaatcaagactctaacgcccttcagggttcatcagggttctattcaaaaccatacatctatgcacatgtcatatgtatagaccatgacggtattatttaaagcagcggtagtccctttcaataatgtggtttacaagtactgctagcttgcaaactaccagagacatgaattattttatgtatgtagattagtggagaataaatttgaaaaataaaatagagttatctgtaggttgggccgtcccctgtaatgtctggcttctgcaatgtaaccgacactgtgtaccaatgctgcaggatgtatgagaagagaaaatgtgagaaatatgtgaagttattaattgtagtatc

SEQ ID NO: 389435 - DNA, 613 bp, Oryza sativa
ccacgcgtccggtcgaacaacaacgtcaacatctccaccggcgtcaactgggcgctgctctccaccgtcgtcagcaaggacttccccctcgccgtctactccgtcgacaaggtgccgctcccctacgagctgttcggccccaagccgcccacgcccgcgccggcgccggcgcccgcgccgtccaagtccaagaccaagaagcacaagaagtccgccgggatcgccgagccgcccgtcgccgacgacgcctccgccgacgacaccaccaagaaggccgccgcgcccgccaccgccgtctccaggtgggtcgtcgccgccgccggtgtcttggccggcgccattctcgccgccctctaagctaaggagacgacgccgacgtcgaacaaatgcatcgcccatgcatgccgtatgcacgatgactgaactggagtggtgaaccgaatccgaatccgaattgatcgagatcgattgaaccgtgtaccgatattgttgtgctgctctgtatgtccatcggctttattctttctcttattttttttggggttataaaatttcttgttgatttgtatttgtaatttatgtgatacccttactagagtgtacttcttttttc

SEQ ID NO: 389436 - DNA, 855 bp, Oryza sativa
ccacgcgtccgcgccatcgcccacggcctcgggatgcgccgcgtcggcctggtgttcacgcaggcagtcgggaggaagaccagcgacactggcgagtacaccatgtccaaccgcgaggtgcttcaggccaccgagctgcaggcggagggcgggatcccggagtgggtcaccgccatagtcaagctcgaggtgggggatgatggctccggtgatgtgcacttcgaggcgttccagatgagtgagatttgtgtgaagctgttcaaggatggtgtgctggagacggagattggggacaaagacgatccccgcctgtccaagatgcggaaagaggtggtggctgggggaaaggatactatggaggtggacaatgacttcttcctggtgcctgtcaagatctctgatcatcagggtccactttcaaccggctttcctatcgagaaccgtggaaaccctgtagcaatgagcgcgctcaagagccacctggatcgtgctaagcatctaccatttgttaagcggatctcggacttccaccttctcctcctggtggctgcgttcctagacataaaagcagacgcccctgcccccaccgctggcgtaaagaaccagagcgtggcgcctgaaggctaccaaccgctgatcgagtcattggctggcgcctgaagtctaccagctgctgatcgaatcattcagccaggtaggcataatgttgctctctggaagcaaagcacctggtccctttaaattcaccgccatacaccaggtgtaacctatggtcgtctctggtgtgtcaaaaagcctcgatcaattcataggcgctcaacttgacacaagcgcaacatcgttttttaaaaagat

SEQ ID NO: 389437 - DNA, 551 bp, Oryza sativa
ggtcatttgtcaaaaaaggccgatgtttttgcatttggagtacttatgttggagactgttgctggtcgttcgaatacaaacaactcccttgaggaaagcaagatatatctcttggagtgggcttggggtttgtatgaaatggggcaagctctgcgcgtagtcgatccatgtcttaaggaatttgatgagaaggaagctttcagagtcatctgtattgctctcctttgcacgcagggctcaccgcaccagcggccgccaatgtcaagggttgtggcaatgctcatcggagatgttgatgtggctgaggtggtcacgaagccgagctatatcaccgagtggcagctcagggatggtgggagcagtagctacaccactagtagctatgcaggatctagtaaccctgagtttagtaggcagagggagaccaaccctctcgcacggtcatcaccaacgatcaccaaagctagtctggtgggaaggtgagaattgaaagttgaattgctgcaggtgattgacccttggtttgcagtgacaatattatacgttggtgt

SEQ ID NO: 389438 - DNA, 1379 bp, Oryza sativa
aatgaatgatggcgtcaagacacaattagggcttactcgttttaaaggattttttcactcataggattaggaaaaatgaaggaatagggatagctgtggagtccaatcctatgggaagctaaacgtcaggaatttaaaaaaagtgtgcattcggatataccgcaggagaagtgtaggaaatctgccgtttgaaatatatttttttaagtttgcatcaactgacatcggccctcaactagccgttagctttgaagtgcataaatagcccccgttagccttgtgcaccattttcccctgttctttctatttgctcatcaactgtggaagaagcttgctgatcctttgctcttctcttcactatctgcataatttttccagaagctttactcatcgtctagccaccatagctggacgttacttgctcgtgtaacaacaagcatcagtttggtaacatctgcacaccatgaatccaagctaccgacgtatatcagaaagtgatgatgagttcattcattttgttctgcctactttaggagattcatcacaatcatcttgtattaggagaccaatgcacacgtcaaaacttacagggggttgccgtgtacatgagattttaacaggacatgaaagattatgcaaaagaaacttccgtatggaggtcgacatttttcatgcactagtcaataagttacgtgagaaagagtacctaactggtactatatgtttcagtagaagagcatattgctatattcttatatacagtggcaaaaaatgcaaccaatgaaacacttcaagattggtttcagcatagtccagacacaatacatagatatttcaaagcagtgcaggaagcaatcacaaatctcacatctgtctacattcgtgcaccatccctacacccacatccaatcttgagggaaccacaattttacccccttttttcagaattgtattggtgctatagatggtactcatatccctatgaaacttccattggatgagcaagagtcatatagaaataggaagcaaacaatctctcagaattgtatggttgcttgtgattttgatttgaagtttgtgcatatacatcctggatgggagggatcagcttcagatgcaagagttttacataatgcacttaatcatggttttcaagttcctggtggtaaattttatctcgtagatgctggttatgcaaatactacttgttgctgctcatcgccgccgcccgccggcaacaacttctctgaaccaaacaagattgccattgggcaggcgctatgaacccttgtgtgttacagctgcgaccccattcgcggcgacccaaatgctaaggtatatgcaaggaagcagcagggggcatcagatctacgcataac

SEQ ID NO: 389439 - DNA, 1018 bp, Oryza sativa
ctaaccctaactctgcaagacgcgcgtccccgccgcaactagcaatgcccaagcggcgtcgcggggttcgcccccctcctcccgatccttccccggctccggcgacaatcgactatagccttacttataaggagatagccgccagtggggctccaggtgctgtggactttgtgaagaatcatggcttgtacttgctgctgcttgagacaccctctggcttctcaattttctctctttgtggggtctacatccacttaccagatgcgatacaaaatatttgggcgatgttcggtacttacaggtcttcacatgacgttatctggctgaaggaatttcagaaatttgatgacaagtctagcgccattaatgttgatactggtgttaacaaacagcttactgagatgatcatgaagtggcgtcgccctaggcagaaattggttgttggaaagccggagtataaatcaatcattgaaaataccttaggaataccctgcctgtgtgatgaagttgtgatggacgtaatgtgggccatgaagcgtctcattcgctattttgtgcccactgaaacacccgagctggctgaagaggacagcctcactatgagtcaaggactacggatgtttttaagtcgttatggctttgaaatcaaaccagagatggtctacaacgatattgttcgtgctgcatccatcgtgtttaggtgtgatgctgttgaggacctttacgagcacttgcaacatcttggtcgccacctcaagaatgtgtctggcattgactatgagaattggggcactgtgaaactcgcgacagcttttaagatcatatgcagccgcaaaattgataaatctgatgagatgttttcagacgacgtggcgatcgaagttgctggattgatgcagattaaatacaaagatcttgtttttttcgacaggttgcattgcaaactataaaaaaattttaggtctcaatatactcaggaatgattaaatggatcaattggctgagtttggttaaggta

SEQ ID NO: 389440 - DNA, 838 bp, Oryza sativa
ccacgcgtccgctacagtaatcattctctaattatagattaattagtcttaaaaaatttgtctcgcaaattagcttttatttatgtaattagttttgtaagtagtctatatttaatactctaaattagtgtctaaatacagagactaaagttaaatccctggatccaaacaccacctaagctccttgtttgcctatatatgcgaacaactttgagcttcatttcttattgtttcttttttcagggaataccctgcctgtgtgatgaagttgtgatggacgtaatgtgggccatgaagcgtctcattcgctattttgtgcccactgaaacacccgagctggctgaagaggacagcctcactatgagtcaaggacttcggatgtttttaagtcgttatggctttgaaatcaaaccagagatggtctacaacgatattgttcgtgctgcatcccccgtgtttaggtgtgatgctgttgaggacctttacgagcacttgcaacatcttgggcgccacctcaagaatgggtctggcgattgactatgagaattggggcactgtgaaactcgcgacagcttttaagatcatatgcagccgcaaaattgataaatctgatgaggtaaagccatatatactgaccatgtaaatgttatactgaccaggtaaagcctatctgatgagggttgtgccttgtctctcttgcagatgttttcagacgacgtgcgatcgaagttgctggatgatgcagataaatacaaagatcttggtttttcgacagggttcatttcaaactataaaaaaattttagggctcaatatactcaggaatgataaaatggatc

SEQ ID NO: 389441 - DNA, 1333 bp, Oryza sativa
ccacgcgtccgagccgatggaggtgaccgatgaggagaaggagcggaaggagaggaaatcgtctgctcagaaggagaaggaagcggggaacgcagcttacaagaaaaaggacttcgagaccgcgatccagcattacacaaaagccatggaacttgatgatgaggacatttcctatcttaccaaccgtgcagcggtctacattgagatgggaaagtacgatgaatgcattaaggactgtgataaggctgtggagaggggaagggaacttcgtgctgatttcaagatgatctcaagggcactgacaagaaaaggaacagccctagccaaacttgctaagacctctaaggactatgacattgccattgagactttccagaaggctctaactgagcatcggaatccagacactctaaaaaagctaaatgaggctgagagggcaaagaaagagttggagcaacaagagtactatgatccaaagttagcagatgaaggagagagagaaaggtaatcagcttttcaaggagcaaaaatatcccaggcgcggttaagcattacactgaggctatcaggagaaatcctaaggacccgaagctgtacagcaatagggctgcatgctacaccaagttgggagccatgcctgaaggtcttaaagatgcagagaagtgcattgaactagatcccaccttctccaaagggtatacaaggaaaggtgcaattcagtttttcatgaaagaatatgacaaggcaatggaaacttaccaggccggtttgaagcatgatccgaataacccggaactgctggacggtgtgaaaaggtgtatcgaacagatcaacaaggccaacaggggtgatttgactcaggaagagattcaggaacgacagaacaaggctatgcaggatccagagatccagaatattcttacagatcccatcatgcgacaggtactggtcgatttgcaggagaaccctagggcttctcaggagcatcttaagaaccctggagtgatgcagaagattcagaagcttgtaagcgctggaatagttcaaatgagatagtcgaccaaagcaagaagcgctgttcgtgtctatgttcattgctccttactttttttccatgctcagtctttgtggacttaagatttacacagtttggggctaatcttcattctcaattggattatgtgagtgcagcgtgtcactggattattagtggttatggcatccgtgctacagctgcacgtgcaaacgtatgtctctatttgttagtcctaaacattttccctaccgaatgaaaatagagccataagaggtgcagaaatagtcgattgcttat

SEQ ID NO: 389442 - DNA, 1324 bp, Oryza sativa
  unsure (1)..(1324): unsure at all n locations
tgacaagagaagcgtggcctctgacaatgccggcgagaagccgatgctccagctatggcatcaaaaggggaggtgcccggactccncncgantcaggagaacgaagaaggatgatctgctcagagcgagctcgttgcggcggtatggcaggaaacggcataccgccgtgaacccgctgtccattgatcccaacatgctcaatgagggtggtcaccaacatgccatagcgtatgtggagggggataagtactatggtgccaaggccaccattaatgtgtggggagcccaagattcagcagcctaacgagttcagcctgtcccagctctggatcttggggggttcatttggtgaggatctcaacagcatcgaggccgggtggcaggtcagcccagacctctatggagataataacactaggctgttcacatactggactagtgatgcttaccaagcaacagggtgctacaacatattgtgctccggattcattcagatcaacagcgagatcgccatgggcgcgagcttcttccccatctcggacatcgccggctcacagtatggtatcagtattctgatctggaaggacccaaaggaaggaaactggtggatgcagttcggcagggagtgtgtcctcggctactggccgtccttcctcttctcctacctcgtcgacagtgcgtcgatggtcgagtggggcggggaggtggtgaactcggagcccgacggcacgcacacgtcgacgcagatggggagcgggcggttcccggaggaagggttcggcaaggcgagctacttcaagaacatccaggtggtggacagcagcaaccagctgaaggcccccaagggggtgggcacctacaccgagcagtccaattgctacgatgttcagaacggcaacaatggcgactggggcacctacttctactatggcggcccggggaagaactcgaattgcccatgaatttggtgatgaagaagctgatgatatatatatatttatatatatatatataatatatggtgacagttttaatatttcttttattttttagcattttgaaggcaatttgtattttcctaattgttatctaatatttgttcattcatttttaacagggttgtttatattcgttattttatctatattttaattaggtttaatatgcttttttttatttcatttcattcatttattaacttttttattttttaggcgactttttggttgttctttgtttatttatttaccaaccttagtttgttgtatttaacatctatttttttaattctcttatatatcttttactattttatttatatttt

SEQ ID NO: 389443 - DNA, 692 bp, Oryza sativa
agtataatatcagtattttgatctggaaggacccaaaggaaggaaactggtgaatgcagttcggcagggagtatgtcctcggctactggccgtccttcctcttctccggcctcgtcgacagtgcgtcgatggtcgagtggggcggggaggtggtgaactcggggcccgacggcacgcacacgtcgacgcagatggggagcgggcggttcccggaggaagggttcggcaaggcgagctacttcaagaacatccaggtggtggacagcagcaaccagctgaaggcccccaagggggtgggcacctacaccgagcagtccaattgctacgatgttcagaacggcaacaatggcgactggggcacctacttctactatggcggcccggggaagaactcgaattgcccatgaatttggtgatgaagaagctgatgatatatatatatttatatatatatatataatatatggtgaagtgtgcaagtgtacccaagcattaatcatgcgtggaatacagtttgatctgcatctgtttcttaatttagccctaggtagtatatgtgtatctttcctactgatgttctttttcttctcttcattagttttttcttcttcgttttctgatgtgccatgtaaaagtttctgaagagaagcatggggttaggtggtggcgcaggggtcattatgtcccaaaaa

SEQ ID NO: 389444 - DNA, 570 bp, Oryza sativa
ccacgcgtccgcccacgcgtccgcgctgaatcggaaccaatgggagtccatggtgtgccttgtccaatctgaggctccctgggagaagaaatcacttgtccggaatgactctctaaatgtcttccgccttgaggagtacaatgctactatcgagttctattggtcaccttttctagttgagtcaaactcagatgatccaaacatgcatagcatcgttgaccgcataatcaagccaacatcaattgcaaaacatgcagcgaattgggaaggggtggactacttgattttcaacacttatatttggtggatgaatacaccagagatgaaaattttacatggtgggtccttttcaaagaaaccagtgaaatacgatgaaatggaacgtgtagctgcataccggaaggtcctcaagacatggtctagatgggtagaaaagcatgtagatccgaaaagaagtacagtcttcttcatgagtgtctcacctgtgcatatgcagagcgagggctggggaaaaccagatgccataaaatgcttctctgagacgcagccagctatcaattacacaaagaa

SEQ ID NO: 389445 - DNA, 1188 bp, Oryza sativa
  unsure (1)..(1188): unsure at all n locations
cnagcgacctcaaccgacggaatccccaaccccaacccccaaaaccaatccgccgccgcgctgcctcgcctcgctcgtcgctcccaccaccaccacaaacccgcgcctcctccgccgccgcacgcccgcccgccgacgaatcagagtttggatttaatattacaggcgcagccatgttcaacaggctctttggtaagcccaaggagcaggccaatgctagtgcgttggccacgcttgataagttaaatgagacccttgacatgctggagaagaaggagaaagtcttagagaaaaaggcagccgcagaactggagagggctaaggagttctcaaaagcaaagaataaaagagcggctatccaatccttgaagagaaaaaagctttatgaacaacaaattgagcagctagggaacttccagttgagaattcatgatcagatgatcatgttagaagctgcaaaagcgtgcgacagaaaccgttgatgctttgaggactggagctgcagctatgaaagcaatgcaaaaggcgacaaatattgatgacgttgataagactatggatgaaattaatgaacagactgaaaacatgaaacaaatacaagatgctttgtcagcccctcttggagcatctgctgattttgacgaggacgaactagaggcagaactggaagaactggagggagcagaattggaatctcagcttctcgagcctgttgcagctccacctgtgcatccagtgcaggtcccaggcaccaggataccaactcgccctgctccacagaaagcatcagctgaggaggatgagcttgcagccttgcaagctgaaatggcattgtgatcaggttcacaatgaagaggtgaaatgtacaaatgattggctgtactctacggaatttcaacgagtctagctacaatataatttcccatgtgtgtacaatctttggggatagtcagcaatcgaagagagatgctgcttcagtccagtactccagtgttttgttttagtggcttgggggtgggggccgggtgtcgtctgttttccatggacataatttaagttaatctggcacagtaagctccaagctaatccatagtcatgcaatgtgcattgctgtcgcacaatatttttcattgaccattatctgaagccgtgtaaaaaaagttgaagcgattgatacgttgttggctt

SEQ ID NO: 389446 - DNA, 1747 bp, Oryza sativa
cggacgcgtgggcgcgctcgctgtctcgcgtcagcggcggagctctctagaaggagcagaggagtcccccccaagcgatcgattcgatcccctccgccgccgatcgcctcgccgaagtctccgagaaacacttgagggatggctgaagaggatatccagcctattgtctgtgacaatggcactggaatggtcaaggccggttttgctggtgatgatgcacccagggctgtctttcctagcattgtaggcaggccacgccacactggtgtcatggttggtatgggccagaaggatgcctatgtgggtgatgaagctcagtcgaaaagaggtatactgacattgaaatacccaatcgagcatggtattgtcaacaactgggatgacatggagaagatatggcaccacaccttctacaatgagctccgtgtggctcctgaagagcatcctgtattgctgaccgaggctcctatgaaccccaaggcaaacagagagaagatgacccagatcatgttcgagaccttcaactgcccagcgatgtacgttgccatccaggccgttctttcgtggtacgccagtggtcgaacaactggtattgtacttgactctggtgatggtgtaagtcacactgttccaatatacgaaggatttacactcccgcatgctattcttcgactcgatcttgctgggcgtgaccttaccgacaaccttatgaagattctcacagagaggggttactccttcaccacaactgctgagcgggaaattgtcagagacataaaggagaagctcgcctatgttgctcttgattatgaacaggagcttgatactgccaggagtagctcctctattgagaagagctatgagctgcctgacggccaggtcatcaccatcggagcagaaaggttcaggtgcccggaggtgctcttccagccatcttttattggtatggaagctcctggcatccatgaagccacatacaactccatcatgaagtgcgatgttgatattagaaaggatttgtacggtaatgtggtccttagtgggggatctacaatgttccctggtattggtgatcgtatgagcaaggaaataactgcacttgcccctggcagtatgaagatcaaggtagttgcaccgccagagaggaaatacagtgtctggattggtggttccatcctggcttctctcagtacctttcagcagatgtggatctccaaggccgaatacgatgaatctggtccaggcatcgtccacatgaagtgcttctaagtttgtgggcagatttgtaccattatcagctgattgagacgtgatctgcagattgtttgcatgcgtcccatggtttcagtagcacctgagggctgttggccatggggcaatgcggaaggtgaagtcaattggtgtactggaagaaatctgtccaggtagtgtgcagtgtaggtcgtctgagtcggtcagttttttcagacaatggcatcgcatcagggcattcctaatgtatgcaatggattgttgtgttgggtttcaccgggcaacaaggatgtttgcccgtgcagtttgaaagctttttgtttcgaattttctactagccgaattgcgggtcttaatgattgtacctctagttttgttttctctcttgaagataacttatttttgtgtacgtagtaaaggtttatttgtatttgaacgacttgtagtgttttggatgttatgctttcccccttgggactgagtatcttgtttaacc

SEQ ID NO: 389447 - DNA, 525 bp, Oryza sativa
ccacgcgtccggtgacaccagcacggaggtattccccaagctactcgcctgttgaaagagaccgctacagttcacgctactcacctgagcgagaacggtcttattctccttatggtagaaggcgatcatattctccatacaacaggcgaagatcatactccccctatgagaggcgtagatcctactctccacatgaaaggagacagtcctactctccgtatggcagatccccttctccttatggtagacggcgatcatactctccctatgacacacgtggttcacggcgtcggtcatactcatcttaccgtggttcccgctaccgttcaagatctccataccgttacagaagagagaggtcatgttcctatgaccattctgtttcaccatactatagaaggtgctattctccaagtgctagaggacggagctattctcgcagtgtatcacctcagaggagctactcccatagctgttccccggattctcagaggtcagggagctattcttcaaggaaaagataca

SEQ ID NO: 389448 - DNA, 1659 bp, Oryza sativa
tcgtcaagtctccgcggcggaggcgctcgcgtcgcgaccccgtcgccgccgccggcgatccgctccagccgaaccccgccgcaccgccgcggtagctgccgtcggcgaggtgcgtctcggcaccggactccaggaatcgtgctgctgctggaacgccgcgcccgctcagccggcggccgggcgtcccgcgtggctcgctggcatcgatcggggatccctcctacgggctcgccgtcgcggaggtttcaggggaccggcgcttggacacgctctttcctcatcaatctgctgacgttttgaaatattggaatgcttctgtcgtcgaatttggttatctacagcatctgaattggttataacttataacttataagtggcatgtctgcgaaggttccaaggcacctagaagctaattccgttgggatggcagattgggctggtcttcagactgatatccttggtgtaattgtaaagaagcttgccgtccctgactatctgagattccgtgctgtatgcacatcttggaaccatctctgtagggatgtattcaactgtccaaggatagacccatggctgatgctccctacaaatgcgcttaatgattctaaatttttgtgtgtacctgaaaggaagaaccaaaccattcgtctcccgagcactgttacaatctttggctccacctggattcctgttggttcttcccatggttggctcatcttttacagcccatctcatggaaccatgcagctggttaatcccattagtggcatgcagttcaatcttcccccaatcggacgaagggccttctccaaggccatgttgcttgacatgaatgacacaaacttcactgttgctgtcatcttacgtgaccagaaaggatataaggtaacgcgtaaaggaagcaacagctggtcatcagtggaatcaaagcatgatctagtggatatcttcaagcacaggagacagctttacaccgttgatatatatggcacagttcagttgtgggcagaaccgccccgttcatggccagatgaagatgccccgcaggtgaatgacccgtatcataacctcattcactatccgcatcaacatggaaagcttaactgtttggtggagtccccagctggtgatctaatgagggtgaagcggcaatcaaatgataagtttgtggtctggattctggacaaggggacattttcctgggagaaggttgataacatcggggactttgcgctgtttgtcagctactacagctcggtctgttaccgggcgaaggatcatctcaacctgaagtcgaattgtgtctacttcattgactcctacagcaacctgtgcgcattcaacctggagaacaggacgaaggagctcgtcgaagctcttgagcccgcccatgcccacggtcatccagagcctcacgctgtccggcgcaggccggaaggacagaggtacatgtggttaatcccttcgctgagataaaccaatggaggatgaaagctacggtacacatccccgttgtctctgaacttactacagtatatgtgactgtcgctaatttcataaaagtattgggcatatctatagcacttctgtagataaatcaactgtctgaacttttgggacaactcgtgggttttgtaattatcgtgtaattttgtaata

SEQ ID NO: 389449 - DNA, 774 bp, Oryza sativa
gtctcccacctgactcgttctaatcggcgaagagaaacccacacaagaggaagatggcggcgccggcgaccggcggcgggatctccgccgacgtccccatcctccactcggagaacctcaccagcaacgtcaaatccatctactacagtcggacattcttgtcaattatcagtggagttgttgccggaatctggggattcacaggcttgatgggattcgtgttctaccttcttgtaatgatggtggcatcccttgggcttttgctgaaggccaaattttcaattcatacatactttgacagctggaacaggattttgattgaaggagtttttggtggccttatgtcttttgtgctgttttggacatttgcgtatgatattgtgcacatcttctgatgcacggcataaagaactcaactccgaagacttgaagggagctgtgggggtttctccttgaactgaattaacgtgtaaccgcaccaaccctggaggactacattcgttggactgctgtcctgttttgttcctttttttttccactccacatgtatcagttatagctctgtactttagaaagatgcaagcttattaagtttaatttacaaattgatgtagaagtgaatccaattgctggcaagtatggtgcttgatcttttgaacatcagaacttgctaggtaggggacaactggtcattgatacatctattgctgcccagcgtgctgatactatactccactagtagtatgttatattgttaaaaaaaaaaaaaaaaaa

SEQ ID NO: 389450 - DNA, 848 bp, Oryza sativa
atgtgtggatgcacttaaccttctttgcagcagcttcccccacgcgtcccgggaaataatactgccagaccttgaggagatgcgtactgccccatgttgtctcaattggccacagaatccattctgtgatttgaatccctcattacagagcaggaaaacgaactgaatttacgttagacactcgaacaagtttggcactttttggatcattcactcgactgactatgctgcttctcaacgaataaggagaaggataatgtactatcacaatgaagctttcaagaaggttgatgtcatagcaactcctacaactggcatcactgctccagaaataccacaaagttctctgaagttaggagagtccaattacgttgtgtcagcttacctgatgcgattcgtgatagctggcaatcttcttggtttgcccgcgataactgtacctgttggtcatgataagcaagggcttccctataggcttgcaactgataggtcgaccatggggcgaggctagcttattcaagggtggcttctgcaatcgaggagctctgtctgcagaagcggaaacggccatctgcatttcatgacatcctgaacgcttgagttgacaaattatgtatccatccatcaatgatgtatggcacttggtgctacgcttttattcagaacatttgtacagtgcagatgattcagtctttcctggtgttggatgtaataaaagtttcccaatggagggtaacgcacatttgtatggacagtcctgtaaattactggcgcaggcattgtgtgattgggtcagtgtttgtgatatagtaggccttgtttagttcccaaaaaaaaaaaaaaaaaaa

SEQ ID NO: 389451 - DNA, 494 bp, Oryza sativa
  unsure (1)..(494): unsure at all n locations
ccacgcgtccgtgaagctgaaacccaagtattcccctcagagcctgacccaatacatggaaattatttctaaacttcgacaccgtcatttggttagcatcatcggtcactgcattgttgaagatcaagagaatcctaatattgctagttcattatgcctcctttctgaatgcgtaacaaatggatccctaagaagtcatctaaccgagtggaggaagcgtgagatgctaaaatggccccaacgtgtttctgctgccattggtgtcgccagagggatccagtttttgcatgatgtgactgctccgggcattgtacacaatgatctaagcatcgaaaatattcttctggacacgacactcacttccaaaatcagcaactttaacctcccgttgatatcaactagcaagaatggcaagatattctcagaatccccctttgccacatctgaagacaatgatctcggcagcgtgccaagnacagaacaaggggacaagg

SEQ ID NO: 389452 - DNA, 719 bp, Oryza sativa
ttcccgagctctcctcgccgccgccgccatggccgggttcgcgcggcgcctcggcgggatcccgtggagggagatcgccggggaagccttctcccgcgtcttcctcgtcgcgcaggccgtctgcgccgtccacgtcgtcaacgcccacgtctgctccttcgcgctggtgatgggcccgagcatgctgccggcgatgaacctggcgggggacgtggtggcggtggacctggtgagcgcgcggctcgggcgggtggcgagcggcgacgccgtgctcctcgtctcgccggagaaccccgcgcaaggcggtcgtcaagcgcgtcgtcgggatggagggcgacgccgtcacgttcctcgtcgaccccggcaacagcgacgcctccaagaccgtcgtggtaccaaaaggccatgtctgggtgcagggtgataatatttatgcttctagagattcaagacagtttggacctgtcccttatggtctaattacagggaagatcttttgtcgggtttggccactgaaggattttggtccgatagatccaatgtcagctgagtaggggtaactcagccttatttttcttcttcacttattttcagaatccaggcctctcgctctacctttatctctccgagccgacctttttttacccgtttgctccagaatttatcgaagacggcatgcatatcttgagattttatgatcaggcaacaagccctacatt

SEQ ID NO: 389453 - DNA, 892 bp, Oryza sativa
  unsure (1)..(892): unsure at all n locations
cgcaacttcgcagcgcanttcgcggagacaacgtgagaaagaaagaaacgagacgaacgcgaggtggtggaggtggacgccatggccgccgccggcagcagcagcaggttcgccgtcacgtgcggcctcctcagccagtacatgcgggagcgccagcagccgcagccgccggtgacggttcttgaggcggtggcggaggaggaggaggaggaggacgcgcggactatgcagctcttccccccgcgcgccgccgccgccgacgggttcgcgacgccgtcgcggggaacggccccgctgaccatcttctacgacgggaggatggtcgtggtcgacgacgtcccggtcgagaaggccgcggagctcatgaggctggccggctccgcgtgctcgccgccgcagccggcgcacgccgccgcgcttcccggagatgccgatcgcgaggaaggcgtcgctgcagcgtttcctccagaagaggaagcacaggatcacgacaacgagcgaaccatacaagaaggcggcggtggcgtcgccggcgccggagaaaagttcgccgtcgcgccggtgaaagatgagccggcgacatggctcgggctctgaagatttatctgcccggtttagaggaggagaatatcacaaagggagaaaaaaaattaagtactgactaaattgttgttttccatgatttaagttcgtctctgtttgagatttctttggcccaaacccaaagagttctttcactgatttaagtgattatttcctccactagagcatatacagtgttctgaaaaataatggtagatttatccatttttgttgatgtacaagtacaactgtctccatttctatgcatagtatgtaattaataattattactcaaaaaaaaaaaaaaaaa

SEQ ID NO: 389454 - DNA, 598 bp, Oryza sativa
accgccaccgagacgtggacatgaatcaaatcaaatcaaatccccaaatcaaagttaaccaaaattccgtggcagaggtctccctcccctcctcttcttggagtcgtctcctcgcgcaagcgcatcccctccccacaactggaccaggatttacatggcttcaaacgctggcaagaagctcattcagatcgatgtgagctctgatacggtgtgcccatggtgctttgtcgggaaaaagaacctcgagaaagctatggagcaaaacaaggacaagtttgatttcgaggtccgctggcatccattctttttaaatccgaatgcacctaaggaaggcatcaagaaatctgattactaccggatgaagtttggccctattcagtttgagcatgcaactgctcgtatgacagagatatttagaggacttgggatggaatatgacatgtctgggttgactggaaatacaatggacagccataggctcataactcttgctgggcaccaaggttatgacaaacaaagtgctcttgttgaagaattattccaaagttacttttgccatggaaagtttattggtgatccgcaagttctgctggatgct

SEQ ID NO: 389455 - DNA, 709 bp, Oryza sativa
  unsure (1)..(709): unsure at all n locations
tttgacccccgtaatacgnctcactatagggcgaattgggtaccggcccccccgcccacgcgtccgcagttacccactgtccccccccccactctctctctgtctctctctctctcttgccgcgagatgaagaggaacgaggtaaaggagaaggagaagacggacaagccttcgacccgccgccgcatcctcggcgtcaccgccttcatcgccgccgccgccgccggcaccttgttcctgctgtcggcgatcggggagagcagtggagacccggacaagacggcagatgatgatccgccgacgacccggacaatgaaggcgccgggctttgacggcaaggtgatgatctcccgcgacaagttcgagggtaacccgaaggagtacttcagggccagccggaagggagacgaggaagacgttggcgctttcaagtaacggatcggaggacgccggcaactaaacacagcctatatgtgatctgaaaactctgcatgtaccagctggcctggatgttagcttaaataagtacgtatagtacgatgtactatgtcagtatatgtgtgtgatcgaggcgatgagtctcctacatgatgtgtcttaaggtgatatcctatcgttgtttatatatcacttagaaaattataaaaaaattaaaaaaaatcaacaagccaaatcggtgagtgaaaaaaaaannnnnnnnnnnnnnnnn

SEQ ID NO: 389456 - DNA, 664 bp, Oryza sativa
  unsure (1)..(664): unsure at all n locations
cccacgcgtccggccagttaacgactgagcgtgaaacacgtctctgtctgcctatatctatctattgccggcagacgatgaggaactgaggcaacgagaaggagaggacggtctacccttggacccgccgccgcgatgcatgggcgcacgcgcttcatcagcgncgccagcagcggcaccttgttcctgctgtcggcgatcggggagagcagtggagacccggacaagacggcagatgatgatccgccgacgacccggacaatgaaggcgccgggctttgacggcaaggtgatgatctcccgcgacaagttcgagggtaacccgaaggagtacttcagggccagccggaagggagacgaggaagacgttggcgctttcaagtaacggatcggaggacgccggcaactaaacacagcctggatgtgatctgaaaactctgcatgtaccagctggcccgtgatgttagcttaaaataagtacgtatagtacgatgtactatgtcagtatatgtgtgtgatcgaggcgatgagtctcctacatgatgtgtcttaaggtgatatcctatcgttgtttatatatcacttagaaaattattaaaaaaataaaaaaaaaaataaaaaataaaaaatttataaaaataaaaattttaatatataaataatta

SEQ ID NO: 389457 - DNA, 650 bp, Oryza sativa
ccacgcgtccgtgaattgaaaaggaatccggtgttaacagagtacgttgtgcaagacctcaatgtgaacccgaagcttccttttgaggataacacatttgatgttataaccaacgtggttagtgtagactacttgacaaaaccaattgatgttttcaaggaaatgagacgaatacttaaaccaagtggattggccataatgagtttttcaaatcgctgcttttggacaaaggctatatctatatggacgtcaaccagtgatgctgatcacgcttggatagttggggctgacttccattatgctggagattttgaacctcctgaggctgttgatatatctcctaatcctggacgaacagacccgatgtatgttgtccagtccagaaagagaatagcttgattaacatcataggttctatacagattttgtgtaatgcacaacgtgatggcaatttttctactggtcactttcgaaacgtaaatatgtagacagatctggcagagtctccgcttgtctgcttgtgtgtctgcttgccttgcaataaaccacattaatacatagcagctttgtgatagttttatcaaagtatttgtagttttatgaaatttatttatttgttcagtaccgtcgtagttgaatcaagatcacct

SEQ ID NO: 389458 - DNA, 381 bp, Oryza sativa
  unsure (1)..(381): unsure at all n locations
ccacgcgtccgcgatcgatctcagctaattaattaagctaacaggccagccaatcagctcatggcggccatgatgaacaacgggagatcgggcagcaacaagctgcaggttgacgccgagaacccggcggcggtgggcgacgagctggacctggcggcgcgcgccaactggctgcgggcggcggtgctgggcgcgaacgacgggctggtgtcgacggcgtcgctgatgctgggggtgggcgccgtgaaggcggaagcgcgcgccatggtcatctncggcttcgcgggcctcctggcgggcgcctgcagcatggccatcggggagttcgtgtccgtgtgctcgcagcgcgatgtggagctggcgcancttgagcgcgatggc

SEQ ID NO: 389459 - DNA, 971 bp, Oryza sativa
  unsure (1)..(971): unsure at all n locations
cccacgcgtccgcccacgcgtgcgcgagatcggagactctgaaaccacaaaccagactccacaagaccacaactcgttaatccctcgatctaaagaaaaaaaaaactcgttaatccctcacgcggcttctcaaattcgcacgcgacgggataaaaagaaaaaagaagaggaataattcgaagggaagaggaggaggaggatctcaatatctcatcctgctgccactgctcgactcctcctaccctcccccaaatccgcgagcctctagggttcgtgggatcccccggaaatggatccgaaccctagacttctcatcctactcgtcctcctcgcgttctccgccaccgtggcggtcgccgaggacggcgaatcgacggggggatcgaaggtctcgctggggcgccgtgcaggggggttcttgcacgggctgaagaaggaagcagtggtggagggagaccatggggtggccctcgatgaggtcggccccgggctgttcgatgcgctcttcgcgagtctctcgatgatcttagtcagcgagattggagatgaaacctttattattgcggcgctaatggcaatgcggcaccccaagtcaatcgttctgtctggtgcgctatcggcgctctacgtgatgacggtactatcaactggacttggtaggatagtccccaacttgatatcaaggaagcacactaacagtgctgctacagttttgtacttgttcttttggactatcgtttgttatacattgcttggaagtctgacccaaagggatctcanaagaaggaaatggaagaagtggaagagaagcttgagtcaggtcaaggaaaatcaacccttcgccggttctttggaagattttgtacaccgatctttttggaggcttttatcttaaccttcttagctgaatggggcgaccgaagccaaatagcaactattgcgccggcaacccacaagaatgcaatcggagt

SEQ ID NO: 389460 - DNA, 436 bp, Oryza sativa
ccacgcgtccgcccacgcgtccgccaatttcttgttgctggaaccgatggagtcgggacgaagctcaagcttgcgtttgaaactggtatccatgacacaattgggattgatctggtggctatgagtgttaatgacattgtgacttcgggtgcaaaaccactgttcttcctagactactatgctacgagcaagctcgacgttgatctagcagagaaggttatcaaggggattgtcgatggatgccggcaatcagattgtgctctgctaggaggagagacagcagaaatgcctgatttctataaagaaggtgaatatgatctaagtggctttgctgtgggtgctgttaagaaggataaggtcatcgatggtaaaaatatcatggagggagatatcatcattggtctttcttctagtggggttcattctaacgggttct

SEQ ID NO: 389461 - DNA, 660 bp, Oryza sativa
tgccccagagatgaggaatctcgatcaagcaaaatgcccttaagccgtgcaaatatcagtcccagaggacgtgggagaggtcgaggtagagggcgaggacgaccacccaccaagcggaaggaagttggttatgtacaatttgaggatgagagcagcatgtttgctgatcagggcgaagccttaccaggagaggagacggttccagagaccatccatggcaccgagagcgtacctccaagcacacaccctccagcagaagccccatcggcagcagagataccagctccaaatccaaaggtggaagaagcgaaaaacgacgaccatcagccggattggcctatgccagatgcgattggaaacatcggtgtcggaccatccggttttggacatcttacggtgcaagttgacgaggatgaggactacgacaacgaggattagccacggccatcttctgattgttatgcactaacagggcagttctcctggtgttgtaaaatgtaaatatgtagcttgcagctagctgtgatgtgctgctgatgtaatgcagtatgtagttgtcccgtgtaactttgtctgttttccaataattgcttgctagttgcctcacattgttgacatgattgactactgaagtgttttgtcagaaaaaaaaaaaaaaaa

SEQ ID NO: 389462 - DNA, 1664 bp, Oryza sativa
tttacgtgtccgcttcatttgtgcttacacataggatcatctgatagatcacataattctgatgttacatccaatggtggagtatctggaatagctccagttaataaagctgaaactgctcccacttcagagaaaaacctaacattggaagcattgtttggggctgcatttatgaatgagctccaatccaaggatgcacctgtttctatccgaggatctgcaactagcggtcctaactatgagttcgcagagacaggcaaaacttcaattgcatcaagccatgaaggatattaccctggtgaacaggtcctacccttcggcaccattaaagatggagttgcccctaaagaatcaggaactggcaacaggaatttagcattatctggcccaagtcagggcagtgctagcttagataagaaaagcttggagattcagttgcctgaagaagataatttgtttacagtgaacgactctttggatggtcaaaagcctgatatttttccatcggtgagatccagtagggttgaggggctactaccagaaaaggcagttgatgatcttaattataggcttcaaagtctagtgcctggtgattcagaacatgttcaagtacttggtcctgatgcgctgggatcccattctcatgaacggcgttatcaggctgaatctcaaaatctttatcatcttctacaaggtagaccacctgcactggctcctcgtcctatgatggatcacattggtaataggaatcagcaaaccccgtttgacatgacacaagcgatacagcatgatcctcaccgttccttttcatcgaacatgaatcctatgcaacaatctcttcatgctcctcgggctcctcatgtagacccagctgctcatcatcttatgatgcagcacatctccacacctggaaattttccaccagaaggcctgcaaagaggtgttccgccatctcagcctgtgcatcacatgcctggttataggcctgagatgagcaatgtaaataacttccatatgcaccctcgccagcccaactatggagaatttggattgatgatggcaggtccatcaggtccagaactgagaggcaatcacccagatgcctttgaaaggtttctccagatggagcttacagccagatccaagcagatgcacccagcaatggctggtcatgtacctggcggcatgtacgggcccgagcttgacatgaacttgagatacagatagatggatgcgtgtgattgcttatgcagtatgaaggacccagaaacggtttgctgtacttgcgtcaaatagtactctttacccatgccataccgctatgtacctgtgtcaatgagcttgggttagcgtttaccatcaatacaatcgtttggctgcgataaggtacctgatgattcactggtggtgggggttggttgcatttgcatataaatatggagaagttatgaatgggttggtgatctggagtgatctgttgtgaaagtggggaacccaacgaatattgggtgaggtccatcaccgtagcagccacctctgcattgtgtctgtgtctgcctgcctatctgttgttttcagtttctgtataaatactattctgcaaaagaaagtaccagattgacagacacatttggaagtgtttccctggcctcaccttttctttt

SEQ ID NO: 389463 - DNA, 524 bp, Oryza sativa
gtatagttagctcatttcctttcagcaggaacttatcaaaaacgtgatgaggtggttacaattacatctgctggtgacattgaggttggtagcaatgcaagaagggtccgaaagggtgtttcaattgatagttcgaatgattcttcgggctcagcagagtcaggtttagtgtcaactaaggaggagacagctccaggtcataggagaacggcaagtgcctatgctgatattggatcatggactattacaattcctgatgaggccaatggcatcgatgaacaatcatttgatgatctgcccaaggtacctttggttaagagccctagctcttctgtattaatgaatgccttccaatcaaagacaagaatgaagacaaagaatggagccaagaagttggctggagctgaccaacaggatgttgtggaaactcttcctctgacaaattctcgctcgtgccaggggtttgatgggttgtttcaagaagcaaaagttgcttgagcacctctgttgatgaggataactgc

SEQ ID NO: 389464 - DNA, 551 bp, Oryza sativa
  unsure (1)..(551): unsure at all n locations
ccacgcgtccgctagcttttgcctcatcaacagctgagcatttgcaacttcaatcagatcatggtgggtgcatggcaggagcatcttcatggttcttgagatcgggagcagcataagcagtatgaggatggagaagaatggctgtgctgttccttctcctcctccttctcaagaactcttcagtttgtccatgcctttcatggcataattccctggattccagaatctctgggtggcttagggaggtatgaacaaaccggcaagtcataaatcggcaatagtgagctccgactggatcttactcctcagtttatcaaatttagtttcattcccttgtaaccttattccagttgtttcaactttctattgttcccccttacaaaggtcattgcaattgtatcttgtggaagcagataagaagttgtctcggtgtaatcttgttttgtgggggtcaaatggtttgcttgtgtnttgcttggggataattttatcccgagatgctcaaaatttaccctggaaaaaaaaaaaaaaaggggggncccccccggggt

SEQ ID NO: 389465 - DNA, 477 bp, Oryza sativa
ctgcccatggctggctgtgcaatgagaaaggaagcttcgtccccatctcctgcatgtaccagggtaacctggagaagacctccttgggtccaaagctcgccgtctcaaccggagagggtgtggaggacaaggagctcctggagaagtacacggtgctcatgaggaagaggatggagattgagaggcggctggtggagaagattgggcgcgcgtaggtagcagcattgcaaagctgctgtcctcgagtcacagttaattagagggaaatgaaatcattggtagaaacttatttataatatatagttagtagtgtatcaagatcatgttattatgttcttgtgcacggaataaataataaatgtaaatttgcaaactaaacaagctcgtctgttctttctgttcatcaattagatgaaactttaaatcttctttaaattctcatagatgaaacttgtttgggtggcttaaattctcaaa

SEQ ID NO: 389466 - DNA, 433 bp, Oryza sativa
ccacgcgtccgctctctttccctctctctcttccattcaccgacaatctaactaaaaatgaatccgatggccccgatgctgccggcgccggcgcccatggcggcggggccgacggagccggtggtggtggttggcccgcagtactgcgcgccgtacgtggtgccgctgacggtgaccaagaagtccatcagcctcaccgacggcgacttcaccgtcaccgacgccaacgacaacgtcgtcctcaacgtcaagggcaccctcttcagcgtccgccaccgccgcgtcctccacgacgccgtcggccaaccactcctctccatgcaagagaagatacttagcatgcacagcagatgggaagtatacagaggggccagcgcacattcgtgcgattaagctcttcaccgtggagaagtcctcaatgcttcagttgatg

SEQ ID NO: 389467 - DNA, 615 bp, Oryza sativa
cgaacaagcatttcctcgaacacttcgccctccaccaccatggccgccgccgcctccaccctcgcctccctctccgccaccgcggccgcggccgccggcaagcgcctcctcctctcctccccctcccgctccctctccctctccctcgcctcccgcggccgcatcgccgtcatgccccacctccgcgctggcatcctctccgccgcaccgaggagggcggtgtcggcctcggccccggccgcggccaccatcgcggtcggggacaagctccccggcgcgacgctctcctacttcgactcgcccgacggggagctgaagacggtgaccgtgcgcgacctcaccgccgggaagaaggtggtcctcttcgcggtccccggcgcgttcaccccgacctgcacgcaggagcacgtccccgggttcgtcgccaaggccggggagctccgcgccaagggggtcgacgccgtggcctgcgtctccgtcaacgacgcgttcgtgatgcgggcgtggaaggagagcctcggcgtcggcgacgaggtgctcctcctctccgacggcaacggcgagctcgcccgcgccatgggcgttgagctcgacctctccgacaagcccgccggc

SEQ ID NO: 389468 - DNA, 1710 bp, Oryza sativa
gcgctctaccctcgtgaccaacccatctccccaccaaccccggccgccgccatgaccggcgccgtctccaagctcgccgccccgaggccggcggccgccgtgccgctcccgccggcgtccgtccgctccgcgttcctcgcctccgccccctccccgcgccgcttctccgtctccatcgccgccggccgcgccaggagccccatcattgcgatggcttctgccaaggaaggaaatggtgccccaacgaagaggacaacccttcatgatctctatgatctccagggtcagtccccgtggtacgacaacctctgccgtcctgtcaccgatttgctgccccttattggcagcggcgtccgtggagtcaccagcaacccatcaattttccagaaagccatctcgacttccaatgcatacgatgaccagttcaagcagcttatattagctggaaaggacgcagagagcgcttattgggaacttgtcatcaaggatatccaagatgcgtgcaaactttttgagcctatctacgaccagaccgatggggcagatgggtatgtttctgtggaggtctcccctaggctggcaaatgatacccagggaactgttgaagctgcaaaatggttgcacaaagtggtcgacaggcccaatgtctacataaagatccctgctaccgcagaatgtgttccttctatcaaggaagttattgctaatggcattagtgtcaacgtcacacttatcttctcgattgcaagatacgaggctgtgattgatgcttacattgatggacttgaggcctctggtttgagtgacctatcccgagtgaccagtgtagcgtccttctttgtcagccgagttgacacacttattgacaaaatgctcgagaagatcggaacacctgaggcacttgccctcagaggaaaggctgctgtagcacaggcaaagctagccaaccagctttaccagaagaaattctctggcccgaggtgggaggctttggtcaagaaaggtgccaagaagcagaggttgttgtgggcatctaccagtgtgaagaaccctgcatacccagacactctttacgtggatcctctcatcggacctgacaccgtttctaccatgcccgaccaagctctgctggcattcatcgaccacggcacagtttcgaggacaatcgacgcaaacgtttcggatgctgaaggtgtatacagtgccctggagaagctgggtatagattgggatgaggttggcaagcagctagagctggaaggtgtggactccttcaagaaggccttcgacagcctgcttgggagcttggaggagaagggcaattccctcaagaagaccgtgagcctgtaggtgcaaagatagctgaaatgttttgaaccgctggcaatggcaagtgaacgattactaaataaatgctctaccttgctggctctctccctctctcaaactctcttgtgatgtgctgctctcgaatttctgggtcagcttttgtattctaggcgctcttggctgctatttgtgtaactgaggttgcgaactgctatgcattttctgataaattgttgggcaagttgatttcatgtgtacatctagactgtaattttttttctggtcaacattgcgagactgaattaatgatgcatctcggagaggttaaaatgacatgtaaaatactgtaataaagcatatatagctagtcacgtttcattt

SEQ ID NO: 389469 - DNA, 478 bp, Oryza sativa
ttttactcgtgggcggacgcgtgggcggacgcgtgggcggacgcgtgggctcccgagtgaccagtgtagcgtccttctttgtcagccgagttgacacacttattgacaaaatgctcgagaagatcggaacacctgaggcacttgccctcagaggaaaggctgctgtagcacaggcaaagctagccaaccagctttaccagaagaaattctctggcccgaggtgggaggctttggtcaagaaaggtgccaagaagcagaggttgttgtgggcatctaccagtgtgaagaaccctgcatacccagacactctttacgtggatcctctcatcggacctgacaccgtttctaccatgcccgaccaagctctgctggcattcatcgaccacggcacagtttcgaggacaatcgacgcaaacgtttcggatgctgaaggtgtatacagtgccctggagaagctgggtatagattgggatgaggt

SEQ ID NO: 389470 - DNA, 732 bp, Oryza sativa
  unsure (1)..(732): unsure at all n locations
gacgacgacgacggcggcagcaaggacggcggcgcgccgccagagccggacatgaagaaggacgcaagcagcaaggtcaccctctccggcctcctcaacttcatcgacggcctctggtcggcgtgcggcggcgagcggctcatcgtgttcaccaccaaccacgtcaagaagctggacccggcgctgatccggcgaggccggatggacaagcacatcgagatgtcctactgctgcttcgaggccttcaagttcttggccaagacatacctcgacgtcgactcccaccgcctgttcgccgccgtcgacgagctcctgtcggaggtggacatgacgccggcggacgtcgccgagaacctgacgcccaagagcttggacgacaatgccgacacgtgcctcgcagcattagtgaaggagctcgagaaggccaaggagaataaatcaaaaggaaaaaatgctcatggcgaagacaaagacgaagacgaagacgaagaagatgacgatgtagaagtggtcgggaaggataagtagctagccgccattggcgccttgctggagtggttgctagcttctcgttttttctagtccacgtagcttatgatcacagtaatagactaagtttttttaagaaaattattttcattgtggaataatttgaccacatgttgtgctaaataatttgactcgattttcttagtgnnnnnnnnnnnnnnnnnnnnnnnnnnnnnnnnnnnn

SEQ ID NO: 389471 - DNA, 703 bp, Oryza sativa
  unsure (1)..(703): unsure at all n locations
aacgnccattgagcncgcgtaatacgactcactttaggccgaattggttaccgggccccccctcgaggtcgacccacgctcacgggaggaagaagaggcgggcagcgaggagggaggagatcggcggcgagcggcgagaggggaggagaaggtaggttgcgatggcgtccgggtggggcatcaacgggaacaaggggcggtgctacgacttctggctggacttcagcgagtgtatgagccgctgccgccagcccaccgactgcggcctcctccgggaggactacctcgagtgcctccaccactccaaggagttccagcgcaggaacagaatctacaaggaggagcaacgtaagttaagagctgctattcgtcgtagggaggaggcggcaaaggagaaggctgagggagctcctgctgtttcagctcagcattagccactccgataaaattcatgtgtgctttttgtttgctgtcaaaactttgttctactgtgatgctaagagcaaggcaataattccccaccttcatgttggactacacaaactcttttcccctctcactccatgactttgatctgtatcaaggcgttgcataaaccatcatggtgatgaagttttcgtgcctgttttggataattttgcgataatgatggttggttcgatcatcatattttgcacgtttnnnnnnnnnnnnnnnnnnnnnn

SEQ ID NO: 389472 - DNA, 810 bp, Oryza sativa
  unsure (1)..(810): unsure at all n locations
gaccatgaagacatagatcgtgctattgcattatctttatcagaagaagatcagcggaaggggaaggctgttgatgaggtagatattgatcatcgtttacatgaagatgaacaacttgcacgggctctacaagagagtctgaatgatgaacctcctcgtcagaatgttccagtaaaagatgttcactcggagagtactccagcaactttcatgcccccatatatattcccttcaactggattaagggtttgtgctggatgtaaaactccaatcggtcaaggacggtttcttagttgcatggattctgtttggcacccccagtgcttcaggtgttttgcttgtgataggccaatatcagaatatgagtttgcagttcatgaaggtaacccataccatcgatcctgctataaggagcttttccatccaaaatgtgatgtctgcaagaactttattccaacaaacaaagatggccacattgaatatcgggcccatcctttctggatgcagaagtattgtcctgcccatgaaactgatcgtactcctaggtgctgcagttgtgaacgaatggagccaaaggatagtaagtacataacattagatgatggccggaaactctgtttggaatgcctgaatacttcaataatggacacagacgaatgccaaccactatatattgatattcaagaattctatgagggtttgaacatgaaagtggaccaacaaattcccttgctgttggttgagcgacaagctttaaatgaagccatggaggccgagaaaactggacatcaccttncttgaaaccagagg

SEQ ID NO: 389473 - DNA, 1475 bp, Oryza sativa
  unsure (1)..(1475): unsure at all n locations
accctcgcgagccaagctaccattctcctnctngncggcgcnnccatggtggccgctccgccgcccccgncgccgcagtacgccaagcactttgcggcggggccgcccccgccgggacggcccggcggcgcacgcgaccccggccgcccccgccggatccgggggaacgggtgcgaggagaacaagacgatctgggttggcgacctccagtattggatggacgagaactacctccacagctgtttcggacccagcggcgaggtagtgacgataaaagttatccgcaatagacaaactggacaatccgagggatatggttttgtagagttctactctcacggatcggcagagaaggctcttcagaattttactggtcatgtgatgcctaacactgatcgacctttcaagttaaactgggcttcatatagcatgggtgaaaagcgatctgaagttgcttctgactactcaattttcgttggtgatctagctgctgatgttactgatgaaatgttgatggagctttttgctaataagtaccgctctgtgaaaggagctaaagttattattgatgcaaacacaggccgttctaggggctatgggtttgttagatttggagatgacaatgacaaatcccatgcaatgactgaaatgaatggtgcgtattgctctactaggccaattcgtattggacctgcaactcccagaaggtcttcaggtgattctggctcctcaacacctgggcattcagatggcgattctactaacagaacggtatatgttggtgggctcgatccaaatgtcagcgaagatgagctgaggaaggcatttgccaaatatggtgatgttgcctctgtaaaaattcctctagggaagcaatgtggctttgttcaattcgtcagcagaactgatgcggaagaagcactgcaaggattgaatggatcagtcattggaaagcaggcagttcgcctttcatggggccgcagcccatcacataaacagtctagggctgattctggcagccgaagaaacaatatgtactatgggacgccattctacggtggatacggttatgcctcccccgtcccgcaccctaacatgtatgctgctgcatatggagcctaccctgtctatggcagtcagcagctagtgagctagagaagagagagagagagagagcttcattccattccctccaatggaaaacaaggttttggtccggtcagcatggtagcgccagatgtgaggttatagaacgtcctaaaagcgagtgaaacaggtaaaatgaatgtatggtatctgtagtgttgtctgtgttgcaagaagtataactcaaggcttgtagacacaagtgagtcgatggtattctttcaagaaattttgacttgctaataaattaaactattgtttgtgtgtcaaaaaaaaaaaaaaaaaaaaaaaccaaccannnnnnnnnnnnnnnnnnnnnnnnnnnnnnn

SEQ ID NO: 389474 - DNA, 552 bp, Oryza sativa
atgaaagatatgaaagaactgctccaagagaaagtctatgtgatcaatgtcttaggttacatctcttacaactttgtcattggtgcctattcctactggggccctaaggctggtcaggatatctacaatatggcgagtgcagatataatgtttggtggaataacaattgtctgtggaatatttgggactctttcagggggtttcattcttgacaagatagactcaacaatatctaatgctttcaagcttctttctggtgcaacttttcttggagcaatattttgttttggtgcctttcgtttcaagagcctttatggattcatacccttcttttcagtaggagagcttttggtctttgcaactcacgccccagtaaactatgtatgccttcattgcgtaaaaccaagtttgcggccattatcaatggctatgtcaactgttgcaatccatatatttggtgatgtgccttgttcacctctcagtgggcttcttcaggacaaaatccataactggagatacgcagcttttaccttgacatgtatacttttcatt

SEQ ID NO: 389475 - DNA, 902 bp, Oryza sativa
  unsure (1)..(902): unsure at all n locations
gcatcacatattcatgaaagacctgttgtgaattggttgtgggctgctggatgccatccctttggaccattctcaaactcctctaagatcagtcaaatccttcaggatgttgcactgagaactacaatttatgctcaagttgatgctgctcttcacaaaataagggacacatcggagtttgttcaatcctttgcatcagagcatcttaagacgccattaggagaacctgttaaaggtaaacaaaacaagtccaacacagagttatgggtagagaaattctataagaaggtaacaactatgccagaacctttccctcatgagcttgttgaacgtttggaagaatacctggataggcttgaaggacaacttgtggatttatcctccttgctctatgaccatcgtctagttgatgcttatcaaaacagttctgatatcctgcagagcactatatttacacagcagtacgtagaacgtgttttgtctgcggaaagagacaagatgaagtgttgcactattgaatataatcaccccaagcagtcatcacaggcgtttgtttacggagggatccttctggctggatttcttgtctactctttggttattttcttctcttcaccagtccgctaattcacatgcgtccagatgaagatgaccctgaattctctctagtatgacaagatggctaagcatgatagaatttgaaacgattgctgaaaagctgtcactgcgatatgcaaggtgtgcccggcctcataaggatgtcaatctgcattcagccatgactagacaatctgctgtatacgttgggggctttctcggcacagttntgtctatgagaaatgtttgctcttagtacctacaggcaaccccatagttagatgattcattcggncatcataaat

SEQ ID NO: 389476 - DNA, 1348 bp, Oryza sativa
tgttttcgtgggcggacgcgtgggttggatatcaatctattgtatgccaccacggccatgcttcaagggttctgtgccaatcaatctgtctgatcgtcttaaccaagtgctacgttgggctcttgggtctgttgagattctgcttagcagacattgtcctatctggtatggttacaatgggcgtttgaaacttctggagaggctggcttacattaacaccattgtttatccaattacatccattccacttatcgcctattgtgtgcttcctgctatctgtctcctcaccaacaaatttatcattcctgagattagcaattatgctgggatgttctttattctgcttttcgcctccattttcgcaactggtattctggagctccgatggagtggtgttggtatcgaggactggtggagaaatgaacagttctgggtcattggtggcacatctgcccatctcttcgctgtgttccagggtcttctgaaagtgttagcaggaattgataccaacttcactgttacctcaaaggcgtccgatgaggatggtgactttgctgagctatacgtgttcaagtggaccagtctcctcattcccccgaccaccgtgcttgtcatcaacctggtgggcatggtggcgggtatatcatatgccattaacagcggttaccaatcatggggtcctctctttggaaagctcttcttctccatctgggtgatcctccatctctaccccttcctcaagggtctcatgggcaggcagaaccgcactccgaccatcgtcatcgtctggtcgatcctcctcgcgtcgatcttctcccttctgtgggtcaagatcgatcctttcatttcgcctactcagaaagccgtcgccttggggcaatgcggtgtgaactgctgatcggcaccgttacgaagatgaacttcaatcaatcaaggtctacccccccttgtgtaaatacctgaggggggctagaatgggatcttctttttgtgtagatgaagaccttttttatctaagttatgccactgtttattagctacttcagtgctggcgctagctgctgatacgatggaactgtgaagccttattttgcctgcgaagaagccagcccagcagcgtaaattgtgaatttttttcttcttttgtgacacccgttattttagtcatttgtttgaggggtcgttgttacacatactatgggatgttatttatacggatatattccaattacattcttttgcggtgaacattttaattatattcgtagcatataatgtaaggcaactcagtatttcagctgttcccttgacaagttgcaacacatatacatcttgagttgtttgttcc

SEQ ID NO: 389477 - DNA, 628 bp, Oryza sativa
ggctctacaaggtttgcccttgagaatcaagctattaatgaagctaccttccgttgccctgatgagctgggatggaaaccacagagggcccctattgtgtcatctgatggaagcatctcaaatttaagaaagaccactgtgcctgtgaatgaagtgaacaagtccctacaacagatgggcttcgatgtggcgccttcggatgacgctggtcgattcgtatgcaactatgtctattaccaatctcttaggttcgcagaacagcgcggtatcaagtctttgttcgtccatttccccctcttcacgacgattagtgaggaagttcagatgaacttcgtcgcaaccctcctcgaagttcttgcttcccagaactatgcacagtaacctgatggggggcagggtctacttcctaaggtttcttcttccaattttattaggaagttgccaagtgacaaaacctctctagtgctctgtttgctgtccgactgtaggccgtcgtcgccttttgctgtgaagatgaagtggagtgaataagattgtaaaatcattcatgacattgcctgtgctccaaattgtgtataaaaaaaggctggttagagctgttcttgtggtgaaaaaaaaaaaaaaaaaa

SEQ ID NO: 389478 - DNA, 567 bp, Oryza sativa
ccacgcgtccgcccacgcgtccgcccacgcgtccggcagaagaatagtagaaaagtacttcaagatggagagagttcctgcagttcatctggcagtggtgctcctggccttctgctgcctcatccatgcatcatcaagtgctgaaactccactcccacctgccctcaaggtgatgcagcgttttgaagcaactccagtctctagcagaggagatgatcaggctgccgccgtcatcgccggagaaccggaggccggcgaggtcaacggcaggatggaactggagctcaccgattacccgggctccggcgccaacgatcggcactcgccatgggggcaggagaggagaaactgagcagcagcagcaaaaaatcttcagagaaaacttcatccatggtcactttcttcagagagaaaattcagactttgtacctgtaccatatcatgtatacttaattatctctactattttctacacaactgttacagtgtttctacaccctgtgtaacatgaaagagaggatttgggagtaattaacgactgataatcagtcgccggcaccataatat

SEQ ID NO: 389479 - DNA, 1085 bp, Oryza sativa
  unsure (1)..(1085): unsure at all n locations
ccacgcgtccggcgccgcgccagccacacccacacgcgcgcgccggccagcctacgcttttcccctccccccctcccccgcaacgagccgcggcggaaggaaggatggggagccttggcggggaggagggggcgaggccggctgcggcggcggagggggcgcggaggccgaggttcctgtgcctgcacgggttccggacgagcggggagatcatgcggaagcaggtggtggggaagtggccccgccgacgtcacggcgcgcctcgacctcgtcttcgccgacgcgccgttccccgccgaggggaagtccgacgtcgagggcatcttcgacccgccctactacgagtggttccagttcgacaagaattttacagagtacaggaatttcgacgaatgcctgaactacatcgaggaattgatgattaaagaagggccttttgatggactgatgggtttctctcagggctcgattctatctggcgcccttccgggcctccaagaacaagggttggccctgactagagttcctaagatcaagtacctcataatcataggaggcgccaagtttcagtctgccgacggttgccgagaaggcgtacgccaataacatcaaatgcccctcggttcacttcctcggtgacactgactttctgaaaacccatggcgaaaagcttatagaatcatatgtggatccattcatcatacgtcatccaaagggccacactgttccaaggcttgatgagaagagtctggaaatcatgctccgtttcctcgataagattgagaaggagacagcgctcgagcattcatccactgatgttgacgaaaaggaaatgtacttgtgaagggtagaagattagtgtccagtccagatacacaccaaattcatactatagacaagcatactgttgtacttgtatcctccttatttatgtggtggtacaaagagttgaaaactattgaataatcacgcaaaagaatggatgtgtactctttaatttgtctaaaaaaaaaaaannnnnnnnnnnnnnnnnnnnnnnnnnnnnnnnnnnnnnnnnnnnnnnnnnnnnnnnnnnnnnnnnnnnn

SEQ ID NO: 389480 - DNA, 458 bp, Oryza sativa
gcgtccgcccacgcgtccgcccacgcgtccgcccacgcgtccgcccaaaatggcaaaggaaatagtagtgatgagtgtgctcctttttgtgctggccgccactactaaggccgacacgcaaagcgggtatgggcatgggtgtagctccttatgcaatagttcagcgccgacacacatacacttctacttccatgacaagattaccggcccctcgccatccgctgtgcaggtggtcagcccaccgaacaaaacatcaccaacctctttcgggacggtgtatgtcatggatgacccattgaccgaggggcctgacccaaggtccaagcccgtgggtcgagcccagggcatgtacctctcatcagaccaagtccggataggctttctacaggctatgaacatcgtgctcactggtgggccgtacaatggcagcgtgataaccgtgctcggcagcaaccaca

SEQ ID NO: 389481 - DNA, 566 bp, Oryza sativa
gttttcaccatcaaggatgacttgcaagagcaactgaaaagtctagagagtggagaggttctttctgacaaggtgattgatgatttgaaaagaagaaagcttatcacaaaagagaaatcaatttggtatgccctaaagaaaggaccccagtttgtcgcgaagaggaaaaaactggcaactgatgtgacacaagagcatctcataagtggtgattggaaggatcttgaattcaaagactataactttggagcccagggacaacctattgccattggttatgtgcaacctttgttggaggtgcgagaggaaatccagaacatctttcttcagatggggttcactgagatgccaactaacaattacgttgagagcagcttctggaacttcgatgccctgttccagccccaacagcatcctgctcgggattcacacgatacattttctcttgaagcccctgccgctacaaaacaattgcctgaagattatcttgagaaagtaaaggaagttcatcaacgtggtggttatggctccaagggatatggctatgactggaaacgggatgaagc

SEQ ID NO: 389482 - DNA, 585 bp, Oryza sativa
ctccctccctccgcctctctcgccatccgccgcggcgccaaccgagtcgatcccccctcccgcccccgccgccatgggcctcctctcgaacaggattgggaaggagaccctgaaggcgggggatcacatctattcgtggagggccgcgtgggtctacgcgcatcacggaatatatgtgggcgatgataaggcgatccattttactagaggaaggggccaggaggtcggaacaggaactttcattgacctcctccttatgagctctggtgctaatacaaacactccatgttcaatatgcaacaatgaaggtgccaccaccaatacggagacaaatggtgtggtatcctcttgcctcaactgcttcctgtcagggggcgccctctaccgtttcgagtatgctgtcaacccagcacttttccttgccaaagcgcgaggagggacgtgcacgcttgccccaactgatccagatgaggttgttgtgcgccgtgccaatcacttgctcagcaatggtttcaggtgctacaacctgttcaagaagcaactggaagacttcgcgatatactgcaagacaggccttcttgtggc

SEQ ID NO: 389483 - DNA, 329 bp, Oryza sativa
gcccacgcgtccggaacaaacagctatcaccccgcgatccatttgcccaatcagatcaaggcgtgtagatttgattttggttttattactcgcaacctgcacgttgccctcagtcacctggcggcggagagagagatcggagatgagctcggtgtgcgcgaggcccgtcggcgtggggtaccttgtcggcggggcggcgagcagctggtcccagcggcgggggcgtggggcggcggcgccccgggcatgcattgatcgatgcaagttggtaatctgcaaccatgccgcccttggtctatttaagtggcagacaagcttccagggccaac

SEQ ID NO: 389484 - DNA, 635 bp, Oryza sativa
ccacgcgtccgaacaatgggacctataaatcctgctgccggactggaacattatgtggagtctctaatgaaaagagcggatgtggagtttaatgtggttgtcacccaaatgaatgggaatgattactcatcgaactctgtccatgcatttcatatcggaaaaatgagaataaagcttcgaaaaggatggtctacaaaagcaagagagtcatactcgaccacaatgaatttgtgtgggagccgtggtgggggtaatgctgcagctacggcagttttctggcaggcaaggaaaggcctgtcctacaccttagcttttgaaacggacagggataggaacgcagcaatcatgcttgctcgtaaatttgcctcaaattgcaatattacgctcactggtccaggtgatgaagttcatgctggtagctgaatttacagtgttcacggtgtgacagcaggagtatacatgtaggctgtgaattgtgtactgtgtcagtttgtgttttcgagagtagaggttgtacactaggctttcctctttcagcatacattctcaaggcaattctttttatttgcctgccagcagctgtttgtggtgttcgtcaaacatgctgtgcaaaatgatgattattcttgagcatt

SEQ ID NO: 389485 - DNA, 731 bp, Oryza sativa
ccacgcgttcataacccaaaccctacctggtccgcgagtgcggtggcgatggcgacattctccgatgcgccgcccggggacgcggcggccggcgagaagatcttcaggaccaagtgcgcgtactgccatgccgtcgacaaggccgccggccacaagcatgggccaaacttgaacggtttgtttgggaggcaatctggtacagctcctggtttctcttacccatctggcgacaagatagtgcctgtgatttgggaagagaacactttgtatgactacctgcttactcctaagaagtacactcctgccaagatggggttcaatggactgaagcagccacaggaccgtgctgatctcatcgcatacctgaagaacgccacagcatgagagtccctgctgccatcttcctaagatgaagagaagcttattgctcgtagcctcatactgactctttgtaacttgtaaggtgaactttgcaacaaaactgtgttgtaaatttgtaataataagcagtggcctcgtggaagagacgatgtgcagctcatccacttgggcagctgcgagctattctttggctgtgttctttgacgtgggttgggaactaatcccatgcataaacagagcgacagataaatatattattctcgagggggggcccggtacccaattcgccctatagtgagtcgtattacaattcactggccgtcgttttacaacgtcgtgactgggaaaac

SEQ ID NO: 389486 - DNA, 701 bp, Oryza sativa
  unsure (1)..(701): unsure at all n locations
ccacgcgtccgtgcctcgcgactcggctccgcgaagcttcgaggaggaggaggaggaggaggagtacgacggggtgggagcggcggtgggtgggatggggagggacgagatgctgcggcggagcctggtggcgctagcggcggcggtggtggtgacgggggtggtgacggcgtcggtgcggaaggcggcggcgacgtacgggttcggaatcctggccatcgcgggcgtgctgctccccgactgggagttcttcgaccgcgactactcccagtggctcaccccgatgccggcctcccgccgcacggccgccgaagccgccgcggatcgcgagcacgacgtctggaaatttaagccctatcccctaaggatggctatgcttacgacaatctatgggtttggcctttacaagtggtggatgtacgtatctagctagtggaatccaccttcctctccgcctttgctctcatgtatggattagaagtttttgggagagtaccatcatcacattgccattcttggccatttatattgcctgattttattatacactgccaattcgaaaacgtctaatggggattggggaacagtccccatcacaggttgatgtctgtaactaattgagggttntaatgggcaaatgccactctcagctcaagcttcagcttaatattcctaggccctattttctttcaaaaagagat

SEQ ID NO: 389487 - DNA, 1032 bp, Oryza sativa
ccacgcgtccggaaagagaagataaggaaagctaaggaaattgtggacaatgccctcaagataagagaagaactgcatcaaaagtatctcagagccgagccatggttaaaagaacaggaaagacaacgacttgaaaggaacaaacgttttacaactgagatcattaaccaacctccagattatcgtggagaatgggatccatatgtatcggatgatgagttcgggacatcatttgagctgaagcgtacgggtggggaagttgagaagttggccttagaccttgctcgaagcacagttggactcgagtctttcactggagagaatcatctattctcttgctctggtactattattgaatttctgaatggtatttgttctgtggtaacatctgcaagtttaattagatgcatggacaaagacgagcaagctgatgaacttaagattaatgtatggttaccgagtggtgaaaaatgtgagggttttatttcaaatgtggatctgtactacaacatttgtttggttacagttcactgtacttctaacctgccaaagaaaagcttcaatgacgacactggattttttgatttatatggcaaccattcgaaagatgttgtagctttaggccgtagttgtgaaccttggagcttgaaggtggcttcgggaaagctaattccaagaagacaccgatttgattgtgaagaacttcttgtttcttcgtgcaagattacaaagataggtgttggtggtcctttgatggattttaatggaaatatcgttggaatgaacttctatgacaagaaagaaacacctttccttccaagtttcattgtgttgaagtgtttacagcacttcaaagaatttgggaaggttgtacggccattgcatgggtttaagggttggaaatcttctacaaagagtctctcgcttcacttgagaagatatgtcatgagttccctaaggtttgtggcgtgattgtggagaaggttgtaccttcagcagtgtttcttgagataaaagttggggacatcatca

SEQ ID NO: 389488 - DNA, 626 bp, Oryza sativa
aattaagctcgccatatatagctaagctagctagctccacagctgtgacgcggccggctttctgctacagctagcttagctccggccgccggcgccgccgctcgccatggccaagctcgccgcgcagctcaaggacaagttctgcggcctcatcggccgcatcaccagctgtggccgcgccgcccacaaggacgccgcagctggtgtaaaagagacccattcggcttcatctcagcacacagagataaggtcaaggggacttccaccgtctgtgtcaggagggtccaagccccataccaattaacagcgacaaattaccattgatcaaaatcgatagatctctctgcttaataattaatcaacggctactcgttctaatacctgtgtgggaatgcacaattcattgggcaatagctatatgaagcttttcttcttctactatctgtttgctgtattttgagaattttggtgttgaccagttcacaggtgtggtcttcagactaaattaacttgcgaactcggggcttattcggttaatccctttaccatgtgtgaaattaaccgagcaagttaatttacaccggggattttaccggtgttaacccccggctacgaaatggatacat

SEQ ID NO: 389489 - DNA, 956 bp, Oryza sativa
gcccacacggcctatctataaagccgcccccgtctccgcaaggtgatcgtattcaatcagtttattcgatcgccggatacccgaggaagaagaagaagaagaaaagatgagctactacggccagcaacctcccgtcggcgtcccgccgcagcaaggttacccggggaaggacggctacccgccgccggggtacccaccggccggctacccgccggcgcagggctacccaccggctgggtaccccccgcagcagggctaccctccgccgtacgcgcagcgccgccccagcagcagcagcacagcagcggcccttccttcatggagggatgcttggctgccctctgctgctgctgtctcctggacgcctgcttctgaggatagaggcgacgggtgcaagagagctgaagagatttgtttcatggagctgatcaaaccgaactgctatgagaaaatgctgctagatttcgtgttcggcattattacctgttattcgccttgtttatgaacctctctgaacctgatttatttgatcagtgtttgatggatggctaaaactatatagttgtgtactactgttgattccaatcttgctggtggaattcaacccgggttgcggagtgcaagttgaattcgttcttgttatgtctgccatttgatttctttaccattgctgcggggtaacacttgcgttgctttgaaaataccctgatcacctcataagccgccgggtctcactgggcactgactttgactggtgcgtttctttttgaaggaatcttacgtttcttgttcgaacgaacagcttgcccagtaatttttttccttaattattgtaattacgatcatatataacatcaaggcctcgcgactagctgaagtgaaattcgtgtggcgacatgcttttagatattttctgataaattcttttccaaaaaaaaaaaattttattttcacac

SEQ ID NO: 389490 - DNA, 621 bp, Oryza sativa
  unsure (1)..(621): unsure at all n locations
ccacgcgtccgccgactccttcaactccagcatctacgacctcatcctcaatctcaagggcctcccgcacctcgacggccacgccgagccgtacatgcggcagctcaccgtcggcgacgtggtggccgggccgctgcggagcttcaacggcgtcgagaaggtgggccacatcgtgcacacgctccggaccacggggcaccacgcgttcccggtggtcgacgagccgcccttctcgccggcaccggtgctgtacggcctcgtgctgcgcgcgcacctgctggtactgctcaagaagcgggagttcctgacggcgccggtgcggtgccccaaggactacatggccgggaggttcgaggcgcaggacttcgacaagcgcgggtccgggaagcaggacaccatcgccgacgtggagctgtcgccggaggagatgggagatgtacgtcgacctgcaccccttcaccaacacgtcgccgtacacggtggtggagaccatgtcgctggccaaggcgctcgtcctcttccgcgaggtcggcctgcgacacctnctcgtcgtgcccaagtcctgcgacaggtcgccggtggtggggatcctgacgaggcacgacttcatgccggagcaca

SEQ ID NO: 389491 - DNA, 331 bp, Oryza sativa
  unsure (1)..(331): unsure at all n locations
ccacgcgtccgtccacgcgtccgcccacgcgtncgtctagatataagtacagcgccatgtatcatttcacagtgcagtagctatctatattcaattcatttgattgaattttacacatccacttttgctaggccttattagagtatatatatatatgttccctggttaagtttatctgtgtggcctctgtatagccgtggatatgatctgcttccgtaaaccatacatgctgagcagttgcatcaggctcagaactgtaaaacaattaaatttatgtgtctcaatgtaacaacacctgtttggataaaatgtgcccggttaccgtgatgcc

SEQ ID NO: 389492 - DNA, 600 bp, Oryza sativa
ccccccctcgaggtcgacccacgcgtccgcccctttctcatcctagatccaatcggccagggggcggcgacggcgaggcagccagccgccggctgcgccttccacggtcctccgcgcgacatccacgagcctccaagctgcgccgccacatgcatgccgagcttccgcgagacctcgacacgccgctgttgttgtctccaagcagatcttgcgctcccatcctcttctggtcgactactccacgcggcggcccgctgctacagctattgcacgttgtgccatggctgattagttgccactaatctttctggtttttcatgcttgattgcttcttgttggactattttgtgcttgattgcttttgcatgtgtaagtgtgagacagatcttttgttttcagccatcaaacttgttaatttttgttgtttcctgattaattacttaagaatggcgtgtgtttttgcacttggcaagtgtttagctaagcattgcccctgctgatgtgtatttttgatgatttactgatggtatgtccatcgtttgtactgcatatttctgaacttctgaactaaccaaaggttggagcaaaaaaaaaaaaaaa

SEQ ID NO: 389493 - DNA, 912 bp, Oryza sativa
tttcttctcctcacccctcgcaccccctccacctcgccgccgccgccgactcgccggggctcgccgccaccggtggtgggggggagctcgacctcctcgccccacgcgcgcgtccggacgccgtcgttctgggcgcgggagagatccgtccgtcgccccccgctgggcttgcgccatcctctcgccgggtgatttgagacaatcaagatggctttttcatcagttttcaggagaggaaatgtcaaagaattgatctcaaatgtttcggtctacactagcgcagcagagtcatctggaggattgagcttgatttttaagcgttgggccaccaaaaagacagctggatcaacaaaaaatggccgtgactctaaccctaagtatttgggtgttaaaaagtttggcggagagaaagtggagccaggaaacatcatcatccgccaaagaggaacccgcttccatcctgggaactacgttggcatggggaaggaccatactctcttctgtctgaaagaaggacatgtgcgattcgagcgcaacaagctgactggcaggaaatgggttcatgttgatcctgttgctgggcatgtgctccaccctgtctacgccagtgattccacccctgcagctgaaatggagccattgtaatggctttacatggaatgaagtaacatatgttgctaacagctttcgtccttgccttgagagtgacttctctaaagaaacttattgcgattaagaggcttctgggttgaatttgcttgcaataaggaacctaaccatcatgttcagaacccttttgtttttggttcttgctgtggcttaaagttgatttgtttaagtatcctttgtgatttgtggcatgaaggttgacaaacctacatgatttataaccccacataaattctaaccaaa

SEQ ID NO: 389494 - DNA, 543 bp, Oryza sativa
ccacgcgtccggaggagacgaagaagaagagcaagatggggatggggacagggctggcggtgggcgcggcggcgggcgtgctgggagggctggcgctggccggcggcgcgagctacctggaggacaagttcgaggagggcgtggcggagaaggtggaggacgatctcgacagagtcgacgactacgccgccggcggctacgacgacgactattaattaattccattttcattttattcatccaaccacaccacgcctatccctgcacttcaaagttcaaactcatcctaatataaccgaataataatacctatacttactattacctctttttatatgatactccaataattgagaaacacaaattaaacaagagtaataatcaatttttggtttagaaaacaactcattattcatgctgatgatgatgtgttgttcatttctttttcattcaaggggggaaaaaagaatctttctcctcgccaagaaagagagatgttgatgaacaatatttatatcagaccgatccagtgtggatttggac

SEQ ID NO: 389495 - DNA, 628 bp, Oryza sativa
ccacgcgtccgcggacgcgtggcttcgacgaccttatcatcgaattagcgtggcagtttagctcggaagacaggcagagcaagaggtagcacatcctctccgaaggaagatatgagcgaccagagctcgtaccctaaccctgctcaagggtactaccagggtcccccagcctcggcggcggccggccaagataacacggcggccggcggtggcaagtccaacgcagccaagaaagaccaaccgagcttcatggataacctccttgcttgcctcccctgtgcccgcccagccgaagccaagaacgacgcgagctaactaaccttgctccatcaggcagcctagcacgggaaggaaggctgcaaagctactgcatgattatgcccagtgtttgtttgattattcagcatctaagtaagcacgtcgttaattagttcaatccggattgctcatttgcgttttgtgtactagtgaacgatttatgtatttgtcgggggcgcatgtaatttaatttattcccctttggattcattattcagtttatcttgtcatgattttgggaggaaagaatctgttttacgcatggttaaattgtactactactacttcacacaaaaaaaaaaaaaaaaaa

SEQ ID NO: 389496 - DNA, 1396 bp, Oryza sativa
  unsure (1)..(1396): unsure at all n locations
atccggcctccccctcgccgtgccactcactcatcccccgcccaaagacaaagcaagcaagtacagtagccatggcgaagcatctcgcgctgtccgtggccgccgcggtggccgtgtcgtggctggcggcgtcgtcggcggcggcggcggggttctacgagaagttcgacgtggtgggcgccggcgaccacgtgagggtggtgagcgacgacgggaagacgcagcaggtggcgctgacgctggaccggagctccgggtccgggttcacctccaaggacacctacctgttcggcgagttcagcgtccagatgaagctcgtcggcggcaactccgccggcaccgtcacctccttctacctctcctccggcgagggcgacggccacgacgagatcgacatcgagttcatgggcaacctcagcggcaacccctacgtcatgaacaccaacgtctgggctaatggcgacggcaagaaggagcaccagttctacctctggttcgaccccaccgccgacttccacacctacaagatcatctggaatccccaaaacatcatattccaggtggacgacgtgccggtgaggacgttcaagaagtacgacgacctggcgtacccgcagagcaagccgatgaggctgcacgcgacgctgtgggacggcagctactgggcgacgaggcacggcgacgtcaagatcgactggagcggcgcgccgttcgtggtgtcgtaccgcgggtacagcaccaacgcgtgcgtcaacaacaatcccgccggcgggtggtcgtcgtcgtggtgccccgagggcacgtcggcgtggatccaccgcgagctcgacggcgccgagctcggcaccgtcgcgtgggccgagcgcaactacatgtcctacaactactgcgccgacggctggcgcttcccccagggcttccccgccgagtgctaccgcaagtgattttgaactcgatcgattcaaatcctcctccattgatgagttcttggcaatgatttgtaattgcttcttgttcttgttttcgtcttcgtcttcgtcttcttcttcttgatccatgtacattttgccatccattcgttctccatttgttacagttacagagacaggttgatggtgaattactattgccgccaatttttttcttcttcttgttactcgatccaattattactactagagttcatcttgcacagttgggcggtgtgaaaaactgaaaaagaaaagggtgtcaaatttgttgctgatgctgagcaagtgagcacatgcttatgctctcaggtatgaacaaaataaacagtaaaattatctgcaaaaaaaaaaaaaaaaaactcgagggggggcccggtacccaattcgccctatagtgagtcgtattacaattcnnnnnnnncnnn

SEQ ID NO: 389497 - DNA, 1701 bp, Oryza sativa
aacaaaacgcctggagctccaccgcggtggcggccgctctagaactagtggatcccccggggctgcaggaaattcggcacgagaatgatttggattattggagaatatgctgaaaggattgacaatgctgacgaacttcttgagagcttcttggaaacattcccagaagaaccagcattagttcaattgcagttactaacggcaactgttaagttgttccttaaaaagccaactgagagggcctcaacagatgatacaggctgttctcaataatgcaacagttgaaacagacaatcctgatttgcgcgaccgagcttatatatactggcgacttctttctactggatcctgaggcagctaaagatgtagttttggcagagaaacctgtgatcagcgatgattccaaccagcttgattcttctctcctagatgatctgctagccaatatttctaccctttcatcagtttatcacaagcctccagaagcatttgttagccgcgttaaaacagctcctagggctgatgatgaggagtttgctgatacagctgaaacaggatattcggagtcaccatctcagggtgttgatggggcatcaccttcctctagtgctggcacttcttctaatgttccagtgaagcagccagcagcaccagctgctcctgctccaatgccagacctccttggtgatttgatgggtatggataactccattgttcctgttgatgaaccaacagcaccttcaggccctccactacctgttttgttgccatcaaccactggccaaggactgcagatcagcgcacaactagtgcggcgtgatggccaaatattctatgatatatcttttgataatggcactcaaactgtgctagatggattcatgattcagtttaacaaaaatacctttggccttgcagccggtggtgcacttcaggtctctccactgcaacctgggacctcggccaggacgctgctacctatggtggcattccagaatctctctcctggagcgccaagctcactgctgcaggttgcggtgaagaataatcagcaacctgtgtggtacttcaatgacaaaatccctatgcatgccttctttcgtgaagatggcaaaatggaacgaacaagttttcttgaggcctggaaatctttacctgatgacaacgaattttcgaaagagttcccctcttctgtcgtcagcagcatagatgcgaccgttgagcaccttgcagcatcaaatgtgttctttatcgccaagaggaaaaactcaaacaaggatgttctgtacatgtctgcaaagattccgcgtggaatccccttcctgatagagcttactgctgcagtcggtgttcctggcgtgaagtgtgcggtcaaaactccaaacaaggagatggtggctctcttcttcgaagccatggagtctcttctcaagtgatacaaaattgaaggatcattgttccttccaaattgatcagttcatgagctattgtagggtttggatgcggcgttgtttcacaggagctggtgttaattgtatttgttgtcctttgtattagattactgtatttaaactgctagttccctggtttcaaagttttttcacgacgggcactcgacatggccattttgtctgcgtaatttgtatatctcggacctgaacctcttttcatgccatagcatatgaaatataagtagcttgc

SEQ ID NO: 389498 - DNA, 802 bp, Oryza sativa
  unsure (1)..(802): unsure at all n locations
tcgtgtatgcagatgccagggaagcagaaaatatagtggaacgggttacaccccgtctgcaacatgcaaattgtgctgttgttctctctgctgtaaagataatccttttacaaatggagctcattactagcacagatgttgtccgtaatctctgtaagaaaatggcaccccctcttgttacgcttttgtcagcagaacctgagattcagtatgtagcgttaaggaacattaatctgattgttcagaaaaggcctactatacttgcacatgaaattaaggtcttcttttgcaagtataatgacccaatatatgttaagatggaaaagctggagattatgataaagcttgcctctgacagaaacatagatcaggttctattggaattcaaagagtatgccacagaggtggatgttgactttgtccgcaaagctgttcgtgctattggaagatgtgcaattaagttggagagagctgctgaaaggtgtatcagtgttttgcttgagctgattaagataaaggttaattatgttgtgcaggaggctataattgtnattaaggacatcttcaggcgctaccctaatacgtatgantcgatcatcgcaacactctgtgaaagcctagacaccttagatgaaccagaggctaaggcatcaatgatttggattattggagaatatgctgaaaggattgacaatgctgacgaacttcttgagagcttcttgggaaacattcccagaaganccagcatnagttcaattgcagttactaacggcaaactgttaagttngttcccttaaaaaag

SEQ ID NO: 389499 - DNA, 747 bp, Oryza sativa
  unsure (1)..(747): unsure at all n locations
gtgcccaaaatcaaaccaatggtttatggttccacttcccactgcaattgagaaggcnataancccctgaaacttgtcnagattatcattgagctggaggatggtgatgtcattgtaacagcaagtgatgntctttttgacaatgtgtatgagcaagaagtagccaccatggtctcgaaatctttacaagccgatctcaaaccaacggagattgctgaacacctggctgccaaggcgcaggaagttggtagatctgcagccggaagtacccattctcagatgccgctcttgcagtggggtccctgggtttcagcgggggcaaactcgatgacatagccgtcgtcgtgtccattgtcaggaaatctgaaatctaaattgtaaaagacatccatgatccatgatgtccccctctcaagtttggttgaagctgcactcctagcctcctagcaaggtgcaccacactcatcaatatattgtacaaccagaagtgcagctgctgaaaaagactatctgtgagcgaggagcaagaggccattaacctgtgtaagtatctttgagccgaattgctcgcggtttttgggctaatttagcattggaaagtaatattgtgatccttggttcgagttgtaaaccggtggaagaaatctgccgtgtgtgtgagagacaaccgtgcataggaaaggaacatacattgattatgtgacatgaactggaaattgccgcnnnnnnnnnnnnnnnnnnnnnnnn

SEQ ID NO: 389500 - DNA, 632 bp, Oryza sativa
  unsure (1)..(632): unsure at all n locations
agcaaagcaatctccgtgagcggtgatggcgcanaggtggcgatctctcctcttcctcctcctcctcctcctcgtgcccttcgccgccgccgccgggcaggatgcgccgttcgtggtagcacagaagaaggttgcgctgtcccgcccgggtccaggcgtggagcgctcgccgtcaccctcaacctctacaaccagggttccgcgaccgcctatgatgttagcttgaacgacgactcttggccacaggaggcttttcaacttatctctggaaccacatcaaagattgtggaaaaacttgatcctggtgctactgcttcccacaacttcatcttggagaccaaagtgcagggcaagtttcagggctctcctgccattatcacataccgtgttcccacaaaaggccgcacttcaggaggcttactcaacgcccatgtttccacttgatattcttgctgagagacctccccaacagaagtttgaattggctaagagacttggggggaaatatgggtcgctggtctccgttgtttcctttgtcggtgtgtttatctacctggttgcaagcccgtcaaaatccactgctgcaaaaggaagcaagaagaggcgctaaatctggtttggtgccttttttt

SEQ ID NO: 389501 - DNA, 507 bp, Oryza sativa
ccacgcgtccggagaacgatgacgcctttgagcagcatcgcgagtactaactccaatcgtcgaaagaacattccttttgctgtggatgaaggtgtgtgcgtgtgtaagtaggcggtttggtatgatcgaattcaggatgttttgccttccagtttagcagaatgcttgttgcattagtttttttgtggagggttttgttcagggagagccttgagtgtgttttggtcgttttggcaaattggagatggttttagagcgaagaggattgagacgtcagaactgagaacacccaaatttgattaggggtggtatgatattatgtgctacattatatttagttcaatcaaagttagttcaagcaagtcaaggtggaaggggcagaggctttctgttaattttgtttccttgtgatgttgccggttcgagtatagaaaaatatgatcacaaacttgatatttttaacaaaatcgtcgggcaatcatttgcttgattgctactccctctgtt

SEQ ID NO: 389502 - DNA, 601 bp, Oryza sativa
gcgcacgcgtccgcccacgcgtccgcccacgcgtccgcccacgcgtccgactgtcaattgggagaactctaaacgggcagcccaagtgaagggcctctcagctccaggaaagttggcaaggaatcagacttccagtggaaagaaatcttccaagaaacaagtatcatttgctgaacgtcctgtatcttttgtctcctgtggcactatggcggaatctgttactgagacaattgcagttgccacaaccagtggtgaagtctcatgtgagaaaattgttgaaagcgactctgtcaagctgggaacctttgagatgcacaccaagggctttggttctaagatgatggctaagatcgggattcacttgaggggaactcgccctctggcaaagatgcgccaaggcatgatgcagcccatccacgccaattcaacgtgcccaaatctctttggactcggggggtagaaactttgacagcgaggctgaggcaatcaaggcaaggtcagaaccaccaaccaaagcaaggtcagaaccatggcggaatttgaggaaaggggagattggtggcgttggttcctttgagaggcatacaaagggcttttggat

SEQ ID NO: 389503 - DNA, 587 bp, Oryza sativa
cgacgcgtccgcccacgcgtccgggccatgattatgctccgcactctatatagagatatctccaggtacaagcaacttgagactgaagaagaagcccaggaggaaactggttggaagcttgttcatggagatgtgttccgcccaccaactaactctgacttactctgtgtctatgttggcactggtgtccagttctttggtatgctgctggttaccatgatgtttgctgtcttgggtttcctttctccatcaaaccgtggaggattgatgactgcgatgctgctcatttgggtcttgatggggctgtttgctggatatgcttcttcccgactctataagatgtttaaaggatcagaatggaagagcatcaccttgaagactgctttcctgtttccaggaattgcttttggtattttcttcgtcttgaatgctcttatatggggggagaaatcatcaggtgctgtccctttctccacaatgtttgccttggtgcttctttggttcggtatctcggttccacttgtctttgttgggggctatcttggtttcaagaaacctgccattgaggcttcagtgaagaccaacaa

SEQ ID NO: 389504 - DNA, 479 bp, Oryza sativa
gcgctttctcctgactgaggcaccgtcactcgccctgaaccccgctctgtccctaacaagacatgatcgactccgcctgcgcacatacattgaagccgttaacgctaggctcgtcccgttgcaataccaacggcactgaccgctcacctgtacaatattctttcatcctgtacatatattcgttggcccaaacgagggcgtgtaagatatgtcatgtctgagaacgtgctccgattagggagaagtagcgaaaaatccagtgtaacttgcccaaactgcctactgtaacgtgagctcggtgtgcttgcatgggacgcctgattatcaggcagctcaggttggcagctgaaggcccgaccatggtcgtttgtggacatgtaaagcagactgctacctcgatggtttgttcattaaaatttgggcttttacactgcatatgttgtccaagtcatcgttgcttttcaaaaaaaaaaaacaaa

SEQ ID NO: 389505 - DNA, 966 bp, Oryza sativa
  unsure (1)..(966): unsure at all n locations
ccacgcgtccgaagagaggcattgccatcaaggacccatcaagcccatccaaggtgaagctactgatcaaggactacccttatgcaacagatggcctggcgatctggcaagcaatcgagcagtgggtcactgagtactgtgccatctactacccaaacgatggtgtcctccagggagatgtggagctgcaagcatggtggaaggaggtgcgggaagtcgggcatggtgatctcaaggacgcggactggtggcccaagatgcagagcttgcctgagctcaccaaggcctgcaccacaatcatctggattgcatcagcactccacgcagccgtcaatttcgggcagtacccatacgcgggctttcttccaaaccgtccgaccataagccggcggccgatgcccgagccgggttccaaggagtacacagagctggacgagaacccagagaagttcttcatccgcaccatcaccagccaattccaaaccattctcggtgtctcgctcattgagattctatcaaagcactcagcggatgagatctatcttgggcagcgtgacacgcccagagtggacattcagacccccagggcactggaagcattcaagaggttcagcaggcagctggtggagattgagagcaaagtgttgaacatgaacaaggaccccctgctcaagaaccgggtcggtccagccaatttcccctacacactgatgttccccaacacgtcagacaataagggggcggctgaggggatcactgccaggggcatccccaatagcatctcaatatgagactgctgcaccgtcacgcgctgctgagttggtgtaggtttgtggctgttatcttaggccctagggcacaagcaatgaagctgcatagtactatttgctacaaattatgcaagaataaagttttngtgcnnatnnnnnnnnnnnnnnnnnnnnnnnnnnnnnnnnnnnnnnnnnn

SEQ ID NO: 389506 - DNA, 1168 bp, Oryza sativa
  unsure (1)..(1168): unsure at all n locations
ccacgcgtccgcgcaacggaaaccacaccacaccccgatacgactaggatttcctctctgcttcttcgatccccttgttattacaatcgatcctgcaagagaagcactctataattgcagcggcaagatcgattttttacaaaccaacaaagcagaaaggattcacgcgccgccgcttgcgatttgtcaattgcagccagaaagaggcgatggatttcaaagtcgcttcctttctcctactcctgttaatcgtcacctgcggagctgctcaaggtcaaggcaatgattttgttgtccttgatctaaaaacaactgaggtcggggaagatgctagcccaatgtacaaggagcaaattgcgttgaccaagatacctgtaactcttctgaggagcaagcacagctcactgtgctcggcttgtgaaaacatcacaaggcgaagcagttcaactttcttagtgagaaacaaatacaagataagataatgactatccttcatgacacttgttctcagacattctcctttgagcaaaagtgtcttgagactatggactcctatgcaactctcgtctttgcaaaaattgctgagattaagccagatgagttctgcaaacagtatggcctctgccagggacatggctcttttatcagctatgaaaagtgaaagcacatgcgtattctgccaccacatcatcgatgaaattatgtccaaactgaaagatcctgatgcagagtttgagatcattcaattactactcaaggaatgcaacaagattgaaggtcatcagcagcagtgcaagaggatggttctgcagtacgtccctctggttctagtgaacggtgagaagttcctggagaagaacgatgtgtgcgcaatgatccaagcctgtgatgcaggcaagaggaaggcattcaacttgttctctgcacggaaattggtgcgtgacgcatgaagtagtaggaagcgtgcatacacgaatcaagttgtggtaggcatggagaagacgaagaagtgatggcagcttgtacatatggttgttattaatgatataggcaatactactctgtgaaggggataatccgataattgtatgcacacatttgaactgtttgtctgatagtaatggctatacttacttttgtgtgcttnnnnnnnnnnnnnnnnnnnnnn

SEQ ID NO: 389507 - DNA, 516 bp, Oryza sativa
gttaggagcacaaagtggtacatttctgcctgggagctcattttgattctttcaatgggtgctgcgagatattcactattggagataaatcctggagacagattgggagtttccatggagcaccgacagatagaggggtgcatgtgaatggagcagtgttctatctgacaaaggtccgttacattgcttcggcacgtatcaattggttgaatcttgagagcgaaaattttgatgtgatgatgcttcccccacgcaagtcgtatggagggcattgctctttggcggagcttgagggaaagctatgcttgctaggtgtggaggggggacatgataatccacctcgtgcaatggacatattgatgcttgatagtggtgataagacaacctggacccacagataccacatctcattgccatgggtgatgccttcatgttattttactccaaaacaccactttgttccatgagggaaaaatttgggttcagttgttggctcgaacctctactggtatgatc

SEQ ID NO: 389508 - DNA, 364 bp, Oryza sativa
  unsure (1)..(364): unsure at all n locations
cgacgcgtccgggagatggtcgtctcagctgctagctcatcatcatcctcctcctcattgatcttcttgtgggaattctgaacagctctggctgctgcattttttctgatttctgaaatgatgctctgctcgatcttggcattctgaagtctgaaattgctactgcccgctggtattatcttgagctgcttttcacttctgctgaaatgtcgaattgtcgatgtgcctgtgcttggaagatggtgcttgtgttcttgtaagataattttggattatgatgtcgaatgcatgctcctggagaacgctggcagttgctgctnnnnnnnnnnnnnnnnnnnnnnnnnnnnnnnnnnnnnnnnnnnnn

SEQ ID NO: 389509 - DNA, 708 bp, Oryza sativa
gctattcctttgagcaagcatggctgctctgaggtatttggaccttagctggacacagattgaacagctgcccagagaagtttgctcattagtaaaccttcagtgcttaaaccttgctgattcacacatagcatgtctgccggaaaattttcggtgacctgaagaacttacggttcttgaacctcagctacactaaccatcttaggaacatacccagggggggtatatctaggctggccgggctgaaaatattgtacttataccagagtaaggactcaggctttgaattggagttgagcaaaaacattacgggcagaaatgatgaattcagttttaggagagctgagatgctctcacacagggctatccctgggtattactgtgagaagtgttggtgctctccgcacactatcgctgcttcctgatgcctacgtacaccttcttggcgtagaacaactggaaggggagtccactgtgagcctgaagctgcagagtaccgtcacggtggtaaacttcaggatgtgcctcggtgtagaagaattgtcaatcgaacttgacaatggccaagatccagagaaatccattccgcagttggagtacctcaccttctggcgcttggccaagttgtcttccgtgaagattggtgtggagctcctctacatccgaatgctatgtatcggtgagaacaatgggcttgggacatcacct

SEQ ID NO: 389510 - DNA, 786 bp, Oryza sativa
ttttatttcgttccgacgcgagtaattcctccccacgggcggcgactagggcggctagggttcctcgggcgccgccgtgccggagatcgcctctcgccgccgacacccggatctccgccgccgccggtcgccccaggttatcccgctcccgcagtcaccatcccgtcttctccgccagtcgcctcacgcccggcctggacgccccggaatccattgtcggtctcgccccgccgactgccgttgacgccactggctgaaggtgtgaatatgtcggacagtgcgttgaaagatctgaatctagctcactcctgggagttcaactgtgactttgaaattgattatggacccgaggaacgcggcatccattagtttacaaaacgctagctgttggataaggcgttgcaacctgacaaggtaaagaggggagatgtctgtttctggtggcaagcttcgtcgtggcacttttgaagctgtagagggctcggaattcctggcgagcatcgtttcaagcggcgttcgttcggatcttaacagtactggttaccaagcttgttgaagaatatgggcatcagcaaggaaggagaagggcagtatctagctagttttactcccctgtatcttagaaaaatgttttacaacacctttgagcattcataccttcttttatatcatattatgtgtgttcttcgtttcttaggccagaaatctacaagatagaagcagctgttgtaattccagatttcttgaatcttggtatgggatttgcctctcaaaaaaaaaaaaaaa

SEQ ID NO: 389511 - DNA, 559 bp, Oryza sativa
catttcgttccgacgcgagtaattcctccccacgggcggcgactagggcggctagggttcgtcgggcgccgccgtgccggagatcgcctctcgccgccgacacccggatctccgccgccgccggtcgccccaggttatcccgctcccgcagtcaccatcccgtcttctccgccagtcgcctcacgcccggcctggacgccccggaatccattgtcggtctcgccccgccgactgccgttgacgccactggctgaaggtgtgaatatgtcggacagtgcgttgaaagatctgaatctagctcagtcagcagagctggagaaaaccaaggacagttctgccaagtcttgcatcaccaagcctgtcttgaatggcaacaaatgcaacaatacggaagaaaatgctccacctgtactccctgatgctgtgactaatgggtgtgaagctggaaatgcacatggtgagtatattgattctgagagtctgacagatcttgaagatgctggtgcaacccttagtactttagttgcaagggtggattcaaaagactgggttatgacat

SEQ ID NO: 389512 - DNA, 413 bp, Oryza sativa
  unsure (1)..(413): unsure at all n locations
ggaacgcgcatccatagttaacaaaacgctagctgttganaaggagcttgttgagaaaagcactcgaatcctgtggtatttatcttgcagttgcaacctgacaaggtaaagagggagatgtctgtttctggtggcaagctcgtcgtgcacttttgaagctgtagaggctcggttcctgcgagcatcgttcagcgcggtcgtcgactcttacagtactggttaccaagcttgttgaagactatggcatcagcaaggaaggagaaggcagtatctagctagttttactcccctgtatcttagaaaaatgttttacaccacctttgagcattcaggcctccccttattggtggtcaatccagtacacccgatccntcgnctntgntnttttgccccctngngnggggttttgtttt

SEQ ID NO: 389513 - DNA, 538 bp, Oryza sativa
  unsure (1)..(538): unsure at all n locations
cgcacgcgtccgcggacgcgtgggagcttttgattttgtttcggatcatcttgcagcagctcgtggttcaaaggggtaacccgagagcgatggggatgttcagaatgtagcaacaatgcatttgtttggcttcacgcaaacttcactcgtactccatcgattagctggatcaatctcaggacaggttttgcatgttgtgctccaacagttgacccaagaaagaaagaaaagatttccccccgggggattgtgttgtaccaggtatctagacaaatgtcgatttttatgttgaaataagctgtacttatcttctcagtttcttttgagcccccgcctctttttttttttcttttaaagagtcggacattgtagattgttctcgggcgggattttgttttcgctcctgtacaccagcatatttggttcttttgacgggaattgtaaagcttgctacgttaataacaggtgccatacgggattaatgatgcctcttgaaccnnnnnnnnnnnnnnnnnnnnnnnnnnnnnnnnnnnnnnnn

SEQ ID NO: 389514 - DNA, 737 bp, Oryza sativa
tgcctattttggaatatcatagcaaccacaaccgcatgggtaaaaggggaaggtgttattatctggttgcttgctattatctacttcatatctggtgtacctggtgcttatgtgttatggtaccgccctctttataatgcaatgagaactgagagtgctttgaagtttgggtggttttttctgttttacctgattcatataatcttctgtgtgtgggcagctgtggctcctccttttcctttcaaaggaaaatctttggctgggattttgcctgccattgatgtcataggcaggagtgctatagtggggatattttactttgtcgggtttggattattctgccttgagtcactgctgagcattggtgtcattcagcaagtatacatgtacttccgtggaagtggaaaagccgcagagatgaaacgtgaggcggcacgtggtgctctgagctccgcattctgatgaaacatgccttgagcaaaaactgtagccagatgatatgagtggggaggaaacacgaaacatgagttgccaatctagcattcgcatagtgtacatccctgacggctgaacagcgtgcggatttggaatcaccgaaagcacccagccattattatcttttttgctcttctgtaatatataagcagcgttcttgtatggacgcgttcaggtgtttgtttccatttgttgacaaagatttagatgtggacgtgtgttgatagggaatagcatacata

SEQ ID NO: 389515 - DNA, 907 bp, Oryza sativa
ccacgcgtccgcccacgcgtccggcggcagctgctgggcgttctcgacggtggcggcggtggaggggatcaacgcgatcgtgacggggaacctgacgtcgctgtcggagcaggagctgatcgactgcagcacggacgggaacaacgggtgcaatggcggcctcatggactacgccttctcctacatcgcctccaccggcgggctgcgcacggaggaggcgtacccgtacgccatggaggagggcgactgcgacgaggggaagggcgcggcggtggtgaccatctccgggtacgaggacgtgccggccaacgacgagcaggcgctggtgaaggcgttggcgcatcagcctgtcagcgtcgccattgaagcatccggtcgccacttccagttctacagcgggggtgtgtttgatggtccatgcggtgagcaactggatcacggtgtgacggccgttggatatggtacaagcaagggccaagattacatcatcgtgaagaactcatggggcccacattggggcgagaaggggtacatccgcatgaagaggggcactggcaagggtgaaggtctatgtggcatcaacaagatggcctcttaccccaccaaggacaactaaactcctactactaaataactcaattgaatcaacacatgaggatcatacatatgatggtccttcaaagtttctctcttctcctcttgttttattagcctttaattccactgttttttcttctttccaaagatttggaggagagagagagagagagagagagagagagagagagagaagcacaagctgtttgtttgtattcgattttcttttgcgcgctttgaaatcatcgatgaaataataaatgtcagaagcttctttttaagatactgcccgctccaaagtcagaacaaa

SEQ ID NO: 389516 - DNA, 940 bp, Oryza sativa
gtgctgggaggaagggcggcgtgacgaggcggtggggtgctaccagaaggcggcggactagggcaccccgtcgggatgtgcaatctcggcgtctcctacctagaaggggagaaacctactgggttgttgttgttgctgcaatcatattcttcatctcaacgaattgcaactgattgttgctgccaaatcattttttagctgatccacccaaggctgaggaagctgttagatggttttatccagctgcggctgctggcaatgctcgtgctcaatacaacctgggcctttgcttgcagaatgggaaaggaatcaagcgtaaccagcgggaagctgcaaaatggtacctgcgagctgcagagggaggaaatgtgcgagccatgtacaacatttccttgtgctacaactatggtgaaggattttcacaggatcaagtgcgttcaaagaggtggctgcaattagctgctgattgcggtcacaagaaagctctttatgaatgtggtattaaactttgtgcggcaggagacaaggtgaggtctcttatgtatctagagttggcgacgcgccgtggagaagctgctgcctcacatatgagggatgtaatacttgaatcactttcccttgtgaatgcgcaacgtgccctgtcagatgcggataaatggagaccaagagcactgtataccagaagatgagcaaatgggcccatcacacgtataccaagttaataaccccttgatgccaaaagtaaaatggaaattcaccacctgaaggcccaagtgagcaatatgcatctgtggcatactctagtgtatgtggaactgtgtatatgttaactttcaagcccctctctccttttcttttgtacagaaattatgacagcagaaatactgttacagaaggtcaagtggcaataatatccctgatgcagcataggatagaactt

SEQ ID NO: 389517 - DNA, 329 bp, Oryza sativa
gcggacgcgtccgcgagcggtgaggcacagtcttgtgacaggagagagaagagaggagttggttagtgctacgctgcgacggatggaccgcgcgacggaggaggagacggcggcgacggggcggcggatactggtggccgtggacgagggcgacgagagcgtccacgcgctcaagtggtgcctcgccagcttcgccaagcgcggcggctgcgggggggcggctcctcctgacaccatcatcctggtctacgtccgggcggcgccgaccacctactccgggctcgactcctccgctatgggaggctacgtgttatcgaacgaggggggct

SEQ ID NO: 389518 - DNA, 775 bp, Oryza sativa
cacactagctaattagctacttactcttcttcttgctagcttgctagcttctgcatttagacattgcaaaatctgaaaaaacttgagaaattaactaaacaaaatggttgttccggtgatcgacttctccaagctcgacggcaccgccgcagagagggctgagacgatggcgcagatcgacaatggctgcgaggagtggggattcttccagctggtgaaccatggcgtcccgaagagcttcttgatcgggtgaagaaggtgtgcttggagagctaccgactccgggaggcggcgttcatggagtcggagccggtgaggacgctggaggggctcatggcggcggagcggcgcggcgaggcggcggcgccggtggacgacatggactgggaggacatcttctacctccacgacgacaaccagtggccgtcgaacccgccggagttcaaggagacgatgcgcgagtaccgcgcggcgctgcgggggctcgccgagagggtgatggaggccatggacgagaacctcggcctcgacaaggggcgcatgaggcgcgccttcaccggcgacggccgccacgcgccgttcttcggcaccaaggtcagccactacccgccgtgcccgcgccccgacctcatcaccggcctccgcgcccacaccgacgccggcggcgtcatcctgctgttccaggacgaccgcgtcggcggcctccaggtgctcaggggcggcgagggggtcgacgtgcagccgctcgccgacgccatcgtcgtcaacaccggcg

SEQ ID NO: 389519 - DNA, 437 bp, Oryza sativa
ccacgcgtccgcggacgcgtgggcgccggcgagagcacgctcaaggacaagtaccccgcgagacccacgagatattcaccaaaccccgacggcgctgcacaagaaggggttcacgttcatgaggcacacgtttctgaacggccaggacatcatcgtcgacatcgaccgcttcaagccggtggtgctccgcgcactcaacagcctcgcgcgctaacctagggtctgtttggcagagctctagcgcaagtctaatggatgagtctagggtccgttctgcattcggcctaagcacgcaaacgtgttcggtctggcccacatgcgtcttgcccatcttgagacactgtgctagaaaaaattgacacagaatttacataaaaaacttttaatataggaacattttatataaaaacatttcaatccaaatttgaattgaagtt

SEQ ID NO: 389520 - DNA, 474 bp, Oryza sativa
ccacgcgtccgtgttgatgctatggcaacaatagtccacaaccagaaagctcagagagttggacgagaattagtggataaactcaagaaattcatagaacggcaaatgtttgagatcactatacaagccgcagttggttcaaaggttatcgcaagggaaactctgtcagcaatgagaaagaacgttctggccaagtgctatggtggtgatattactcgcaaaaagaagttgctagagaagcaaaaagaagggaagaagcgcatgaagcgtgtagggtccgttgatattcctcaagaagcatttcatgagctattaaaggtctccaattcaaaatagatgctgtgcttagtgctgtagctgtctaacagcatgagggtgtgttgtggtgaaacacaaacagcatgttctggacttctagtcatcttctgaaaggtgccttttggtctaatgagtacctgcccgggcggccgctcg

SEQ ID NO: 389521 - DNA, 766 bp, Oryza sativa
ccacgcgtccggaacacacttggaagcaaacaaccaaatatggctgatccagttaagctcatcggcgcatttggcagcccgttcgtgcaccgagccgaggttgccctgcggctcaagggagtggcttacgagttcatccacgaggaaccttgacaaacaagagcgacctgcttctcgccaaaaaccccatccacaagaaggtccccgtgctcctccatggcgaccgtgccatctgcgagtcgctcgtcatcgtcgagtacgcggacgaggtgttcgacggccgtcccatcctacccaccgacccctacgaccgcgccatggcccgtttctgggctcacttcatcgaacacaagtgctcgaggtcatcgtggctggcattgtggttggacggcgaggagcaggaggggcttctgaaggagacgaaggagaacctggcgcttctggaggcgcagctccatgggaagaggttctttgccggtgactcggtcggctacctcgacattgttgccagcggactgactcactggatcaacgtggctgaggaggtgaccggagtgagcttgatgggcggcgccgactaggatgacgagcatcctgctctacgccggtgcgccaaggagtacaccacggatgagaccgtgatgcactgcctgccgagcagtgagcacctcgctgccttcttcgatgcgaagaaggacaagcttaagatggtggctaatgcgatgctgcatcagtgattgtgagcgtcgtggggcccgcagtggga

SEQ ID NO: 389522 - DNA, 551 bp, Oryza sativa
ccacgcgtcccgcaacccaaccgccacacccagctaagcgccggtcgaccgatcgatcgatcgatatgggctcgctgagaggaggcggcggcggcggcggaggaggaagaggagattgcagtaagcaggaggagacggagagggtgatgaggagcgtggacgcggaggaggcgtgcgcgctgctgagctcggggaggcaccaatacctggacgtgaggatgtgggaggactttgacaagggccacgtcgccggcgcccgcaacgtgccctactacctctccgtgacgccgcgcgccaaggagaagaacccgcacttcgtccagcaggtggccgccctctaccacgcccacgaccacatcatcgtcggttgccgctccggcgtccggtccaagctcgccacggcagaccttgtcggcgcgggattcaagaacgtgaggatcctgaaggcggtacctttcttgctcggctgtaatcaacataccgacccagctgatttttactcaacatgcactatattatactcgagatctcttttttgggggatttctatc

SEQ ID NO: 389523 - DNA, 448 bp, Oryza sativa
ccacgcgtccggcaatgcggctgagctccctcgtcgccgtggtggcctatgcgtggctaggtgaggcaaggaggccggacaaaggtggcgccggagccggagcggctgcgtttccggcgtcggcgcaggcctagatggtagtgcaaagggagctggcggcagtgggtcgtcttcctcgttgccggtcggcaccctcgcccttcttagagctcctccccttttttgtggggagtttctaggttggattgaggcggcagcttgtcaacgggggaagcccaggttgctgaagcaatgccacccagtccagggttctcctttggccagatttggcgaggagactggcgggtggtggatccgaaggctcgctgaagtcaatcgatggcggggcgttggtgctttgtgggtgcaagcctgtcgttggcaggactggaagctggccggcggaagg

SEQ ID NO: 389524 - DNA, 860 bp, Oryza sativa
  unsure (1)..(860): unsure at all n locations
ctaatttttgccgagatcgagcagttcagtgtgtctgtcagaggccttaatgtcgtcttgagcagccgccgcctggagatcaataagatctgatgttctgatcaagctgacgatacatatacaactcacatctgcaggttggttcctttgtgtccaaacccaaggaaaggaaaggcacagtcatctctctctctccctactcctcatctccagccacatctgctgcttcgtctccttctcctgagatctctcgatcttcaagaggaggaaacctaggtgaccttgctctctggtggccacgccatgggagccgtcaagaggtctagctttctcctcgtcgtcgtcgtcttcgctttgctcctcctgacctccatggcagcaggagggaggaagatgttgatcaacaagcatcaagtgcaatcaatggagacgtctgatgatgaatccatgcatcaagggcaggaagacgacgaaatgctggcgatggtccacgagagaattctgaggcaggtgaagacgaacgactacgggacctacgaccctaccccaaccatggctaagcctcacgccaaggaaatacctaactaactatatatatatagctgcatgcatgcatctcatatccataatccatgcatgcaaatatgtgatcaatatatatgtcttgcatatatatatgtggtcattaaattgcctcttcatcgagatatatttcgatatgttaattagtttgctacatataatatactactttgggccggccatatatatacatatgttttgtcgaataaacttcatggtttgtcatggaatgttattattcatatgtgtnnnnnnnnnnnnnnnnnnnnnnnnnnnnn

SEQ ID NO: 389525 - DNA, 1576 bp, Oryza sativa
ccacgcgtccgcccacgcgtccgcccacgcgtccgcccacgcggccccagaaattgtttggccatactgtcactattgctgtgaaagggcagagccttcctacaagtgacagcatgaatgctactgatgtacctgatagaacacagttcaaccgagatgacttccctgtccaatatgatgatgcaaagttctttgtcattaaatcatacagtgaggatgatatccataagagcataaagtacaatgtgtgggcaagtaccactaatggaaacaagaagcttgatgctgcttatcaggaagctcaggctaagagctccaaatgcccaatattcttgtttttctcggttaatactagtgggcagtttgttggtgttgctgaaatgactggcgctgttgattttgagaagaccttggagtactggcaacaagataagtggaatggttccttatctctcaagtggcacattgtcaaagatgtgcccaacaatattctcaagcacatcatcctagagaacaatgagaacaagccagtgacaaatagccgtgacacacaagaggtaaaccttgaccaaggcattcaaatgcttaagatattcaaggagcatgtcagtaagacctccatcttggatgactttgctttctatgagaaccgtcagaagttgatgcaggaaaagagggtgaaacaacagcagatccaaaagcaggtctgggacagtagggctccaagttctgtcactggagagaagcagcaggatgctgctactgcgaagccaaagctaccaaatggcgtcaatggagaactgaaggttcctgcagagaacggcacagctccagtcgttacctatgcagcgaaggtcgcccaaacagcagcgactgagaagcctgcccttgccaacggcaccgtcaaagctagttaactggatcacataccccatgttccctagctagccatgaagaacaagacggtcctgaagaactcaacaggcatgtggtcccaaggaactgatggtctggaaaactcttatctgtgaaactggcagcacgggcccaagatcctgctgcttggctgctactggggagcagttggctagttagttttgcctagttttcttttgccgtattcccgttttcggtttgcttttttttagctcgctctaagactccgtttatagtatcgtcgaaaatgccagaaaaaaacctagcggcaaagacaacaagttgcaaagaccatgtctggctttggtgcgttgcgtttcgcgcttattcagtggggggtggagtactataatcccgttgttgagtggttctggaagtgggttagattggtgctatttattttacttaaaagaatcttgctttatatacatctgatgatgcagggtctcgcctctaagtgctccactaagcagctattgcgaagctgactcactgcttttcgcggctgttctaaagctggggcattgcttgcatcattccatttggttgcttgatgagtagtgctagtagtattatcatttcagggccctttatttgttaactatagctaagcggatggatggtaaaaaaaaaaaaaaaa

SEQ ID NO: 389526 - DNA, 809 bp, Oryza sativa
  unsure (1)..(809): unsure at all n locations
gtggtagaaggaactggntgtaggaggctgataatactgacaagccaacagctaaggcagatccagctaaaacaaccacaaatggtgctcctaatggtactgttcacagtaacagtggaactgtaccccttggatcaagcgcagcaaaattcatcactgacccctgatggaacttatagggcacccttgctaggtggagttccttctgctggttacctggactctacatatgggtatgacagcacaggagcacactttgcatggtatgatggttctgcttatacaaatggacagcagagaacaactacaaccaatcacatgtcgtcttcaacattcagtaatggctcttctgcaaggactcaaaacaagggctccacacctcagcagatgggcatgaataacagaagacctacaactacaacaggatcagctgctcctacatatccgaataggatgtacccgagcacccggtcttacagccagtatggaaactcatacaaaactggtctttcgtacagcacaaatggttatggaagtaatggctatggtagtaatggttatgattccaggctatatggtcggctggggtcttagtatggataacaggtacaagccaagaggccgtggtaacgggtactatggtttttggcaatgagagtcaggatggaacaattgagttgaacagagggcctagatcaggccgttttaagaaccagaaattgtatggccatactgtcactattgctgtgaaagggcagagccttcctaaagtgacagcatgaatgctactgatgtacctgatagaacac

SEQ ID NO: 389527 - DNA, 565 bp, Oryza sativa
ccacgcgtccggtggatgatggtcttctggagattgtgggttttaaagatgcttggcatggacttgtgttgctatctccaaaaggccatggcactcgtcttgctcaggctcatcgcgtccaattcaaattccacaagggtgcaaccgaccatgcttacatgagacttgatggggaaccctggaatcagcctcttccgaaggatgacggcaaggtcttggtggagatctcacatgccggccaggtgaagatgcttgctaccaaaaactgcattgctaaaggcatccatgaggcactgtctatgtcaacggttcatccagagtccagctcctccagtgacgatacggatgacgatgacgatttcgcggaggagaggaagaactttggtgctgcattgtcgtttcggtacatggatgatgtgaccaaagagtaaaaaagcttgctttttttactgagccttgtacagcatgtttgcataggacgtagattgctgcactaactctggaagctgtgccccttgaagattctttccattgccaggttctgacatttggttgattttgctgt

SEQ ID NO: 389528 - DNA, 1068 bp, Oryza sativa
gtgcctacatccgcatcgtgcccgtctggtccacggggatcatctactacgtcgccgtcgtgcagcagtcgacctacgtggtgttgtccgcgctgcagtccgaccgacacctcggccggagcttccagatccccgcggcgtcgttcacggtgttcgccatgctggcgcagacgctgtggatccccatctacgaccgcctcctcgtgccgcgcctccgcagggtcacgggcaaggacgagggcctcaccctcctgcagcggcaggggatcgggatcgcgctgtcgacggtggcgatggtgatgtcggccgtggtggaggaccggaggcggcacatcgcgctgacgcagccgacgctggggacgaccatcaccgggggcgccatctcggccatgtccagcctgtggatggtgccgcagctcatggtgctggggctctcggaggcgttcaacctcatcagccagatcgagttctactacaaggagatcccggagcacatgcggaggtggccggcgcgctcgccttctgcaacctggcgctggggaactacctcagtgggttcctcgtcaccatcgtgcaccggaccaccggcgccgggagcaactggctggcgcaggacctcaacaaggggaggctcgacctcttctactggatgatcgccggcatcggcatcttcaacatcatctacttcatgatctgcgccaagtggtacaggttcaagggggcagccgccaactgagatgcaagtgaagtgaagtttgttcgtttgggtggttaattaattatgtcaatggcagataattaattggtggagtgcttttagctgggttttttttttctgcctcatcatttctctcttgtatttttgtatctgtggtgtcttgaattataaaatctataggattaagtgggtgaggaaagagaaggaaagaaacaaaagggttggtttcttgtaagtggttaaaattcaaagataaatgaatcttcaatcctagtaaatcgctacttgctgtttgactgattcacaaggaagtaaatgaaatagttttgaatgaaaaaaaaaaaaaaaaa

SEQ ID NO: 389529 - DNA, 727 bp, Oryza sativa
ccacgcgtccgatttaatactgcaattgtatctccaatctattatgtaatgttcacaacactaacaatacttgcaagcgtcataatgttcaaggattggtctggtcaacgcggacgcgtccgcccacgcgtccgctgtggtctgattgttgtgttgtctggtaccattttgttacatgtgacgaaggattatgaaaggattccgcaatcaagaagtatatacgcaccattgtctccctccttgacagcaagattaaacggagacttactgaagcacgtcgaggatgataggaaccccgatgaagaaaaagccttgagaaggcaagagatgtactagctccagtctcctgaagctcaaaaaaggatgaacaactccgattgagctaactagtgacatcagtgattgctatggtgtgttggtctgtacataatcaggcatctgcaggaattggtccaaaggattgaaggtgactgcctgcctgtaaatctttgaggtggttttgggaggctgcaggttacttccacagatagaattgaagtttgggtgcacagattcttctcatttctcttctttttcttctatctcttctggtgacgtatccccagttttgtccacggcatttctttcttgccccttgtgtagatttgagagtgagctatggagattgtattgcaactgtgaatgctgtacattattagtattattgtgaactgccgctcctgattct

SEQ ID NO: 389530 - DNA, 574 bp, Oryza sativa
  unsure (1)..(574): unsure at all n locations
ccacgcgtccgcccacgcgtccgcccacgcgtccgcttagcttctcagaggacgactttatggatggctgcagtagccatgatgggagcagcatagttggtgtcgacaattgccccaggcgatcaaggaaactttctggtagccgtgcatgggagagggccagtgagacagaccaagctgatggaggctatgatgtaacgcggccgcccgcgcgcccctatgcggtgaactctttgaagaagctctatgcccttatcacaaagtgcctgcgacccccatacggagtactgtatgtggtttcaaagaagaacttggttggttccaatggcggcgcaaggcaactcagagctttgatggaggagagagggtgtccttggtggccactttttaaccgagttagctgaccgggaaatttgggagttcttcttcaaggaaactagcaaaccaaggagctgggaagatgaaatggggccctggccttgtgacacaattttttgatgtctactctgcagcgctgtacataccgcanagcgtagttccattaattctttggtaatataggaatatgatatgt

SEQ ID NO: 389531 - DNA, 558 bp, Oryza sativa
tgcttccaccacgcaccgtcatcaaccgggacggggagcgctgctgctgctactactcctctccggatgcagcacttcatggcgcaggattacggcctcctgcaggacatgttcatcccgtcgccgttcttgcacaacgacgacgccaacaacaacaaccaccgttgatcgatgatgatgatgatccgcactagctcgagctggatggccggctactgatatactctgatagtgatttgcatcttggtaacttaatttctcctttttttggttctgaacatctgatcgattgatctgtatacgatgcattctacgacgatggtacgtgtagtactatgatgatgatctagcaagtagcctagttgtagcatgcagcatcggcggcagcagcagtagtatactactagtagtagaagttgttgtacatgtacctgattctcatgagctcgtacgtgcagacttgcactgcactttggggggcattattcagtagtagtactgaatactgatgatgagctagcagtggttaaaaaaaattattatataaaaaatttttgg

SEQ ID NO: 389532 - DNA, 1489 bp, Oryza sativa
  unsure (1)..(1489): unsure at all n locations
nactcgcagtcgcagcctctttcctcctccgtctctctctcccctcttcctctcctccgcgcggcgaacgaagcgagcgagcggcggccatggagcggctgcagcggatcttcggggcgtcggggatggggcagccgccgacggactcgccgctgctcgactcctccgagcaggtctacatctcctccctcgccctcctcaagatgctcaagcacgggcgggccggcgtgccgatggaggtgatggggctgatgctcggggagttcgtcgacgactacaccgtcaggtggtcgacgtcttcgccatgccgcagagcgggacgggcgtcagcgtcgaggccgtcgaccacgtcttccagaccaacatgctcgacatgctcaagcagaccgggagaccagaaatggtggtgggctggtatcactcccatcctggatttggatgttggctttcaggtgttgatatcaacactcagcagagttttgaagctttaaatcccagggctgttgcagttgtgatagacccaatccagagtgtcaaggggaaggtggtcattgatgcatttcgtctcattaatcctcagaccatgatgcttggccaaggaaccgcgacagacaacatcaaatgttgggcatctaaacaaaccatctatccaggctcttattcacgggctgaacagacactactactccattgcaatcaattaccgcaaaaatgaactggaggagaaaatgttgcttaacttacacaaaaagaaatggaccgatggattgattttgaagagttttgacactcattcgaaaaccaatgagcagactgttcaggaaatgctgaacctagccatcaaatataacaaggcagtgcaggaggaggatgagctgccacctgagaaactagcgattgccaatgtgggacggcaggatgccaagaagcacttggaagagcatgtctcaaattttgatgtcgtcaaacatagttcagaccctaggaaccatgctcgacacggttgtgttctagtctccttctactgttgtgtcaaccctatacagacccccacccaaattattatttatgtttatcgaagcctctgccgtaattctgtaacttttggtgccagctacatttgggttctaacagttcgacttgaagaatttgttttcttttaaacaaaaaaaacaataagacaaataaactaagctggaaggctatcacagaacacaggcaaacacaggatcattgatagggcggccatttttaaagatccaatctttctttcccctgcattccacgtctttactttttttttggggcacccaaattcaattcaatggccaccgttttaccaccgttctgcttggaaaacccttggggtgcccaacttaatgccccttcaacaaattcccctttcgcccatttgggttataataaaaatgcccccacctattcccctttccaaaattttgcccaccctaattggcaattgggccccccc

SEQ ID NO: 389533 - DNA, 467 bp, Oryza sativa
  unsure (1)..(467): unsure at all n locations
aggaaaagaagaaaaaagatcctgtgaaccctacgaaactaccgaagcgaagcgaagcgagcaatcggcggcggcggcggcggcggcggtggggagaagccatggagcggctgcagcggatcttcggcgcctccggcatggggcagccgccgtcggactcgccgctgctcgactcctccgagcaggtctacatctcctccctcgccctcctcaagatgctcaagcacgggagggccggcgtgccgatggaggtgatggggctgatgctgggggagttcgtcgacgactacacggtcagggtggtcgacgtcttcgccatgccgcagagcgggaccggggtcagcgtcgaagccgtcgaccatgtcttccagaccaacatgctcgacatgctcaagcagaccgggaagccagaaatggttggtangttggtaccattccatcctggattttggttctggctttcanga

SEQ ID NO: 389534 - DNA, 786 bp, Oryza sativa
ccacgcgtccgaattaaggtcttcttaattctcctttaaggcgaacgttgcattaattttttacaagaaattctctcatcggatgtgtcgtcagtctagtacacgagtaaattaaccatcctgcatgtataggtcacaggttagcatcttcagttaatcagtgtgttcatgttaacttagcttctaggaaaagttttgccgcgccttgtacctcttaaggaagagatgtgcaggggaaataatatgtggtagagtcgctgctgatttttcatatgcagctttagttcaagatgtctccacagaagcttgtgggggctactgaaagagttcaattaattgtgtattaatttgtagtacgtagtcacatatttcattttcacctatacatcttcatttctttttttcttgtacactaactaggtcagggtccctttcgatccattctctattcgatctggtccttcatttctggttttcttccatctcactcgttatgtatcaccatccaccctttcacccataattaaggcagcaatgcattatatatatgcataattaaggtcaagcaggcccaagaaatcagatgaaaaattgatggaagccattaccagacatattattactctggagttctccaaatctccaattagtataacgacttgtatggattattatatgtagcttccttttgagaagctaaatgtaccacgtacgcttatctttcagtacatttacatgaactctgctaaatggcaaacttctacatatgcagatcgctgcatacct

SEQ ID NO: 389535 - DNA, 589 bp, Oryza sativa
ccacgcgtccgatgagctgttacatgacaagtccgaagagaagctgaaagctctgagggagatcagtgacactgttatgcataggaagcttcttgacagcagtgttgatcttgtcggaaaacttctctttggatttggaaatgggccttctgtgcttcaagctgttagcccttctgggtcagccactccgttgatgattgggattgtttgaagagaatggtacggatctttgagtcgcattgcggaccgctcactcagtacggtatgaagcacatgagggcgtttgctaatatttgcaacaacggtatctctggcgcttcaatgaaggaagcaagcatcgctacttgcagcagtcacaactcgggtagatggagctcgctggtgcaggggtacagtgcttgatctgccgcaacacgtgatatagcctcaaaacttatgccttgtactcgtacttcctcaaaacaataccttcaggactgcaaataaccgtccaaggatgtaccgctgtatgctactgtacctctatgtgtgcaatatagatgccctgtatatacgagtatatgaatgaatcgtgtgcttttacaaaaaa

SEQ ID NO: 389536 - DNA, 834 bp, Oryza sativa
ggccttggctttaaaaaagcatatatagaatttactttagacttgtattgtacataccaaagggatccctaccgtatacgcgtaatatactcgtactgtatatgtctaccatgtaaaatgtaaaatactatgtaattacatctggtcgccacataccgctgcgctagctcattctacaccgccgtcgtccgagctcacggccgccgctgttacctgtctgacttgtctccggccacacaataaaactgagccggtgaccttaacgcgcgcggccgtgccactcaccacgaggctagtcagaactaccatacagctcatatgctaacacaagaacagaaagggaacaaaacaataagcaagagaagcacggacgggagcctactactactccagccgcagcatgcggcggaggtcgcgcgtcgcggcgtcatcgacggcggctgtgacggcggccttcctgaacgggaactgcggcagcggcacagagctcggctcgggggacacggagaacgccggcccggcgtacacctccaccgctacaggcctcgcggccgccttcctggcggcggaggagcccctgccctgacgtctccggcttcccgccgtcgtcggcttggtcctcgcatcgctctgatggttgttggccgtcctctggtgcgtggcggcggtggcacggatcctccgctgcgccggggaaggcaggagcacgttgtgcgggcgcagcacctcggtggccatatcaatggaggacgaggagaagaaagaagaagaggaggaaaaggttgggagtacagaacttggaagttgaaatcggacgcgtgggcggacgcgtgg

SEQ ID NO: 389537 - DNA, 494 bp, Oryza sativa
  unsure (1)..(494): unsure at all n locations
ccacgcgtccgataaaatgggtctctcaagctgttcgttacagaatgtggctgtaatatgaagagcttggacatatcactgaacggaggagcatcttggttttatcaggggtttgtagatggtttcagtaatcatatcagatcatcagtagaaaatgcaattacgaagaaaataatggagggtgcatcaaagcttgactcattccttggaagccttccaaagaaaatcgatgttgatagcatcgctgctatgaatgtgacatttgttagtgatccactcttcaagagttcctctgtggagtttgatatcgatggactgttcattccatctgataaaactgcagtttcaagacacatgcattttagaggtgtaaaatatgtaccacctcttggtagctcttcaaaaaatgctatgggatttcaattggatgaagatgttttcaactctgtttcagctctctanttcaaagggctgggttcactacaaccgtagnt

SEQ ID NO: 389538 - DNA, 669 bp, Oryza sativa
  unsure (1)..(669): unsure at all n locations
aacagaagcagaaatccccaacccaatcggaggaggaagagaagggcggcggcggcgagcggagatggtgaggaaggcgaaggtcgagttcgacgagagcccgccggatgacttcgacccgaagaacccgtacggggacccggtggcgatgctggagtacagggagcacctggtgagggagaagtggatccagatcgagaccgccaagatcatccgcgaccgcctccgctggtgctaccgcatcgagggcgtcaaccaccaccagaagtgccgccacctcgtcgaccagtacctcgaggccacccgcggcgtcggatggggcaaggacgcccgcccgccggagctgcacgatcccaagaaggtggttgaggccgacgagtagctttgctgctgctgctgttcctgggctggagaggttatctttctattggatttgaaaggagtaaaaatgaactgctgcagtccttattttgacctctctagttgctcatggatttacaataaatgatgatgtcgaagtaacattgttgtgtgttgcctgtatttttccctgcccgttctataagagccgagcaaatacatgcttgaatttatctgccttgttcttgtactcaacgatatgaatgatatttngttttcatttnnnnnnnnnnnnnnnnnnnnnnnnnn

SEQ ID NO: 389539 - DNA, 714 bp, Oryza sativa
  unsure (1)..(714): unsure at all n locations
ccacgcgtccgatttcaagctctcctaacctcagataaatgatagccattagaaccctagaaggatcattatcattatcctgaaataattccggtgaaattcctgtgttcccaaatagcagagcaagatttaatttcttgttaattattttttagaaggaaaggagcattgcgagtttttggcgccaagaagcaagaaaggtcatggacagcagcaagcagcagctcgccgtttggccggtgtccgccgccaagaagtacgccggcttcgacggcaaggcggcggcgagggagcggtcgggcctcgcgaacgcgtcgttccgggtgtactacagcctccgcgccggcgccgtgccgttcctgtgggagtcgtcgccgggaacgcccaaggcgggccgccgccgcggcgccgctccagcttttgttccctttagtgagggttaattgcgcgcttggcgtaatcatggtcatagctgtttcctgtgtgaaattgttatccgctcacaattccacacaacatacgagccggaagcataaagtgtaaagcctggggtgcctaatgagtgagctaactcacattaattgcgttgcgctcactgcccgctttccagtcgggaaacctgtcgtgccagctgcattaatgaatcggccaacgcgcggggagaggcggtttgcgtattgggcgctcttccgcttcctcgntcactgactcgct

SEQ ID NO: 389540 - DNA, 489 bp, Oryza sativa
cgcgtccgatatatactctctcaaaagtttacattaattgctgatagctcatcatcagtttgatcgtgtccggaggtgtgaggtcgtcggcgagatgagctccggcggcgaggaggggaagacgtcgtggccggaggtggtggggctgcgggcggaggaggcgaagaaggtgatcctcaaggacatgcccgacgccgacatcgtcgtggttccggtggggacgccggtgaccatggacttccgccccaaccgcgtccgcatcttcgtcgacaccgtcgccggcacccccaccatcggctagagctagctactagcctcatctgcctgccttcagcatcctgcttatcttaattaaataatcacatgcacgcaagtgatatgtactgtgcatgtttcgatcgatccatcccccatctgaataatgttggttttacccctacgcacgtgttaatgtttttctcctacgaattaataaagagaccttcattt

SEQ ID NO: 389541 - DNA, 426 bp, Oryza sativa
gccgacgcgtccgcccactcgtccgcccacgcgtccgctccaaagtttacattcctgatatatagctcatcatcaggggatcggggccggaggtgtgagagggcggcgatgagctccggcggcaagcaggacggtgcggcggcggcgggcgaggaggagcggaagacgtcgtggccggaggtggtggggctgccggtggaggaggcgaagaaggtgatcctcaaggacatgcccgacgccgaacatcgtcgtgcttccggcggggtcgccggcccggtgaccaaggacttccgccccaaccgcgtccgcatcttcgtcgacaccgtcgccggcacccccaccatcgggtagcctgcctcatctgcctgccttcagcatcctgcttatcttaattaaataatgatcacatgcactcaagtgatatgt

SEQ ID NO: 389542 - DNA, 694 bp, Oryza sativa
ccacgcgtccggagcctgacagatgatattcctgggtggggatcactcttccacggcgaagttggggatggaactgtcactatcatgatggcgacgctgctgttcataatcccgagcggcaagaacgacggcgagaagctcatggactggggcaagtgccggaggctgcagtggaacatcatcctcctcctcggcgccggcttcgccatcgccgacggcttcagggcgagcggcctgaccgacatcctctccgaggggctcggcttcctccgcggcgcgccggcgctggcgcatcgcgcccgtggcgtgcgtcttcagcggcgccatcaccgagttcacctccgacgacgcgaccgccacgctggtgctcccgctgctcgccgagctgggcaagtccatcggcgtgcacccgctcctcctcatggtccccggcgccgtcggcgcgcagctgtcctacctgctgcccaccggctcgccgggcaacgtcgtcggcttcagcacgggctacatcagcatcaaggacatggtgatcgccggaacgcccctgataattgtcggggttgcagctctcaccatcctactgccaacgttaggatccgtgcgttttggcatggatcaaaagctatagaaactttagtcaaagtgcaattggatgttttttggactatccaatttggaggctggaggttattac

SEQ ID NO: 389543 - DNA, 895 bp, Oryza sativa
  unsure (1)..(895): unsure at all n locations
ccggnccgacccacgcgtccgctgcgatttctgaaatcatccctgagatggagatgggcgactttgagtttgacccgtgtgggtacccaatgaatggccatttatggtccccccgtttttccaacgatccatgtcactcctgaggaaggtttcagctatgcaagctatgaagcaatggaacttcaatcctagctccttggtctacgatgatttgatcaagaaggtcctggcttgtttctgcccttcagacttttcggtcgctgttaccatcttcggtgggcatggttttgccaaatcatgggcaaaaggtgcagaggttgattcctacatgtgcgatgatcttgttgagcaagagcttcctggtggcggtgtgctgatgtatcagagttttactgctgttactcctggtgctgtgtcaccgaggtcgaccttggatggctggaacagcgatggagcagagatggttgcgaagagcaaagagatgagtgtctgctgggaaggagagaaggcggcgaagaagaaagatgcagatgcctgagaaatcggcagttcttcaacctcaagttgcaagtttgattcatctgaagtttctgagacgccttatttggttctgctcttgcagtttcggttaagcagctggctgggctaccggcaaagcatatgttacttgttcattgttcttttatatctgtctgcccaaataagtgctctagatggtttgctgcgtctgccatagtgagcaattcagattgtagtagaattcttatctgttgccgatgctctttaagggagaatgatatgtaactcgattattttcaataactattgcaacttccataattttctgtccattggttatgtttgtttgtttttctctgaaaaaaaaaaaaaaann

SEQ ID NO: 389544 - DNA, 705 bp, Oryza sativa
tcttcaccaacaccaacgtccgcaagattggtcccaaggaatttacctctgtgttttacagtcttcagaattggaggtccattttcgagaggtttgatcgtgaccgaagtggtaaaattgatgcaacagaattgcgtgatgctcttctcagtctgggatattcagtttctccaactgtgctagacttgcttgtgtcaaagtttgacaagactgggggcaagaacaaagccattgaatatgataacttcattgaatgctgcctcacagttaagggtctgactgagaagttcaaggaaaaagacacagccttctcgggctctgcgacttttacttacgaggctttcatgctgactgtactcccttttctcattgcataaaatggcagtgtgctgcacagtcgacctttcaggagaccatgcccattgtgttgaaacggttctgtaacgtgtgttcatcgacttgtttttaactgagtttattgtttggatttgaaatgatacaagtgcttccctgatcgggcatgttacaagttacaacgctcatgtatgtgaggatatatagctccgaaaatgatgtcatgactcttccgatagacatcacatatcgatcagccgacaaattcaatgcatttgtgaaatgactcagagagaggacgaagccgagtgaaatgaaagtttcgaagtgctttgaaaaaaaaaaaaaaaa

SEQ ID NO: 389545 - DNA, 555 bp, Oryza sativa
ccacgcgtccgcccacgcgtccgctcaccctttccctttccaacccgcccgcgtggatggagccggagcgagccgaagtttgagatcctttctgatggccgaccggcggcgaggcgtcggcgcggtggccacgcgttgaagaggattagctggtggtggctgttgattctgacgagcactcgttgacgcgggggaggaggaaagcaatgggtgaaagcctagccttcgggccggcaacggcgacgcctgcggggcgttgttgcgctttcctcctttggtcctttaggtgaaaaccacatcctgttctaggacgggcgacggcggtgctctttggcgtcgcttcctccttggaggcgtcgtttagaagttccattcgtgttgtgtgcttgttgggtttctgcagtgggatcagacgtagacgcgtggtgtggttgtattttctttttcctgactgcagtctcccaggattgtaatcttgtattttttttcttccataccaatagaaccgtcgcaatatcttgtgctggcttgtttcaaaaaaagtggtatttgaat

SEQ ID NO: 389546 - DNA, 490 bp, Oryza sativa
  unsure (1)..(490): unsure at all n locations
ccacgcgtccggcatggctctccagagagttcacaggacagcagcaagagaagaaaggttgtgttacccagtcctagccaagctaagaatgttaacatccttcgaataaagataagaagagatcaagattcttcagcttccctttcggagaaatctaatgttgtacaaacaccagttcatcaaatgggatcagtttcatctctgccaagtaagaaaaactcaatgcaaccacacaacaccgaaatgatggtgagaacagcatcaacccagcagcaaagcatcaaaggtgattttcaagcagtaccgaaacatggtatgccaaccccagcaaaagtcatgccaagagtcgatgctcctccatctatgagggcatcaaaggaaaggattggccttcgtcctgcagagatgttggccaatgtttggtccttcancctccaaggcaaaacagattgtcaatcctgcagctgcttaaggtttacacaaggggttg

SEQ ID NO: 389547 - DNA, 431 bp, Oryza sativa
  unsure (1)..(431): unsure at all n locations
gcagcggcagcaacgcctcacctcgcctcgccctcgtctccggccgcgccgcttgctgggagctagctttggaggaggaggaggaggaggggcgcgagcatggcggagaaggaggagtcaacgtcgatcccgctcagccaggcggcggaggcggttgacccggaggacccggccaagtcgccgccgcggcccagctcgcccaccacctccacccgcaaggcatgctgcgctgttcttcaaagttgggtgtcaagaaaatttatgactggatgcgtcgttctgtttcctgttgctgtcacgttccttcatcacatggtggtttattcaatttgttgatgggctttttcagcccactatatgcaaaaacttgggatcgacatatttggtcttgggtttcctgacttctctggnatcaattttcctggttggaa

SEQ ID NO: 389548 - DNA, 977 bp, Oryza sativa
ccacgcgtccgggaaaagcaggtcataactccaactggatcggtttacactggggtagagttctccaaaagattgtgtggtatctcagtgattagaaagtggtgagagtatggagaatgcattgcgggcatgctgcaaaggtataaaaattgggaagattcttattcacagggaaggagacaatggcaaacagctaatctatcacaatttaccgaaagatattgcaaacaggcatgtgctgttgttggatcccatactgggaacaggaaattcagctgttcaagctatatctctactcttgaaaaagggtgtacaggaaacaaatattatttttctgaatcttatatcagctccccaaggagtgcatgtggtcagcaagagatttccaagagtgaagatcgtgacatcagaaatcgagtttggtctgaatgatgatttccgcgtcatccctgggatgggtgagtttggggataggtactttgggacagatgattatcagtcatcaacaccattcttttgtgatgagaaaaatcgtgtcaggcttttgtgagcatttaaatagacaaagtcctggcggcggcggcggcatcatctccatttttgagaaacttaaattttacatttggaaattcagatgcccatattgatgtattcattaccagaaactgtgtatcggttgaacattacaggccgatcttgcctaatgacataaacggagcaaattcctttatgttttttcttatgtcttctccagctttttagtcaggaagatgctgtgatctcattgcattccctatctctccctgtgaattgtgggtgtgtttagttcgcgaaaagaaaatttttgagtgtcacatcggatgttggatggggttttcggacatgaatgaatgaactaatttcataactcgtctggaaaccacgagacttatttatgaagcctaattaatctgtcattatatatgtggggttactgt

SEQ ID NO: 389549 - DNA, 904 bp, Oryza sativa
ccacgcgtccggatgcatatggtggtcgtggtgttggaggctatagtgagggtggccgtgggtatgttggtggtggatacggtgacggtaacaattacggtgggtataacacaagtggtggatataattctgaaggtgggcgtggtggctatagtgtttttgaaggtggacatggctacggtagtggcggtactggttacacaggaggcagcggcggatataattcggcccctggaaattacagcagtgacaacttcaatcaagggggtgcagcacctggtgcatatgaaggtgcaaactacggtggaggcaacaactacatgaacaatgcaaccagtgatgattccaccggtaagctggacgagttgttaaatgatcttaaagttgatggtgatggcaaagaggatggtgagggcaaagcggatggcgctggcctggttaatgaggatctgaaaggagatgatggtcaggatgaattgcttcagaatgatttcaaagatgaagatgtgtctgatgactatgccaacaaaagacgttaaagttcgctcgaccatgaagtccagtccggtaacttttcatgtgttgccgatggaggtgctctccacaatcgcgaaatccaaagttaagacaacgtcctgtatgcaaataagtttcgtgttgtagccatatatgctggaccatcgggactctttcgatatgcggtcattcaaaacctggattagtatggattcactgcactacaatcgcatcctctgtggataatccattgttgctcggctgctctctttggatacaatctactgatagacactccctccgaagtccgaccgtgttattcttttttgggttaattggatccatgccattataaatttttgagttttgaagtaaaaaaaaaaaaaaa

SEQ ID NO: 389550 - DNA, 611 bp, Oryza sativa
  unsure (1)..(611): unsure at all n locations
ccacgcgtccgtcgactcctatcggcggtcgcgcgagctccagcgccaaggggatccgttgcgtccggcgggggttaatttcttgcggttgtaggatccccgatggcggatacggcgaaggccgatgcggcggcggaggcggccaagatggacctgctcgaggacgacgacgagttcgaggagtttgagatcgaccaagaatgggatgacaaggaagaaggcaacgaggcagttcagcaatgggaggatgactgggatgacgatgatgtcaatgacgacttctctctgcagctcaggaaagagctggagagcatcccatcgaagaactagaacttgtggtcttgtattcagtactttcagataggaagtggtatctgctggatttggcatgtttactgttatatttaccaactcgagcattttgcttgttctgtggtatgcctttccgttatacattttattaccaaatacggttcataaaactatattgcctatgtctagaaagtggtatcggttgtagaaccgtaatccatcaactggctgaacctttttgttccgtgaatgcagaaaggccattgcttngtgttnnnnnnnnnnnnnnnnnnnnnnnn

SEQ ID NO: 389551 - DNA, 296 bp, Oryza sativa
  unsure (1)..(296): unsure at all n locations
ccacgcgtccgtccatgtgtttgcgtacgatggtatcggctgttctcgccgtggggtgactcgatcacaaaccgttactgtctgtgtacgccgacacgagcgatatccctcggaagcatcgtgctgttaagaagtgcttaatttggcgtagcatctatctcgaatgcaagactctgttagcctatgagcttttgtaaaacaggaagaatgatttgtataacaaaaatttaccatggattggttatgttataacatagtgatttaagaactaaannnnnnnnnnnnnnnnnnnnnnn

SEQ ID NO: 389552 - DNA, 507 bp, Oryza sativa
ctgctgtcaagaaagcatatagaagggcaaccctttgtgtccatcccgataaactacaacaaaggggtgctacaatcagacagaaatatatttgtgagaaggtgtttgatcttcttaaggaggcatggaacaaattcaattccgaagagcgatacctcgggatgtaggggacaataaattggatttttgattttctagttttaccaaaattatattttattaaacaaatttcaaagcctaatgataaaaaatgatcgataacaaaactgtgaatagcgttgtggagagcggttttgatatgtgatctgaacaaaattacatgttgttaggctctaaaatttgttttaataaaatctaattttggcagaacgagagatccaaactatatagccttgatgttgatttttggtacctatgtaaatatatgcagtcgtagaaagcattttctggccattcttgactgaaaaagaatatcaattcaatagtaaagcatcagtgattcttttg

SEQ ID NO: 389553 - DNA, 506 bp, Oryza sativa
ccacgcgtccggactaccgcgacaacgtcctgagcaagacctgcaaatccgccccgaacccgacgctggcgaacaacatccgcgacatcgacgcggcgacgctgggggacctggcgagctacgtcgtgccggccgtcggcggcgactacctggacaacagctactacaagaacaacaagaacaacctggtgctgttcaactccgactgggcgctcgtcggcagcaacgccacgctccagcacgtcaacgagtacgccgagaacggcacgctctggaacatcgacttcgcgcaggcgctcgtcaagctcagcaagctggccatgccggcgggcagcgtccgccagatcaggaagacgtgccgcgccatcaactattaatccactctctgtaccgtcgtgcgctggcgttttgttgacagttgatatcgcatcgatccgacattttggttgcacaattctttggtttatccaagtgtggtgtccggcacggctgggtgtctatcattc

SEQ ID NO: 389554 - DNA, 719 bp, Oryza sativa
ccacgcgtccggggttttgttgtctgtgttgcaaatattcggggtggtggggaatatggggaagagtggcacaaagctggagcacgtgcaatgaaacaaaattgttttgacgacttcattgcttgtgctgaactcctcatttctgctggttatacgagttacaggcagttatgtattgaaggtggaagcaatggtggtcttctgattgctgcttgcgttaatcagcggcctgatctctttgggtgtgctcttgctcatgttggtgttatggacatgctccgttttcacaagttcaccattggtcatgcctggactaccgactatggttgttcagacaatgaagaggaattccactggcttatcaaatattccccccttcataatgtgaggagaccttgggagcaaagttttgttaactgttgtcagtacccagcaatcatgctgttgactgctgatcatgatgatcgtgttgtgccattgcactcattgaagttgttagcaacactgcagtatgtcttgtgcactagcattgaggatacaccacaggtcaatccaataattggtcgcattgacgtcaagtcagggcatggagctggcagaccaactaaaaaaatgattgatgaggttgctgatcggtatagcttcatggcgaacatgttagatgcgtcatggacggagtgattcattttgtcctgcataagttggagatggtgagcgtt

SEQ ID NO: 389555 - DNA, 317 bp, Oryza sativa
agctcgtcttcgaggtcggctccgtctccgccaagtgccccgcccgccacttcaacgccagcctcgagtgccccgccaaagccgactcttagtacaaaggtcctggtgtctattccttgatatggcatcatgaagcggcttaggcttcaggctttcagtgttctctgtttcttcgcacctgtctgtaattattcgtgtataaggctgaaatgctgaattgttcagccagtcgccccacgcaaacaaagtggaacagaacaatgcgtactgtagctcttgtatctataccttctatatagttggtataattggtaccc

SEQ ID NO: 389556 - DNA, 541 bp, Oryza sativa
  unsure (1)..(541): unsure at all n locations
ccacgcgtccggaaaaacaggactcatgctatctaccagtggaatagaaacgatgatgggaagcatgtacctgcggacaatgtggtgtttcacaaccagtattgggcaagcaacactcgccgcaggaggctgaagaagaagcattttcacttggatcaaattgaggacttgatatccgtgttctaggagttgatctttcagaacactgcatcgcagactttctgaaacggtggcggaatagctctgttgccctttggtcttgagcctcgaccgagtgaggcagaggctctcggctctcatgtaaaggaaccatgcacaggtttgtgggattactattattgagcactgtattgtatgatgaagacaatccgatcagcagatgattagtgctgtacacatgtagcatttcacagccagcgacagtttcgcaatgtgacagtatcttcaataaagtttcaaagggttgtgaaccgagattgcagcattagctgccccctgttcgtaaaagatcttatttctacnnnnnnnnnnnnnnnnnnnn

SEQ ID NO: 389557 - DNA, 719 bp, Oryza sativa
  unsure (1)..(719): unsure at all n locations
ccacgcgtccgcccacgcgtccgcccacgcgtccgcccacgcgtccgcccacgcgtccgttttaactgctctggcagaacttggccatgaagctacaataaatgaagctgtacgccgatttaacatctttgtggaagatagagaaacaccactactccctccagatgttcgaaaggcggcatatgttgctttgatgcagacagtgcaacaaatcaaacagagccggctatgactcactattgaagatctataaagaaactgatctgagccaggaaaaagtcagaattttaggttctctagcatcttgccctgatcctgatgttgttcgtgatacactggacttcatgctgtcacctgaggtgaggaatcaggactctatatttttgcttagaggagtcggtgcagcgggacatgaggtggcatggacatggttgaaggaaaagtgggactacatttcagacaccttctctggaactcttctcacctatttcgtttccaccaccgtctcaccgctgcgcaccgatgaaatgggcgacgacgcnganganttcttccagagcangacgaaagccnacatcgcgaggacggtgaagcngancatcnagagagtgaggatcnatgccnaatgggtggagagcaccanggccgaagctaacctgggcaatgtccttaaggaaatttctcacgaccactgagacaccgatcttttcctgcgccgt

SEQ ID NO: 389558 - DNA, 599 bp, Oryza sativa
atcgtgccggcggagatatacccggcgcggctccggtcgacgtgccacggcatctccgccgccgccgggaaggccggcgccatcatcggagcgttcgggttcctgtacgcggcgcaggaccagcacaagcccgagcctgggtaccccagggggatcggcatcaagaacgcgctcttcgtgctcgccggcacaaacttcctcgggacgatcatgacgctgctcgtgccggagtccaagggcatgtcgctcgaggttatctcgcaggaggtcgccgacggcgacgacgaggaggcggcctacccgaagtaatttgaccgcgcgcgtgatcacgcagggagtggttgccgctaaccatttgtgtcatctcttttcccaactgtaacaactctagtcgtcgcttccgtacgagtggtagttttttctttttcttggataagtttgtagaaatttcaattagtgactagtttgtagtatatgtgagtgagatgtgtgtatatgttcttgaagaattggtgaacttttccctggatttgaaagaaccgtgtagtttgaaaaaagaatgcaatggatatgctagtagttcaggtaaaaaacaaaaa

SEQ ID NO: 389559 - DNA, 545 bp, Oryza sativa
ccacgcgtccgcggacgcgtgggctggcactttccttcctcttgttaacggcagcagctcgcagtttgctatctgctcagggaatccatttctactttcttctgttccaaggggtctcattcttggttgttggtctcgacctaattggtgagcaagtggagtgggggaagatgaagagtttaatgcgtgttctttttctgtctgaaagaaaacactttgcaagcatcaaacggctctttggacagggaagagtgatgcaaatgttcgatgcttacacatggaagctgtcatccctattctaggggtcaagactcatcacatatactgaactgcggcgatgtagacagatatagtttggattaagcctgtggcatgctctgattccttcaggctattcttttgcatgaatctcttgtgcctagataggatcttcttgtatcttaacgaactctaccttcagatgaagatcatccctctattagatctcgagcggtcagtcttgaaggaccaaactctcctacgcctgcatgctacgtaataccttt

SEQ ID NO: 389560 - DNA, 740 bp, Oryza sativa
ccacgcgtccgcccacgcgtccgcccacgcgtccgcccacgcgtccgcctcactgtttgggaattctgattgtggcaaattgccagtgttgggcgtggccggaccactctacgagctgttcgttgcaatggcaagctcaatatggacacttcatagattggcttgggcgtatgatccggcagtcggcatattccagattggccagggagcggagtactcggtggtttacatggagaacattgtgcgttcaaaaggattttcaggaagcaaggagctcggaaagatgatgcgaccgaaggtcggtttcacggtggtgccgggatttcggctcggtgggacggtgatccagtgtagggtgtacctagattgtggcaagagggaaggaattataggtgaatgaaataatatagtcaaaaaagaaactgtacatttggaaaacaaaaggaggtttgtgtaaaggcgatcaagaacagtgccaaaataaccttcggagagtcacagttgctgctcgatgagtagtacagaaatagctacttatctttcattttagttttggtttgggtaaaagcgggttattcgtgatttgtagtgttgtacaaaggccatcagattctgagagctgtgttctaacattgtcaaagagctatttatctaattatttgtaatttatttctctgtagttctataaaaaaaaggtatatttatgattgtgtgcccctgtgaaaaaaaaaaaaaaaagg

SEQ ID NO: 389561 - DNA, 716 bp, Oryza sativa
gctccttcaagagcaccgtgctcaaggagattctccaggagccactgtggtccaaggacgaggcgaatgcggtggtggttgaggcggatgcgttcaaggagacggacgtgatctaccgtgccattagctccatgggccaccacaacgacatgctccagactgctgagctggtgcaccagtcgtcgacggacgcggcgtcgtcgctgctggtgacggcgctgaacgagggtcgtgacgtcatcctcgacggtaccctctcctgggagccgttcgtccagcagaccatcgccatggcgcgcgacgtccaccgccgccgctaccgcatgggccccggctacaaggtcgaccccgacaccggcgacatcaccgagaactactgggagcccgccgacgccgacgccgcctcgccgccgccgaccaggaagccttaccggatcgaggtcgccggcgtggtctgcgacgcgtacctcgccgtggcgagggggatccggcgcgccatcgtgacggggcgggcggtgcgggtgcggtcgcagctggtgtcgcacaggcggttcgccgccgcgttccggcggtacgccggcgccgtggacggcgcgcggctgtacagcaccaacaccatgggcgcggcgcggctgatcgcgcgcaaggacggcgtcgccggcagcctgctggtggagccggcggagttcgcgtgcctcgacgcggggggcggcctc

SEQ ID NO: 389562 - DNA, 590 bp, Oryza sativa
tctgttatgtagaaactaagaagacacggcctaagggttctgtggtagacgatgcgtgtggcacttctttcgaacaatattacaaggttgtgaaggtgattctgaaatcttttgactactttgggtgaaattaatttgaagatttatttcaagaacatttatggacctcaacattataaagccatctgtttgaagtttcttctgagtagaaacaattgctttatgaaccatggaggagttctcagtagcagtatttgatttctacttggtccagcttgcatctccagtagtatcctttacatatgggcttgtactgttccataactagctaggatatgggttcatttcaacatatgattggccctcttgtatgttggtttggtgtcatcttgtaatttgtgtgttcattaagcttccctctgatgttggaaattgtaattatcaaatgatatagacgtccatatactgatttagtctgtataatagttgtaacatggtaatttgttttgataatcctgagttgtaacatggtaattttgtccatatactgatttagtctgtatagaatgaaactctatggctcttgtggc

SEQ ID NO: 389563 - DNA, 763 bp, Oryza sativa
cagccaagcgtttggttggggggatcggagcggcggcggcggcgatgcagtcgctgcaggacaaggcgtcggagtggagcggcgtggcggcgggggatgcgttcgccatcgacgatgggaacgtcttcgaggcgctgggcggcaccacgcagccgttcgtcgacctctccaccaacttctacaccagggtttatgaggacgaggaggagtggttccggcagatcttcgcggggtcgaagaaggaggacgcgatccggaaccagtacgagttcttggtgcagcgcatgggcggcccgcagctcttctcccagaggagaggacatcctgccctgatagcaccgcatcgaccattccctgttacccaccaggctgcagagcgatggctgcaccatatgcagcaagctgtggatactactggacagcatagacgctgccacaaaaaccaaaatgatgtattttttcaggcacactgcatacttccttgttgccggaaatgagatgacaaggcaaggccatggaacttcctgcaagtgcaaacatgggggaaagcaaaccagcagaataacgatcgattcatgcctctggccagtaaggcatctggataataaacgattcgagcctttagcagcctatcctggtgttatagaaaaaaaaaaccatggacgatggaattcagaccatctattcattcacaaaaacagttgagctaactgttgtaggcttacagccactctcgaacacggagcaacccaaaattgataga

SEQ ID NO: 389564 - DNA, 579 bp, Oryza sativa
ctgcctcctaaatgttgtcccaatcttcagtatggatgggggagtcattcttgatgttcccagttgcatggcaagagtcctcaaccgctctcagagtgtcatggatggatatcccatggctcagatatggaaagaaattggggcgccaggggcaccttccttgctgggtatagatgaagggaaagacaaagcatgcagcaatctcccatgtccacttctgacatctgccatgtcagactacagctgccctgaggtattctggaagattgacaatgaagaaacaaggatgttggctacacaatctggttatggaaaatgagggccatgctattgaaggataaagccatacatcaagatataggccaggtttctaagctacatatgtgctttccagatttgcagtacttatgtggttatatttgtgttactatgggtctcaatatttacagatctactataacattattggtgtgctcatgatgtatgtattatgtatgtatgtatgtagaatctaatgtgcaacatagctggtgtgactttaccttgacagtatggaacacaataccactttgtatgaat

SEQ ID NO: 389565 - DNA, 809 bp, Oryza sativa
  unsure (1)..(809): unsure at all n locations
ccacgcgtccgcttcaatattgagctcaaatttgatgacaatcttgaataccaggaggaagagctcacttgtatcctccaggccatcctgaaggttgtttttgagtatgccaaggatcggcctattattttcgctagcttccagcctgacgctgcacaggttatgcgaaaattgcaaagcacataccctgtttactttttgactaatggaggcacagaaatctacgctgacgttaggaggaactcattggaagaggccatcaagctatgcctcgccagcggcatgcaaggaatcgtgtcggaggcacgaggaattttcaggcaccccgctgctgtaccaaagatcaaagaggctaacctctccctactgacttatggaacactgaacaacgtaccggaggcggtgtacatgcaacatctgatgggggtgaacggtgtgatcgtcgacctagtgcaggagatcaccgaggccgtctctgagctcatcaccgtcccggagcctgacctgaacgccgataatttgagcaatggggcagcaaaagacgccgcaacgccacatttctcgcagtgtgaaatctcattcttgctgaggctcatccctgagcttgtgcaataatcgatccagttgccttgctggtctgccgactttantgactgatctgttttcnggaagaanaagananaccccntgtggaaggtttcnantttacaaaacttttaaattngttgatgttctanaacttaaccccgggtccngtttttttnaatttgcccctgggggacgttttggattccctnaatnggatcctt

SEQ ID NO: 389566 - DNA, 440 bp, Oryza sativa
ccacgcgtccgaatcaagaaaactttttatgatctgtgcacgcgtgcccgccatcgtctcgatgggagcaggtcgtggctgcaatggcgccgtgctcggcatcggcgtggccgtggtgaccgcgctcctggcgtggcggtgcgcggcggcggcggcgcaggcgccgcctgttgcttcgacggacggcggcgggtcggggtgtatgccggagctcgtcagcctgtcgccctgcatggggtacatgtcggggaacgcgacggcgccggcggcggcgtgctgctcggcgctgtccggcgtgctgaggtccagcccgcggggcctctgcatggtgctcggcggcacggcggcctcgctcggcgtcgccgtggacaccgcacgcgcggcgctgctccccggcgcctgcagcgtccaggccccacctgccagccagtgcaacgcag

SEQ ID NO: 389567 - DNA, 580 bp, Oryza sativa
ttgacccccttctctgtcgaggagtacctcgtcgacacctgcggcctcaccggcgcccaggcgctcaaagcatccaagaagctctcccacctcaggtcgcccgccaagcccgacgccgtgctcgccgtcctctccggcgtcggcctctcccgcgccgacctcgccgccgtggtcgccgccgagccgcagctgctctgcgccagggccgacaacatcgcccgccgcatcgcctccctgcgcgaccgcgtgggcttgtcggacccccagatcggcagcttcctcctcgtcgcgggcggcgccaagggcatccacgcgtgtgacgtcgccccgaggctggagttctggatccccttcttgggatccttcgagacgctcctcaggatcttgaaggggaacaacgtgctggtgctctctgaccttgagaaggtgatcaagcccaacatcgcgctgctccaggagtgcgggctaactgtttgtgatattgccaagatggccaggtttgctccacggatgttcacgtccaatccaaagcaggtggaagggtttgtgcggcgtgccgatgagcttggcgtgccacgca

SEQ ID NO: 389568 - DNA, 665 bp, Oryza sativa
  unsure (1)..(665): unsure at all n locations
aagattccttctcttcttcttcgtttcaggcgctgcgcgtctgcgggatttggggaggggagcggcggcggagatgcacccgaagctgtcgcggttcgcgcacagggtgctctgctgcgggaggaaaggctccggggaggatttgagtgatgaggggagcggatcgttgaggtgggtgttttcattgcgggagcttcggtcagctacaaatagcttcaactatgataacaagattggagaaggaccattcggaagtgtctattggggacaagtttgggatggttctcagattgctgttaagaagttgaagtgcgcaaagaatgggacagaaacagaatttgcttcagatgttgaaattctgggaagagtgaggcacaaaaacctcttggagtttccgtggatattgtgctgatggacctgaacgcgttctggtgtatgacttcatgccaaattcaagtctttatgcacatctgcacggaacacattctacagagtgccttcttgactggcggaggagaacatttattgcaattgggtgctgctcgagcnctagcgtatcttcaccaccacgcaacaccccagataatccatgggagcgtcaaggctactaatgtgcnactcgattcaaatttccaggcacatcttgngtgactttggtctgataa

SEQ ID NO: 389569 - DNA, 604 bp, Oryza sativa
  unsure (1)..(604): unsure at all n locations
acctgggggatngcattgnnaatngggttgaatggaaccnaccaacaagagccccgggggccattctgtggcactgcatcatcaacaattcgagggccgcgaccggcgaccagggcgtcgtggacgagagcgtccggaagctggagaaggtgctcggggtgtacgaggcgaggctgtcgggctccaggtacctcgccggcgaccgcatcagcctcgcggacctcagccacttctccaacatgcgctacttcatggcgacggagtacgccggcgtggtcgacgcgtacccgcacgtgaaggcgtggtgggaggcgctgctggccaggccgacggtgcagaaggtgatggccggcatgccaccggatttcggcttcggaagtgggaacataccatagtgtgcttgctgttgtccagctttgcagcttgttattagcatgtctgcatttccaataaatgggatagccagctctgagaacctccaaacaatgtcaatgctctgcatcaggcgctcgttgcagaagcaaaaaatcatggcgttgctttttcttctctttgacaagctgttttcatcatggtggctttggcgttaaaaaaaaaaaaaaaa

SEQ ID NO: 389570 - DNA, 712 bp, Oryza sativa
  unsure (1)..(712): unsure at all n locations
acaaaatgggccgatgagcagcaactatatatgtaccaacaaagtgcagggcaaattcagctgcaagaaggaccaatggcgccgatgaaagtgtacgggtgggtggtatcgccatggatggcgcgggtgctggtggccctggaggaggccggcgccgagtacgaggtcgttccgatgagcaggtccggcggcgaccaccgccggccggagcacctcgccagaaacccgttcggtgagattccagtactggaggatggcgacctgacgctctatcaatcgcgagcaatcgctaggtacatctttcgcaagtacaaaccagagttcctgggactcggagaaggtggaagcctggaggagtcggcaatggtggacgtgtggctggacgtggaagcccaccagcacgaggccgccgtgaggcccatcctgtggcactgcatcatcaacaagttcgagggccgcgaccgcgaccagggcgtcgtggacgagagcgtccggaagctggagaaggtgctcggggtgtacgaggcgaggctgtcgggctccaggtacctcgccggcgaccgcatcagcctcgcggacctcagccacttctccaacatgcgctacttcatggcgacggagtacgccggcgtggtcgacgcgttcccgcacgtnaangcgtggtgggaagcnctgctngccannccnacngtgcanaangtnatngccggcn

SEQ ID NO: 389571 - DNA, 1057 bp, Oryza sativa
cactacgcttctacgctacacaccactactctcacaacaatggcgaggagcgtagccgtggtggtgttgctggcgatggcggcggtggcggcggcgcaggcgccgggtcccgctgcgacgccggcggcgggcgccacggggccgccgaacgtgacggcggtcctggagaagggagggcagtacacgacgttcatccggctgatgaaggagacgcagcaggacacgcagctgaacagccagctgaacaactccttcaacggcaacggctacaccgtgttcgcgcctaccgacaacgccttcaacaacctcaagccgggcaccctcaacagcctgacgcagcagcagcaggtggcgctcgtccagggccacgtcctcccgcagttctactccatggactccttccagacggccagcaaccccgtccgcacccaggcgttcggcaccgacggcccctacaccctcaacatcacctccaccaccaacaacaacgtcaacgtctccaccggcgtcgtcgaggtcaccgtcaccaacgcgctcagcgcggtcaagccgctcgccgtctactccgtcgacaaggtgctcctccccttcgagctcttcggcgtcaaggcccccgccgccgcgcccaccgcgtcgaccgccaagcccaagaagggtggctccacggaggccgcctccggccccgccggcgcggaggacgccgagcccacgggcgccgccagcgccagggccgtcggctggggcgtcgccgggctcgccgccgttgttggctgcctcttgtaagacggtgtacggacccgatggtcgaggaagctagccatgtgcatgcatttcttttcttttctttttttttcctttttttccttttctttcattcttcctctctccatgtttaaatttatttgattttgactagtttgttctttacattattcttgttcttggtggtttgtaatattgggctgtgtgattggagttttctgtctgaggccgggatgttaataatgcattagtacattttgagtctaaaaaacaaaaaaaattcaaaaacccaaaa

SEQ ID NO: 389572 - DNA, 867 bp, Oryza sativa
  unsure (1)..(867): unsure at all n locations
ccacgcgtccgcccacgcgtccgcttattagtattgttcctgtttgcaacaggccatcatccatggattccttgaggtgctactcacctcacacaatcctgattccgaagacgatcggtccaggaatctgatcagagcctccatggatgcagcttctcaggtcctgaatccaagaaggctcccaactctgtcagcttcaccagcaaggtcaacaaggtctatgaagacaagtgcatgggcatcctctgctacaccgacgagagcggcgagctgatctgcgagggcttcgacgagggcccaaggctcacctggcaagacatggagaagatcaacagggagaaggaactgaaggctgaagaagatcgtcgggagaggatgatgcggatacggcgtcgcggggatcgactggaagcagcctgcggaccgctgtcagcaagcctgtcagtgtgggggaagaactgaagaagtaaacaagctgacaagcttagtgcagtaggttattttctgaaatgtttcagatcttgtagaaacaagttatgcttgtttgtgtgtatatagagtatgtagatcgatctccattgctgctgctttctctggaataaggattatgctgtgtttaggtaggattaggaggagacaaagaggggcgtgatgctgatctagctggtcagctcctggcttccaattgataaagagatcatgtaatatattctgcttggatgatcgttcagcttaatgttagttccaacttccaagttgatcagattcctggtgtcgtgtcgaaccaagctgctgggagttcgtttgcctgtcaatttgttgcttgataagaaattctctgaaagttnnnnnnnnnnnnnnnnnnnn

SEQ ID NO: 389573 - DNA, 1011 bp, Oryza sativa
ccacgcgtccgcccacgcgtccgcccacgcgtccgcggcgtgcccgggcgtcgtctcctgcgccgacgtcgtcgccttcatggcgcgggacggcgtcgtgctgtccggcggcctcggctaccaggtgcccgcggggcggcgcgacggccggactccctcgaggacgacgcgctcaacttcctgccgccgccaacgtccaccgccgccggcctcggcgccaacttcaccgccgggaacctcaccgccgaggacatggtcgtcctctccggcgcccacaccatcggcgtctcccactgcgactccttcaccaatcgcatctacaacttccccaacacaaccgatggaattgatccgtcgttgagcaaggcgtacgcgttcttgctgaagggcatctgtccgccgaacagcaaccagacgttcccgacgacgaccaccttcatggacatcctgacgccgaccaagttcgacaacaggtactacgtcgggctgacaaacaacctcggcctcttccagtcggacgcggcgctgctgacggacgccgcgctcaaggccacggtgaactccttcgtgcgcagcgaggcgacgttccggctcaagttcgccagggccatgatcaagatggggcagatcggcgtgctgtccgggacgcagggcgagatccaggctcaactgcagggtcgtcaaccctgtcaatgtcactgctactgcagctgatgatcaccaccttacttcctcttcctcctcttcttcagatgaagtggctgcaagctaattaattaactgattaccactgcttgttagtaggtgtgcatgcacagacagtgattgagatgtgtgtgaagttcagtgtgatgagatgattagatgcttcaattgtttgttgcagttacagtgattgagagacatcagatcttgtttacctgatgtaggtgttggtggttgatactgtcaccatcttgtgcttgtcagtctgaaaaataaattgttgcatccagcaaaaaaaaaaaaaaa

SEQ ID NO: 389574 - DNA, 1285 bp, Oryza sativa
  unsure (1)..(1285): unsure at all n locations
tctgtggctcgggaacgtcaagctgctgaggctcgagaaaggcaggctgctgctgctgctgctgctgcagcagctgcagcaaaagaaaaacagagtaaaccggacgatcttgagtccttctttggtatgggagctcgagccaatagtgcgccgaagcaaagggctccaacagcggattcgatgttcaattctcaaactcaaaatagaggggcagcatcttctgcttcagcatctatgcggaaggcatcatcaacaacaaatattgcagatgacctatctgcaatatttggaggagctcccacatcatctgaagaatttcaagaaattgaaggagagagtgaagaaagaagacgtgctaggttcgaacggcatcaaaggacccgtgaacgagcggcaaaagccctggctgaaaagaatgaacgggatatgcaggttcaaagggagcaggctgaaagacatagaatttcagaaacaatggactttgagattaagcgatgggctgctggaaaagaaggcaatttgcgtgcattgctatcaactttgcaatatgtactttggccagaatgtggatggcaacctgtatccctgactgacttgattactgctgctgcggttaaaaaggtatatagaaaggcaacattgtgcatacatcctgacaaggtgcagcaaaagggggcaaatctacagcagaaatatgttgccgagaaggtgtttgatctccttaaggaggcatggaacaaattcaactcagaggaactcttctaaacggcctgcgcaaatgaaacatattgctcaccaatcttcacctgcatgaggcaatcggggtgggacagcacctcatagaacaaccgagctggagcagtcggtcggcggacccatgaaacgatgaagtgaaagttccaccataattacaattgtattgttattaccaatattgtttgttttattatacaccctcatcttctcccttctgtatgtgttgattcaaatgacatttcacagccacatgtggtggccctgcggcagaccctcatccagtaggtgtatattaagcgttctttttgctcggttgatccagggttgtgtagcagcggatttggggtggccagtgttgtggtttttggattaggcacagggtttatttaccatggagggcccaaattgcatggatcatgaatgttgccagtttgatgccatgggcttttcgtaagttcaattatcttgtttatagtgaacttctggaacacacattggggatgttnnnnnnnnnnnnnnnnnnnnnnnn

SEQ ID NO: 389575 - DNA, 853 bp, Oryza sativa
  unsure (1)..(853): unsure at all n locations
gcaggagagagaaagagagagagacccataccaatgcctgatactgggttactttgtgatctcctttggtccgatccatccaatgacgcacaagggtgggctgtgaatgatcgaggcgtctcatatacattcgggccagacaaagtgtctgaatttcttgagaagcatgatttagaccttcatctgtcgagcccatcaggttgtcgaagatgggtacgagttctttgctaaccgccaacttgtaacaatattctcggcccctaattactgtggagaatttgataatgctggtgccatgatgagtgtagatgatacactgatgtgctcttttcaaatactaaaaccagcgaggaaaatgttgggtggttccacgaattccaaatccggcttcaagtcactgagagggtggtgacgatgagcaaagctgtgatctgatctgctggcgcatgtcttctacagcggctgcgactaaccggcattttcgcctacagctcgggtccataaacagcgaagcagatagaaatgtgtacaactttccagccgatggaactgtacatcatcgttcatgttggattaacacttgttgtaatgtattattggttttaccatgcggatctcttatcatatgagaggatgtgaatgaaaactgttctcccgtcctcccccctaaattcagaaaagttcagacagaaggactccaataaaaatagctagaatcgaatgcttttgaaccaaatttccatccagtgagcaccagtgctaacatagttatatcccaagaggtagtcccattgaacctgctattactgaatttttctgccctttttnnnnnnnnnnnnnnnnnnnnnnnnnn

SEQ ID NO: 389576 - DNA, 1070 bp, Oryza sativa
  unsure (1)..(1070): unsure at all n locations
ccacgcgtccgcccacgcgtccggtccgtcgccgacgcgccagtctacgccggcccggccttgtccgcggcttcgcctgagccgagctccctccccttcccggccttcatccgtcgcgccgaggccgaggcgacccgcggcctccgctgcctcctccgcatcggcgacctcccttgacgccctctctcaccgccgtcttccccggagccgtgagcccgtccacgctcctctcctcgtttctcctcctcttctctgatggatggattgcttggtggtttcgatccgatcgaaagcttgtccggatcagatcccggctgcgttccgatcaaactctcccggtattttttcagaggacgagtttgggggaacgcatctgccggtggttggatttggtagtggttaggttttcaaaagtttcgtggtggaattatgttgggggtttgcttctacgaagaacaacactaggttgattagttctttgtcttttgagtttggtttttaggtggtgtcttggttgggaaaaattggggttagtttggtggaaatttaggctggcttggtgttgctgatctgttagtacagcagtagtggtaataatagtagaggtttggttagatgaataattcgtcggtagtgattgtgatttgtggtttggtgagcgtgagttcaatgtcaggtgaagaatagtagcactaaattcgtgttaggtattatgtccagtgtcaaaggcaagacatatatagttcttattatcagtaattaagttatgttaggtgttatctttctgttcgtctgtaagatatatatagatcttatcgggtaatcaaatcaactatgtatcagatcctcgcagtggtgaatttcattcaacacatcagtggatgtttggttatcttcttttttttctcatgctgattagctgtggatttgtgttcttactttgtgcaagtaataagtagactacccttggattctcaacgaggttgcttcacaatcatcatatgcataccaagatttaattaagaactgccacttgttatnnnnnnnnnnnnnnnnnnnnnnnnnnnnnn

SEQ ID NO: 389577 - DNA, 662 bp, Oryza sativa
  unsure (1)..(662): unsure at all n locations
ccacgcgtccgcccacgcgtccgaccacgcgtccgcaaactactggtgcttataattgcctcgtgttgcatagactggaaaaaggaggcgatcttggcaaaagacagggtcttcagccatctcttccagtagcatgaaaatgtagtgtgcccatctcacatgcagtgcaccaggcaattaataggatgcaaaattggtctatagcacatcagcatcaatcatcattctaaaaagcatacgaattgatcatcgttcggaaaagcatacgaattgatctgcaagaggagaataggagccgtcttgtaacttctattgggatttcgaagaagtcgaaggaaaaacgtagttgaggactgcatcaatcacaatatgatcgaggccatgtcagcaattttggacttcgcgtgttgtgtatgactattgtttttgccaacagtgtacaactgagctctagttaggataggtataggtacagtgagagtatgtacctagtatgaattttgatgatttttgatgtctctgtcagtgacattgtaatgagcagcgcacaacatctcggaatgaacaaatgaaaactttgaccaaaaaaaaaaaaaaagggnggncgcaccgnggtggagctcccagcttttnnttccctttagtngaggggnaattccncc

SEQ ID NO: 389578 - DNA, 1908 bp, Oryza sativa
gtcttttgctttgctttcaggacatggtcacctttctcaggcagcaagcgtaagcaaggcagaggagagggaaagaacctctctgcagtgctgctgctgctagcttgcagaaaaaaaaaactctcatcttttgcaggaagagacatcactgtttctgcattcgtgtgcatttggattaagctttgcttatccctttttagtggagattgttgagtatatcaggtctatatattggcagctctggttggagatagacactcacactgagccaagatggggagtttgcacaagttcagtgttattctcctcatgttatgttttgctacgttggggagcgctcagtatgtcaagtataaggatccgaagcagcccgtctctgttcgtgtcaaggatctgctcggccggatgactctcgctgagaagattggccagatgacccaaatcgagagggagaatgccacggcggagcagattgccaagtacttcataggtagtgtactgagtggtggaggcagtgtgcctgctcctcaggcatcagctcaggcttgggcttcaatggtgaatgaaatgcaaaagggtgccctttcgacccgactaggtattccgatgatctacggtattgatgccgtgcatgggcacaataacgtctacaaggctacaatcttcccccataatgtcgggctcggcgctaccagggaccccgacctagtaaagaggataggagaagcaactgctcttgaagttagagctactggaattccctacgtctttgctccttgcgttgcggtttgcagagacccaagatggggacgctgctacgaaagctatagcgaagacccaaaggttgtccagtcattgaccacactcatctctggcttgcaaggcgatgttccatcaaatgatgtaggaagaccatatgttggtggaagtaagaaagttgctgcatgcgcaaagcactatgttggtgatggtggaacggtcaagggaatcaacgagaacaatacaatcatcgatactcacgggctgttgaccattcacatgcctccttattataattctatcattagaggagtctccactgtcatgggttcatactctagctggaatggagtaaaaatgcacgcgaaccatcacctaatcactgattttctcaagaacaagctccgcttcaggggttttgtgatttctgactggcaaggcattgaccggatcacttctcctccgcataagaactattcttactcaatcgaggctggaattggtgccggcattgacatgatcatggttccttatacctacacagaattcattgatgacctgacagagcaagttaacaacaaaattatccccatgagcagaattgacgatgctgtctacaggattctccgagtcaagttcaccatgggtctatttgagagcccttttgctgactctagcctcgccgatgaacttggaaagcaagagcaccgtgagctcgcgcgcgaagcggtcaggaagtccttggtgctgctgaagaacggaaaatcctcctactctccggtgcttcccctcccgaagaaagccggtaaaattctcgtcgcgggaagccatgctgatgatttgggcagacagtgtggaggatggaccatcacctggcaaggacagcccggcaacaacatcactgctggcacgacgatcctgtcggcgatcaaggccaccgttgatcccagcacgacggtggtgtactcggagaacccggacagcagcgtggtcaccggcgacaagtacgactacgcgatcgtggtggtcggcgagccgccgtacgcggaggggttcggcgacaacctgaacctgacgatcccggagcccgggccgacggtgatccagacggtgtgcaagagcatcaagtgcgtcgtggtgctcatctcc

SEQ ID NO: 389579 - DNA, 554 bp, Oryza sativa
ccacgcgtccgaacaaagagaaaactgactcttcggaatctgaatcctaagaagctgaatccacggaaacatcgtcggaatcagctgcccctgaagagagtcagtctgaaccacaaagactgacgatttagaacctgaagctccatggatgatgtgtgtggaattatttagcgttgaaacccttggccaccccgtaggatttgttgggatgatactgatactccaagaaggcactttgtcagaggcaaaattttggttgctcaaattttctcatttgtttgacggccaaaagatgaggtgtaggatttccgtatggactagatgctataggaccagcagaaaggtgatccatagcttctaatcgcagcttctaatcgctgtatagcagtattatggtctctatggcatgctgtcaaagttaatgcctcaaaggcttcgacttcacgactttgtagttgcattgtttgtatcgaactaatttgttttgatattgctgagctatagaaattttacatcgattagcagtcttatcaaacgaggataactgccaaaag

SEQ ID NO: 389580 - DNA, 578 bp, Oryza sativa
  unsure (1)..(578): unsure at all n locations
nctttcgcccgcctcgtcgtcttcctcctcccactctcgcactcctcgcatcgcaaagctcggcagcaaaagcaaagcaaagccaagccaagcttgaagctccccgcactgagccaagaagcctccacctcaatccgaaagagatctcgtgcgcgcacggcgatgcggtgaatcgggcatggcgccgccacaggagcgggactacatcgggctgtcgccggcggcggcggcggcgctggcaacggagctgcgccttgggctgccggggactgcggaggaggctgagtcggagggcggcggaggaggagggacggatgcggctccgctgacgctcgagctgctgcccaagggcggggccaagcgcgggttcgcggacgccatcgttgggggtcccgccggccagcggcgggaggcggccgggggcaaggcggcggcggcggcggcggaggccgaggaggaggaggagaagaagaaggcgcaggcgccggcggcgaaggcacaagtggtaggatggccaccaatccgcagctcctggaagaacaccatggcgatgagccagcctgctttgaaggcaaaga

SEQ ID NO: 389581 - DNA, 642 bp, Oryza sativa
  unsure (1)..(642): unsure at all n locations
ccacgcgtccggcggaaggtaagaaatcgaagccagtcgagacaaggaaggtcgaaccgatgtcagcgcctccaccgacggcgccccacgtgccagctccggtggcgagcccgccatcggagggcacatccagtggatcgtccgatgactcgggcagcccgatcaaccacagcgggatgccgtacaaccactccgggcagcagcagcaaacaccagcagcaccagcacatgccccctgcttacgcatccggtggctggtcgctctcagctcatcatcagaacaggcacgactctgacatgaagatgatgtcgaactaacactctgctcggcctcgaggcgccccatttgtttggttgggctgaagaaggagctgatgatggatggtggatcgtgttcgtacccccctctgctagctaagagatttaggaccatggtgatgaatgatctcagagagatgtgttgttgctgttgtttttccttggagtaagattaatttaggcgctgttgtaacgctgtagctgtcataattaagccccctcttacgcaagagtttattatgtgttgtactaaaaaaaaaaaaaaaaaaaactcgagggggggcccggtacccaattcgccctatagtgagtngtattacaatt

SEQ ID NO: 389582 - DNA, 475 bp, Oryza sativa
  unsure (1)..(475): unsure at all n locations
cagctcatcatcagaacaggcacgactcagacatgaagatcatgtcgcactaacactctgctcggcctcgaggcgccccatttgtttggttgggctgaagaaggagctgatgatggatggtggatcgtgttcgtacccccctctgctagctaagagatttaggaccatggtgatgaatgatctcagagagatgtgttgttgctgttgtttttccttggagtaagattaatttaggcgctgttgtaacgctgtagctgtcataattaagccgcctctaacgcaagagtttattatgtgttgtactaccggtggatatgccttctgcttgtctgtcttgctgagatcttcacctccttagtaggctagtagtagtctacatacagacttgtatgaatttacctgaatgctttgatttcaaatcgagaacttttactaggttgtttcaacggacgcgtggnnnnnnnnnnnnnnnnnn

SEQ ID NO: 389583 - DNA, 623 bp, Oryza sativa
ccacgcgtccgccgatgttgacatagatgaagttgcacggaggtcagaaggctatagtggtgacgaccttacaaatgtttgccgtgatgcttcaatgaatggcatgagacgaaagatgcaggcaagacccgcgatgagattaagaacatgcaaaagatgagatctcaaaagacccagtggccatgtgtcactttgaggaagccctggccaaggttcagaagagtgtatctcccgctgatatagaaaagcactagaagtggcagccagagtttgggtccgcttgaaatctccattctgttcccgttcaaatttctcagatcattgtttctccttggttgcttgtgttcgcaagtatttcattcatttgtaccgctgttatgttgtttcaacggccttatgttgatcggttgtattgcctgcgccggtgttgtatcatagacccaagccagtcagtaaactacgaagtgagaggtctctgcccgtggaactgctttggtgatttagtttcagtgtctctggcactcccgaagccaaaggttgcgtcactctgttaccatttcgaccagttgatatccagcttccatgtttcgcacgggcagttacaacgtgcgcgttttaacagt

SEQ ID NO: 389584 - DNA, 614 bp, Oryza sativa
  unsure (1)..(614): unsure at all n locations
gtgcaccctgaatcagttggacctggctctatctcaggctacaaatgctgcacagtatgcttttcaagatggaacagccggcgcaaacttgcagcaaaggaacttctgggaggatgatctcaaagtgttttccatattgagaatggacagagccagagaatggggtttcagcaccaaacttccatggtcagcagcaagcaggcccacatgaaaatggcagttctaacctgcttaggccacactgatcaaggaaaagaatgacaatctgtacatagggaagagacccaagtgcaaaactcccattggcaaagctagtgaagctctctgaactcttgaagctaacagtcatcattaggctcttaagagaggatatttcttaatcatagtctgcctgtagggcgatgtgattctttcggtacctactatttgagatgattatattttgatataaccgtaacaaattaaaatagttaatttgtgtataaagatatggtgcagatattacaaagcaccctcttcttcttctttctgattatgtatgagctggccaattagcagctagctggatggatggaaccatgtattnnnnnnnnnnnnnnnnnnnnnnnnnnnnn

SEQ ID NO: 389585 - DNA, 622 bp, Oryza sativa
  unsure (1)..(622): unsure at all n locations
cccggtcgacccacgcgtccggcggcagcacctggtctggacgctgccggattcgcggtggttggtggtgctgcaggcgatcagcagcagcagcagcagcaggtgatgagccaggacggatcggttcatcaggccgatgggccatcgtgcggcgtggacgattcttccctgcagcagcagcagcaggaggggttcggtggcaacggcggctgctgggattttcaggagcagttcgacagcatcgaccagatgcaggcgagcggcggcggcggcggcttctgcgacctgctctccatgagcggcgccgacccctgggccgtgctggaacgtaccgcgtgatgggggaacgacgtgctcaaggatcgatttttaattagagcttgttaattcataatgtcccgtggaaatcaaattaaggggtgtttgtatactactgcattgtaaattatcgcggtgtatttatagagctgtttaaattagcaacatatataaggaagatcagaggcatgataagtcacttctgtacgaatttatgtttgccactttgctttggagagcatgggcaccgacagaaagatggaaaggaagaaggaaagctgtagagaattgcgcctaanaaaaa

SEQ ID NO: 389586 - DNA, 726 bp, Oryza sativa
  unsure (1)..(726): unsure at all n locations
ttgcgaccgggcgctcgccaagatctgcggcgtgatcgccgccgacgagaggcggcacgaggcgggctacacgatggcgtccggcaggctgttcgagctcgacccggacggcatggcgcgcgcgctggcggacgtcatgcgcgggaaggtgaccatgccggggcagctcatgtcggacggccgcgacggcgacggcgagcacagcctgttcgcccggttctccgccgtggcggagcgcgccggcgtgtacacggcgagggactacggcgacctcgtcgagcacttcgtgcggaggtggcgggtggcggagctcgcggcggggctctccggcgagggccgacgcgcgcaggagtacctgtgcgggttggcgcccaagatccggaggatggaggagctggcccaccggagggcggcccgcatcgagcccgccatggcccgtttcagctggatcttcgataggcccgtcatgctgggctgatcaacccggggcttctgttatggttttatgggcccgtttactgggctctgcttgctcaaattataataagctacatcgtgtgctaaaataatttatctttgttattaaggattcgtgtgagaaagctattttgttttctgtagcaagtttaggaatgtaatgtaatccaatgaagcggcaggacgactgccatttgattaagaaaagactcgcgcttgtttgtagcccnnnnnnnnnnnnnnnnnnnn

SEQ ID NO: 389587 - DNA, 646 bp, Oryza sativa
  unsure (1)..(646): unsure at all n locations
tgttgtgcttccgtttagcatctaggctctagcaaacctgtaaagatggaatcctacacaactggagccaagtttgattgtttgctgtttgacatggatgatactctgtacccactgagcttaggaatcaacttagcttgccgcaagaacatacaagactatatgctgaacaagcttcagattgaagagagccttgttcccaagatgtgtcttgatctgtacagggaatttggaactacaatggctggactgaaggtcttgggttatgatttcgactatgacgatttccacgcttgtgttcatggcacattgccatacgagaagctgaagcctgaccctgtcttgaggcacctactgctttcactgccacaaaggaagattatattcacaaactctgacaaggcgcacgccgcgacggttctgaagaagctcgggctggaggattgcttcgaagggatcatctgcttcgagactctgaacccatcgactgaacctgaagaagacgactctgacagtaccgatggaggcagcagttctgacagctcagcttctcatcgcaagaggaagatcctgtgcaagccgtccctggaatccatggaagccgtcatcgagatcgccaaggtcgaggccatgnagacggtgttct

SEQ ID NO: 389588 - DNA, 465 bp, Oryza sativa
  unsure (1)..(465): unsure at all n locations
ccacgcgtccgntttttttttttttttttttttttttgaagcttaaagaataacgacttacacagacttgtaccttgtttcaaaagtttatattttcatttcttagagtacagtttgagtctgagtcggtggaaactcgggcacatcttctaaagaacccagaagtacatctttctcattgtcagcagtaagtctaaaaggttagtcgatgcttctttcaagtggcataggaaagtgcatactgggtaacattttctagatatttttccaattccttttctccactctcaagagtctcccaaagtgatttcctcaattcctcgtttccttgactttttgtaacaaggtcataagcatagcgcataacatggctgcagtatgcagcttttcatcatccatacattcttgatagggatggattcatattggctttgggattaaaaacacacttcttagcacctttgg

SEQ ID NO: 389589 - DNA, 1201 bp, Oryza sativa
ccacaccacacagcaaccagccagctgccacactagcttgaggcgagcgagcgaagcttagctagcggatataacaagtcgtcgatctgcttgctgcttttgtgaattgcggtggaagcatgtcgagcgcgtcgtccatggaagcgctccacgccgcggtgctcaaggaggagcagcagcagcacgaggtggaggaggcgacggtcgtgacgagcagcagcgccacgagcggggaggagggcggacacctgccgcaggggtgggcgaagcggaagcggtcgcgccgccagcgatcggaggaggagaacctcgcgctctgcctcctcatgctcgcccgcggcggccaccaccgcgtccaggcgccgcctccgctctcggcttcggcgcccccgccggcaggtgcggagttcaagtgctccgtctgcggcaagtccttcagctcctaccaggcgctcggcggccacaagacgagccaccgggtcaagctgccgactccgcccgcagctcccgtcttggctcccgcccccgtcgccgccttgctgccttccgccgaggaccgcgagccagccacgtcatccaccgccgcgtcctccgacggcatgaccaacagagtccacaggtgttccatctgccagaaggagttccccaccgggcaggcgctcggcgggcacatgaggaagcactacgacggtggcgtaggcgccggcgccggcccatcttcaaccgagctcctggccacggtggccgccgagtccgaggtgggaagctccggcaacggccagtccgccacccgggcgttcgacctcaacctcccggccgtgccggagttcgtgtggcggccgtgctccaagggcaagaagatgtgggacgaggaggaggaggtccagagccccctcgccttcaagaagccccggcttctcaccgcgtaattcagcagctgcatggatccgatccgtcagagagtttttgtctagggagtgaaattcagtcgaaacacactattcgttgattcgttttgtgccgctattgtttaatttgttcctgcttttgtacagagcaagcgagtgatacatagccatacatacagtcatacagatataggtctagctcttccttggttctttgtaacactggaactgtacctgtatcttttacactttgttctttgacagtcatatattgtagaccatattcgaccaac

SEQ ID NO: 389590 - DNA, 417 bp, Oryza sativa
ccacgcgtccgccgacgcgtggaccgacgcgtggtttcgcggcggctcgctcgcctgatccatccgtgtctcgcgcggcggcgccatggcggcggaggcttcgccgcccgcgccaccggagatccccacgaggtgccaccactgcgccggccccctctccaaggacatggaaacgagcagctggacggtgcctccactggttcgagatagcttctccatgattggttctgctattgggggtacagctggagcattttatggtttcaaccacactatgccttttgttcgacggtacataaaagggccaatgtggatgcatttttcttgttggtgcacctccagttattggcttctcttctgcatgtgctgggttagcaagtgggacaataccagcgcttgcacaactggtatcatcat

SEQ ID NO: 389591 - DNA, 716 bp, Oryza sativa
ttacagtttttactggattagcccaggaagctgtagaagtttgctccacatctcttcagaatgcaagcaaggtcattgcaaaaaaagcaactgcaatggatggacagcttttcctaattaagcaccttcttattttaagagaacagattgctccatttgatattgagttttctgtcacgcataaggagctggatttctcccatttgctggatcacttaagaaggatcctcagggggcaggtctcgttatttgattggtcaaggtcaacatcacttgctaggacgtttcctccccgtgttctggagaaccaaattgatgccagaaaagaattggaaaaaagcctcaactccacctgtgaagagttctataatgtccattacaaaattagtagtggatccaatgctttcttttgttactaaggtaacggctgtcaaagttgtactgtcctcgggtagccagggtcagaaattggattctgttctggctaaaccccttaagactcaagcatttgcttctcctgataaggttgcggagctggttcaaaaggttgggactgctattcagcaagatttacccaaagtaatgaccatgatgaggttgtatttgcaaaatccatctacgcggttgattttattcaaaccaatcaagacaaatatagttgaggctcatatacagctacactcccttctgaagtcagaatacacagctgacgaaat

SEQ ID NO: 389592 - DNA, 217 bp, Oryza sativa
  unsure (1)..(217): unsure at all n locations
cacgcgtccgcgcgacgcgtggagccgacgcgtggtttcgcggtttcactttttttttcctcttctgtagccttccttgggatgtgtatataccatacggagtattaggatatgatctataggtggtacatggtagtagtatagaagaatgtacaaatttcaaacattttgaattctgatacctactttttgggaggaaaagatctttctnnnnnnn

SEQ ID NO: 389593 - DNA, 674 bp, Oryza sativa
ccacgcgtccgctggtggactttttccatgttatgtaccacgaaccaaaggcaaagataatatcagatgttgaccattttctgagtaccattgacatacagaagtttgtgttcctagaaactcctgaagtgatctcttctgtgctgaggccacactgggcgaggagggttgatggaaaggcacaggtcgttcaggcacagggtgatgtgcttgaagttgtaccgctcgggacttccaaaggaaacggggtaaaaattctgttggaatcactttgtgctagtccagatgaggtcatggcactaggcgatggagaaaacgataaagagatgctccaacttgccggccttggtgtcgccctctgcaacggctgtgaggtgacaaaggtggtagccgacgtcatcggcgcgagcaacgacgaaagcggcgtggcacaggccatttacaaatacctctagaaaatgattccacctagctggcttagcatttctactgtggtgtggtagggcctaatatatcttgcttgcagcatccatttgcaagcgtaccatatttaaacttcaataattgtacgtggaagttggaagtactattcgctggtggattaatatcatatttgctgcttacagctaagatatcccattttaaaaaaaaaacccaaaaaataaaaaaaacac

SEQ ID NO: 389594 - DNA, 503 bp, Oryza sativa
ccacgcgtccgcccgaatccgcagcgcgaatttcaaagcagcctcccccccaacctccgatctcccgctccctcgcgtctctctctctctctctcgcgcgcgcgcgcgccatctagggttagggtttcgagaggatcccgctgcttgcgagtcccgaccatgagggtgcacccggcgccgcggaagcgcaccatcgccgtgcagcggcggtgcggggtggccgcggcggcggcggggatggccggcgggaagaagctgaggcggctcccgcacatcttcgccaaggtgctcgagctcccgttcgccgcggacgccgacgtctccgtggagggagacggccgcggcgctccggttcgtggccgcggcggacgggttcacaccccgtcccgcggcgccagcgcccacgccgtcgagatccacccgggggtcaccaaggttgtcgtgcgggacctctccgccgggctcgacggcgacgacggcgccgtgttcgagctcgatcggtg

SEQ ID NO: 389595 - DNA, 709 bp, Oryza sativa
ccacgcgtgcgggattctgcctgatcttacgattcaaggatctctaacacttaactctacattgaggaccttcccaggatacgttctacttcagttatgctacgaagagaacaagaaagctttttggaattacagtgccttcaagcgtccttggaattcaccccatgctcttcctgcgagtcctccaaatgtgtatgtggaggcaccctcaaaatgcacctctaccttacaaaggatacagggatgaagattgggaagataatgatggggctttgaacacaatctccatgacgcaccctcgcattcctacagagcattcaaaccgtttggtagtggatgattctgattgccatcctttgcagcctgggatatggtattacaagataattgaggctgatcacattcttttcattgtaaatcgtgaaagagccggagtgcagtttgatttgctgtatgatggcattttccaacggtgcagaaagcacgcatttaggaggagcccccctactgtaccaaatgaatcgagtcaaagtcaatagcagactacaccaaaaatgaaatctatctagaaagtagaatggaaggaaaaaaaggaatcacgacggtttttctgcttctctttcgcccccggcaaccatgtagatgtaaacaacattgtaaactgtaaattacattattcatttgactatgtgaggagcattgcatacat

SEQ ID NO: 389596 - DNA, 497 bp, Oryza sativa
ggtcgacccacgcgtccgcccacgcgtccgggcgagaagccggtgctcggggaggagcacacgatcgcgcaggcgctcatgtcgctggactgctggctcatgttcgcgtcgttcctgatgggcgtcggcacggggctcgccgtgatgaacaacctggggcagatgggcgtcgccatgggctactccgacgtctccctcttcgtctccatgcccagcatctggggattcttcggccgcatcgcctccgggaccatctccgagcacttcatcaagacaagagcaattccacgccccttgtggaatgcagcttcgcaaatcctgatggccgtgggctatgttgtgatggcagttggtatgccaggctccctcttcgtcggctccgttgtggttggcatctgctacggtgtccgcctggcggtcaccgtgccaacagcatctgaactgttcggtctcaagtactacggcctcatctacaacatcctcattctcaacttacc

SEQ ID NO: 389597 - DNA, 428 bp, Oryza sativa
  unsure (1)..(428): unsure at all n locations
ccacgcgtccgcccacgcgtccgctcaaactgagacatgtgagctacttatagttgatcgttcagtagaccagattgcaccaatcattcatgaatggacatatgacgcgatgtgccatgatcttctatgtatggatggcaacaagtatgtccatgaggttccgagtaaaaatggttcatcaactgaaaagaaggatgtcctattggaggatcatgatccaatatgggttgagctccggcatgcccacatagcagatgcaagcgaaagactgcatgacatgatgagcaattttgtgtccaagaatatagctgctcaactgcagcaagcaagaactgggggagagatatccaatagaganttgcaaaaaatggttcaagctcttccacagtacagcgatcaaattgagaagctttctcttcatgttgaga

SEQ ID NO: 389598 - DNA, 605 bp, Oryza sativa
ccacgcgtccgcattccgtcagtctgcatcccggcgcttccattgaacaccagatttctggattaaagagttgcgaaccggagttccttatatccacgccagagaggctgcttgaactaatagctttaaaggcgattgacatatcaggcgtatcgatgctggtgattgatggtctgaagtgtttcacggaccttaatgtcagcgacaagctttgttctattagggatgccatattgagcaaccctcaaataactatattcagtgacccgtctgaccgaagggtagctgcactggcaacaaaactagtcggtggaaaaaagatcacaaggctttgtacgaatgattcagttacttctagaggtgcattcataacacaaaagatacacatatgcccatcaaaggaccaaaaggcaccgaaggtgaaggaaattcttgaacaaattctaaatgatcatgctagaaagactgcaaaggtcctactggtaaccgcaagtgatcatgaagcacagcatctgtcatcattctttgaattgcaaaattgtaccgtgaccaatgactcgcatggcaactcttttaccatatgcagcagtgttgggctgattaat

SEQ ID NO: 389599 - DNA, 1189 bp, Oryza sativa
ccacgcgtccgcatggatcaaaatcccataccccttccaatggggtacaccaatcttcactgcaggtcattcatttggaatgatgggtgctgtacttgtttctgcttttgagtccactggtgcacactttgcaactgcacgtctagctggtgcgacaccacctccagctagtgtccttagtaggagtgttggtttgcagggcattggaatgttcctagaaggtatctttggcgctccagctggttcatctgtatcagttgaaaacattgggcttcttggactaacaaaagttggaagcaggagagtgatccagatatcaactggatttatgattttcttctccatatttgggaagtttggtgctttctttgcatctattccattgccaatcttcgcagcaattttctgtatcttatttggtattgttgctgcggtgggagtctcgtacatgcaatttgtaaacaaaaattcgatgaggaacatatacatcattggactttcgctgttcctaggcatctcggttcctcaatacttccatgagtatactgcttctgctagcactggacctgcccgaacaaatgctggatggttcaatgacatcataaacacagtcttcgcctctggcccgacagtgtcactgattgtcgcatcgatcctggacaacacactggagtttagaggctacgaaaacgaccgggggcttccatggttcatgccgttcctgcaccgtcggaaaggttactcagatcctagaaacgacgagttctacagcttcccgatcagggtgcatgacgtcatcccaagccgattcctctgacgggcgagggtagcgccccgtacctgcgcttccgcgcatgtaaatctctttgttcttgttagcccttccttactcctgtgacatgtagcaattggcaccgccaagattaaaaagtctcaacttagtggggatatggtacaaatggttaggacttttggttttcttttctttttcctcccctttgggccaaccatttggttaattacatgatggtgtagagttggttaaatgattttgggatggatctttaaagaatatcagccaccccaatttgttgattgcccccccagtgatgtagatgtgcttccaggacatgcattgatttcgtcataactctgtaatcacaccatcttttcactgcatttgattgag

SEQ ID NO: 389600 - DNA, 673 bp, Oryza sativa
  unsure (1)..(673): unsure at all n locations
aattgggttacccngccccccccttcgaagntcgacccaacgcctccccccaaaacacaacagcagctagctagctgcagatccagcactagtgacattgagcctttcttcttgctcttcctttgcctagctagctagattctcttcttctccgttcgttacggatggttaagctgaggatccatgggaagaacagggccggaggaggaggaggaggagggctcagcaggatgctgagggagcagaaggccaggctctacatcatcaggcgatgcgtcgtcatgctcctctgctatcatgactgatctgaatgatgatggtctgaatctgctgctgttcatcgtcctggcgatgcatggtttctgaactgctactactgctctttggttctgttcatctgagttttcggttctaggaatattgtaggcctgacaaattctttggtgtatataggatagttttgggatagatctactgacggttttgatcatcttcttcttctctctttttttttgtgagtttgtggtactcctaagtcctacaatggcaaggatgtacgtgtatcttggtgtccggcaacgttcttggatcttgtcccgtgttcttctgttctcaatcagaaatgcaaaatgagaaaaaaaaatctgtctactggtaaaaaaaaaaaaaaaaa

SEQ ID NO: 389601 - DNA, 1179 bp, Oryza sativa
gttaggggcttgatgcttgacacttacgacttcaataatgatgtctggctgtgccactcatttcaagggaaatgctttaacttcacagcctttcaacctgccatcaatgtgttgaaagaaatccggacgttccttgacggtaacccttcagaagtaatcacaattttcttggaagattatactgcttctgggtctctgccaaaagtattcaatgcttctggactcatgaagtattggttcccagtggctaaaatgcccaagagcggtggcgactggcctctactcaaggacatgatcagccagaacgagcgcctgctagtcttcacatcaaagaaatcaaaagaagcaagcgaggggatcgcttacgagtggagttacgtcgtggaaaaccaatatggaaatgaagggatggtagagggtaaatgcccgaatcgtgcagagtctccagccatggattccaaaagccagtctcttgtcctgatgaacttcttcacaacagacccaagtcaaacaggggtttgcgcaaacaactcagcgccacttgttagcatgctgaaaacctgccatgatctctcgggcaatcggtggcccaattacatcgctgttgatttctacatgaggagcgatggtggaggagctcccttagctgctgacatcgcaaatggtcatctagtatgtgggtgtcacaacatcgcatactgcaaggcgaattcgacattcgggacatgtgtgatacctccaccttcaccgccgccgtcgcctcggaaggcacccagcggcggcaagggcacaagtgcaggcggcagctccagttccagcggcgcaatggctcgggttgtactaccaaagctgagcttcttcttcggagtggcacttctgatcctggtcatactctcttattaagagcagacccattcacttgagcttgtgctgtctttgtgctctgctggtacaagcacatactgtactgccattctgaggcaaaattttctgctctttttttagccacctgttccattggtttgtaacttctttttcttttttgttaatgagagctgtagatgccagattagctggagaaattgttcatgtgccgagctgtagatcattccttttatttgaggcaatatttttctgcatatcaagtgatcttattgctcataaaatactgcaatcgca

SEQ ID NO: 389602 - DNA, 448 bp, Oryza sativa
ccacgcgtccgcccacgcgtccgcccccgcgtcccacacgctgcaccgcgcgcagcctcgagctcgaggagagggagatttggccccccgatggcgaggccgagggcgccgctgctgcgccggatgctgctgctgtccgcggtggcggcctcctgctcctactacctcctcgtcctccacgcgcaggcctccgtgccgccgcgctacgacgggttcgcctacggggacgccgccaccgccgcctggaaggacaccatcctcgtcgaggccttcctcgacccgctcttgccccgacagccgcgacgcctgggcgcccctcaggctcgccgtcgaccgctacgcccccagggtctccctcatcgtccaccccttccccctcccgtaccacaccaattcattccttgcctgccgtgcactttacatagctaacaaattgaactcatcatcg

SEQ ID NO: 389603 - DNA, 902 bp, Oryza sativa
ccacgcgtccgcccacgcgtccgcgactaccagccaaatgggcaggcaccgatctcaagctccgacatacagatcacaccggacggttcagggatcgtgtactccaagccccgccggctgcgggccgacgagatccctcagatcgtcgacgacttcaggcgagccgcgcggaacgccatcgaggccgggttcgacggcgtggagatccacggcgcgcacggctacctcctggagcagttcatgaaggacagccgccaacgaccgcagccgacgagtacggtggcagcctcgagaaccggtgccgcttcgttgtcgaggtgatcgacgccgatcgtcgccgaggttggagcgcaccgtgtggggatcaggctgtcaccgttcatcgactataatggactgcgtcgactccgacccggtggctctcggctcgtacatggtgcagcagctcaacaagcacccggggtttctctactgccacatggtggagccaagaatggccatcgtggaaggacgcaggaagatcacccatggcctcctgccattccggaagctgttcaatggcactttcatcgctgccggaggatacgatcgggaggaaggaaacaaggtgatagccgatggatatgctgacctcgtcgcctacgggaggcacttcttggccaatccggacttgcccaagaggttcgcgatcaacgcaccattgaacaagtataataggtccaccttttacatacaggatcctgttgttggctacacggactatcctttccttgatgagaaagacgagggcgctgctacttatgcttaatcctcaattaaattgtcaaattgaaatgttcggtttagtaatgtgcactatatttgtcatacactaaaaaaaaaagagggggtccgctaaccgt

SEQ ID NO: 389604 - DNA, 762 bp, Oryza sativa
cgggcgcgcgcgtgctcggactcgtgggtctagaaccggtgccgcttctccgtcgaggtgatcgacgccgtcggcgccgaggtgggagctcaccgtgtcggaatcagattattcgccgttcggcgacttcatggactgcttcgactcccgacccgggggctctcggctcatacatggtgcagcaactcaacaagcacccaggggttctctactgccacatgggggagccaagaatggccataatcgaaggacgaaggaagatcgcccatggcctcctaccattcaggaagcagttcaatggcactttcatcgctgctggcgggtatgaccgggaggaagggaacaaggtggtggctgatggctatgccgatctcgtcggcctatgggaggctcttcttggctaaccctgacttggccgaggaggtttgagcttgacgcaccattgaacaggtatgacaggtctaccttttatacacaggatcccgttgttggctatacagattacccttttcttgaggagattgatgaggagtcaagaactacttatgcttaattgtcacctaaataatccaattttagcctattatttggattaataatgtaacacttatcatgtgatacggacaagcatgaatacatttttttgttgtaagtttgtagctgttgattcgagattaatgagctaatgtaatattgatattgttcgagaaagatgtattcgaattttttttgaaaataatccgattttaatggacccaaaaa

SEQ ID NO: 389605 - DNA, 641 bp, Oryza sativa
gtttccgtctccccgccggccgcctccacccgcaccgcgcggtgcccccctcatcaccaagaacggaagatgacagaagctgctgagtggaatgatgagaacactaaaattatctgtgaactttatgctgaacaagttcgggctggaaatcgaccaagtactcatctcaacagcattggatacagccaagttgcattgaagtttcagcagagaactcatttgctctacaccaggagacaacttaaaaacaaatgggatagacttaggaatgagtacaccatctggaacaaattgcttataagagggtcaggtttaggttggcacagtacaaaaggaacaattgcagctgacgaaaactggtgggacaagacaaatacagagctgccaggtggcaaaaaaattgcgagagctggaatgaaaaatttggatcattcgagagggatgtctgatgatattgccagagacggtgcggatcatacaccggtgccagcagcatgttcgacatctactatggaaagtgctgcaaatgtagctaatcttgactgactagacaatgacatggcagataatgatgacactgagcttgaaaaggagtctacgttgaatcggaacaagaaaagacctgggcatgctaataatgc

SEQ ID NO: 389606 - DNA, 625 bp, Oryza sativa
tttgtttcgtgggttgacacaaggaggttgcacgagagaatgcaggctgttcaaaaggaaagggaagagaaacttgcagagacactgaaaaaccgactgcacatttacgttcaaggaaataaagaggaatttgtccagcttgctcaagctgaggtgaccagacttagcaatgcagcatatggcactgttatgttaaacactatcggctatgtatattcgagacaagctgcaaaagaacttgggaagaaagcaatattcttgggtgttccatttgtagctgagtggttcagagacaaaggccatttcatcaaatcccaagtaacagctgcagcaggtgcaatagctttgatgcagttgcaagaagacttgaagaagtatcttagtgctgaaggccattacacagaggaggaactagaaatgttcatgcaaaaccacaaaaaggttatggttgattccttgtggaagcttaacgttgctgacatagaagccaccctatcacgagtctgtcaaatggtgcttcaagatggaagcgtcaggagggaggaactgcgtgctcgtgctaaaggactgaaaacattaagcaaaattttccagcgggttaagctcaacaatgatgagggggaag

SEQ ID NO: 389607 - DNA, 528 bp, Oryza sativa
ccacgcgtccgcccacgcgtccgcagaaatccttagccgcaggaggcatatcagccctggtcctgtacttcgtccacactcaactcccagtgagacctgtctttgcatcatctattggtttaggtatatctgctgccctcttgtcggtcatgggatctcgcttcaagaagtccgggaagatattcccagctggtgtcgtttccctcgtctccttggtcatggtcggtggttacatccatgggatcttgcgcagcactcatgcatgacaaactgacagtagccgtggcaatcactatatgcaactccctacctaagcctcatgtttcccttccgtttttgtgttttagaatctgcagcaactgtgtgacattctccttcttgatcatgtacctgtgttgtgggcgtagttcactccttttctggtacaatatggcctatggttaagcatgtgagatgctagatggaaaaaataaaaggtttggtgaatctgtcttgaattttgattgaacatcggtactccttggcagc

SEQ ID NO: 389608 - DNA, 839 bp, Oryza sativa
gatcaacatatggagtggataaactctgttaagcctgctgttgatgcatgcatagttggtaatttgtctgatgatggtgagtcaactatcaataacagtcttgatgcaaggaaagaagtccgtgcagcgctcggtgctcttcttaaggatgatggaattctggtcattccaactgttctgggatgccccccaaaactaaatgccagggaactttcatctcaggactacaatgttcagacatcatgtcttacatctttagctagcatgtcagggtgttgccaggtgacggttcctctgggtacacatgataagtgtccagtttcagtttctttgattgcaaggcatggtggtgatcgatttttattggacaccattcaaacaatttatgctaccatccaagagcaagttgacgctctagcaaagtctaatgtctcgagtaaacaggcgatgagtgaagaagctgctgaggctgctaaagagaaaggtaacattgcatttaaggaggaaccaatggctaaaggcaattaaatttctatactgaagcaatcaaatttaaataataaagtggctacatactacagcaacagagctgctgcttttctagagctagctagttaccgccaagctgaggcagattgcacaagtgccatcgatattgatccaaagattgtaaaagcttatttgaggagaggcactgcaagggagatgctgggttactacaaggaggctgttgatgatttcaaccacgcccttgttctagaacccatgaacaagacagctggtgtggccatcaataggttaaagaagctatttccgtaaatactgagctgttggatttt

SEQ ID NO: 389609 - DNA, 631 bp, Oryza sativa
gaacttattgtaacatatgagggatcaaggcttgcaattagtgacctaaggctgcttatggatactttccaccgcgaagactttactggtacatggaggagactattctcaagagtcaaaaaacacatcatctggagtgtcttgaagtcgatggctggaatgcaggttaagaagtttaaggcccacaatcgggaaacacatgatggtgctgttcctgatcatgatctgaatttaagtgacagtgacggtgaccatcacggaaagcccgatcagtttcctgtgtcatggctgaagaggccgggtgaaggcgcaggggatggatttgtcacatcaattagagggctctttaattcacagcgccgtaaagcaaaggcgtttgtgctacggactgtgcggggagatggagacaatgaatgccatgacgaatggagtgacagcgatggcgaattcccttttgctagacagcttacaatcactaagaagctcttacggagacatacaagaaagctccgtcccagggggcagaagaacacaggcctgacattgcaagattcactgccatctagtccacgcgaaacaacgccatatcaaagcgactcggactcatcatcagagtcaccttacgaggatt

SEQ ID NO: 389610 - DNA, 521 bp, Oryza sativa
  unsure (1)..(521): unsure at all n locations
nttctnacggacttagggaacccttcncgaaattcggncaggttattgaagcntagagtaaatcactgatagaatatctggatactcctcgaggatttggcctttgtcaaatatgcaaccggttgaagaaacccggtgaggggcataaaaggcatggatgggaaagttccctcgatggttgggtgatatttgccgagtacgccaagcagagagaagcacagcagccggcccaaccagcagcatcaactagttaccaatactccaaccaatgatagttgtctctacgatcaggattaccttctattggacaatattgttcgctattttaccatgtgaaaactgaaaatcactctccttgatatttcgtcagggagaaattttagtgtgcacggcatgaacatctccttagtaacttacggtgccgttttgtctgctactgtctgctgggtgactgtactctgtgagcttatgtaactatacaactgccttcatttttgagactacagtattttatgagctgc

SEQ ID NO: 389611 - DNA, 851 bp, Oryza sativa
aactccaaggcaccgtcgacacgaacttcacaagaactccaccgagaggagaggagaggagaggaaacgacgacacctcctccggcgcggcgagacgaatctacgcgtaccgagtaccgacgcggcgaccgcctcgctccgtccctatcctcgccgctccggctgattccgtcgcggagcgcgcggccggcgaggagtcctgggagggcgaccgacgcatggcgcttccttccatctcggttcgaatcgaatcgaattgaagcctgccagtgaaaatgagtgacaatctgatggacaaggttagcgcctttgggagcgtctgaagatcactgggtcagaggttagcaagaagatgacggctggcatgtcctccatgagcttcaagatgaaggagatcttccaggggcagactcccgcggacaagattgtggaggaggccacctcagagaatttggacgggcctgattggtcggcaaacctggaaatctgtgacttgatcaacacggagaaagttaacagtgtcgagctgatccgtgggatcaagaagcggatcatgctgaaggatgctagggtccagtacctctccttggttcttcttgagaccattgtgaagaactgtgagaaggccttctcggaggttgctgctgagaagggttcttgatgagatggtcaggttgattgatgatcctcagacagtggtaaataacaggaacaaagcccttatgcttattgaggcatggggagagtctggtgatgagcttcggtacttgcctgtctatgaggaaacctacaagagcctgaaatcaaagaggagtgcggttccctgggcgtgacaatgagagcttggcccc

SEQ ID NO: 389612 - DNA, 496 bp, Oryza sativa
  unsure (1)..(496): unsure at all n locations
ccgcttcaagattgttgttnatgggtgagancgaagttgacttgatggtncaaactcggcacatgcgagacgtcatcattctggtnattagaggtcttnctcaaaagttcaacagcacatctctcaactcactcctccaagatagaagcatgtagaccgagttgccaacctgatataactgacagtatgaaaccgattagaaaaggttgttcagtatcgattcaagttgtttagtttggaggatgtgtaatatttataggatttggagcgtggcagcttttgtgtatgggtgtggttgagtgtgttaaagttttcctttttctcaaatcaggagcgggttgctcttctgaccctggttttccatactcatgaaatgtacataggaaagggagggttggtgatatggtgttgcattaatatacaagttgtgtatgcaattctcatattaggctatatgattgattgggaagattttctgttaaaaaaaaaaaaaaaa

SEQ ID NO: 389613 - DNA, 1555 bp, Oryza sativa
tgtttcttcttctgccattccatccatccaccgccgcctccgctctctcttcttcttcttcctaccctttgcctagttgcattcggagaggagaggactgattgattgattgatcgatcgatggccatcgaccacgagtcgccgttcaaggagctccgcctcaagaacaggaggatcatgggaggaggagggcctgagccggaggaggaggaggcggtggcgcacggagagcagtggccgcggtggctgagcccgctgctctcggccagcttcttctcgcagtgcaaggtgcacgccgactcgcaccggagcggcgagtgcaacatgttctgcctcgactgcgccgccgacgccgacgccgccgccgccgcgctctgctccctctgcctcgcccacaaccaccgcgaccaccacaccatccagatccggcggtcgtcgtaccacgacgtgatcagggtgtcggacatccagaggttcatggacatcggcggggtgcagacgtacgtcatcaacagcgcccgcgtggtgttcctcaacgagcgcccccagcacaaggccggcaagggcgccgtcgccaacatctgcgaggtctgcagccgcagcctcctcgacaacttccgcttctgctccctcggctgcaaggtcgtcggctgctccccccacgccgccaccgccgccgccaccgccaccgccaccgccgccaggaggaagagactacgccacgcccacgccatggcctccacctccgactccgacaactccacctcccctgccagggggagcttcacgccgtccaccccgccgccgccgcccaccctgccgcccaagcgccgcaagggcattccacaccgcgcgccattcggcagcctcatcgtcgagtactagccattgccaaccaacagcaacttcacctgcaggaatccagcgcgtgcgcaattgggaatcgcattgcaaagcggccgccacctcgtcggcctttgcccattgccattaccattgttgccttttggtggtgcttctcgaggtggatgccattacctttgcacaaaggaaaggaggaagatgaagaaaaggaagggtacaaaagcactagctttttccattgctaattgctccattaccattactaggaacacattaaaaatacagacaggatatgtatacatctttaattagtgaccaccccctccctctctctcttgtgttcaaccttctatatagtcttttttttttcattttgagatgtttcaaattttagatgtctttgagcagacttgtagctaatactcctagtggattagcagtgatgataataagtagctggtggtgcttaagttttgtgatggctgctactaactggtggtaccaggattagtgctactttgttcagctcatcttgtaatatggatgctagaagagggcatgaatgatccttgcttattactcccggttataataatttaatttattctctattacactttcttttctcccttcatttttctcatactcaactccataatctacactctctcattaatacccttctacttat

SEQ ID NO: 389614 - DNA, 885 bp, Oryza sativa
ccacgcgtccgaaccagggatttggttaaaaattttcatgtggttcttgcggggctaacaaacagctactctcagggcattacaactttggaagaataccagatccaaagatatgagggagcatcaacgttgtatggtccccacaccttgagtgcctatatccaagaatttcagaaacttgctatggccatgattgcaaacaaagaggtcccaacaaatttccaacctcctgatatgttggacaagcaaattggactacttcctggtgttgtttttgactcaactcctcttggtgtcaagtttggggatgtcaactcggatgttcctggtaactcaacattcaacaagggtagtactgtgaatgctacattttattcagcatgcccaaggaatgaccttcttacggatggtacctttgcactcgtcgagaagctagatggtaacaataattgggttcctgtctacgatgatgatgattggtcattgcgtttcaagtggtcaaggcccgcaagattgagttcaagaagttttgcaactctagagtggacagttcctgaagacgctgctgctggtgtttacagattgaggcattttggtgcctccaaaccaatgtttggttcggtcaggcattttacaggaacctctcgtgctttcgcggtgcgttagttgatacgccttgagctttttatggcttatgaaggtttacagcaccaacttcatacatggaaaccctgccattatatccatagggcttatctgcttcttatttacttgtatttgagggtaataacactgttcaatcttatggaagtgtgaaactgctgtcccagtgcatgaactaagaatgggaaatatacagaatgtacataggtgctctttttatgt

SEQ ID NO: 389615 - DNA, 955 bp, Oryza sativa
ggttaatatactcagaggaggtccattcagtgttctcaacatttgctcacagcctagtccatgcattccaaacattcgaggaggtttgggaagatctatgcactgatataagagacggtgttctctcaaagaaagttacagcaccatcaattcgtgaggctgtttcaaaaatcctgaagcccaatcctgaacttgctgactcaatatacaagaagtgtattggtttgagcaattggtatggagtgatcccagcactgtggccaaatgcaaagtatgtgtatggtatcatgacaggatccatggagccatatctgaaaaaattaaggcattacgcagggaacttgccacttataagtgctgactatggcgcatcggaaggatgggttggctctaacatagaccctactgtgccaccagagcaggtgacatatgctgttctcccacaagttggttattttgagttcattcctttggagaaaccaataggggaggagacagaaaactccgcctccattcattacatagaatcagatccagttggcttgactgaagttgaggtcggcaaaatctatgaagttgtaataactaactttgcaggtctatatcggtacaggctaggagatgtcgtgaagatagcacgcttccacaactccacacctgagctccaattcatctgtcgcagaagcctagtgctgagcatcaacatcgacaagaacaccgagaaagacctccagttggctgttgaggaggcatcaaagttcctggaaggagagaagctcgaagtcatggatttcacgagcttcgtggaacgatcaagcgatccagggcgctacgtgatcttctgggagctgagtggcgatgcgagtgatgaggtcttgagcagctgcgcaaatgccttggatctagccttcattgacgcaggctacacgggctcgaggaagatcaagacaatcgg

SEQ ID NO: 389616 - DNA, 609 bp, Oryza sativa
cgcaggtccggcccacgcgtacgcggacgcgtgggcggacgcgtgggcggacgcgtgggcggacgcgtgggggcgatgcgagtgatgaggtcttgagcagctgcgcaaatgccttggatctagccttcattgacgcaggctacacgggctcgaggaagatcaagacgatcggcccccttgagctccggatcctcagaaagggaaccttcaaggagatcctagatcatttcctgagccttggtggtgcggtgagccagttcaagacaccaaggtttgtgaacccatcaaacagcatggtgttgcagatactgagtagaaatgtcacccaaagttatttcagtactgcctatggattttgatacaaagaaacatattagatgctagcagctgcatgtaattacctttttacctcttgtttttcagctttactgtagtctccaccggaagaaaacgtttgggttagtctcttgaataatctattttcttatcctgtttgtgactatctagaatctatgtaaatggcccagctctagtgaaagttatggttgatgttatcaggaaagaaaatgtggtgttttccgttaattataaactatccttctttttacc

SEQ ID NO: 389617 - DNA, 623 bp, Oryza sativa
agcagagattcttttccctggagtggcctgcttccttgttgcagtcattcttggctctgctgtacatgcctccaatgcagctgataatgaagaaaaactaaatggctccacaaatatctataaacttggggaaaatggaagtgtggaaccaaacaaagaagtcccggaaaaagatgctcccaaggacttggagaatggagcttctgcaaccaaatatgttgccaaagctgaagcaggaactgcggaatacttgattgagctcgaagaacggcgttcgatcaaggtgttcggatcaagcaccttcatagggcttgggatagtgttcttctcaggagtctgcttctcactcttctccccggcattcaacctcgccaccaatgaccaatggcacaccctgaaacaaggtgtaccacacctggtggtgtacaccgccttcttctacttctcgatctcgtgcttcgtcatcggcatcggcctgaacatcctgttcctctaccgtccaatggccggtgtgccgaaatcatccttcaaggcttacctgaatgactgggaaggcaggcagtgggctctcctggctggcttcctatgtggctttggcaatgggtttcagttcatgggtggct

SEQ ID NO: 389618 - DNA, 989 bp, Oryza sativa
ccacgcgtccgcccacgcgtccgtgcacgcgtacggagcacaccgtctcatacggtagcttcagctccacagccgacctgtgccttcagaggctggccgacagcaccttcaatgtcacctagctgtgcgacggccacacctgcagctctctcggcgaccgcggcttcgtgtatctcgtcggtgcgcatgaggtcgagggaaggagcgggccgattgtgttcctagatagggctaaggaagactgcatgcagcgttttgggtccagaatcgacgtggaggggcaacacccgctcgccgacgatgcagatgacgatggacttcctcttggaggtccgatttagcatcgcctactatcttgcccggggattcggtccgtggctgtaggatcacatgctgtatggtattgatcatccagaggaaattagcgtgctctccaaagtgaaagcacagcctcacggaggtcatagggattatgaccgacaacattgagaagatattggaacgtggagagaagattgagcttttggtcggcaagactgaaaccttacaatcacaggctgacagcttccacaggcatggaagagagctcaggcgtaagatgtggcttcagaacctgaggtttaagttgatggtgggtggtgctgttgcggcgttgattctcttcctctggctgattatttgcgggggcttcaagtgctagaacattgaaagcctttttctttgttttgcattcgatgtgtttaccgtgtcgtgtgcatatataacgaccagcaaatcctgctttcgatatgcttcgtgcagagttaaatctccttatggacctttattccttgtagcctgttctcatgtttcatagtattacaataggggggctctggaaatggaatacttgtgtaaacaaaccttgtgaaaggagacaacttagctatctgtattatgtacattctgaaatgctaatagcttatttcaatctcaaaaaaaaaaaaaaa

SEQ ID NO: 389619 - DNA, 625 bp, Oryza sativa
cgattcaaccaaccaccacctcatctccgattccccctcttcttcttcttcttcttcctctgcccctcggggggggtttgggatttcttgactggacgacctcgtgcgatttcgggaggcaggagccatgaacggcaataagcagtccctgatatacagcttcgtggccaagggctccgtcgtgctggccgagcacaccgccttctccggcaacttcagcaccatcgccgtccagtgcctccagaagcttccccccaacacctccaagtccacctactcctgcgatggccacaccttcaacttcctcgtcgaccgcggcttcgtgtttctcgtcgttgcggatgaggccgttggaaggagcgtgccgtttgtgttcctagatagggttaaggaagacttcatgcagcggtatggctccagtatcgacgaggagggtcaacacccgctcgccgatgatgcagatgatgatgacttcctcttggaggaccgatttagcatcgcctacaatcttgaccgggaattcggaccgaggctgaaggatcacatgctgtattgtattaatcatccagaggaaattagcaagtctccaaagtgaaagcacacctcacggagtcaaagggattat

SEQ ID NO: 389620 - DNA, 582 bp, Oryza sativa
  unsure (1)..(582): unsure at all n locations
cggacgtgncagngacgctatgggcttcaccttcagcgcgagcgcgagcgagagaggaaaagggaagccacgatctctgcccttctagaagggtttgggatttcttgactggacgacctcgtgcgatttcgggaggcaggagccatgaacggcaataagcagtccctgatatacagcttcgtggccaagggctccgtcgtgctggccgagcacaccgccttctccggcaacttcagcaccatcgccgtccagtgcctccagaagcttccccccaacacctacaagtccacctactcctgcgatggccacaccttcaacttcctcgtcgaccgcggcttcgtgtttctcgtcgttgcggatgaggccgctggaaggagcgtgccgtttgtgttcctagatagggttaaggaagacttcatgcagcggtatggctccagtatcgacgaggagggtcaacacccgctcgccgatgatgcagatgatgatgacttcctcttggaggaccgatttagcatcgcctacaatcttgacccggaattcggaccgaggctgaaggatcacatgctgcattgtattaatcat

SEQ ID NO: 389621 - DNA, 578 bp, Oryza sativa
ccacgcgtccgaatactacaacgggctcaattgcatcgacaagcaacaccacacgtcggcccccgcgtccgtcaaagtggaaagacccaatggtagctccttcaacgtgacaaccgttgcctactcatctgacagcattatccgctgcatgagcaaccctgcaacaaatgattggataccatcctcagagacggttattccagtttcaaacaagcctagcaggagtgactcctgagtcctgaccgggttcccttctgctgtatgaatctttttataaatcatctgaagagaataaagagcacatagagcagccacttctgtatatcggaggaactcagagaaaggtagagaaatgaaagcgctgcaactgcaaggtttataaggcatgaatctgtcctgctcttcatcgtgttttatgtgaacttgtcgtatgcaacttcactgttcatactcaaaactcagtatcatgaatgattggtgtaaccgtgtaagtggatagagtaccagttctgtcagttttttctctttgctgtaaggatattttccgtgtgtctatggaaaatgggtcattgccagat

SEQ ID NO: 389622 - DNA, 724 bp, Oryza sativa
  unsure (1)..(724): unsure at all n locations
atctgattcatgtcaagctacaaatgaagaagaaatatttgaagttcaggacaaaggctcacttttcactcttggttggattcatacacatccaacacagacctgcttcctatcttccattgatcttcataatcactattcataccaggtcatgcttcctgaagcaattgcaatagttatggcacctactgatacaacaagaaagcatggtatatttcatctgacggatccaggtggtatggggatcatgatgatacatgattgtcaagagagtggatttcatcctcatgaggagcctctcgacggtacctctatctatgagcattgctcccatgtgtacatgaacccaaacgtgaaatttgatatggtggatctccgtgaactgtgaagcttgattccgtttggggaagtttgttcacttttgacctttttctgacaaatacatgccgctgagcttatttatttgctacgttggaaggcctgttaatttgatgtaagcgtttgtaaatagctaggccattcaatttccgtgcatagggatcttgttttggaccaatgctagttctggttatggagagtggcatcncgaatgtaatatcatacatttaantggccctttttataccctacagcagaataagtatcctacagcnnnnnnnnnnnnnnnnnnnnnnnnnnnnnnnnnnnnnnnnnnnnnnnnnnnnnnnnnnnnnnnnnnnnnnnn

SEQ ID NO: 389623 - DNA, 682 bp, Oryza sativa
  unsure (1)..(682): unsure at all n locations
ccacgcgtccgggctggcgatcgaggagctctccgccgtcgacgtcgagcgccgcggcgggaagccgccgccgccgttgccgactcctcccacgctgaccttcctcgcgctctctcacctcctcctccaggtgctcgataagatcggtccgaccatggctgtgctgaggctcgacgtccaacgaaacatcgagaggctgcaggagttgtacttgttggacccatccaaatactataatctagaggagatactggagaaggaggtagatgagggcactgcaaggaaggttgatagctgcgcgagagctattctttggcttactagatccatggatttcactattgcactattacagagattggaggaggattctgatcagaagtgttttgcacagcttgtacgaatctgcatacatgggcactctaaagccatggcatggggggatctcttcagcagcctacaagatcgcaatgaaactcattcctgacaggaagatgttcatcaacctgctcgttggcaaatgccaagattgtgctgctctgaaggaggagattcgaaagctcgcaaagttgcttaagcccttccttgacgatatccatgccatgatggcgaatttcagattgtaccggctggaaacaacttgatggcaagcctataaattgtcgntgtaatatgtgaatgt

SEQ ID NO: 389624 - DNA, 502 bp, Oryza sativa
ccacgcgtccgaacaaattcttgcctcctgagaagcaaatcgtgactgcaaatcctgacatcaacgttgtccgccgtcgcgtcggcgacgactttcttgttttagcatgtgacggcatttgggactgcatgtcaagccaacagctggtggatttcatccacgagcatatacagaaggagagcagtctttctgcagtgtgcgaaagagtgctcgacagatgcctagctccatcaacaattggtggagagggatgtgacaacatgaccatggttctggtgcagttcaaaaagcctattactcagaataaaaaagccgacgtaggggagcaatctgtgaaaggtgtggaagaggctgagatcaatgctgctgaggagaatggttcttgacgccgatgattatgcagacatttgctttcataagcaggccgagtggagcagcagtcactgtgtgtgtgtgtgtgtgtgtgtgtttatatatatatatatatatatatatatatata

SEQ ID NO: 389625 - DNA, 500 bp, Oryza sativa
  unsure (1)..(500): unsure at all n locations
ccacgcgtccgccacgcgtccgtgacctcgtcggcaagatagtaaaatcggtcgcagaattggaaaagatgtatcatagtcaggatggtgaaaatttctttgttcctgccagcactgctcatgatagtcacagtaaggaggtactaaagagtcaagtgtatgtggagaaatatcttgagaacaacagacagacttttctagattatatttctgctgggtgccaattgaattttatggtagccgtagacttcacagcttcaaatggaaatccacggcttccagattccttgcattatattgatcccactggtcggccaaatgcatatcagagagcaatactggaagtaggagatgtactacagtactatgacccagcttaacggtttccctcatggggctttggtgctagacctattgatgggcctgtttcccactgtttcaacctgaatggtagcacctatcaaccctgaggttgagggaatacaaggngatatgtcagc

SEQ ID NO: 389626 - DNA, 717 bp, Oryza sativa
ccacgcgtccgcccacgcgtccggactagtggtgcatggtgagtgtagacgtacgtgtcaagggaaaagtccattgtactaggaaaactatatattttgttggagtattgactttctaaactgtttttttatcaatctacttttcaaattacttaaaaattcaccctctttagtttacaaacattatttttcccttaataaaaatataatttttatgttgaaattttatagtcatatatagatgacaacgtaacctatatttttcaaaaaagaaaaagaatttgggtagttcgcaattatttttaatatcatgaagtttaggtatttgggtgttttcaatctttgcaaacaatatatagttcaaaactaaaaaaaaaagagttgtgacataaattaagtttgtaattctatcacgcctcaaaatttcaaaaaaaaaaaccatcagctgaactttttaagtagttcaggggaacaaaataagcccgaaaatgttttagaatgttaatactccggttaaatagtttaacttagtaagaaggactttttttacacattgtattattacgtacctgtgtgacatgcatattggttagttgcagcagctagtggctgctccttaccttgtttgtttgtacatacatgttggaccagccgttgtacgttttactgggtaataaatgtgtaatgacatgggattaacaagcatgttaacccgtg

SEQ ID NO: 389627 - DNA, 460 bp, Oryza sativa
  unsure (1)..(460): unsure at all n locations
ccacgcgtccgcccacgcgtccgcccacgcgtccgcggacgcgtgggttcctagatagagaaccaccgtgaggaacggggccgcgctacaaagatcttcgcagacatttagaaggtccgggtcatctggcttggtctgggatgagaggcttatgttagatgggcatagcgagagagatcaagaagatggagccttagagctgagacactcccgtagtgttgggttgattgggctgcagcgtaggcatggcgatggtgcagggcacaccaggtgcaacaacagccaggcgttccatactcgccgggtgcccccagcacaggatcctncttcacccaaagttcccggatgcatcttctgtggaattttaggaaagccgtactttcagagccatctaaacccaagaagttctagccctttgtgctcttctcaactatctgtgcagagctatcagtttcttttt

SEQ ID NO: 389628 - DNA, 628 bp, Oryza sativa
  unsure (1)..(628): unsure at all n locations
ccggtatgatgaggccgtgttttcttatcagagagctcttactgtattcaagactagcaggggggagaatcatgcaacggtggcctctgtttttgtgcggcttgcggatctatacaacaagacagggaagctgagggagtcaaaatcatactgtgaaaatgcccttaaaatttatcagaaacctattccaggaacttcattggaagaaattgctaccggtttaactgatgtttcagccatttatgaaaccatgaatgagcatgagcaagcactcaagttactccagaaggccttaaaaatgtacaacaattctgccggtcaacagagcacaattgctggaattgaggctcagatgggcgtcttgcactatattttggggaactatggagaagcttatgactcattcaagagtgcgattgcaaagctccgcacttgtggtgagaaaaagacgggccttctttggtgttgccctgaacccagatggggttggcatgtgttcaaaggtactcgataaatgaaagctgcaggactgtttgagggagctaggagcttgttctggggcaaggatatgggccttatccatcccaggtacttttgggggttaccancaatcttgctnggacttatg

SEQ ID NO: 389629 - DNA, 1157 bp, Oryza sativa
  unsure (1)..(1157): unsure at all n locations
cggaacntgacagagaacgcgtgggaccgacctttcccccttcttctcccctctcctacctcgccgagatctagccctagggttcgccaacttcaccggcggcgaggagcacgtcaccggcggcgagcacaggcggagggcgaggggagagagagagggaggaggacatggggcagcagtcgctgatctacgcgttcgtggcccgcggcacggtcatcctggccgagtacacggagttcaccggcaacttcaccaccatcgcctcccagtgcctcatgaagctcccggcgagcaacaacaagttcacctacaactgcgacggccacacgttcaactacctcgtggaggacggcttcacatactgtgtcgtagctgttgaatcagtagggcggcagattcccattgcattcttggatagagttaaggatgatttcacaaaaagatatgctggtggaaaagctgctactgctgctgcgaacagcctcaaccgagattttggatcgaaacttaaagaacacatgcagtactgtgtggatcatcctgaagagattagcaagcttgcgaaagtgaaggcacaagtttcagaagtcaaaggagttatgatggaaaatattgagaaggttcttgatcgtggagagaaaattgaactgctcgttgacaagaccgagaatctgcgttcacaggcccaagatttcaggcaggcaggaacacaggtaaggagaaagatgtggctgcaaaacatgaagatcaagctgattgttcttggcataataattgcgctcatccttatcataatcctgtccgtgtgccatggattcaaatgcaagtaggcataaattgactcattcaactgcacttacagtactgcttgcttggggcaaaaagggggggaaattggagaggtgtttggttctttctagtttgtgctctggctggttacggcgcctgagtgtttacgctgtcgtgtctgttgaatgctggttggtgactcggtcagtgggttgtgggttgaagtgtcgtgtatttttggatgctatgtgtgtatagcttggattttaacctccttgttctattattattattatatgatgattagatttcactctaaaaaaaaaaaaaaaggacggccgcaacacaggagccaaccagccgaagga

SEQ ID NO: 389630 - DNA, 539 bp, Oryza sativa
gactagttctagatccccttttcccttctcctccaccccccccccccaaccacctcaccgccgacgacctcatcctcgtcggcgccgtcggattcaccagcgagggaggttgcggcggcggcggagagcgcgagggaggaaagcgggggaggtgaccgccagcgatggggcagcagtcgctgatctacgcgttcgtggcgaggggcacggtggtgctcgccgagtacacggagttcaccggcaacttcaccaccatcgcggcgcagtgcctccagaagctccccgcgagcaacaacaagttcacctacaactgcgacggccacaccttcaactacctcgtcgaggacggattcacatactgtgtagttgctgttgaatcagttgggcgacaaatccccattgctttccttgacagagtcaaggaagatttcaccaaaagatatggtggtgggaaagcagctactgctgcagcaaacagcctcaaccgagaattcggatcaaaacttaaggagcacatgcagtattgtgtggaccaccct

SEQ ID NO: 389631 - DNA, 868 bp, Oryza sativa
  unsure (1)..(868): unsure at all n locations
ttgaatcttaagaaaaaaagagttttaagcatacaaatataagcatcaatctgatctgcattcgacactttggtcactagttgagttgagttgagagttgctgacaaagcaagcggctttccatgtctatcacctccgcttcccgccgcgccggcgccgccgcgctccccatcctccgacgaatcggcggcgcgttccgccgcccttctcgtcggagccggacccggcatcctccccggggtaccacgtcgccggcgggcccagcttcatgcgcggcgcggtgttctgggagcccggccgccctctcaccctcgaggacttccgcatgccgcgccccaaggccggcgagctcctcatcaagaccaaagcttgtggagtttgccactccgatctccatgttctcaagggtgagctcccattctccagcccctgcgttgttgggcatgagatcactggggaggttgttgaccatggtactcacacccctgctgagatcatcaacaggttcccagttggcagtcatgttgtgggtgccttcataatgccctgtgggaattgcttctactgtgttaagggccaagaagatctgtgtgagtctttctttgcatacaaccgtgctaaaggaacgctatacgatggtcaaacccgattattccttcgtagcaatggaaagccagtgtacatgtatagtatgggtgggcttgcagaatattgcggttgtgccagccaacgcactagcagttcttcccaactctttgccatacacagagtcggcgattctaggatgtgccgtgttcactgcatacggcgccctgaggcatgctgctgaaatgcgtcttgggattcagtagctgtgattngagtcgga

SEQ ID NO: 389632 - DNA, 919 bp, Oryza sativa
  unsure (1)..(919): unsure at all n locations
gccgaccacacccgcccgtagctctcctctagccggtcacgagacctcctctcccaagatctcacctttccaccccctccgcccccgcctcgatccggcaatggcttcccccggaccggccaccgccggcgagctcctccgcatcgaccccgtcgaactccgcttccccttcgagttgaagaagcagatctcgtgctcgatgcagctatcgaatctcagcgacgactacatcgccttcaaggtgaaaactacaagcccaaagaagtattcggtgcggcctaacacaggggttgtcttgccacggtctacctgcgatgttgttgtgacaatgcaagcacagcgggaagccccgcctgacatgcagtgcaaagataagttcctagtccagagcgtcattgcaccttccggtgtaactgtgaaggatatcacggggagaaatgtttacgaaggagtccggaaaataaggttgaagaggtaaaattgcgagtgacctatattgctcctccacagccaccatctcctgttcccgaggaaatcagaagaaggttccccatcaagggtttctgagtcagaaaatggagacagtcttggtgggggtttcactagagcactgagagaacgcattgagcctcaagaaaattcattagaagctggagctttgattaacaaattgaatgaaganaaaaatctgcaattcaacagaaccataaaattanacaggaatggatatgatgagacgggagataaccagaaacgcggaaggtctccttcataatcgtcataattgttcgcttgatcgggatcttcttgggctatatgatgaattctaatctttgantcaaatcnaagggaatggaaccccnttcctgccnattttcttgggaggcaaaaaacgcctgaantctccttctgttttgtt

SEQ ID NO: 389633 - DNA, 562 bp, Oryza sativa
  unsure (1)..(562): unsure at all n locations
aatatttctgtagaatagtccatgctcacagcagcctctntgagcattcagagactgagctgggaaaacacgcagtcaataccgtcaacttctgagccgttcccttatggttgtcctcagttggagctcccgttgcagttgtggcaatagctgcttaccgagtctatgcagctaggaagaacacatccgtctttaagctctcctggacagtgctgaaataaagtgctttcctcctttcactgcccatcaaccggatcttttcagataattttttacttctgagcttcataacgtgaaactttgtccagagaacccttttatgtacagatgtgttttcagcaatcaatcgttctgcgtattggatttcgcattttgcggctataattatgtagctgataaactgctatgactaaactagctctggcaaaacattagtactgccgtacaattttgttcttttagcaaatgtgctgttactatatcatgtctcggttctttttttaattaatggccctggattcttttggcattgagaatgatatgtcagattgtctttttcccc

SEQ ID NO: 389634 - DNA, 668 bp, Oryza sativa
ccacgcgtccgcttcaattatgatgatggcgacaacataatgagtgcatccatccatgcggatcaattggctggacaatggtatgccaaagcttgcggtctcttcccaattgttgacaaggataaggcggaaagtgcactagaaaagatatattctttcaatgtgatgaaattcaaggatggtaaaaggggagcaatgaatgggatccggccagatggcacagtggacatgtccgcaatgcaatctcgggagatatggccaggtgtgacatatgcacttgctgcaaccatgattcaagaaggcatggttgagaaggggttcaaaacagctgaggggatttatcatgctgcctggtctccagaaggacttgggtactcatttcaaacccctgaagcttggaacaatgacgatgaataccgatcgttgtgctacatgcgccctcttgcaatatgggccatacagtgggcactatcaaacccaaaactccacaagcagactgcagatattccacaggactctttcccaaagaaccagttctcgtatgctcggattgcgaagctgctgcatttacctgaagacgaatcgccgaagagtttccttcgagtgatttatgagattgttcgtaacaggtataggtcctgatggaagggcaaatatgctccttattg

SEQ ID NO: 389635 - DNA, 1007 bp, Oryza sativa
  unsure (1)..(1007): unsure at all n locations
cgtccgcccacgcgtccgcccacgcgtccggtttcacttgctgcctttcagttgcaaagcatagctgttctcacacctgccttgtagctagagtggttagcagagaagggaagcagtggagttcaggttcagccatggaggttgaggcttcctacagctatggcttccttccttcaggcaggcaccagccttatgcaccacctcctccccaccctgcagaggaaggcgaattgtgggagtactttccatgccctttctgttacatcgaggttgaggtgcccttcatctgcaaccatcttcaggaagagcattgctttgacaccagaaatgctgtgtgcccgttgtgcgccgacaatatagggagagacatgggtgcccatttcagagttcaacactcacatcttctcaagagaaggaaaccttctaggcccagcagctcatggcctacaccctccaacaattcagacccctactttgaggggcctccacagtatatgatgaacaacaggacataccaagatcctgcacctgatccactgctctcccaatttatctgcagcatggctcaaactgacactaactcggataacacaaacactgaaattgcagtttcagcagtctcacatgatcagaggttgagtcagcgtgtgactctgactgatgatgcatccaagctggaactcaaggaaaggttgcaaagaatcgagtttgtcaaggagataatcatgtcgacaattctttaatttgttgtctagtgttacttagcaagttttatttatgttttgtgttttgtgagcgcagatgtatcagtcatgtatgcgcaacatcccctggctcacagatatataatctataccatgtaatattctagtagatgaatgcttgcatactttggctccaagtttgtcatatgaattattatacatctggcaggagaatatgccatatcccatactaatacctggatacataattacattnnnnnnnnnnnnnnnnnnnnnnnnnnn

SEQ ID NO: 389636 - DNA, 728 bp, Oryza sativa
  unsure (1)..(728): unsure at all n locations
atgtgtgctcatgctggaatgattggaacgacgaggccaacacattatcatgttctgcacgatgagataggtttntnccctgatgatctgcaggagcnagtgcactcactctcttatgtgtatcagagaagcacaacagccatatcagttgttgctccgatttgctcatgcccatcttgctgctgctcaggtgggcacattcctcaagttcgaagatatgtcggacgcgtcgtccagccaaggaggtcatacgtctgtcggaagtgtaccggtgcctgagctgcctcgcctccatgagaaagtgaggagctccatgtttttctgctgatcgtgccgcctctcgatcaaatgctcgccgacgttgagaaatccggtgatcggcctgggggaactactagtacttttgcttctcataattaggaacatgtatggaacctatgtacctgcccttggcatgctgcctgtgtcatggattatctgctggtaggagtatcctttaaccaaacccttttagcttttaagttaggtttaatggactgctgtttagtatgtggtgtggtgttagtaagtttccagacttcgacattgtgcagctatgcctattgctggttatggtcccttcccttctatgtagcatgtgccgtttccctttgtctgagttgattttagaaatagtatctgatctgttcgaggttggggatgnnnnnnnnnnnnnnnnnnnnnnnnnn

SEQ ID NO: 389637 - DNA, 495 bp, Oryza sativa
ccgcgcatccaaccaccgttcactgggaaatagtgaactggaaaatgacgataccactaagtcgtgtgcttgttctttctgtcttaaggctgcattcatgtggaccgatctccattatcaggacacaaggggacggcttgctgcattgaagaagagcataaagttcgctagattgctgggcaagagaagccaaggagatgaatattctgttaatgcaggcagatacaacttgaaacgggctgcagagatggagtttgagctatatcaacagcaaagatcactcttccttcatacagaaaatgtccttatccgtgagagcgcacagcttcattcatctcttgtgaagttaaaggcaattcagagagaactgcaggacagatctcgagacggctagcagttcgttgttgggaaaatgaatctttcatggttgtgctgttaaactgcttttgcctgggattcttcagatcagctgggccagtttgagtcaagtgtgca

SEQ ID NO: 389638 - DNA, 1644 bp, Oryza sativa
tggttcttgtgggtttagtattgctcagcaagctgcacttttccacagtattaagtccttgttcatgaacaagcctctagtcattgtgtgcaacaagacggacttgcagcctcttgaaaatctgtctgaggaggacatgaagctggttatggagatgaaagcggaggctatgaagactctaggtcatggtggagaagctaatgaagagggtgttttgttgactatgagtactttgactgaagagggtgtgatggctgtgaaaaatgctgcatgtgagaggcttcttgatcaaagggtggagatcaagatgaaatcaaagaagatcaatgactgcctaaataggtttcatgttgctatgccaaagcctcgtgataacaaggagaggcctgcttgcatccctcaggctgttctggatgctcgagcaagtgctgctgctgcaaaggaaaagaagaagctggaaaggaaactggagaaggacctcgagaatgagaatggaggtgctggggtctattctgctagtctcaagaagcattacttattggctgatgatgaatggaaggaagatattctgcctgagatattggatgggcataatgttgccgattttctggatccagatatactgcagaggtgtgaagagttggagagagaggagggtcttcgcctcgaagaggaagctgcacaggaagctttccagattgatggccatgaactaactgaagagcagcgtgaaatcttgggtcagattagaaagaagaaggcattgctcatccaagagcatagaatgaagaagaggactgcagaaagccgtcctattgttcctagaaagtttgacaaagacaggacattcacaactaatagaatgggtcgtcaactttcatccatgggttttgatcctagggcagctctggaccgagcccgcagccgttctagaggtcgcaagcgtgagaggtcacttagcagagctgctagtgatggtgatgatatggatatagatggccagcaatccagcaagaaattgcgcgcgttgtcgaggtccaggtctaggtcaaaatcaagaccacctgaggaggttgttccaggagaaggattcaaggactctgctcagaagaagaaggcgattaagaaagctaaggattctgtgaggaacaggaacaaggaggctcgtcgcggtgaggcggatcgtgtcattccaactttgaaaccaaagcatctattctctggaaaacgttctattggcaagacgagcaggcgataagtaattcagcactgctgcttagcatcactggtttcaggaagagcagtataattgcagttcggtgttgggattagggtgaaggaaggcctgtttatccaatctttaggacttgttctacgccgttattcatactgtctggtggattggtgttgtatcgcgtctcatccttcgactgagacataattttgttagcttatgtttcagctttatgctacattatatatggtttggctagtattaatagagtggtttaatttcgtcgaatggtactcactaccatcaatatcttataattgtgactttgttatacttatattccagtcctcgttctactgtaccgatgctctactggttgagatgcaatgttaaatttgttgagctggaac

SEQ ID NO: 389639 - DNA, 490 bp, Oryza sativa
cgcagttcccgggtcgacccacgcgtccgcccacgcgtccggtggcactgttcctccgcaaccagatgatccttctgagtgactctcttgctagaactgcaccagagagcctagtagcctcgtgtaaagatgtctttcaagcagggtctccccttgctgacattttgcattggttcgctgacctcgctattgcatcgaaggaggatgcactggtctgtagtagcgaaagtgacagccatgatgaatttgaagctttcacactgcacctagaagaaacccaaggctatgagctctactcaacaccgaaaacaccagttgagcatatgagcaatgaagaccatggctctggtgcaccctcactgcttcagacaaaactctcgaagaggccgtgcacgaaagcgtccccagaagaaagatttccagaaggacattctaccaaacctcgcttttctgtccaagcacgaggtgttagaggatctttacacccttt

SEQ ID NO: 389640 - DNA, 974 bp, Oryza sativa
  unsure (1)..(974): unsure at all n locations
gtcgccnactttgaaagtgcnacccaagcagtagcagtttcccangcttgtcgggggcaccggntncattttgccgccccggngtgtgccccttccnagttgccaggntccagggtggtttgtgttcccccngcgtttgcaacntgggtgttcnttttctttccgttggattctgcaggcggcggcggagtagttcgccggcgcgcgtacccgaggatcgaggccacggcgaggcacggcgcgaggaaggagaaccccaaggtcaggaaccgccggctgcagaagaagttcaatggcacggcgacgaagccgaggctatccgtgttctgctccaacaggcagctctatgccatgctcgtcgacgaccacaacaagaagatcctcttctatggcagcaccctgcagaaggccatctgcggtgaccctccctgcggcgccgtggaggcagctgggaggatcggggaggagctcatcagggcgtgcaaggagctggacatcaccgagatctcgtcctacgaccggaacgggtttgctcgaggggagaagatgatggcgttcgaagttccggtctcgcagatctagtggagcttgagtgcattgattgggcgagaaaagaaattaacataaagtatgaaatcagagataacaggaagggatacaaagcaggagccttgaagaagggcatggaacatatctatacccaacagtgcgattttgttgccattttcgatgcagatttccaacctgaatctgatttccttctaaaaataataccatttcttgtgcataaccctaagattggtctggttcagacacgttgggagtttgtgaactatgatgtttgccttatgacaaggatacagaagatgtcactggactatcatttcaaagtagagcaggaatcaggctcatctatgcattcattctttggcttcaacggtactgctgctgtgtggcgggtatcagctactatt

SEQ ID NO: 389641 - DNA, 810 bp, Oryza sativa
ccacgcgtacgcaccacgctctgaggactcgtgcttgcagacttatagctgcaaagtcaactctagcagcaaggattgattcgatcagaggtgatccaacaggaaaagctgggcgtaacttgttagaagaaatccgtaagaagattgagaagtggcaagaaccgcctcctgcaaagcttccaaaaccacttcctgttccagactttgagcctaaaaagaagagagggggtcggcggcttcgaaaaatgaaagaaagatatgcacaaactgatatgatgaagcttgctaaccgaatgcagtttggtgtaccagaagagagctcattgggtgatggtttagggggaggttatggcatgcttggacaggcaggaagtggaaagctacgcgtgtcaactgcaccaagcaaactttctgcaaaaattaccaagaaattcaaggagaagagctatggtagcagtggtgcaacatcggggctgacttctagtttggcgtttacaccagttcaggggatagagttgtcaaatccacaggcccacggcaacctgcttggaagtggaactcagagcacctatttttcagagaccgggacgttctcgaagatcaaaaggacctgagctgataagcaaaagtttcttcttcccatcagcccacagacccgtcataatcctcaggatgcaccgatgaatccattttgtaatgtactccaccttatacccgaattcagcagactttcgtggtgctgtttgcaatctctagaagttcgctaacttccatacggttcaagttaattcgacatgctgcgtttgatct

SEQ ID NO: 389642 - DNA, 584 bp, Oryza sativa
ccacgcgtccgaagaaagtggtagtcgagggcccgctatgcagtgactccaaggttgtcggttggttctcgagggacttcaatgatgggaccacccgtgcagtgacatataacacagaggcggacttgaatcctgctggtgctgctggcacgcgagctcacacgccgcgcgcccctgggtttgcgttcaacagttctattttgtgggatcccgagcgttggggcaggccgacgtcattaccagacacttcacaggattccatcaagtttgtgcaagaggttgtattggaagacaggaccaagctaaaggggattccctcagattgctcccaaatcatggtttggcaatatactatgcccatgcaagttcatgcccaaacctctactccaaaaactcacaatagaaggtagggagagaacaagcaagaggattctccagaaagggaaaaaagtgggaagttgatgtaaatgtggtgaaaacaaaagaaaaggaagaaggttgtttacactgagtttttttccctttctttttctctcatttttgttttctttttagtttggggggccatgaattgtctgcggaaa

SEQ ID NO: 389643 - DNA, 504 bp, Oryza sativa
cgatcgcgtccgcccacgcgtccggtgttcacctggctaatttttacttatgataaaaggcagttgtaggttaatggttgacacatcttcctcagggtgctgtgttcatgtgatgacctggtcatgcaatagaatttttacttatgataaaaatgacagctgtgggaaggtgttgaatatgtttaactgttcaatgtgatacatttattttgtgttagcatacacatccttttcttttagttctgaacatattggttttgtttgtatattggctgttgcaattcattttgtaccctttttgtaggcttgatgggctcttgtttccgctgaggtcttttcctccagaatatctagaggagcaaataaactatgggtgtgttcggagggggcattttacagcagcggctgcggctgcagcagttcaaaactgctgcggcagcgatgccgccgaacagagtcgatgtgttctctattgaaaggtcctggatcaatcgttcaattagt

SEQ ID NO: 389644 - DNA, 602 bp, Oryza sativa
  unsure (1)..(602): unsure at all n locations
tccccatacacttatccatcatatctttacttgctgcattcgcagatattggaataaaggaatcatgtattgcagtaaaagacagcctatttggttggtgaagcaagaactgcggtttggggcttgatgggctcttgtttccgctgaggtcttttcctccagaatatctagaggagcaaataaactatgggtgtgttcggagggggcattttacagcagcggctgcggctgcagcagttcaaaactgctgcggcagcgatgccgccgaacagagtcgatgtgttctctattgaaagtccctggatcaatcgtccaattagtgtatggacctttgatgccttcttccctggattaatcgtccaattagtgcatggacctttgatgccttcttcttggctgtttgacggacctttgttgccccatctttaacagtatgctacacatctattatagatactagaaggatatgcgcggcgccacgccgnanngnacaatgttttgcatgagcttnnnnnnnnnnnnnnnnnnnnnnnnnnnnnnnnnnnnnnnnnnnnnnnnnnnnnnnnnnnnnnnnnnnnnnnnnnnnnnnnnnnnnnnnnnnn

SEQ ID NO: 389645 - DNA, 501 bp, Oryza sativa
ccacgcgtccggacaacttctgttgtaacacatagatacggagatcaagctggacaggtcacacaggattaccttcacgcctctggaaacgctcttggagtcgcatgggctgtcttcaaaattcggaaagctctcgacccaaagggcaatctgaagaagtcgtctctggccagcgctgctgcccatgctgtagctaaagaatcgatatctcggcaaagaaggaagtgagacaacacggtcgatggtggaactcgctgttactctctaatacggtgtactagcttcaatagaaatgctcttttgtgaacttggcggctatagcagattttgttggatgtgtcgcttgtaacttgtaaggcgtgtgactgttgccgtgatggtttcgatgtttgttttggtttttggatgtttgcgacttgcgatgatgtactgctttggcacctggcgcattactatatgtgtatacatgatgcacagtgatctcacggtttatttgttttt

SEQ ID NO: 389646 - DNA, 677 bp, Oryza sativa
  unsure (1)..(677): unsure at all n locations
ccacgcgtccgggaacttcggcgtggccaagcttgtccgggatgtgcggaccaaggagctgtttgccgtcaagttcatcgagagggggcagaagatcgacgagaatgtccaaagggagattatgaaccacaggtcactgaggcatccgaacattgttagattcaaggaggttgtgctaactcccacacatttggccatagttatggaatatgctgctggaggtgagctattcgaaaggatttgcagtgctgggaggtttagcgaggatgacgcaaggctcttcttccagcagttgatttcaggagttagctactgtcattccatgcaaatatgtcatagagatttgaaactagaaaatactctctcggatgggagcatagcacctcggctcaagatatgtgattttggttactcaaagtcctctttgttgcactctcaaccgaaatctactgtcggtactccagcttatatcgctcctgaggtccttgctagaaaagaatatgatggaaaggttgctgacgtttggtcatgtggagtaactctatatgtgatgcttgtggtgcgtaccccnttgaggaccctgacgaaccaagaaacttccgcaagacaattactcggatactaagcgtacaatacatggttccttgatatgttcgagtttcgatggaatgcagaca

SEQ ID NO: 389647 - DNA, 552 bp, Oryza sativa
  unsure (1)..(552): unsure at all n locations
cagtacattcatgtactggcaggtgttgaagcagatgtaccatgctcctgtaaccgctagctaccaccagagcgcgtgggcgaaaattggccggattgtcaacccgtacatccatcgctatgcaccattcctcaatacacccatttctgcagcccaaagatggtggttcaggtagcaaggctgaggacagaatcacgatatttgcagatctgatcatgcggagaacttatctacaatgtgttttgaagagctattacaaacttagcacgccgttgctctcgtcatgatggagctgtgcatcataaaaactcctgcaagtagttcccttttgtattggcttatactttgaggttaacattgatgcaagaacggtgttataaaccctggagggctttttcaccaccgtaatgctcgatcagtgatcacgacgatgttctatataattcctgccaaactcaggctgacctgtatacaatggattgctcttagattgcatcatctattcatgagtggctatgnnnnnnnnnnnnnnnnnnnnnnnnnnnnnnnnnn

SEQ ID NO: 389648 - DNA, 703 bp, Oryza sativa
ccacgcgtccggccgccgcctcctcgagagagagagagagattgagagagagctccgcgggagagcgcgtcgaagatggtgcagcggctgacctaccggaagcggcacagctacgccacgaaatccaaccagacccgcgtcgtcaagacccccggtgggaggcttgtgtaccagtacaccaagaagcgggcgagcgggccgaaatgcccagtcaccgggaagaagatccaaggaattccacacctgagacctgctgagtacaagaggtccagattgtcaaggaatcgcaggaccgtgaaccgtccttacggtggtgtcctgtctggtactgcagtcagagagaggatcatccgggcttttttggtcgaggagcagaagattgtgaagaaggtgttgaagatccagaagaccaaggacaagtcagctaaatgattgcaagatagagacattgccgcgatgtttaagcttctccaaatttgtttttaagcaatcaagagaatttttcttctggatttgggggaaatcccgtttcctagtgctgctagtatgtgagatcaaatcgacatgattgtttaaattttgagcgctagttctctagagtactactacaaccttgtgtggatcctttgatgcaagttttgaaactcccaagtcccaagtttgcgcaaatgttgttttggcagaaactccgtgttgatgcttt

SEQ ID NO: 389649 - DNA, 755 bp, Oryza sativa
accaggttcaccgccaggggaagggcagccggtgtaccacttcctcggcacctccacgttcagcgagtacaccgtcgtccatgtcggctgcgtcgccaagatccacccagcggcgccgctcgacaaggtctgcgtcctcagctgtggcatctccaccggatttggcgcgactgtgaacgtcgccaagccaccgaagggtgcacagtagccatattcggcctgggtgcagttggtcttgctgccatggaaggtgcaaggatctctggtgcttcacggattattggcgtcgatttgaacccggccaaattcgaactaagctaagaagtttgggtgcacagactttgtgaacccaaaagattacgacaagcccgttcagcaggtgatcatcgagatgaccaacggcggcgtggaccgcagcgtggagtgcaccggcaacgccgccgccatgatctccgccttcgagtgcgtccacgacgggtggggagtggccgtgctggtgggcgtcgccggcaaggacgcggcgttcaagacgcacccgaccaacttcctcaacgagaggacgctcaggggcacgttcttcggcaactacaagcctcgcaccgacctgcccggcgtcgtcgagatgtacatgaacaaggagctggagctggagaagttcatcacgcacagcgtgcccttctccgagatcaacacggcgttcgacctgatgctcagtggggagagcctccgctgcatcatcaggatggaggactagc

SEQ ID NO: 389650 - DNA, 621 bp, Oryza sativa
gcttttgtggttcctgggtctgctcatcatcggcatcaacatgtacttcctgagcacgagcttcgtcggctggctcatccacaacgacctccccaagtacgccaacgtgctcgtcggcgccgccgtcttcccgttcatgctcgtctacatcgtcgccgtcgtctacctcaccatcaggaaggactccgtcgtcaccttcgtcgccgactcctccctcgccgccgtcgtcgacgccgagaaggccgacgccggcgacctcgccgtcgacgacgacgagcccttgccgtaccgcgacgacctggcccacatcccgctcccaaggtagagaagaagacgatcgacatgcatacgtatggtatagcgtatgtatacgtacgtatatacgcgtacattgtgaatatacgtacttacgtacgtatatgtgcatcctctatggatgccacgtgcgtgcgtcggagccgttcgtttatatttgtgcggtccagatcgctcgcagatcgatcgatcgacaagggtgtgcaattaatatataagcatttgaggggaggtggctcatgtatccttgtaatttatatgtacgatatgatttatcataattcagggcagagccaacgtccttca

SEQ ID NO: 389651 - DNA, 819 bp, Oryza sativa
ccacgcgtccggtacaaggtgccgctcggccgccgtgacggcctcacatcggcgacgccgtcacaggtgctgggcgcgctcccgccgccgacctcccacgtccccgagctcatcgccgcgctggccaagctcaacctcgacgccgccgacctcatcgcgctctccggcgcccacaccgtcggcatcgcccactgcacctccttcaccgggcggctgtacccgaagcaggacggcaccatggacaagtggttcgccggccagctcaagctgacgtgcccgaagaacgacacggccaacaccaccgtcaacgacatccggacgcccaacgccttcgacaacaagtactacgtcgacctgcaaaaccgccagggcctcttcacctccgaccaggacctcttcgtcaacgccaccaccaggccgctcgtcgccgagttcgccgtcgaccagtcggcgttcttccaccagttcgtcttctccgtcgtcaagatgggccagatccaggtgctcaccggctcgcagggacagatccgggcaaactgctccgtccgcaaccccggcgccgccgccgccgacgaggagctcccgtggtccgccgccgtggagaccgtcgtcgaggcggccgagagcatcgtgctctagacacacaattgtgcgcgccatggacgcgtacgtcagtacgtgtaccgtacgttgaatgtggaaagagacgacgacgactgtggatatatgttggttactgccatgtcgaataaatgcatgacgtcatgacaacctcctttatgatcaatatatatggacgtggattttcatcaacaaaaa

SEQ ID NO: 389652 - DNA, 1111 bp, Oryza sativa
ccacgcgtccgcggacgcgtgggcccgtctcctgttcgtccctcgggagcgggaggctagggccgacagcagcgttcgcgccggcgcgggattgggttctttgttcttgtcagtgctgtgtttgctcgcaagggtcatcgtgagaatggaccagatttacatggctgctgtcaataacaagacttcattgcctgatgatgagccaatgaagaaaattagtggagatatgcctgtgactgctggaaacgcttgctttgactgcaacatttgccttgattttgcagcagagccggtggttactctttgtggtcatctctactgctggccttgcatctatgagtggctatgtccaggggttggatcgactgccagtaacaacagcagtttggcaaggcgacagtgccctgtgtgtaaggctacactctccccagacatgctggtgccattgtatggtcgtggggggagtctgaagaaatcactgaatggtgtgcccattccacgacgaccaaccgtgcagcgggtggcggttgagcatcaaaacacacacaataacatcgatgatcggcaccatgagaacatggaacccagccctccaccacaaccgctgcggcattcgagccatcattccagtgcaactgaatttgattttatttacccgccatcaccaattgggcgtggcttgatccactcgacggctggtggtgtgcttggggggatggcagtggcgggtgctaccatgggcattccgtggccaggtgccaccgagcatgttcatgagtccccactatgtcgcggcacacaatatgagctctagagcgaggagacatcagatggaagttgagaggtcactgcatcagatctggttcttcctcttcgtttttgtggtgctgtgcctgctcttgttctgaagcaagatggtggtgtattcctttggtaaattacgggaagggccaagacacctaatggtgtggagtgcatatggtaaaagaggtgtggttaacactgttggtctgtatcgataagcatgtgcctaaagcatgctgatatagagatgtaatgtgccaagccttaaggtgaaatgcacatttcattcttctcttgtcctaagatc

SEQ ID NO: 389653 - DNA, 658 bp, Oryza sativa
tgacaatgaactgtcacggaaggtaaatgaagtaattaatgaaataagacgccagagatgttcttatttaaggttgcgtctatgcagaaggggtgaaccatctggtgatttcttccgctcatttttgacagaggacaaggcacctggtggcctttcctatgtggagttccttgtgcatgtgcacaggcaaatccagagcaagatgacgtgacatgccatatgcttgtcgcactgtttttggttagtggatggattacaaactaagaagagatcagtttcggcacaaggatactgcgaagaagcatagggcaactccagatcactggttgagttggggttagacatcattttcctggagaatagatttgcaggaattgaggcctgcaatgtttacagcatagtttttttgggggagagggtggtatatcttgtaaacagatgagttgttggatgtgatgcctctttttttcgcttctcaccgtgcatccttattgaaatctcttgtgaagggagaagggtgtattatgttcaaaggaatataagtggtttaggaataaaactatacctagctaatagttgagtgaagtatacagttctcaagtttatgtacgaaaaacgtcaagattgtctaatggtcgtttgctctgcaacaaacaaa

SEQ ID NO: 389654 - DNA, 482 bp, Oryza sativa
ccacgcgtccgcgcactgcgaactaaccttcctcttgcggcggcggcggcggcgccactgccggagaagaaacccgaccgcgcctcgcctcgccgagcggcgaagcggcatagggcggtagcgccggcacatggagggggtgaacggcggggcggtggaggaggagaggaagccgctgtcggaggtggtgggcgactgcgtgcagcgctggttccaggacgcgctcaaggaggcccgccgcggcgactccgccatgcaggtgctcgtcgcgcagatgtaccactccggctacggcatccccaagaacgagcacaagggaagagcgtgggctgagaaggcatctagatacaggccttcagtctggaaagttggcacaaagcgtccgggatataatgccagtgactcagattctgatgaaatgaatgatgatgagaagcaataacaatgaaagaatcaattgtgagtttagatagaagaatggc

SEQ ID NO: 389655 - DNA, 453 bp, Oryza sativa
  unsure (1)..(453): unsure at all n locations
tatgcacattcgaattgctagctagctcgtcgaagaaaccaaagtgcgagcgatcggctagctgctgcaagaagccttgaccatggaggccagacaccgtgtgatgtcgctgctgctggtgctggtgatcggctgctgcgcctggggctgccgccctggcgcggcgcaggtgcccgtcccggcgaggacggacgggttcgtgtacggtgggaaggcgccggcgctgggggagacggtggtggtggaggcgtacttcgaccccgtctgcccggacagccgcgacgcgtggccggagctgaagaaggcggtcgagcactacgcctcgcgggtgaccgtcgtcgtgcacctcttcccactaccttatcacagcaatgccttcatttcctgccggtcaattcatgccgngaacaagataaatncgtcgnttgtgtattccctgctcgagagattctt

SEQ ID NO: 389656 - DNA, 771 bp, Oryza sativa
  unsure (1)..(771): unsure at all n locations
ccacgcgtccgcccacgcgtccgcccacgcgtccgggctagctgctgcaagaagccttgaccatggaggccagacaccgtgtgatgtcgctgctgctggtgctggtgatcggctgctgcgcctggggctgccgccctggcgcggcgcaggtgcccgtccaggcgaggacagacgggtacgcgtacggagggaaggcacccgcacaagggagagacggactngcaaaattctttcagggacacatgaaggaatgaccactgtgacaccaattcatgtttttgtccggaacacagatcacagaggtggtgattacagtgaaatggctaaggcctacagaccttcacatgcagatgcaacttatgacttcaaatacggtgttagagcagtgcagggtggtgagaagatcatcagcaagagagaccattggaagggtggctgcaggagctcttgcaaagaaaattcttaagctcacatctggagtagagatcttggcgtttgtgtccaaggtgcatcaaggtgtactaccagaagacgccgttgactatgacactgtaacaatggaacagatagaaagcgacattgttagatgtcctgatccagaatatgcacagaagatgattgatgcaatcgataaagtacgagctagaggtgattcgattgctgctgtggtcacatgcattgcaagatatgttcctcgtgggattgccgctcctgtttttgacaaacttgaggctgaattggccaaagctatgctttctcttcctgcaagca

SEQ ID NO: 389657 - DNA, 627 bp, Oryza sativa
gtcctcgcctcgcttcggctctcaccaaccaaaccaacaacctcgctccgatggccgcgccaacgtcgtcgcagccggtggcgcgcgtcctcccccgcggcggcggcggcgggttccgcgccttcccggagtccgccccggcttccctccgcttctccgtcggccgccgccgcgccgctcgcctagaggtgaaggcgtctgcaaatgtatttgggaactacttccaggttgcaacttatggagagtctcatggaggcggtgttggttgcgtaatcagtggatgcccacccagaatcccacttactgaagcagatatgcaagtagaactcgaccggagacggccaggccagagcagaataaccaccccaagaaaggagactgacacttgcaaaattctttcaagggacacatgaaggaatgaccactgggacaccaattcatgtttttgtcccgaacacagatcagagagggggtgattacagcgaaatggctaaggcctacagaccttcacatgcagatgcaacttatgactacaaatacggtgttagagcagtgcaagtgaggtggagatcatcagcaagagagaccattggaaggggggctgcaagagctcttgtcaagaaaatt

SEQ ID NO: 389658 - DNA, 1228 bp, Oryza sativa
  unsure (1)..(1228): unsure at all n locations
cggacctggncgngnacgcgtgggttgagaccattgagcagttgccagagcaaagatttgactgtgtagggatttatggtctnaactatctccatagtaactggattatccatcgagatctcaagccttctaatatactggtcatgggagaaggagaagaacatggaattataaagattgctgattttggactcgctaggatatatcaagctccattaaagccattaagtgataacggggttgttgttaccatctggtatcgggctccagagttgttacttggggcaaagcactacacaagtgctgttgatatgtgggcagttggttgcatttttgctgaattgcttacactcaaaccactgttccaaggtgttgaagccaaagctactccaaacccgtttcaacttgatcaactagacaagatttttaaggtcttaggtcatcctaccgttgagaaatggcctaccctcgctaatcttccatggctggcaaaacgatcaacaacacattcatagggcataagtatgagaacacacgacttcataatattgttcacttgcctcagaagagtcctgccgtttgatcttctctcaaaaatgctcgagtatgatccctcgaaagcgtataacagctgcgcaagctttggaacatgagtactttcgaatggatcctctgcctggacggaatgcacttttaccatcgcaggctggagagaaaattgtgcaatatcctgtgcgtccagttgataccacaactgattttganggaacaacaagccttcaaccaactcaagcgccatcagggaacgcagctcctggcaaccagtctgtggtaccgagacccattccgaggcaaatgcaacaacccatggtcggtatgtcgagaatgggtggtacaaacatggcggcctttggtgcagctccgcaaggaggcatagctgggatgaatcctggtaatattccaatgcagaggggcgctggagcccaatctcatccgcatcagttgagaaggaaagctgatcaagggatggggatgcagaaccccggttatcctactcaacagaagaggcggttctgaccgactgaatttgtaattgtatatctatttggtgtgttacttgtgagcacgcttagcttttgcggtggttgctcctagtcgtacagtgagaattgtatctgttctgttgtaattgaacgccatcacaaccaaaaaaaaaaaaaaannnnnn

SEQ ID NO: 389659 - DNA, 496 bp, Oryza sativa
  unsure (1)..(496): unsure at all n locations
gtgaaagggcttcgtgtacgccctggaggggatctacaataaggaatcggcattgcagaagacgagggcgctgacggggcacgacgatggcaattccctgaccaaccttctctggtggctgcacagccgcggcaccgccgatgatggcgtcgtcgggttctccaggtgctgctggtaccgccagtattgccattgatgggggctgaaatgatcgcagcagagattgcccgagatgatgcgttgttgctgaagatcaggttgtgtgggtgatatgccgaaggatacagattattatagagtgggctgttcagtttcagagtttccgtgtgattcaaacatcaggatgctacacacacatcttttacactttgttgtttcaataaaaagtagtcaaaagtcatggtatgttgatattttacatggaacgcaattggttcagangttttgagttgcctatgnnnnnnnnnnnnnnnnnnnnnnnnnnnnnnnnnnnnnn

SEQ ID NO: 389660 - DNA, 831 bp, Oryza sativa
  unsure (1)..(831): unsure at all n locations
ccacgcgtccggctgaagagtgctctgaagaagccaggaggaagggaaatactgaaaagcgcttcttttgcaccctcagccagcacacctcactcggtttttccaggacagacttctacaataaaccctggaattcagcttcctcttaaaaaagctgtttcttttcaagatgataacaggcatacagttggtccatccaagtctcttccattgccacagggtccaaaacactcgagtccaatacttcaggtttcttcagataaccctacatctcatgatcggaagataatgtcaagtggacaaaaggccttcacagggtctattattgaacatgatgataatatttcaacccttcaaccttcaaagagtgctgctttgcagaatcctgctagttcatcttcaagacctgtatctagattcaagatgcagaagggagggcgttgagaccatatcgttaacactaggatgagtgcgaaaccgtcaacttagatctttggtaacatctgcattgtcaacaactgctataagcgaaagctgcattgtcaacaactgctataagcgaaagcgacaggtgtggtatcaagaccacagttctaagatgagaccttggagctagcttgtctgtgcgcggatgagaaaattctttatacccagagtgtagggctgtaggcactagttttggtctgaggattcagacatttagggaaagttcctgtaattcttgttctagtttacattgatgccaacagcccaacgcattgatgggtgttacttgtgatagctctgtgcaagcattttgtganttgtgtagcactacatacagtgacctca

SEQ ID NO: 389661 - DNA, 575 bp, Oryza sativa
ccacgcgtccgcttctctggatccatctctgttcaatagtgattcattctccacgagaaggaagctagtctctgtactacaccatggagaacaacagcaacaaccagccgcctccagggtacccgacggcagcgggagcagctgagcaaggcgggaagaaatcgcggcgaggaagcaccaagtctaggggagacaaaggcttcattgaaggatgtattgctgcgctgtgctgctgctggatctgcgagatgtgctgcgactaagccagcacacatacgattatacgtacatacagagttaatacacagccagtggtatgtacgtgatgcgtgagacgacgctcgatcgctgtgctatatatgtactgtgtgtatgtatcagtgtatgatcattaaaaccagttgtttctcaccgagtttgttttttatccgagggactcgaccatcagaataactgaagaaattactataaaaaaatgtgccgtgtgatagaaatttttcatgtatactgcgtcttgtgtttggtacggcttcgtgtgattcattcacttaaattatcaaaaaaaaaaaaaaaaa

SEQ ID NO: 389662 - DNA, 726 bp, Oryza sativa
  unsure (1)..(726): unsure at all n locations
tttccaagccgattaaagttgggtaacgcccaggttttcccnagtcaccgaccnttgtaaaacgacgcccattnaccncccgtaatncgactcactattaggccgaaattggttaccggcccccccctccgaggtcgacccacgcgtccgctctatgaggccatagccgggaggtctcagcagggcttcctcatggggtggctccactccctcttctcccctctgaggaagctctgggttcgtgcgcattccgcacgtcgaaaccggaggggaatgcacattctgtacaaggatgtcaagtcttgccaggatgaggatgtgcatgttctatggtccatattggtggattcgcaccgtcacccagctctgatgaagctgaagctctagggttcttgaagaacagagcaaggatgatggcagctatgaattttctgtgattttgccgtttactcggccattacctctgtatagaacagcatgatttcaatggcatcaagattgaaggggcaaaaaaaaatagaaggacaaaataggcagatgtttatatgcctttcttgtgtgtattgatgtttctgtcttgtggctttgtgagtgaggttgaaatgtcacctttggttgatgtgaatgcgagtgaggttgagtttaatgtatttgtatatacagatgctctgatgccttacctaatggtatgaagtttggtagcacgtnnnnnnnnnnnnnnnnnnn

SEQ ID NO: 389663 - DNA, 814 bp, Oryza sativa
  unsure (1)..(814): unsure at all n locations
ggaggnanctgtgaaaccttcccggcggcgcgcgantntcgcggggggaggagagcgatgtcgaagcggcagggtcccccgaagcatcagaaccgctacgtgtggaagcccaacctcgggcagaagatcaacgagaccgagcccggcggcaggttccgtcctttgtcggagatcaccggcgtctgccagcgcttgcaaggaccaaatcgactggaagagaagatacgggaagtacaagcctatcgttgagccggcaaaatgtcagaagtgtgggaaacggaacgtccgacaggcgtatcacaacgtctgcacggcttgctccaaggaccttgggatttgcgcgaagtgctgcacttgtgttaaagcgcttgtcggaagggatcttagtgaacaggagagtgagcgcaaggaactagaggaggccataagaggtgctagggagagggagaggcgcacacttcttcgccttatgaacaaaggtggcggggagagcggaccgtcggttccaaagattgctgacagaagtcgtgaaggggacattttccctgctgcatcccttgacgaatatgctgaacaagctagacagcaagatgattcagatgaagaagaggccagggattttgtagaagattaattttagaactcagaaaccttttcttttgcaaaaggatttatatagccttatgtggtgatttacattacatggtgggtaatcccacccactgcggaaaacaagtgtattagttttggcagatatatttccgtctatcagatgtttatcagtgtgtgctccnattcaaaaaaaaaaaaaaaa

SEQ ID NO: 389664 - DNA, 453 bp, Oryza sativa
ccacgcgtccggccgcgccccaaggcggtgaaggggaagaacggcaccgtgctggctccggcgccggcgccggcggactccgacacggcggcgaccaccgccgcgacggtgagcaccgcggcgcactcgtgcaaggtcagagtccgtgtcaagatctggaagtggaccttttaggtacagaatttcgcgaaagtttaggggctcggatgcaaaattttcagaaaaaaggattttcactttatcatttattatatattggagtagaaataccatgcgtcggtggggtgtaaattctctcaaacatttgtttttttggttttttgctttatcgtttgcttcctatattatcttattaaatacttttttcctcctctttgtagcgaatgtactgcataatttggtgatttattatttggagcactgttattttggatcttatatttaaattttttt

SEQ ID NO: 389665 - DNA, 630 bp, Oryza sativa
cccacgcgtccgcccacgcgtccgctttccaaactggtttttccggtcagcgattttatgatgactggttccagtccctttataatgtcattttcacggccctacctgtaattatggttggattgtttgataaggatgtgagtgcgtctctgtcaaaaaaatatccgaagctttaccaggaaggaatcaggaatacattcttcaagtggagggtgatagcagtgtgggctttctttgccttctatcagtcgatagtgttctattacttcactgcagctgcaagtcggtatggtcatggttcatccggcaagattcttggtctttgggatgttagtacaatggctttcacctgtgttgtggtgactgtgaatctccgacttctaatgtcatgcaactctataacaagatggcactatatcagtgtagctggcagtataacagcctggtttatgttcatcttcatctactctgcaataatgacatcattcgacagacaggaaaatgtatattttgtgatttatgttttgatgagcacgtttttcttctacctcacactattgcttgttccaatcatcgctctctttgtgcggcttcttatattatcaattcaaaggtggtccttcccctatg

SEQ ID NO: 389666 - DNA, 613 bp, Oryza sativa
ccacgcgtccgcggacgcgtgggcaaaaatggaaagaatctaccagtggatacctcaggacgctttgtcagctcccatttcacatgcatcatactcacgcaacagccagttggtttttgctgcctttaccgatggtaacataggaatttttgatgtggagaacttgagattaagatgccgaattgcacctccagcatacttatcttctgcagccataaacagcaatccatcggtctaccctcttgtcgtcgctgcacatccgcaggagtcgaatcaatttgcggttgggctttcagatggatctgttaaagtgattgaacccttggagtccgaagggaagtggggaacgacccctcccacggaaaacggggtgcccaatggcaggacgtcaacatcatcagcaactagcaacccagctgcagaccaaatccaaagatagacgtgcatgccggttggatcttcactgtaaagcttttctaatcttttacattgacttgtttgtatgtcgatgtgactaggctattgttgcatcctgcgcacaagcaaacatattacatattggattgtcagatctggtgtgctctgtccttagttacacgttcgctcttacttt

SEQ ID NO: 389667 - DNA, 513 bp, Oryza sativa
  unsure (1)..(513): unsure at all n locations
gttgggcttttcaagatggatcctgttaaaagtgatttgaaaccctttggaagtcccgaaagggaaagtggggaaacgaccggcctccccacggaaaaaccgggggtgcccaattggccaggaacgtcaaacatcatcagcagagctagcaaaacccagtctgcagacctaaatccaaagatagagcgtgcatgccggttggatcttcactgtaaagccttttctaatcttttacattgacttgtttgtatgttgatgtgactaggctattgttgcatttgttggaaaagcaaacagaaaaaaaatggaatcgtaagatcaggtgtgcttgtaacttgtcggatgtttgccctagttatgaaaaggttatcttgtaatagggatagtccataaaattaggttttctcagtataactgggacgtcggatgctgtagttatctttgcttagatgcttttcaagctatacatagtttttccttccttcatgttcnnnnnnnnnnnnnnnnnnnnnn

SEQ ID NO: 389668 - DNA, 602 bp, Oryza sativa
ccacgcgtccgctggaaccgacgtcgccatcgaagctgccgacattgtcctgatgaggagcagcctcgaggatgtgatcactgccatcgatctctccaggaagaccctctcaagaatccggctcaactacgtctgggctctgggctacaacgtcctgggcatgccggtcgccgcgggcgtcctgttcccgttcaccggcatccggctgccgccatggctcgccggagcttgcatggcggcctcgtcggtgagcgtcgtctgctcgtcgctgctgctccagctctacaagaagccattgcacgtcgaggaggtggctgctggacccaagaatgacccggatttggtgtgaagactgaagaagcgtcggtcttgctgtgctgactgaaactgagcatgaagcaaacgccttgtttgcagtggccctcctgactgatttctgtacagtagtcatgttttgggattctctgtttttttttggggacttctgattgattcaataataatttggggagcttaattgctatccagtgatatatagatgtgaaattgtgtttaaacagtggagaacaggtgttgtattttctggcaagtgacccttgcgg

SEQ ID NO: 389669 - DNA, 927 bp, Oryza sativa
ccacgcgtccgcggaagctggagggtgacctcgacgtcaagctctcctcctacgcgcgcctcgccgcgcgctcctcctccgccgccgacgccgcctccgcctcctccccgagcgagcgctcctcctggaagtccatggagttcgagatccagtcgctgctcgacaagctgcaggacgtcaacgacgccatgagccgctgcgccgcctccaccgcccccaccacctccgtctcgcagaagctcgcccgccaccgcgacatcctccacgagttcgcgcaggagttcaggaggacgagggggaatctgagctccatcagggagcacgccgatctcctcagctctgtgcgggacgacattactgagtccaaggctactggcggcatgtcgccgagggtgcatttgctcagggagagggcctcgattcatggcagcattaaccagattgatgaggtaattggccaagctcagagcacaagggtagccctttccaatcagagggcattgtttggggatgttcaaggaaaagtcaagcagttgggtggaaagttccctgttattagaggactacttggtgccatcaagaggaagaaatcaaaggacactatcatcctttcagcagtgatcgcggcctgcaccatctttttgattatttactggctttcgaaatgatggttgtctccagaaaatctcaccgtgaaggcttcccctctgcgcagaatcgctgataccagatgacacgataagacttggtagtatgtttcatttgttaggctaagaggaggaatgagagatcggattcttcagcttttatcaatttgcctttgatatatactcctaccttgtatttggagattaacctgtcctacatgtacagtacagagcaattttgctttccaaagtaacttgtctggctggctgagtccaaaaa

SEQ ID NO: 389670 - DNA, 924 bp, Oryza sativa
ggtttatccggtgttggattcagaggttgtccaggtacactttctcatctagaagctgagtcgtgcatgctttctccagatggtttgttggatgtagtgagtggtggtggactggagtatctaaatttgtacaatttgaaaagcccaactggacttgatggcctggacagagttggttatgcgagaagtcttcggtttttaaacctcaggatgtgccgttaccttaccgatgattctgtgacggcaatagctagcgggtgtccattgattgaggaatggagcctcgctgtctgccatggagttcgcttgcctggatggtctgcgattggattgctctgcaacaagctgagaatcttgcatgttaaccgttgccgaaacatttgtgaccaaggtttgcaggctctaggggatggctgtgtatgccttcaagttctgcatatccatggatgtggcaagatcactaataatggtctggcatcatttagcattgctaggcccaatgtgaaacaaagggctgatgaagtcatgtgcattggcccctccattgaggatttattccgattgcaatgatcagaaactcagaaagtttcagctaaagtttggggttgacaagattcaagccattgccaccagcattgtcattacaagtcacaagatatttggttctgtaaccattatgcccttctaatttgctcaaaagtgcatacttatttattataaacaggaccacaaatatacaaatggattgcgaggagtcaagtccatttgttcctgtggttatttgcaagttctgagtttattgggtgatacagaaaatggttgtagaaggttgtttttcgtacaatttgatagctagtttaaacttgtaaattgacatgttttaaaaccatcgaaaattgaattggatgggttggttgtactacc

SEQ ID NO: 389671 - DNA, 995 bp, Oryza sativa
catttgtagttttattccttgcagaccaaaaccatctttggatgtcagcaagagcgtttgtggtcttgatctttcatcggtgaaggataattcagccaaacctccacggaggcactcaatacagaccaagccaggtgttagccccaggccaactcctacaggaactatcactcctgtgtcattggttcgttcaaggaggtccgatagtcaagggaagtttgataccccgatatcagaagtttccatgtccacagcaaggcgcaagttcagcactctgtcctcaacctcatattggatgacacaaatcaggcttgcagaggctgcttccaagcactctatatcgttgggcttctttaagcttgcacttgaatcagaatgcgagcctctggatcgtatgagagatgagctaaaggcttatgttgtccggcatggcttgcaacagagttggaggaaccagtgaaggatattcttcaggtttacaatatcgtggaggatcttgagaagctaaagatcactgtgaactcttcagaacagccgaaaaagtctgacaaggctgctcatagtgccaccaatgtgtcaccaaagggtaatctgaagccaagatcgctgaattctgatgcagctcaaagtaaggaagcagctaaaaaagacaacattcagaagaagcctgatgcaaaggttagaggctcctacaaccggaatcctgcaaaagaagccatcaccaagaatactggtaagaaagccaagaagcaggtcaaggggcagaaggaagattgcaatggaggcagcgaggctttgccagttggtacagagcaagaacctgttgatgtggtgaaggaggtgacatatgaagataaggagaatatgggggacagtgaaatgccaatggatcttggcatagcccaagaaatctagaacaaccaaaccgacttcagattcaaatctttttatcgctggatatgaagtagagtgtgggtgcttgtttttcccctcat

SEQ ID NO: 389672 - DNA, 837 bp, Oryza sativa
ccacgcgagagacagagccagacagagtgcggcgccgaggaggagaggagcaataatccaattccaatccattcctccgcgacctcgtcgtccgatcatggccatggccgcctccaggttgctgtgggcttcccgcgccgcctcctacctcaagatctccactttccccagggccttctccaccgtgctgaaggatctgaagtatgctgacactcatgaatgggttaaggttgagggtgattcggcaaccgttggaattacagaccatgcccagcaccatttgggtgatgttgtgtatgtggagcttccagaagttggcagcagtgtatcccagggaaagaactttggtgctgttgaaagtgtgaaggcaaccagcgatatctactctccagtatctggagaggtggttgcagtgaacgatggactaggcgatgaacctggattggttaatacaagtccatacgagagtgggtggatcatcaaggtcaaggttagtgattcaggtgagctcaattcattgatggatgacgcgaaatactcgaaattctgcgaggaagaagatagcaagcattgaacaaataccagtgacttgtgatctgcaaagaatgcgccttgacccttttgtcaatgcttgtgatgtgctatcgagcacttatctttaccaccggctgctcctgaaatcagcaccgatcaacacatgaataaattagtgttggcattgcctcttccacaaagagttgcaaacttcgaacctgtaaatgacatgagtttcgttatttctttgtagtatcgcgtgatttcatcttcaattgtagctctgccgcctctgctccgttt

SEQ ID NO: 389673 - DNA, 650 bp, Oryza sativa
  unsure (1)..(650): unsure at all n locations
ccacgcgtccgcgccggccgtgaaggagaagaaggcgaaggcgaaggacaaggaaggattcaagacgatcgagatgacggagaaattctactgccgtgcgaaggacatgtatgagatcttgatggatgagaacagatggaaggggttcacgcagagcaatgcgaggataagcagagaggtcggagggcagttcagcctcttcgatgggtcaatcagcggcgtcaatgaggagttgcaggaagggaagctgatcgtgcagaagtggcggttcggtagctggccagacggcgtgcactcgacggttaggttggtatttgatgagcctgagtcgggagttacagtcataagcctcaaacaaactgatgtgccagaggaagacagatatggaaattcaactgtggtggagaacacggagcgaggctggagagaactcatcttccagaggatacgcggagtgtttggttttgggatctaaagcagtactttgactcttgagctggatttctgcttttcaggaagtcgagcgttaccatgtcacagttatccctgtctttgctgtcgcagtttattcgatgttagacacaaactttgcatattacggggaagtcggaaaaaacatctgttattcatcacactggaataatctnaat

SEQ ID NO: 389674 - DNA, 1310 bp, Oryza sativa
cttctcgatcatcgctcatcatcacaatcatcaacagctcagttcatccgtgccgtgttaatttagctagctagcaatcgagctcagttttcctaattaattgctagctcgatttgctcggtgatctcttcaattcgccggagcttggaatcaatcgagagattagagtgtacgtgagagctagcgggagatcgtcggcggcgatggtgaacacggcggcggtggcggcggcgaagggcagcaggggcagcgggctgccgctggcgtcgctgaaccacatcagcatcgtgtgcaggtcgttgcaggagtcgctcaccttctacaccgacgtgctcggcttcttccccgtccgtcgccccggatccttcgacttcgacggcgcatggctgtttaattatgggattggtatccatctgcttcaggctgaagatcctgacagcctgccagggaaaacagagatcaatcctaaagataatcacatctccttccagtgtgagagcatggtggcagtggagcggcggctgaaggagctaggcatcccttacatacaacgatgtgtggaggaaggtggcatctatgtggaccaaatcttcttccacgatcccgatggcttcatgatcgagatctgcaactgcgacaacctccccgtcgtccccctcggcgccgaccagccgctcgtcatggccgcctgcaagagggccgccgtcatcaagcagcagcagcaggcgtcctcttctccggcgacggcggcggcggcggcacagtgcgccgtgccatcgtcgacgaaggcgatccacgtcggcgaggaggcacacatctcgtgcgcctaaaggcaggagagattgtgtacatgcttgtgtggctgcaatgcaattagggatgcaagtaggctgatgtacaaactcaccaaaataggttatttactactcccttctctcgtaaaaaaaccaatctaggatcggatgtgacacaccttcatactacgaatctagacatatatatgtccagattcacagtactataatatgtcatatctgattctaggtttgttttttatagcaaggatggagtacgtggttggtgggttggtccacttaaatagcatgtatgtgggttagtggtcagctctctttcatcgctaaatgcaatgaacggttgtggtttgctagatcagttgtcaggttatgcgattgggctcactgggagtttgtacatgagtactatggtgttgggcaatgtaatcccctttgttataagtaaagaataaattaagcagaatgagtcatgtcttaaaaaaaaaaaaaaaaaaa

SEQ ID NO: 389675 - DNA, 741 bp, Oryza sativa
  unsure (1)..(741): unsure at all n locations
aaacatctcttggaagagtgacagggagcacaaatttggacgtgatgtctttccaaagaacttccagaatggttctcttataggtggaaaaacacttgatccaaataaatcgttgagtaaacaagaagaccttattgtttggatgagaactgctgcacttccaacattcagaaagctgtatggtaggatacacactgacctcaagaaaggtgacaccattacggtgacattggagaacaactacagcacatatagctttagtggcaaaaagaagggggtactttctacctcgacatggctcggtggaaagaatgattttcttggtctagcatatctcagtgttggtggactctgcttcttcctggcatttgcattcaccttgctgtacttgataaaaccaaggaaaatgggtgacaacaactacttgtcatggaacagaaaccctgcaggccgttaataagctcttcaaacttttaagttgcaaattcaacatgaagcaagttggattatggattcaaatgtatcttgtactagatagcggttttatttgttagccgtgctggagtgccaatacggcttataccaattagggcagcgtttatgagcaacactgatgtacattatgttgcaaagaaaaatatatatatatacagccttcttttgttgaaaattttaaatatcccagaagttaaatggaatgatttttatnnnnnnnnnnnnnnnnnnnnnnnnnnnnnnnnn

SEQ ID NO: 389676 - DNA, 694 bp, Oryza sativa
  unsure (1)..(694): unsure at all n locations
ttcggcaacacttcgccggtgccggtcacccgcatggtcgccatcttcgagaagcttcctcggcaagaaggccaacaagcgcatcgtcgccatgcccagcaatggcgacntgcccttcacccacgccaacgtcacccacgccgcccacgacttcgntaccgccccaccacctccctcgacgccggccttcggccaattcgtcgactggttcgccgactactacaagctcaagctcgacgtccccaagatcgccgccaaggtcgccggcgccggcaagccctcctcctcgtcggcctccaagaagaagaagaaggccgcggcgatgtcggcgtcatcatgatcgagcagcacaacaccatgagacaccatgcaagtgtgtattccatagctagttcttggaggctcttgtctgtataacattgtaagtgcttattgtttaagcccctattaatttcttttcttcttcttcttgaggtgtttaatttttagtgattagaaacaagggaataatggtggagaaataacactgttgttggtagataaatatgagaggggtatagagatgatgataaagatcaaaaacccttggaagccaggacagaaagaaagatgaagtccctggcttccttcgaatcaaaatataataaataaaaaatgatttatattattttttataaataaatatatatttata

SEQ ID NO: 389677 - DNA, 1019 bp, Oryza sativa
ccacgcgtccgcccacgcgtccgaccgcattcaagctcttcactggctcggcgtggatgatgcttactcatcaatttattgaatactgcatatggggttgggacaatcttcccaggacggtcctgatgtattatgccaattgtctttcttcaccagagggttacttccacacagtcatttgcaatgtcccagagttccgcaacaccactgtgaatcatgatctacatttcatttcttgggacaacccaccaaagcaacaccctcactacctcaccctcaatgactttgacggtatggttaacagcaatgctccctttgcaagaaaagtttggaagagaagatcctgtactagacaagatcgaccaggaattattgggccgccaacctgacgcggttcgtggcaggggggtggattggactgttgaacaccacaacagtgagagggtcgttcactgttgagcgtgtacaagatctccgcccagggcctggtgcagacaggctaaagatacttgtcacaggcttgctcacccaggaaggctttgatgacaagcattgcttgtgaaacttgcagtaatatgattctggggtaggttacactatcaaaattcgaggatgttgcgccattagctagtcatctactagctgaagaagcagcagcacatagcatcaattccacatggatggaatggtcagataggtgatctttttacacaaaccacttgagttgaatcaccgtacaggagaccacggccgtagcacacggagattatacagcactaatagctcattaggttatgttagaggattatatcagcccccaaccattaataatctcttcttgatctctctgcgctgcgggttgtccaagatggtccattattcgttcagaaaatcacagcactgaccagatcaatttgccaacctgcagcgcttgagatttcgttgtattaacttggattcttctgggcaaactggcacattttgattacatacatgtattctttgatttcaaaaaaaaa

SEQ ID NO: 389678 - DNA, 1161 bp, Oryza sativa
  unsure (1)..(1161): unsure at all n locations
ctgcagtaccgtccggatcccggtcgaccccgcgtccgcccacgcgtccgccaccttggtagaagagaaggacacaggggtcgttccggctctcatggtcgtccacagttcttagttttttcttcgcatccaaacatgccttctgctggttcagtttcttcatcgtccgttcaaggggaagtggataatgaatcaagtcctgtccacacaactggtgaattatcactgcatgctaacacccatgaagaagcaggcaatcaaagtcctgggatgcttacctacgatgctgatcaagatgctgttgtttcatctggaaatagtacccctgtatctagccctaggtttttcaacaggaggcattccactgggcaatcaactccagtaaacaacggcagagctgggctttcagatcttcagtctttctcagactctctgaagtctcgcttaaatgctgtctctatgaagtacaaggaatctattaccaaaaagtactcgaggatggaaggagagacttttttcgcgtcattcatctgtggcagatcttggttctgaagtaagaagagaagttaatgctggaattgcatccgtatcaaggatgatggagcgtctggaaactagaggtagtaatggtagaacaagtgatggcccagcaatatccacttctgaagttattcccagtacagaatcaagcaatgagagagttacagaaaacaatccaactactgcagcgacaagtagtggcaacacttctgcgtcttctgccccttgtgttacaacaaccggttcaaattagcatgttataggttccgaaagaaggcctgcacattcccattcttctccatcaaaggattgccattgccaggcatgggcaggtgaccaaaagcaacgtcatgttgtcatcctcagcattgcataaatcacctccagaaaatcggaatgacaaatttgatgtattggtttgataaaagggctcagcccgaggtattaccttaggatgccgatttgttctgcttcatctatgtaaaaagggaaaaaaatcagggacaagtttttaccggtataaataatggatttggtgacataatagcaatcataatcgtgataaatatgattgatccagcnnnnnnnnnnnnnnnnnnnnnnnnnnnnnnnnnnnnnnnn

SEQ ID NO: 389679 - DNA, 743 bp, Oryza sativa
ggaggttggaggaggaggcgaagaggctagctagctagctagggtttcgtgctccccatcgcctcgcgcgcgcagccggatccgatcgggcgtcctcgtcggcgtcggcggcggtgcccctgatatcagtgttgtgattccgttgcaatggcatctggaactgatgagaaagccaagatggagggtttgacatcagctgcagcctttgttgagggtgggattcaggatgcatgtgatgatgcatgtagtatctgccttgaggcgttctgtgagagtgacccttccacattgactggttgcaaacacgagttccacctccaatgcattcttgaatggtgtcagagaagttctcagtgtcctatgtgttggcagcctatcagtttgaaggatcctaccagtcaagagctgctcgaggcagtggagcgtgaaaggaatgtaaggaccaatcaaactcgaaatacaactatatttcatcatcctgctcttggagattttgaggttcagcatcacctagcagcagccgctgcaatgggaaggtcacacccccttggtagcacagaaggccacaggggtcggtccggctctcatggtcctccccaggtcgtaggttttcctgcgcatccagacatgccttcggctggttcagtttcctcgtctatgtaaaacgggtaaaaaaatcagggccaagttttcaccggtataaataatggatttggtgaccccatagcacaaaaaaaaccaaa

SEQ ID NO: 389680 - DNA, 660 bp, Oryza sativa
tttttgttaccttaatccgcgagagccctgtggtgaattttattttcattcaaattccgctgcttccggtttaaatcttatccaaattccggtgtggagttttaaaccggtcaattgcttctcaatttatcattgtttaacttttttcttcatccgattttcggttcggacgagagctctattgccgtaccggcaggagaagggagcagggagagcgccgccgccgccgccgccgccgcaccggcgctgtgccgacgagatgagcctctcccaccacctccccccgccgccgggagacccctactacgtgtacgcgccgcacccctacccagatccgcagcggcagggggtactcacgctcttcgtcgccggcctccctgacgacgtgaagccccgggagatccacaacctcttctccagccgccccggcttcgaccactgcctcctcgagtacaccggccgcgggaaccaggtggtggccttcgtgtcattcgttaatcatcaggcggctctttcggcaatgtctgctttaaatgtgagttatgatgttgaacatcttatggaagaaccaatttccaccatcctttgctgcgtgacctggaatcctttccctcttgtatcttttcaacttcatatttgttaaagtatgtaatccctggc

SEQ ID NO: 389681 - DNA, 571 bp, Oryza sativa
  unsure (1)..(571): unsure at all n locations
cgacggtcacagagcacggccgcntnnctctgctccttcgtcgtcaccccgcgcatcgccagcccggcggggtacctcctcagcggcgtcacggcgacgctcgccgaccagctcgggtcgggcgtgttcctctccagcgggatcgggacgagcggtgtctcgctcgagctcaacctctcctacgtcgacgtggccagcatcggggaagaaatagaggttgagggaaagctgttgcgcgctggaaaatcagtcggtgttgtctctgttgatttcaggaagaaaaagacaggcaaattgatagcgcaggcccgccataccaagtacctcgctgtatctagcaaactatgaggttttcctacgataccaaaatgatcatgtcaaactctttactatctaggaccttgtcatacgctgtcaagtgctgataattgttctaaaataggatcgtgtccatctcaaacgcatagattgatggcggttctgttatttatattgcttaggtcaattcctattgggaatgaagggatttcacagaaaatgggggtaaatcctcctaaattcatacccaaan

SEQ ID NO: 389682 - DNA, 478 bp, Oryza sativa
ccacgcgtccgcgtctgcctctggctacgcgccaccgaccgcacggccaccatgcccggcgaggagggcaagttctcccccctcatgcccgactgctgaacccaagatccgtgttggatttctggatccgatcgagcagtggagcgtagccgccatcttctttcttgcctcagatgctcatctaattgcagttaataattaattgctgcattcttatctcttttttagcgtgggctttcttcttttcttctctggtgttcaataactaattttttttttcttcttttactttggatttctagagagagtcatcagtgagaggagttaggcgtgatgacatcagcttttgtgtataggtactcccccccaatttatgtcgcttcaccggaagactgctgctgatcttgctagcttatgcttgagatggaatactctgctttcgcacttggatttttttatttctctcactccacaatgg

SEQ ID NO: 389683 - DNA, 525 bp, Oryza sativa
  unsure (1)..(525): unsure at all n locations
gttccgcggcgcgcaacacgttccggtgccccaacctcgggcctcaccagctgggtccgactgccgatccacgacgccgacttcggctgggggcggccggtgttcatgggccccggcggcatcgcgtacgaggggctcgccttcgtgctccccagcgccagcggcgacggcagcctgtcggtggccatctcgctgcaggccgagcacatggagaagttccgcaagatgatcttcgacttctgatcctctgaaatcaaacaacacgtacgtacgcacgcacgaacgcgcacatgcatggagaggaggcggggtggttcttaacacagcctatcatcggtaggatgcagcaacgattctttgattccacacgttagttcctgcaaatttttcccttcctgccttcccgcttttgggcaggacacattttgtgccaactgtatttgtattgtgaacagttaattaatccgtaaacattacgaaacacagagggttaataaggttaaaaaaaataaattactnnnnnnn

SEQ ID NO: 389684 - DNA, 597 bp, Oryza sativa
ccacgcgtccggccgtgtcgatgtatgctgagggtgtgcatggtctcaagggcaactgtgtgtactggattggtgggcgtggtagggatcagggcatggtgttcgacatggaaaccgggaggtctacgccttgctatcctttggttggtggcatgccagggcctttgcaaagcacgatctgctggttcttcttgagtgatatagtgaacgccagcaacaatagtggaggaaggagagtttatcagacacgatcaaggtcccgtgcggaacgtgcacaggatatggaagagtaatgcgtcgccagattgcttggtgacatagtgggtttcaccgatcacgatgatagaagtttgagcttatgtaccatagcaaaagtgtgatctgaacgtgcataagttgtggcagagctggtgtttcaaaactgcccgtgtagccgatagtttattgcgatttgtttgttttccaaatcaattttctctgtctagttgtgcttatgtaactcgtatcatccttatatatttgtgtaatgaaacaatcgctgtcatcttgttgagcttgtattcatcatattatgatggaataagaaaatggctcctg

SEQ ID NO: 389685 - DNA, 980 bp, Oryza sativa
ccacgcgtccgcggacgcgtgggcggacgcgtgggtttgtcaccaacctgcctgctttccatcaggttctggtcttcgtttgcgtcaagtccgtacctgtgccgttcgttccagaggacgaacggtacctcattggacggatcggccccagggaataccgtatgtaccggtgcatcgtgaggtatggctacaaagatgtgcagaaagatgacgagagctttgtgaaccacttggtgatgagcattgccaagttcatccaaatggaagccgaggaggcagcctcctctgggagctacgaatcttcggaagggaggatggctgtcatacacacagaggacacaaccggcaccggtctggtgatgagggactccaataacgaggcttcaggcacgtccctgacaaggagcagcaggtcggagacgctccggagcctccagtccatctacgagcaggagtccggtagtctcagccggcgtcgcagagtccgctttgagattgcggaggaggagccgttcgacccccaggtgcgggacgagctggctgatctcctggacgccaaggaggccggcgtgacttacatcatcggccactcctacgtgaaggcaaggaagaactccaacttcctcaagacgttcgccatcgactacgcttactcgttcctccgcaagaactgcaggggtcccgcggtggcgctgcacataccccacattagcctcgtcgaagtcggcatgatctactatgtctaaatcgatttttctgatcatgcttgccgtactacccagtaatactagctttgttttgagctgaatcttctgttggtcatcctcaactgtgtacgtcattttgtttgctcttttatacatgtaatgtagttgccgagttaccatgtgatgtaaagatgctggcagaactagctttagctgctaccatctgaactccggggcttcggtgatcttgtgaatacatccagttcaactgtt

SEQ ID NO: 389686 - DNA, 1137 bp, Oryza sativa
  unsure (1)..(1137): unsure at all n locations
ccctcctcctgccgcgatccactcctgctctccagctcagggaatccacctccacccgcagagaccaaccagcagctgtccgtcctctgcggcggcggcggcggcggcgagatggggcaagctctgcggcggctcttcgacgccttcttctccaccagggagatgcgggttgtgatgcttggtttggatgcagctggcaagacaacaattttgtataggctgcacatgggagaagttctttcaacggttcctacagtaggttttaacgtagagaaggttcagtacaagaatgtggtatttactgtgtgggatgttggcggacaagaaaagctcaggccattatggaagatgtacctcagcaattctgatgcactgatctaacgttgttgattcattggacagagaaaggattatagacgccagacaagaatttcagaccattatcaaggacccactgatggcaaacagcataatcttagtatttgcaaacaaacaggacctgagaggtgcgatgagcccagatgaggtgagcgaggggctagccctgcacgacctccaggaacaggatatggcatatacaagggacatgcgctctccgtggtgagggactctacgatggacttgattggctcgcatccaccctgaagcaattgcaagagacaggccatgcaacttcagtcgccggcccttccatctgatttcgctagagaagagatgccaatgcctcaactagtcaaccaatctgatgctcctgggcagtcatccttctgttcatccaatgagaatattgagttccttggtgcatgcgtgatcttcgctatcggctttcttggtgtggctgctcgcagaggagggcattcaatcgctgtgttcatatgagcaaactcatttgacagtaacttgcggcataattttctcctaaaatgtttgtaaagtgtttggacgtctgtgtactttgttgtagtgaacaagagctgagtagtttgcacggaccgtgcttgtgtatacttgatggcacgtccacatgattgtttgctgattgcctatcaataagacggttggatgatggatgttgtttggtgatatataaactgggctttggctgaatgttcctcctnnnnnnnnnnnnnnnnnnnn

SEQ ID NO: 389687 - DNA, 1043 bp, Oryza sativa
  unsure (1)..(1043): unsure at all n locations
tcagttgcagccatggcgaagcccactcctgctcctcgcgccacaccattcctcctcgccgccgtgctctccatcgtcgtcgtcgcggcctccggcgcggaggcgcggtggtacggcggcggcggcggcggcgggtacagccccagccccagcccggtgtcgtcgatcgtcagcgagcagctgtacgcctccctgttcctgcacaaggacgacgcggcctgcccggcgagggggttctacacctacgcgtccttcgtcagggccgcgacgaggttcccccggttcgccgccacgggctgcgccgacgcccgcaagcgcgaggtcgccgccttcctcgcgcagatctcccacgagaccaccggcggctgggccaccgcgcccgacggcccctacgcctggggcctctgctacaaggaggagatcaacccgcagagcagctactgcgacgccaccgacaagcagtggccgtgctaccccggcaagtcctaccatggccgaggccccatccaaatctcatggaacctcaactacgggccggcgggccaggccctgggcttcgatggtctngcgcaacccgagatcgtggccaactgctcggacatagcgttccagacggcgctgtggttctggatgacgccgagggacaccaagccgtcgtgccaccaggtgatggtcggggagtaccggcccggcccggccgacgtggcggctaaccgcacggcgggcttcgggctggtcaccaacatcgtcaacggcgggctcgagtgcaaccgggcaggcgacgcccgggtgaacaaccgcatcggcttctaccggcgctactgccaggtgctcggcgtcgacgtcgggcccaacctcgactgcgagcaccagcagcccttctagcttgctataaaaattcatgtcgtttctcatgtcgctgcttgcgattagctgtaagatttaattttaagtgttgttgcgtgaactgtgtacacgccgtcttgttttgtctcattcattggaaattggaatcaaggaccactgcaattgtgctaaacaaa

SEQ ID NO: 389688 - DNA, 529 bp, Oryza sativa
cccacgcgtccggcggggagctcggtgggggagggttgctcggatctaggctgatgaagcacgggaggggcaatgcgggggaccaggagcacgaatggaggccgccggcgaagcaggcgaggggcggggacgcgtcctccgccgcgggctttgggaggggatggtgttaaaaaatgtgaggacatcaatgagtgcaaagagaaataagcttgtcaatgtccagaatgcagttgcagagatacatggggtgactatgaatgtacttgcagtggggacctactgtacatcaaagagcatgatacttgcataagtaagacagctgttcagggtaaagcagcttgggctgcagtttggggaatcttgatagtcttggtagttgtggcagcaggaagttatgttgtctacaaatacagactaaggtcatacatggactctgagatcagagcaatcatggcacagtacatgccactggacagtcaaggggaggggccaaatcataccattgatgaaaaacaccattagcaagagt

SEQ ID NO: 389689 - DNA, 1087 bp, Oryza sativa
  unsure (1)..(1087): unsure at all n locations
ccacgcgtccgaaaagatgttgttgttgagaacctgagacagctttgtgtatttcaagttgcaaaagagagcaaaaaaccatggatctggtgggattatgtaactgattttcacataaggtgcccaatgaaggacaaaaagtataacaagaaatgtgcagaaactgtcatcaaatcactaggtttagatgtaaagaaggttgacaagtgcatgggagatccaaatgctgattcggaccaccccttgcttaaaatggagcaggatgcacagattgggaaaggatcaagaggagatgttactatattgcctactcttgttgtgaacaatcggcaataccgaggaaagcttgaaaggaaagctgtcctcaaagctatatgtgctggctttgaagaaactaccgagccaaatgtttgtcttagtgatgaaatggaaactaatgagtgcctgaatgacaaacggtggttgctggcaagacaaagctgctaatgtaacagctngcatggacactttccgtggtagagtgtgtgaatgccctacattcaatggtgtgcagtttaaaggcgatggctacagcaattgtgaacctgctggaccaggaaagtgcttgataaatcatggcggctgttggcatgagactcgcaatggcaaaacattttctgcttgtcaggaatcaggaaatggaaaatgccagtgtccagctggtttccgaggggatggtgttaaaaaatgtgaagacatcaatgagtgcaaagagaaaaaagcttgtcaatgtccagaatgcagttgcagagatacatggggtgactatgaatgtacttgcagtggggacctactgtacatcaaagagcatgatacttgcataagtaagacagctgttcagggtaaagcagcttgggctgcagtttggggaatcttgatagtcttggtagttgtggcagcaggaagttatgttgtctacaaatacagactaaggtcatacatggactctgagatcagagcaatcatggcacagtacatgccactggacagtcaaggggaggtgccaaatcatacaaatgatgaagaacaccattagcaaggagttagt

SEQ ID NO: 389690 - DNA, 709 bp, Oryza sativa
  unsure (1)..(709): unsure at all n locations
accacgtcggnttccataccgccgcttcgacgttttcgtcacctaccgcgacgaaccccgtcacggtccccttttccttcccgccgacttaccagggcccaccgcgacgtcaccatctgntcgcccgtgctctccggcgagtccntccccgtgncgggcttcgtcgccgacgcgctcaggcaggacgtcgcccgccgggtacgtcgcgctgcaggtgaaggtcgacggccgcgtcaagtggaaggtcggcagctgggtctccggcagctaccacctctttgtcagctgccccgccatgctcgcctccgccggaccaggcggcgtcggccccatgcctcctcggcggcgcctccgccgccgtcgtgaacggcaccggcgccggcgccgtcgcgtcgctcaggttcacgcagccgacagggtgcagcgtcgaggtgtgagtcacaaatttgagtagcggctagtggcaatatggtaattaattaagttcatcggtcgcgtgggtccgcaagctgttaattttttttttgtgttcatgtagctcatgcatactctatgtgagagaataaagttacgtacgttcatatgtataccattgcaacacattaatttcctatatgaagtgtactagtataatttcgttgctgtaatttttgaattattgttaataatatatattcaggtaatatttctcgagaaaaaaaaaaaaaaa

SEQ ID NO: 389691 - DNA, 936 bp, Oryza sativa
  unsure (1)..(936): unsure at all n locations
taccggtaccggcagtgcccggcgccgagcccacgcgttcgccaacaagtcgctcaccgccgaggagatggtcgtcctctccggcgcccacaccgtcggccgctccttctgctcctccttcctcgcccgcatctggaacaacaccacccccatcgtacgtacatagatcgatcgccggcgacggcgacggcgacctcgcggccattgaccatttcgccattgacgtacggctcacatggcggcggccggtgtgttcgatcgtgtgcaggtggacacggggctgagcccggggtacgcggcgctgctgagggcgctgtgcccgtcgaacgcgtcggcgacggcgacgacggcgatcgacgtgagcacgccggcgacgctggacaacaactactacaagctgctgccgctcaacctggggctcttcttctccgacaaccagctgcgggtgaacgcgacgctgggcgccgtcggtgagcagcttcgcggcgaacgagacgctgtggaaggagaagttcgtcgccgccatggtcaagatggggagcatcgaggtgctcaccggcagccagggcgaggtcaggctcaactgcagcgtcgtcaacaaccggtcatcctcctccgccgccgggatggagacgtcgtaccactactactccggatccaccatgtccgtcgacgaggtcgcgtcgagctgatcgacgacgatgtacaacctgtttggtgttaattaggatgtgtgtatcccacgaggtcacgacgatgtagaagccgggaaggtcaaaacattaattctatgatgtatgaaaaaaagcgtgtctatgtaaaattttatatatttgtctgcatacatgcatgcatgcagtatgcgagttatttgcagtacgtgtcatttagtttgtaacgctngatgcaaccatgttcctttcagcttatcagtca

SEQ ID NO: 389692 - DNA, 572 bp, Oryza sativa
ttcacgccgatcacgacggagatcgacgtgagcacgccggcgacgctggacaacaactactacaagctgctgccgctcaacctgggcctccacttctccgacgaccagctcatccgcaacgccacgctcctcccctttgtcgacgccttcgccgccaacgagacgctgtggaaggagaagttcgtcgccgccatgttcaagatgggccacatcgacgtgctcaccggcgcccggggggagacccggctcatctgcagcgccgtcaacccgtcctcgtcgtcgtcgtcctcctccgcacgggaggatcctcgaggccgtcttccccggcgccggcggtgaggtcgccgccagctaagctatacccttgctgaccatgtaatatacgtcatatatatgatgataatgtaaaattaataatgcatgacacgcacttgcactgtgtgttgtacggccagggcaagtgtggttggttaataagagctttgtttgcacctacttgatgtgtgtagtgactctgccatgaacgatgcacgtatacaagtatataattaagatggccggcagctggtaat

SEQ ID NO: 389693 - DNA, 480 bp, Oryza sativa
  unsure (1)..(480): unsure at all n locations
aggcgacctatatgtnactttcgaggttttattcccgaaanccctaaccgacgcccagaagtccaagctgaagagcattctcacataaccgaaggcccaggttttcgcttttatgctgcagctagttcgttctcatttgaggtgggaaggaaaactgcctcaaaaaaggaaattttcccagcttacaagcaccagcagctgccttttctgtgggtgtgattttgcgttggtaattgttagcagttcagcagtttaatttctcttttaccttattttgtttctcatgtcattaacaaccgggtgtagcatttaggaagttggatgatcatgagctgtaccaaaatatttgtattgctggaagaatatattgatggtagaattgtagcttacacttcccaaaaatgtatttactggttgtacaacagtcagcagtaaaattaaatggaatttaagtcagggtcattcgttgtcctgctggtg

SEQ ID NO: 389694 - DNA, 1549 bp, Oryza sativa
gttttgcactgcaggcctctgtcgttataaacaacattggcgtgatgattgcttacatgattatcattggtgatgtattatctggaacataatcaaccggtgttcaccatcgtggtatacttgagggctggtttggagctcatctctggaattcacgtgccattgttcttcttgcgacgactcttttcgtgtttgctccattggtgagctttaagcgtctggattcattgagatacacctctgccctatcggttgctcttgctgtggtttttgtcgtcattactgctggaattgctatcatcaaactcttcaatggaactgtagcgatgcccaaactttttccagaactagatggtcttagttccatctggaagctcttcacagctgtccctgttcttgtcactgcctacatctgccattacaatgttcacagcattgacaatgagcttgaagacagaacacaaattaaacctattgtgcgaacatccctgttcctctgctccagtgtttacattgctacaagtttctttgcatatctcctcttcggcgagggtaccctagatgatgttctcgctaacttcgatgcaaatcttgggattccatttagttccgtctttgatgatatagtgcgagtgagctatgctgctcacgttatgcttgtctttcccatagtcttctttgcccttaggctcaacttggatggactgctcttccccacatcaaggcacatttctcgtgacaacaagagatttgccataatcactatctcactcctcacagtaatttatcttgctgccattttcataccgagcatttgggatgcattccagtttactggtgcaactgctgctgtcctgattggtttcatcttccctgccatggttatacttagggatccttatggaatcgcatccaagcgtgacaagatcttggctgtaaccatgatcgtgcttgctgtcctctccaattctgttgctttatacagcgatgcaatgaatatcttccgtaaggaagaggaggcatgaatgtcagactccaaaggaatgtcatcaaatatcagtgatgaaggaagcgtggcttcatgttatgagacacagatgctgtgaagggaaattatttcctggaatccagcgaacgaagatttcttggtcagcggtcgaggttccagtcactcgaatgaattggatggttgaatctgcgtggcttctgtgcgaaccggctcaaattcgaattgagctgctcgcgatatctgtattgttagtgttcttgtatccacaagcaatgtatggctttaaaatgcctggtttacaataatgtacagtttcaaaaatacttcagatgagttaaatgtctatgtgaacctggactcagtgtcgatttaaaattggaatggctgttgttgccatctttcggactttcacttgtgtgtcaagtctctgcatgtttgaattaaggcaatatgagaatttaatttacttttgaaaaactctggtttccaatgatgttgaaaagtacaatgctaaattttcatcaaaaaaaaaaaaaaaaa

SEQ ID NO: 389695 - DNA, 556 bp, Oryza sativa
cgcaagttcacctcagctcagctcacaattcggctgtatccaagatcgccatgggcttcccggtgggctactcggagctgctcctcccgaggctgctgctccaggtgctcctcctcctcggccacctccatcgctttctcctctgggccttccacgcagtcggcctcggcgacctcatcgacaacccgcccggcctggcggccacggagcaggacctgatgctgcaggggcgcggcggcgggatggcggagggttgggcgtcgtcgtcggcgctccagcaccgccggcccgaagttcagggcgattccgccgatggccatcgaggaggccctccccgtggtgcggttcgacgagctggtggcgtccgccccggcggcggtgtgcggtggcggcgactgcgacggttctgcctcagcggcatctgcgggcgcgacgaggtgcggcggctgtccaactgccgccacgttttccaccgcggctgtctcgaccgctggatggcccacgagcagtgcacctgcccgttttgccgcgcgccgttcattcccgacgagctctt

SEQ ID NO: 389696 - DNA, 542 bp, Oryza sativa
ccacgcgtccggtttaatttgtgcatagttcgctgcgcgcggcgacgacgacgatgaaggaaggaggaggaggaggaggggagaggaggaacatcctggccaagacgatcgacaggtgccggtcgtcgctggggcaccggacaacgaggcgccccgcctccgccgccggcggcggcggctacggcggcgcggccgtgccggcggggttcttcgcggtgctggtggggccggagaaggagcggttcgcggtgtcgggcgcggtgcgccaaccacccgctgttccgggctctgctggaccaggcggagacggagtacgggttcgccgggtgcgagggccccctcgagctcccctgcgacgtcgacgccttcatggacgtcatgtgggagatggagcaggccgaccccgtcgtgtccccgcgctgcggcgcgcgctttggcggtcccgccgccgccggcagcggcaggggctacgggggccacggccaccaccaccaacaccaggggtaccagatgatgagcaccccggcgaggctcctcgtcgc

SEQ ID NO: 389697 - DNA, 483 bp, Oryza sativa
  unsure (1)..(483): unsure at all n locations
ccacgcgtccgccgtctcgccggaggccaaggacctgatgcgccgcatgctctgcaaggacgtctccagaaggttctccgccgaccaagtcctgaggcatccttggatcgtgagccgtgggggagccgcggtgatgggctagttcgttcgatcgaggatgatgatgaactccatccatgtgtagatagcttttcttcaggcgaaggactcgtctgctagctgtgaattttggcttggattagtggcagggttcagtggtagtagcgtattattagtgtttgtgtccagtaggagttaggaccatgacgagctctggtgaattggctggaatttgggagctagctatatctttctacccgagtttgtccgatgtacatacagtgatcagttgatcaccttttggctgaactgaagaagagggtagtctctcttagtgcgtagcaggcttgttcagatgnnnnnnnnnnnnnnnnnnnnnnnnnn

SEQ ID NO: 389698 - DNA, 1007 bp, Oryza sativa
  unsure (1)..(1007): unsure at all n locations
cacaggttctggtatagacaatgctgacacaaacagcatagctacattagcagattactccaagcccttaatcgactacctcaataaacttcctgagaatgagaaggttattttggtcggccatagttgtggaggtgcaagtgtgtcatatgcgttagaacaatgccccaaaaagatatcaaaggctatatttcttaccgctacaatggtaaaagatggccagaggccctttgacgtgttctctgaggaactcgcatctgcagatgttttcttgcaagaatcacagcttttaatttacggaaatggtaaggacaagcctcctactgggctcatgtttgacaaacagcagatcaaggggctatatttcaacaccagtccttccaaggataccgtgctggctgcagtgtccatgaggcccatccctctagccccaatcatggagaagctctccctcaccccagaaaactatggcaccgtcccacgctacttcatccagacgctcgatgatcgaatgctctcgcctgatgtccaggagaagctggtcagggagaacccgcccgacgggatcttcaagataaagggtggcgaccattgccccttcttctcgaagccgcaatccctcaacaagatcttgcttgagatcgctcagattcaagctccgacggcgctgctcccaggcaaggcgaagacggaggcgatagaggcaacagaggctaagacagaagaagagaaaactgagaaattatcatgactttgtattgtgtatgtacatgtaagggtagtagcacataggttgcaaacaggaggaaataccaggatcaattgaaaccagtcggctgccagaataataatgtaccagtaggaagacgaaaaaatgttgttcttttttcttcttttgtgatcaagtatagagaatgagcctatgagagatcttcagtcagatatatgtttaaccttgtgaattacaggttcttcagtctgaacattttcaaaaaaannaaaaaaaa

SEQ ID NO: 389699 - DNA, 696 bp, Oryza sativa
  unsure (1)..(696): unsure at all n locations
ggctcctacgacttcatcggagttaattactacaccacctactacgctaagagtataccgccgcctaactccaacgagctatcctacgacctcgacaaccgcgccaacaccgccggcttccgtaatggcaaacccatcggtccacaggaatttacaccgatcttcttcaactaccctccaggtctccgtgagctcctcctctacaccaagaggagatacaacaacccgaccatctatgttacagaaaacggcatcgatgagggtaacaacagcacactgccagaggcgctcaaggatggagcacaggatcgagttccactcaaagcacctgcagttcgccaaccacgccatcaggaatggggtgaacgtgaagggctacttcacgtggacattcatggactgcttcgagtggggtgacggctacctcgacaggttcggcctcatctacgtcgaccgcaagacgctcaagcgctaccgcaaggagtccagctactggaccgaagacttcctcaagaggcactgatccagccccacaaaatttcggattgatcacgagatcgatcggcttggcaccagattgtgttcgnagtctagcttcagctggtattgtgattgtgcatagtgtgtccgtatatgcgtatgatatgctgcactcactattggatgtgtcctcaggtcactctcaccgtggtgcta

SEQ ID NO: 389700 - DNA, 489 bp, Oryza sativa
ttgcagtatttccatcatgggcacgtcactttctcctgacgaatgagtaccctacagagaagagcgtgaatccgatgatgcttgggtgcattgctggctctctactacttaggaaagctgcatcacatgcttttgagaagaacaagagatcaactgtcaccactgacatcattgagttactgggcaaaagcttggaagatatatgccctgctggtcattagtttagatctttaccatcattggtggtacggcgccttagcacctgtaataatggtaatccatatgttcggataccagtctctccctgcttaatgtacatgtttcttgactgaaaagatggtgttacaatgcttggttttgtttagcctccgttttgctcagaagaattctacagaatgaataatgaattgccccataaatggggctttgattttgaaaaaataaaatattttttttaattattttatatattattttttttttttttta

SEQ ID NO: 389701 - DNA, 1724 bp, Oryza sativa
  unsure (1)..(1724): unsure at all n locations
tgaggatgtaaagaatatgctatacactgacagtgctgaggctggggaggctggtggcattggcatgggcttgcttatggctggaacagacagtgagaaggctggagagatgcttgcctatgcacatgatacacagcatgagaaaattattcggggcttgtcacttggaattgcattgacagtttatggcagggaagaggaagctgacaccttgattgaacaaatgactagagatcaagatcccatactccgttatggtggtatgtacgcattggctctagcgtacaggggaactgcaaataacaaagctatccaccagcttcttcattttgcggtgtcagatgtgagcgacgatgtccggaggactgcagtattggctcttggttttgtcctgtacaatgagcctgagcagactccaagaattgtgtctctgctctctgaatcatataatccgcatgtccgttatggtgccgctttagctgttggaatatcctgtgcaggaacaggattaagtgatgccatctccttgttggagcctcttacatctgatgttgttgacttcgtgcggcaaggtgctctcattgcaatggcaatggtcatgatccaaactaatgaatcatatgactctcgtgttggaacattcaggcgtcagttggaaaagatcattctcgacaagcatgaggacaccatgagcaaaatgggtgccataatggctactggtatccttgatgctggtggtaggaacgttaccatcaggcttcagtccaggtcaaagcatgacaagctgactgctgttgttggccttgccgtcttcacccagttctggtattggtacccgctgacatatttcatcagcctggccttctctccgacggcttttattggcctcaactctgacttgaaagtgccgaagtttgagttcctgtcaaacactaaaccatcgctctttgattacccaaagccgacaacccaacaaaccacgactgcttcagttaagctgcctacggccatcctatcaacatatgccaaggcaaaatctagggcaaagaaggaagccgaaagcaaagctcaggagaaagcagaagcaccaccaagtcaagatgcttctacttcaatgcaggtcgatggtgtggcggagaagaaagcccctgagcccgaaccgaccttccagatcctgactaacccggcccgggttgtcccggcccaggagaagttcataaaattcctggaggccggcaggtacgagcctgtgaagctggcgccctccggatttgtcctcctacgggacctcaagcccaccgagacggaggaactagtcctcaccgacgccccggcaactcaggcgacgaacgccgcagccgccaccgctggccagcaaggctcaggctgccgccgccatggccgtcgacgaggagcccctgccaccccagccatttgagtacacctcgtgatcccttgatgatcccagggctaaacacttgtactgtttgtttctaacttggtagccatgatggaatcaaatgtttctttcacaaagcttatgaattgattctttccattgatttactggtttagtgtgtggaaaaattgttggtattagtcaccagagtaaaatatttcacctgcaaaagaggagttcgatcaagatttgtattggagtctggaattggatgcgtgtcatcgcgaattttcgtttcnnnnnnnnnnnnnnnnnnnnnnnnnnn

SEQ ID NO: 389702 - DNA, 1413 bp, Oryza sativa
cataaatgtgcctattggagcttcatgggtggaagttacaatgcgcacatcagcctttgatactcctaggaggttctttttggacactgttcagatctgtccactgaagcgacctattaaatgggaggctgttgtcactttctcttcaccttctctcaagaatttcagttttcctgtagaaggtggcttaactttggagttgtccatagcccagttctggtctagcggaattgctagccatgaacctacctgtgttgattttgagattgtgtttcatggaatatcccgtgatcagaaaataattggccttgatggtagtgaggcacctgtgcgtgttgttgctagatctctattagcatcagagaggcttgttcctgttgccactctgaacaaggtcaagaccccttatcgaccagtggagtctaatctttgttcacttcctcccagccgtgatagattaccatctggcaagcaaatcatagcactaactctgacttacaaattcaaactagaggatggtgctgaaataaagccccgtgtgcccctacttaacaacagaatatatgataacaagttcgagtctcagtattatagaatatcagattcaaacaagtgtgtctactcttctggtgacgtctatcctaattatgtcaaactctcaaaaggtgaatacacgctgcaattgtacataaggcatgacaatgtgcagttattggagaaactgaagcagttggttctatttatcgagaggaagctagagaaaaaggatttcattcaattgagtttctactctgaacctgatggccctacagttggaaatggcaccttcaaatcctctattttagttccaggagaaccagaagcattctatgtgggtccaccatctagagaaaaacttccaaagaatgttctacctgggtctgttttggttgggtcaattacctatggtgcggtaagctctttcagcaagaaagatgaccaaaaccagcatgctccagcatcttatagtatctcgtatctcattccaccatcaaaggttgataatgataaagaaaagggagtttcatctggaagaaagagtatttcagagagattggatgacgaggttcgagacaccaagataaagttcctttctggctttaatcaagaaactgaggatgacaagtcttcttggacggcacttgttgcttctcttaagccagagtatcccaagtatacacctttgcttgccaaaattttggaatgcatagttcagaaagcaacttcagatgataagtttagccatcaaaaagagattatagctgcagctgatgaggttgtggacagtattgataaagaggatctggcaaagtctttgtcccttaatccagatcctgaagatgaagtggcatagataattttttaaaaagattg

SEQ ID NO: 389703 - DNA, 676 bp, Oryza sativa
  unsure (1)..(676): unsure at all n locations
ccacgcgtccgtgcacctcccaaacccgagaagcaatctcctgcccctccggctcctgctccagttgcagatgctactccttttagttctaatgctgagagcagcaatacgcatgagccagaagttgatgcacatgcgatatacgtgaggagtctaccattaaatgccactacgacacaactggaggatgagttcaagaagtttggcaccataaaacctgatgggattcaagtcagaagccataagattcaagggttctgttatggctttgttgaattcgaggaagctactgcagtccaaagtgctatagaggcttctcctgtaatgattggtggacgccaatgttttgtcgaggagaagagaacacctggttcacgaggatccagcagaggaggaaggtttgcaccaggaagaggtaataacaacttcagagctgacgggatgagaggccgtggcaattatagtggaggaaggagctacggaaggggtgatttcagttacagatctgattatggtggcagaggtggtggcagaggtggctcttcgcgtggacctgatgttggctaccagagggttgacggtggtcgtggtggccgtacatcagcaggccctggtgcccctncaaaatgagggggcgaagtagctttntgtctctagtatttatccattccatggg

SEQ ID NO: 389704 - DNA, 484 bp, Oryza sativa
ccacgcgtccgcccacgcgtccggcagaaagcaacgccaatacgccattgccgtgctcctcgacctgcatgcacctctgttcttggcgttgagatacatagaggcttggggtgggtgtttaagaactaagaccggagttaattagcacccctgtggctaccatcgatctgtctaaagagtgattagatcgagatgaccatcaccattgagcagcctcaccttgatgctatcgccgaccggaaggtcgccggcggcggcggcggcgacaacgcggcggagctcgtgctcgacggcggcttcgtcgtgccggactccaacgccttcggcaacgccttcaggaattatgaggccgagtctgagaggaaggagacggtggaggagttctaccgggtcaaccacatcaaccagacatatgatttcgtgaggcggatgcgggaggagtacggtagggtggacaagacggaaatggggatctgggagtgca

SEQ ID NO: 389705 - DNA, 1166 bp, Oryza sativa
gccgagtccttggaagctaaggagctcaagaagcactgcgaggatatagctattcgcaatcttgattacattttcacagtggcagctccatcagttatgaatgcttctcctgaaactcttgcaaacttagagagattgctggatgaaaaatcgtcagagccatggagtcatcgtcgccttcccacagtgacagctacttatcctgctgtcattgatagtgatgaagagggagatgaagcaggaggatttcttaggctcagggacagtcagaagtctgcatcgaagtcatatggaatatcaagttatgggaacttccttgagaaagatagcaatgctggacaagctgcctctaaacagatcagggcacttcgcaagaaactgcagcagattgagatgctcgaggctaaacaactggatggtcatcagcttgataatcagcagctagcaaagcttgagtcaagggctgcccttgagggtgaacttgcagaactcggcattcccacagatttaagaactccagtctgtgttacagaagaaaagacaaacaagaaatcgagtgtttctaagaaacagaagcggaaaaacaagcaggcagcacattctgatactcccttggtgaaaagggaggacagggaccaaatctatgtcaaggatcttcaggaagtcttaccagtccatatttctgcagaaaaggaagcaagcgttgctgattcaatcaaaccctcagagcatgtcactttcattaacacaaaggctatctcttgtccattggaaaacaaagcttcccagccaacttcgtcaaagaagaagaataggaaaggtggcttatcgttgttcctgagtggtgctcttgatgacaccccaaaaccaagcccgcctacccctgttgtgactgtcacaccaaagcatgaaggtcctgcctggggtggtgctaaggtaacaaagggatctgcttcccttcgagatattcaaagcgagcagaggaaaacaaacgagccgatcacggccaaggcaaaagaccgctttgaggactcacctgacagtgctgggcgcatgcgactttcttcgtttatacctgatgcacgctctacaccgataactgtcacacctgctcgtgtcgtgcctgcttctgaaggggataagagcacactatcctggtcgtcttc

SEQ ID NO: 389706 - DNA, 1083 bp, Oryza sativa
  unsure (1)..(1083): unsure at all n locations
cggacggggcngggcacgagtgggcgatactttagccgcgattcggagggaaaccctagctagctcccgctctcgatcccgcgcccgccaccgcactcggcaagatgttcctcacgaggacggagtacgaccgcggggtgaacaccttctccccggaggccgggttgttccaggtcgagtacgccattgaggccatcaagttggggtcaactgcgatcgggttgaagaccaaggatggtgttgtccttgctgtagagaaacgtgtgacctcgccactgctggaaccaagcagtgtggagaaaatcatggaaattgacgagcacataggctgtgccatgagtggccttattgctgatgctagaacattggttgagcatgctcgtgttgaaacccagaatcataggttctcatatggggagccaatgacagtagaatctactacacaagctatctgtgacttagctctgcgttttggtgaaggtgatgaagagtcgatgtcacgaccatttggtgtctctctccttattgctggtcatgatgagaatggacccagcttgtactacactgacccatcaggaaccttttggcagtgcaatgccaaggcaattggatcaggttctgaaggagctgatagctcattacaggagcagtacaataaggaattgaccctccaggaggctgagaccatagccctgtctatcttgaagcaggttatggaggaaaaggttaccccaaacaacgtcgatatcgcaaaggtttctcccaactaccacctctacacccctgctgaggttgaagctgtcattgcccggttgtgagaagattgccatcgcgtgttatttttatcagccctaagacagcctctgtatgaacttcctaaatggattatcagtccattgtttgctatggctgccatgttatgttaacgagatagtggctgctagagtttattactgcctctaatagtctggtgtgcagcccagtcatttgcttgttttcagcagtgttgagaccatgtactttctatcagagagcgactgtcctttccaagatttggttgcaacaaaaaaaaaaaaaaaaaaa

SEQ ID NO: 389707 - DNA, 725 bp, Oryza sativa
  unsure (1)..(725): unsure at all n locations
ccacgcgtccgacgatggtggctttggcttggttcctggttcagaatctcatgtgagtcaggtggagggacattctgtgctgttgcagctttgtgcctgatgggtttcattcaagttgatttggcatcaaatttacaagaaccatcatcaattgatgtacgcttgctcctggagtggtgtcttcagagacaagcggcagacggaggttttcaaggaagaaggaacaaatccagtgacacatgctatgcattttggattggaggtgtcctaaagatcatcggtgcataccgcttcattgatcatggtgctttgcgaagttttttgctctattgccaatcaccttatggaggttttacaaagtttttgtacgatcaattcccggatatctaccattcttactatggacttgccgctctttccttgctggaagaggaagggctggagccactctgcaccgaactggggatcctctctgctgcattgtagcttggaattgattgttcatcttctgtattcagtcaagttatggtgttctttaaagtccattcttgtaatctaatacaacatacagctgaaaagaatgcangtaatctatagagttcgtttgtttgtttgggtaggcaggtcatgcaacattgtctnggataatatgattgtgaagtacagaggagcattctgtaaaggctatttcattttcagttagtcgaactaactgatattctgat

SEQ ID NO: 389708 - DNA, 839 bp, Oryza sativa
  unsure (1)..(839): unsure at all n locations
gtctgcncancactgagaaggagaagaggtcctccggatcaaagcggcaccgacgacgccggcgagncactactaccatatcatagtacatactagtacaagactggagggctagttgggtgggggtactatccaatccaatccaatcaaatcacatcgatcgacgccgcaacccagcagcagcagcggaaccctagccaagccaccatgagcaagctctgccagtcggcgtgcaaggccgccaagtctctcctctccgccaccgccgccgcctcctccccgcgcacctccctcctagccgaggggaggaacgcggcgctggccaccctcaccaacctggggaggaagaccctccccacagcttacgcctactcctaccaccacaactcctccgccgccgccgccggatggctcgctgccatccccgccgctgtttacatgctacaggatcaggaggcgcatgctgcagagatggagcgcacctttatcgccatcaagcctgacggcgtccaaaggggcctgatttctgagatactgtcccgatttgaaagaaaaggattcaagcttgttgccatcaagctggtggttccatccaaagaatttgctcagaagcactatcatgatttgaaagacagacctttcttcaatggattgtgtgacttccttagctctggccctgtgcttgccatgggttgggaaggagagggtgttatcaagtacgggagaaaactgattggtgctacagacccacagaagtctgaaccaggaaccatcaggggtgaccctgcttgtgttgttggcaggaacatcatccatggaagcgatggcccagagactgc

SEQ ID NO: 389709 - DNA, 1254 bp, Oryza sativa
  unsure (1)..(1254): unsure at all n locations
ccgcgccccggggtncggcacgatctcactgaggcataaagtgagagaccgtgattggatcgatcaccggagcgacgatcaatggcgacgctcaccgtgcccgccgccgtgccgcccgtcgccgaggactgcgagcagctgcgcaaggcgttcaaagggtggggcacgaacgagaagctcatcatctccatcctcgcccaccgcgacgcggcgcagcgccgggcgatccgccgcgcctacgccgaggcgtacggcgaggagctgctccgcgccctcaacgacgagatccacggcaaattcgagagggcggtgatccagtggacgctggacccggcggagcgggacgcggtgctggcgaacgaggaggcgaggaagtggcacccggggggccgcgcgctcgtcgagatcgcgtgcacgcgcactccatcgcagctcttcgctgcgaagcaggcgtaccacgagcgcttcaagaggtcgctcgaggaggacgtcgcggcgcacatcaccggcgactaccgtaagcttttggtgccacttgtgactgtatatcgctatgatgggccagaggtgaacacatcgttggcacattctgaagccaaaatactccatgagaagatccatgacaaggcttacagtgacgatgaaatcatcaggattctcaccacaaggagcaaagcacagttactagcaacattcaatagttacaatgatcagttcggccatccaatcactaaggatcttaaagctgatcctaaggacgagttccttggtacactaagggcgatcataagatgcttcacttgccctgacagatactttgagaaagtcattcgattggctctaggaggaatgggcacagacgagaactctcttacaaggatcataacaactcgtgcccgaggtagacctgaagctgataaaggaggcctaccagaagagaaacagtgtcccattggagcgagctgttgctaaagatacaaccagagactacgaggatatactccttgccctccttggagcagagtgaggtgtatatctgctccatctcgtctgtctgatcctccttgtttgatcggaaaataagatctgcatagaactgtgttctattttgttgtttctgaatgatacaagtgagctagtctgcatagcagtgctcatataataaaatctgtcctgcatactggtttgtcatctgagctgcttcagatactattggagtattggttcattatcaagcgttattgttgcgtgcgg

SEQ ID NO: 389710 - DNA, 531 bp, Oryza sativa
  unsure (1)..(531): unsure at all n locations
cccacgcgtccgactccccgttcgtgccgggtctcctctcctcccccgccgacgcgcactcgatcccccccgcctccgcctccgcctccgcctccgcgtcgcccatctcgagatcccccgcatggcgacgctcaccgtcccctccgccgtcccgcccgtcgccgacgactgcgaccagctccgcaaggccttccaagggtggggcacgaacgaggcgctcatcatctccatcctggcccaccgcgacgcggcgcagcgcccccccatccgccgcgcctacgccgacagcctacggcgaggagctcctccgcagcatcaccgacgagatctccggcgacttcgagagggccgggatcctgtggaccctggacccggcggaggcgacgcgttgctcgccaacgaggtcgcgaggaagttgtacccagggagcgggagccgcgtgcttggtcgagatcgcgttcgnggcggccccggnaagttgtttcgcggtaaggaaggcctacangagcgtttaagntttctttcgaggag

SEQ ID NO: 389711 - DNA, 606 bp, Oryza sativa
ccacgcgtccgcgacagcctcttcgccgccggcgacgccaacagcgcgaacaccgacatgggcgccggcgtcaacctgtggagcttcgacgacttcccaatcgacggcgcccttttctgatgtactcctccattgatgcagtttgtgcactcaattgttaatcacgtcgtcgttgatgaatgtttaaccggaggatgatggggtgcagctgatatcatggcttgcttgattaccgaattatattgcggtgtttgtgtttgtcaattagattctgaatctgtactactgccgatcttatgatcaaaactatatattaagtttatgtactcttaatttgtgggctacttttacggggtcttcgtactgctggtcaaatagtcctatgaaatcgatcatgtcggcaatatcgtcgtcaattatcgtggtcgtggttgttaatgatgtcaaataagtctatgaaaacctggtcctcttggtgtttatgtacccctgatcgatccatcatttgatctctgtcatgttgagatggatcgtgtaagaatatcataatttgctggattcagtccagtcgtaatgtattttggtttgtacacaaaaaaaacaaaa

SEQ ID NO: 389712 - DNA, 512 bp, Oryza sativa
ccacgcgtccgctgactatagatctgtagttcacaatcctatggatatggctactgtcttacagcaggtggactctgggcagtaccttactcgggcctcatttatgaaggacattgatcttatagtctcaaatgcaaagacatataatgggagtgactacaatggatctcgtattgtcagtagagcatgtgaactacgagatgtggtgcaaggaatgttgtcacagatggacccatctttggtgtccttttgtgataaaattgctgaacaggggggaccactacaggttacggatgatggagatagctctattcttcaagcagcgcctgttgctcagctgggtatctggtactaggatgagcgcaaggcttcgtaatgtacaaccagaagtaaatctatcacgaagttatgaggcgttgaagcggcaaaagaaaagcaccgaaactgaacaaggcatggttaaagaatcgacaacaagagatgacaagtttcttgggtgatgtgattgtcaa

SEQ ID NO: 389713 - DNA, 1759 bp, Oryza sativa
cgtttgttgagcgcattttgggtcttgataatgataggatgggcgacctcattggagcactattgctggcgaaagttgtggatctactgactgaattggatgttaacataacttgggaagatatactccaagatgaacataacaaaggtatatttgatatggagcttgaagatttgggtgaggatgaggacagccttggacaagaaggaacaaaggccctttttggaggaaatgcttgtgctgaaaagcttgatggtttaatggttgttttttgtgagcacctcaagtcatgtaaagaacatggtcgcttaccccaggagtttgacattctgaagactatctttcgagcatctgtgctaagggtgcacaaatccaaatttgcacagtttatcatgttttatgcctgctcactggatcctgaaatctgtggccttgaattcgctctcttcctctctgatatctttattaaaaaggaagaggattcaatttctagaatgtctgcagtttcatatgttggaagctatttgtctcgggcaaggttcatttctgctgatacggtggttggtatactcaaaaggttagtggactggtgtgttgactattgtgacctccagaacaacataaggataacaaccaagcctataaatcatcaaatattttacgcaagctgtcaggcagtcatgtacatcctgtgctttcgcttaagatctattatggactacccaaatcttaaggcacagctttttaacatgccatttggatatatcttgacacacccactggaacctttaaaggtttgcttgccatcgatagttgatgagttcctgaggcaggccaaggctgccaggttgttcaatgcatctgtccattcagaatttgaagatgcgcttgaatctgatttgtccaaaacttttggaggaatgaatagacttgacatgttcttcccatttgatccttatctgctaaaagaatccgacagatatatgcgtccaaattttgagtactggtccatggtcaagacgacatacaacaattataacagtgatgttgatgatgagctagtggacctcgatgcacctgaaatgaatgtcggcagtttagatgatcatgttgagatagatctcaacagtgatgatgacttggaatactccatgaacaagatgtccataacgccgaaccgctctttctttcatcaaattatggcaaatagtgacactggccttaccatgcctgcgaggatcagaccatcaataagccccccatcataatgggtccaaagatcatcgccgccgccaacttgttgttcacttcacaaaagaaacagccgtatgctgggagtgcattaggatccagcttgtataagagtacaagtatcggatagaattggagctttacttcatagctggtagaagggtcgaacgacccatcttttgcgatgtatccagcccaaataggttagttgttgggatgaaatgtgaagtacagatgtgttattaaaaacgaagcgggagtggttgtgactatagactagcaggtagccctctggtatgtaaaagacaggcctgttttgatgtagaacgatttaccaatattttttatatcggaacagcagctgtctaactttgatactaaaaaaaaaaaatcggtgctgtttcctgaatatgcgttgacacttgacgaattcctatatcgtccattcgtctgtgaagtgtcaacttgttcaatactgtttaaatttcaccaaaaaaaaaaaaaaaaa

SEQ ID NO: 389714 - DNA, 658 bp, Oryza sativa
taatgtgaccaactggagcctcccggtcgactggtgtaaggggtccgctggaatggccaaatgctccgtggccagcacacactctggggccaccctcttcttgatagtaattgtggttggagggagtaaatacatgtgacccataatctctcaagataattttgaccgcaagcagctaacctgtcactgcatcctggggcatgtttagctcctcgaacaaggcggccctggactctggctgatgcaacatgaattggattctgcaatcctatgcgacagaaagggtagcaatgagctatcctcatgtagtggctaattaggtgatttgccccataccttggatactagttaggtgattgtaagttgtaactcgtagaaattgtttaaatgtttatacccatcatccgtgcataccacgagaaaacatctgattatgtttacacaacgattttataggattcatttttctttacaggagtttgcgcatgtaaatacctttctttttcttaacgggaattgcagggaagccccagacctgaggcatgagttccttaagacagcacaaagtacagggccgtcgcccacctcaggggcgcccgaacaaaaggatccaacctaaggaaggggtccatcgaacgtcatagctcttaaatagtgt

SEQ ID NO: 389715 - DNA, 678 bp, Oryza sativa
caagtagacgatttgtttactcaggtagctattcgtcctcaccacccggcgcaggcggcatgcgtttccctttcgagggctaccccgtatcgcacccttactacttctttggacaagcggccgccgccgccgccgcctctggttgccgcatgctcaagattgcgccggcgccggtcaccgtggccgccttggcacagagcgactccgactcctcgtcgatcgtggatctggcaccatcaccgcccgccgcgttggcgaagaaagccatcgcttttgatcttgatctgaactgtccgccgccgatggaggtctagcagccggagtttttacatgatgaccgctagttcatttatttctttttaatttttagtagtagaaaaattccgtgtacctcttatgcctagaccctcttgcttaactgagggaagacatttttgtaaatagtttttttcgccggcgatgtagtttaagagaagatcacaccatgtgtgtcacctaagacatatcctgccggcgttgttatggagcgggattatatatgtattattattattttgatagtcatgagaaactatgtagaaacccttctaagaaatcatcttttcactctgttttgctaaaaaaaaaaaaaaaaaaaaaaaaaaaaaaaaaaaaaagggcggacgcacgcgatctaga

SEQ ID NO: 389716 - DNA, 858 bp, Oryza sativa
  unsure (1)..(858): unsure at all n locations
ccacgcgtccggaaaagcatgactgatattgctgataagaataacaagtgggcatcatatgctggacccggtggatggaatgacccggatatgctggaagtcgggaatggtggcatgacctttgcagagtatcgtgcacattttagcatctgggcacttatgaaggcccctctcttaattggttgcgatgtcagaaacatgactaaagaaacaatggaaatattgagcaacaaagaagtaattcaagtaaatcaagatcctcttggagttcaaggaagaagaattttaggtcaagggaaaaatggatgccaagaggtgtgggctggccccctctctggtaaccgtctggctgttgttttatggaaccgctgtgaggagtctgccaatattatagtaaaattgccatctgtaggccttgatggttcatctccctattctgttagagatctgtggaagcatgaaactctatcagagaacgttgttggaacttttggggcgcaagttgacgtgcatgactgcaaaatgtatattttcactcccgccgtcaccgttgcatcaagttgatcatgaagagcatcatgcctgatgctttcctggaagcacccagtatctactcaaattagacctgatgaatcgtccaccattttggtcgaggcaacaggtctactgaaatttgctttgtggagaatgcagttttcccgtttctatggggaagttcgtgcaagcaaaccacgtaaggtttttcttgcaagcttgtggtgtaaatttattggtggcttgacgccgtttgctgtacaggatgcaaataaataatttattctgtccnnnnnnnnnnnnnnnnnnnnnnnnnnnnnnnnn

SEQ ID NO: 389717 - DNA, 435 bp, Oryza sativa
acccacgcgtccggccacctttttcactttgtttttttaccactacttccttataattaattaattaattaattagatattaataatgaagaattaagggtaaagagagaggagaggataaagaaaggtgaaaagtacatattgatattgagggtacaggtagatggtagtagttgttggcattattagtgggattggtattggattcctttggtgttgtttggtcaagtgtatactggagaacagctactacatgctgggtattccttttatttttttttctttgtctcgggatcaaaagctggaattggtgggaagccgcctcctatccagtatgtcccaccttgataagtgtaccatatattgtattcaatttttatcttattttcagaatggtatatataagctggcaaggtgtacagcctctttagttgt

SEQ ID NO: 389718 - DNA, 570 bp, Oryza sativa
ccacgcgtccgcgaggatagcccggagcggcatgtcgtggagcaacaactcttgtcacgggagatccgcaatgtgctagccgtgggcggtccagcacgcaccggcgatgttaagtttgggagctggcgcgagaagcttgcgcagtcgggcttccgtgtgtcgtcgcttgctggaaagtgccgctgctcaggccgtgctgctgcttgggatgtccccttccgatgggtacacgctcattgaggagaatggcgccctgaagcttggatggaaggatctgtgccttctcactgcctctgcttggcgcccaattcaggcttccggacgttagtactgagggggaatttatagagctgaagtatcacttgatcttacctaggtgcaattacctagtccttttgcttcttttagctgctcaatttggtcaattctgagaaaagaaaaataaaaaaaattctgatcactaattgccagatctccacacggtggtagttactgatgtgcagcttagctttagcttttattctgttcatgctccagttaaccattctgtccagtttagtttattttgca

SEQ ID NO: 389719 - DNA, 1141 bp, Oryza sativa
ccacgcgtccgcccacgcgtccgaagcagagcaaccatggccgcgcgcgtgctccccctcctcctcgtcgtcgtcgtcgccgcggccatggcgagagcccccacggcccacgcgtggggcaaggagggccactacatggtgtgcaagatcgccgagggtttcctgacgaaggaggcggcgacggcggtgaaggagctcctccccgggtgggccggcggcgagctcgcggaaacgtgctcgtgggcggacaccgagcggttccggtaccggtggtcgagccccctccacttcgccgacacccccggcgactgccagttcaactacgcccgggattgccacaacacaaacggtgagaaggacatgtgtgtggtcggagcgatcaacaactacaccaacgcgctcgaggactcatcaagtccatatgatccaaccgagagcttgatgttcttggcacacttcgtcggcgacgttcaccagcctctccactgcggccacgtcaaagatcttggtggcaacaccatcatcgtccattggtacacaaggaagagcaaccttcatcacgtgtgggatgtgaacgtcattgaaacggccttgaaggaattctacaacgaggacgtgagcacgatgataaaggccatcaagatgaacatcactgatgagtggtccaccgaggagaagcagtgggagacttgccgtagccggacaaagacttgtgccgataagtacgccgaggagagtgcaaagctcgcgtgcaaagcgtacgagggtgttgagcaagaatccaccttagaagatgactatttcttcgctcccctgcctgttgttcagaaaagggattgctcaaggtggcgtgaggctttgctgcaatactcaaccggatcttcagcgggaacaaggttcagagtagttgatccaatagagattaaccagatgaaagattaagaaaatagcccgcattctgaattacaataagattatcttgtttgaccatgttaacttcacggttacgattagatgtatcctcatttagccatttgtcaaagtagcttagatagctacagaacattgtaattcctgtaagcaagtggtgatttatcaatatcgcactgtctttttgtatcaaaaaaaaaaaaaaggacgg

SEQ ID NO: 389720 - DNA, 535 bp, Oryza sativa
  unsure (1)..(535): unsure at all n locations
ngagcgacncntnccntncctntcgccgccgcctacgacgaggctttcctcctctctcccatcgccttcctcctctcctccctttcctcccaggcggcggcggcgccctcagcagcaggatccaccctcgcgccaccccaggccggccgatccgatccccaacgcgatcttgtggggggcgaggcgcggaaaggtggccgccgaatcgtcgcgtggttggttggttcctagatcttaaaagtgtcctccatgtcaacacttgtcacgtgctcacttgccaggggctgttaccactcatgcatcaaccaggagatttggaggttcacaattttcagacatctcaagctagctgcatcttaatttaaaagggaagtgtctgctaaagcagtatttaagaagcgtaagatgcattgtcacttatacctcaagtgcttagttgtaaattttttactgcaaccgtcatatgatctgtctctaatgaataacttaagttccaaatttgttgtatggatcggtggttttcctcattccgttt

SEQ ID NO: 389721 - DNA, 577 bp, Oryza sativa
tcccggtcgacccacgcgtccgcggacgcgtgggtgctctaacacctgtccccatctgaatagcccgggagcttcctcgcgaacgatgtcgaggaggaggaggaggaggaggaggaggaagaagaggtgccaagctatcgcactttcagaggtgtgaagtgttgtgagtgcgagctgcaggtcgggacgaagcttagcatgcttgctgccatggcttccagcggtggtcggcgagcgagcaggcggcggcggcggcagaagaagaaagaaggcaagtcttatcggcaagggaaggctaagcctttcttccaggtctccctctctccatctaaatccgtttttggaggaggaggagggggctatctcgttttagctaatctgttgtgtgtgttggtgatggtttcagttcagtttcagtttcatgtttgtgatcagtgagagtgatggtgtgtcagtggtggtttagatcatgtgttaattagttctgtgggcgtgtctttgtgttggatcttgggggtgggttttcagaaaatactattgctgttgtgtgtgtgtgtgagtgagctagtgagtgtat

SEQ ID NO: 389722 - DNA, 515 bp, Oryza sativa
caatctgattgaatccgagcagcacaagcggcggcggcgatgggcggcgaccatggcgggcacggccacggaggcggcgacttccggcagaaggtatggagcatgacgggcgggccctactgccggcccgtgcactggcgccgcaacaccgccatcgccatgttcggcgtcttcctcgtctgcatccccatcgccatgaagtccgccgagctcgagcaacgcccacatcacccggtccggccgatcccatctcaactttggtgcaaaaactttggcaagaaagagtattgaaggatgtctgaacttgcaaggaggactcctgtttttatcttgttttgtcataatttgttctcagcgatcaatgcttgaagaagtatgctcctacgagtatgcacttgatgcttcatgtaactctttcgacttatattatgtcatacaaaggagtttgcctgttggtaactcaaaataaactcgtgacgcataagcctctgatggatttacttttaaggtttaat

SEQ ID NO: 389723 - DNA, 1145 bp, Oryza sativa
  unsure (1)..(1145): unsure at all n locations
ccacgcgtccgcggacgcgtgggactttttgtccgagactctacactccttttgcctgttcatctatcgaagcaacatctgctttggtatggttatgatcgcaagaatggagtccattctctctgccctgctttttggtcaaaacatcggaaatggttgatgatgtcaatggtttgcctcaatccagtagcttgttccttcatggacctgcagttccccaatggacaactaacatatgttgctggcgaggggattacagcaagtggttttcttccattatttggtgggttgcttcaagctcatgggaaataccctggagaaactagagtcagcttctcttgcaagaataagcaaggcaccaggttcactcctatgtttcaatggcctgacaagtctctgtcatttggagttactcaagccttagcatggaaaagatctggtctcatggtgaggcccagtgtgcaagtcagtttatgccctacatttggaggaaatgatcctggggtacgtgcagangttatccattcattgaaagangaattgaatgtaatgtgcggtttgtcttgctcaagacatccatcagcctttactgctctgtctattgggaaatccaagtggaatggtcaaatgggcagttccggagtggtccttaccttggaaacaccccttaataacattggaaggccatctttatccgttcaattgaatggaggttttgaaatttagcattctgcgcagtaagttgtatataccactgtacatagccctactaatgtccatgtcctatctctgtggagatggctgtgcaacgcctatgaatggtatcgggaaggggtttctgctcggttttggtgtcagactcataggtgataagtctcagctcaacaaatcaactggtttattccccatgccaacaaaggcatccatatatataccttaaagagatggtgatcaagtgtgtaggcagttcaaggtttcttttgaagaaattggagagaaaagctgcaagatcagcacttaatactttttggaagttgggagaaggaaaaggctatgaggtgttttgcggctgtgcaagaagccaagacgaatgtggctttgcaagaagcccaagatgttcacccagaagctatgttcctttggac

SEQ ID NO: 389724 - DNA, 529 bp, Oryza sativa
  unsure (1)..(529): unsure at all n locations
ctagaagcccaccaaaagcacaagccgccgccaccaccaccacctgttgaccgagtgattgtaaatcccattgttaagccagagaaaagagttagtactccacctaggacaggtccctcgacatctgcggcatccttttctgttgcatcacttcagcaatatacaaatagttttgaagagggaaatttgataagagagagtaggttgggaaaagtatatctggcagaacttcctgaaggcaggttcttggaagttatgaagattgataacgccaatgatagaataccggtagatgaatttctagaactggttgcaagtgtatcagatattaggcatcccaacatcctcgagcttgttggatactgtgcagaatatggtcagaggttacttgtttataatcatttcagtagaaaaacactgcatgatgtactacatgaaggggaggaattggatggtgcactatcatggaatgctcgcctncaagttgctcttggtgcagcaaaggccttagactatctacatgagagct

SEQ ID NO: 389725 - DNA, 815 bp, Oryza sativa
  unsure (1)..(815): unsure at all n locations
nganggnctgtgtaacgcgttgggncggacgcgcctacggcgccgaccacctccaaaaccagaccccgaaatctcgaggagcttgtcttttttcggtagcaatggcgttggagcagaccttcatcatgatcaagcccgacggcgtccagaggggcctcattggcgaggtcatcggccgcttcgagaagaagggattctacctcaaagccatgaagctcatcaacgtggagaagtcgttcgccgagaagcactacgccgatctgtcctccaagcccttcttcggagggctcgtggagtacatcgtctccggccccgtcgtcgccatggtctgggagggcaagcaggtcgtctccaccggccgcaagctcgtcggggccaccaaccccctggccgctgagccgggcaccatccgtggcgacttcgctgtcgacattggcaggaatgtcatccacggaagcgactcggtcgagaacgccaggaaggagattgctctgtggttccctgagggcatcgccgagtggaggagcaaccagcacccatggatctatgaggtctaaaatgccttgtcactatgaacctggagagttggcatctgaagatctaccgtgctatttagctgctattttatagttgagaattgagatcagcatctcaagaacctttgtctgtgcgaactgaagtttttcttcattatgttgcatgttatgcatgcatttaccagttgctcttgatatatggtattgctttaatcctttgatgtggagttgcattgcatggtgtttgangcnttnnnnnnnnnnnnnnnnnnnnnnnnn

SEQ ID NO: 389726 - DNA, 765 bp, Oryza sativa
  unsure (1)..(765): unsure at all n locations
ccattttgatggggnatcttggtaaaagaaaggttacttccagtgattgatgtgggcctatgtaacccagttagtggaaccatgcttaccagatcagtccagggnaagagnccgcagacagactatttattggcgcagcgctgattgttcttctagttgtttatagagtatgcataatgctggccctactgaatcaagcatctcgtctcattttgaggaaattggatgctgacagtgacagtctttcattccttcccgccacggagaaagttgcctaacatggattcatggttattcctactggcttgacatagatgatgagctttttccttttcttttgtttgctggagagatgcttcgctgttgtgatactgatgagattatctaactaccctgactgtagccaatggagtgttgtcgggcttgtgtatgaggattttttttttttttgggtgggggtgggtaagagccaatgcaagatatccacttttttcacggtcatcatcagaagatatgtaaccgtacaacattctaaaactcttgttgcatcctgtattcttccagcacgttttgggaagccttcagcattaagcaaaagaacagcttgcaccaagtatagcttgcgtgccaagggtgatcagacttgtatgtgacttgagtcatctgatgtttcatcacttgggtgacatctgtgaggtaatgcattgctcgtcctgagtcctgacccnnnnnnnnnnnnnnnnnnnnnnnnnnnnnnnnnnnnnn

SEQ ID NO: 389727 - DNA, 990 bp, Oryza sativa
ccacgcgtccgcccacgcgtccgtgttaatattgtgtagttggtttgcttccattagaagcgattgtccgaccacttaatctgcattatgaagattttttggcatattgaaaccagagaaactgaagcctgtggtatgaattggtcatggctaggattagacattggtgtataagatggtttctccattccattcaagactggtgctacttcttttctcatcaaacctaacaagtgaatgatgttatttggaggaaatttatctgcttgttactttgctgttaagtcaaatcctgctatggttcatggatcagtcaatcttgtcagaacatttaaacatggtcatagttctcacagaattttgatgttaacttgtttacttccggaaagctaatttatcagttaagatggagatggttatgtagtagctaaaaggcccatcctaaaggttctatggtagatgattcttttggcagttacttcctttgaacaatatacaaggttaggaaggtgatgctggaatcttttgactaatggtgaaaataattggaagatttgttccaagaaaattgatggaacggaatttgctttcctgctctgagaagtaaattcgatggttgtgtaaagtgtgccattataaaaccatctattaaatgttcttgtgagtagaaatctatgctttatgaactgtggaagagttatcagtagcactatctgatctctaattagttggcccaacttgtttctctagtagtatctttaacatctgggcatgtaatgttctataactagctagatggtgggttcagtccagtatagtttggccctttgtctgttcgtttggtgtgttgtcttcaatgtgctctttaagcatcctaaagatgttggacattgtaattatcaaatgattcggactttcatgtcctgatttggtctgtaaggttgttgtaatatgataatttattttgacaattatgtattttattaactt

SEQ ID NO: 389728 - DNA, 680 bp, Oryza sativa
  unsure (1)..(680): unsure at all n locations
antcanntncgcaactgttgggaagggcgatcggtgcgggcctcttcgctattacgccagttggcnaaagggggatgtgctgcaaggcgattaagttgggtaacgccagggttttcccagtcacgacgttgtaaaacgacggccantgagcgcgcgtaatacgactcactatagggcgaattgggtaccgggccccccctcgaggtcgacccacgcgtccgcgagtgtgcaatgcctcagaggattccaatgagcaatagtggattcaggacccatctcagcagtgtcctctcactggttttggtcctggctgcttcggccttcgtattgcttcagcaataatcctggccgttgctccgattctttcattctttcaggtggttggatcgacgccatttgtaagaaacctttttgtttctggcggtttactagatgcgtaatggttgctatgtagcagaatctggcagcaattgtgcggcgagatgaacacatagggggaggaaacattgttgcagacttgcaacatagcatcaggatcactttcctgaatcctgatgatatttattactacatgtttacatcaagatgagtgatattgtacatctctgatttaagttggtgtagttgccaggaatgtcttatgtttagttatgttaaataccaaatacattttgccatcc

SEQ ID NO: 389729 - DNA, 793 bp, Oryza sativa
tctttccccgctccccgcgtaccgtctgcgagccagccaaacaccggcaccgccgcgctacgcgagcacggcaccgcggcgcggcgcgactccgcaggcgacaagccgatggagaaccccgcgcccgcccgcccgcatcaccgccggatggccgccggccgccgccggtggggcgataggcggctagatccagatccggcggggcgggatcatatacaccccgcgccgatggggggcgcggtgtcggcgctgttccttctggacatcaagggccgcgtcctcgtctggcgcgactaccgcggcgacgtctccgccctccaggctgagcgcttcttcaccaagctcctcgacaaggagggcgactcggaggcgcactcgccggtggtctacgacgatgccggggtcacctacatgttcatccagcacaacaacgtgttcctactaaccgcctcccgccagaactgcaacgccgccagcatcctcctcttcctccaccgcgtcgttgatgtgttcaagcactatttcgaagagttggaggaagagtcgctgagggataactttgtcgttgtgtatgagttgcttgatgaaatgatggattttgggtacccacaatacacggaggcgaaaatcttaagtgaattcattaagacggatgcgtacaggatggaggtatcacagaggccacctatggcagtgacaaatgccgtgtcatggcggagtgagggtattcggtacaagaagaatgaagtgttcttggatgttgtggagagtgttaacatcttgtaacagcaat

SEQ ID NO: 389730 - DNA, 556 bp, Oryza sativa
ccacgcgtccggattttcttcgacgacagcgtgaggaacatccaggcggggaagaggatcgggctccacacggtgctggtgggcacgccgcaccgggtgaagggcgcggaccacgcgctggagagcatccacaacatcagggaggcgctgccggagctgtgggaggaggccgagaaggcggaggacgtgctcatctactccgaccgcgtcgccatcgagacatcggtgaccgcgtaggccacacctactgtctctcccgactccggcgaatcgctcagaacgagcaaccatccatccatccatgtccatccctggccgggcaggtgatcatcaggtgggaattcagaattggccgggacaacaatacgttccaagaaaaaaagaggagggtgttccgtggaagttcaggattcagaatgtaacagcaatgttggaacgggtcctgtagtatatatatgtatcggtcagatctttgcatgtaaattagtactcctagaagcaataataataataattaataaagagaatgggggttatttatcaacatttaagaagg

SEQ ID NO: 389731 - DNA, 1317 bp, Oryza sativa
  unsure (1)..(1317): unsure at all n locations
cccacgcgtccgcccacgcgtccgcccacgcgtccgctcctgcaacgtgcaggagtgggaagcttatgacccttaccgttcacggtggatgacactcccaaagatgccacacaatgagtgtttcatgtgctcagacaaggagtcacttgcagtgggcaccgaactcctggttttggcaaggagattctttcccacattgttctgagttacagtattctgacaaactcgtggtcgcctggtgttgatatgaatgcccctagatgcttgtttggatcagctagctttggagagaaagcaattgtagctggtggccatggatgctcaaggtcgggtgctacgctctgctgagctgtacaactctgaaactaagagatggataacactcccatgcatgaacaaggctaggcgaatgtgttctggagtctttatgaacggcaaattttacgtaattgggggaatggccagtaacacggaggtgctgactgcggagaagagtatgatttggagaaaggtacctggagggtgatagagaacatgtctgaggggctcaacggtgcaagtggtgcacctccccttgttgctgttgttgaaaatgagttatatgctgcacaatatgcaggaaagctagtaaggaaatataacataaaggataacacatggacaacactgggagagttaccagagcggccagaagctgtgaatggctggggtattgcattccgaggatgtggagagcggctcttggtgattggtggaccaagagtgatgggaggggggatgattgagctccattcatggatcccgagggaggggccgttgcggtggaacatgatcgggagcaagccttctggtaactttgtttataactgtgctgtcatggggtgctgatttgtgccaccctcttgccgaacatactgtgaacatgaaagattgtgatattggtttcctcaaatgtcataaagcaccgattcgcctgatgggtaatctctgcctttctttttgacatttcagattttacacgtggttcaatagagtagttgtttcagtgcatgcgtcactggtcacccttaggtaaattttccacattcgatttgcagctgggaatttgtaccttgttctaccctctatcggaacaagttcccgatggatgcatttagtcgacaaactgtaattgaggcaccattgcatctgtacaattgtatgaggttctgatttggtgcctgtcgatcccattactcttttgtgcaaatgtttcttgacaggaagaacatgaattataatgttcctctgttcactttaaaaaaaaaaaaaaaaaan

SEQ ID NO: 389732 - DNA, 1009 bp, Oryza sativa
  unsure (1)..(1009): unsure at all n locations
ccacgcgtccggcggtgtgcccggcccggcgctggcggagtactacgcgcagcggaccacccanggtggcctgctcatctccgagggcaccgtcgtctcgcccgctggcccggggtttcctcatgtccctgggatatacaatcaagagcagactgatgcatggaagaaggtggtggatgctgttcatgccaagggaggcatctttttctgccagttatggcatgtaggcagagcttctcaccaagtataccagccaaacggtgctgcaccaatttcctcaactgttaagccaatatcagcaagatggagaatactgatgcctgatggctcctatggcaagtaccctaaacctaggcgcctggcagcatcggaaatacctgaaattgtcgaacaatatcgtcaagccgtcattaatgccattgaagcaggttttgatggcattgagatccatggtgctcatggctatatcattgatcaattcctaaaggatggaatcaatgaccgcactgacgagtatggtggctcactttccaaccgctgccggttcctacttgaggtaactagggctgtggtttctgccattggagcagaccgagtcgcggtgaggatatcaccagccattgatcaccttgacgcctatgattcagaccccattaagctcggcatggccgttgttgagcggctgaatgctctccagcagcagtcagggcggctcgcctacctccacgtcacgcagccacggtacaccgcctacgggcagaccgagtctgggcagcatggcagtgccgaggaggagagccgcctgatgcgcaccctccggggcacgtaccagggcacattcatgtgcagtggcggctacacgcgggagcttgggttggaagcagtggagagcggcgatgccgacctggtgtcgtacgggcggatctttatatcaaacccggacctggtcgagcggttcaggctgaacgcccgtctgaacatgtccgtgcgtaaggaatttttcaccccc

SEQ ID NO: 389733 - DNA, 628 bp, Oryza sativa
  unsure (1)..(628): unsure at all n locations
agctgagctgagctgctctctataaaagaagccaagnagncttcacatccgcaaagntagctacttagccactgcatatcttccagcttttgtcatagccttttttgtttcttctcttttggtacaaattcagggtctggaatacttgaatcagtgagaagaaaaaacaagatgtataaccctccaagtgcccaggagatgacatacaaagatcatgttcagaggcgccatgaggaaaaaggctgcttatatgcatgcctgtttacactgtgctgctgcttctgctgctacgagacctgcgagtgctgcctcgagacactctgctgctgctgctgacgtcgtcatgacgaagtgatatgcggactgtgacgtccactgggacactcatcgttgtccatctgctttgtctgaataaaaaatgtatctatgtacttaattaattatttgagtgctgtaaatctgcaatgcgttgtgttgatgtgtttaattaccttttcttttctctgcaatggatggaaacctggtgtatttgtatgttcatcaaataagtactctatgcagtgttttggcttgaacaaaatgtttgtcgagggtttgggctataaaaaaatatnnnnnnnnnnnnnnn

SEQ ID NO: 389734 - DNA, 661 bp, Oryza sativa
  unsure (1)..(661): unsure at all n locations
ccacgcgtccgcaagcttttctctctctctctctctttgcactacattcttgaattcacaacctacaaacaatccaagaagatgtcttgctgcggaggaagctgcaactgtggctctagctgcaagtgcggcagggctgcggaaacatgtaccctgacctggcagagaagaccacaaacacttcagcaactatggtcctcggggtcgcacctgcgaaggagcaatttgagggggttggcaaggcagcagagtctggtgaggctgcccatggctgcagctgtggctccagctgcaaatgcaatccctgcaactgctaaaggagatggtgatctgcatcagcatgctgatgatatgtacaagtaaataaagaagccatttgatgcaatggctcctgtgtgtgtgtgtgtgcgacagtgtgagtcagcttgtgttcttcatcctgatgtactaatgtggcctgtgaatattgtgaggtgtctcctgctttactctcttgtcagaatgtaattagaggctatatatcatggccttgtgattggagcacctgaagtttttacagacaacattatgtttgtgtaatataatatggtttacttgtgcatgtaaaaaaaaaaaaaaaaannnnnnnnnnnnnnnnnnnnnnnnnnnnnnnnnnnnnnnn

SEQ ID NO: 389735 - DNA, 535 bp, Oryza sativa
ccacgcgtccggttaactgaagctgttactgatgctgacagcagcagcagccactgcgagagagagaagcccgaggaagatggggataacgatgacatgcttggggctgtttttgccttcagcgaagaaggttgaacctaataatatactctgcttttacatagagaatggaaaacagtgcccgtgatattacctagaaaatggtggatttccattaggctttcgtggaataaattggtgctgagatgataatctactatttggtacatattagaaaggtgaagcttgtgctcgatatccatttgtgagaagttttactcaggaattgagatcaagatccttccttccgggccattaactaatccacggatccacgttaaggggagcttggtgttgtcgagaagttgctgctgcctgccgcaacactgccccttttccgttgctttgtacatactgtaaaagaccatttgttttgtgaaatacgtctctggaacattggacggtccaacttccttggcagccatatttgttgact

SEQ ID NO: 389736 - DNA, 647 bp, Oryza sativa
catcggctactgcgacgagaacgccgagatgaccctggtctacgagtacatgcacaatggccccttccgcgaccacatctacggcaaggacctgccggcgttgacgtggaagcagcggctggagatctgcatcggcgccgcccgcggcctccactacctgcacaccggcacggcgcaggggatcatccaccgcgacgtcaagaccaccaacatcctcctcgacgacaacttcgtcgcaaaggtatccgactttgggctgtccaaggacggccccgggatgaaccagctgcacgtcagcaccgccgtcaagggcagcttcggctacctcgacccggagtacttccggtgccagcagctgacggacaagtccgacgtctactccttcggcgtcgggctgctcgtggtgctatgtgcccgtgccgatagagacgcaacgctggcaactgcgatgggagatggtgagctgtatgagcatgctgaggatatgtacaggtgagataacaagccatttgatgcaatggctgctgtgtgtgtgtgtgtgcgacagtgtgagtctgtttgtgttcttcatccctgaagttcttatgtggcctgtgaatattgtgaggtgttttctgctttacttctttgggcagaatgtaattaga

SEQ ID NO: 389737 - DNA, 687 bp, Oryza sativa
  unsure (1)..(687): unsure at all n locations
cgaattgggtaccgggccccccctcgaggtcgacccacgcgtccgcccacttctgcctcgccagggcgcagtgcttcggcgaccccctcgagctctatctccgcaacgcctggctcaaccgcctctccggccgccggtagccaccgccgtcncctccccgcggcgtactaatgtactaaagctaccggccttgatgcgtccgattcttgctgtgaagaagagcaaacgaagcgtgcagattgcaacggaagaacatattcagattctttctttgttttctttcgttccggtttctcccaaatgcggatttgtacagattattggttgcgaatttgcaatttgctacctcgattattccaacgaggagcgattcatcctgtcatcgaggcattgccccatgtactatgacaacatatgacaacaattttatgagaaatttttttagtataaaaaaagggggggcccggtncccaattcgccctatagtgagtcgtattacaattcactgggccgtcgttttacaacgtcgtgactgggaaaaccctggcgttacccaacttaatcgccttgcagcacatccccctttcgccagctggcgttatacgaanaagcccgcaccgatcgcccttcccaacagttgcgcacctgaatggcgaatggnaaattgtaagcgttaatattttgtta

SEQ ID NO: 389738 - DNA, 635 bp, Oryza sativa
  unsure (1)..(635): unsure at all n locations
gatgatcacaaactaagctcgtactgtcacatctaagatacgaggtggtacgatgttggtttatttgggacaggtgggaggttggtaagtnggantattaantattgtaatattttgtaaagagaacttatgctctaagtaagaatattaaatgtgagtcatgagtcaacggggtcaagcccctacaaaagccaagaaccccaagcccttccagctgcagacttgcagtgcctcgatcagctcactgtaacaagatgggcggcgccttctcgacgtcgaagccgaagcccgccgccggcgaggagggcggcgagtccgccgtggtggccgtccactccaaggccaagtgggacgagctgtgggacgcccacaagaacaccacaaagctggtggtgatagacttctcggcgtcgtggtgtgggccgtgcaagatgatggagccggtgttcaaggagatggccggccgcttcaccgacgtcgccttcctcaaggtcgacgtcgacgagctcgcggaggtggcgcggacctggcgggtggaggcgatgccgacgttcgtgctggcgaggggcaggcgaagggtcagtcgcatcgtcagcgccgacaaggacgagctcgagaagaccatcaacacgctc

SEQ ID NO: 389739 - DNA, 485 bp, Oryza sativa
aatcccggcacgaagcagaactcatctcgccgcggcggcggcggcggccgagaccggcggcgagcggcgggggcgggggcggcgtcagccatggttgcgcgttagcttctatcgcaactatggcaagactttcaagaaaccaaggcgtccatacgagaaagagcgtcctgatgctgagctgaagctgtatggtgagtatggcctcaggtccaagtgtgagctgtggcgtgtgcagtaagccctaagccctatccgcaatgctgcaagggagctgctcacccttgatgagaagaacccccgccgtatctttgagggcgaggctctcctgcgccgcatgaaccgctatggtctccttggtgagggccagaacaagcttgattacgtgcttgcgctcaccgttgaagaacttccttcagcgccgcctccagaccattgtcttcaagaacggcacggtgaaatccattcatcatgatcatgtactcatc

SEQ ID NO: 389740 - DNA, 699 bp, Oryza sativa
cccagagaaccctaatccacaccctctcaagccagccatggcggaggcggcggcgagcgtggcggcgagcgcggcgggttcggccgcggcttcgggcgcggcggtcgcggcgaccgggaagggcgccgtggcgggcgccgcggcccgcgccaggaggaggagaagtgggtgcccgtcaccaagctcggccgcctcgtgaaggaaggcaggttctccaagatcgaggagatctacctccactccctccccgtcaaggagcaccagatcgtggagaccctcgtgccggggctcaaggacgaggtgatgaagatcacacccgtgcagaagcagacgcgcgccgggcagcgcacccggttcaaggcgttcgtcgtcgtcggcgacaacaacggccacgtcgggctgggggtcaagtgcgccaaggaggtggccaccgccatccgcggcgccatcatcctggccaagctgtccgtggtgcccgtcaggaggggttactggggtaacaagatcgggcagccgcacaccgtgccgtgcaaggtcaccggaaagtgtggctctgtcaccgtgcgcattggttgcccgccccgaggggtttcgggtatttgtcggccgcccgcgtgcccaagaaggtgctgcaggttgccaagggtcttggtggatccaaggggacgaagtgaagacatccttcaatgccgggttcta

SEQ ID NO: 389741 - DNA, 1168 bp, Oryza sativa
tcccaccctgttttcctcctaatctccacgccccggcgatccgagcacaagtatgcatggccgagcgcggaggcggcggcgagaggggcggcgagcgcggcgggttcgggcgcgggttcggccgcggcgggcgcggcgaccgtggcaggggcgggcgcggcgggcggcgcggcccccgccaggaggaggagaagtgggtgcccgtgaccaagctggggcgccttgtgaaggagaacaagatccacatgatcgaggagatctacctccactccctccccgtcaaggagcaccagatcgtggagcagctcgtgccgggcctcaaggacgaggggatgaagatcacgcccgtgcagaagcagacgcgcgccgggcagcgcacccggttcaaggcgttcgtcgtcgtcggcgacaacaacggccacgtcgggctgggggtcaagtgcgccaaggcggtggccaccgccatccgcggcgccatcatcctggccaagctgtccgtggtgcccgtcaggaggggttactggggtaacaagatcgggcagccgcacaccgtgccgtgcaaggtcaccggaaagtgtggctctgtcaccgtgcgcatggtgcccgccccgaggggttcgggtattgtcgccgcccgcgtgcccaagaaggtgctgcagttcgccggcattgaggatgtcttcacctcgtcccgtggatccaccaagacccttggcaacttcgtcaaggccacctttgactgcctgatgaagacttatggattccttactcctgacttctggagggacaccaagttcgtcaagtctccattccaggagtacaccgacctcttggccaagccgactaaggctcttatgattgatgcacctgtcgagaacgtagaggcttaggatggcggagtaaagagagtctttgctagctcggacttgtctgatgcactttgttttacaatagttaagaaccggttgtcatccttggattgtgctgcgtctggatgtttctatttcctgtcaagttttggatcatggtactgtgatactgcttttatcaatgaatgctgcataattattatgttaaaaaaaaaaaaataaaggccggactggattataggtcaagcccaacttatgggggcactattcgtctactttgcgtgctttagctcaagctg

SEQ ID NO: 389742 - DNA, 553 bp, Oryza sativa
ccacgcgtccgcggacgcgtgggtgctcatcacctctccatctttagtttgaagtatctcagttttgcgattctcctcgctgttcaccgcgaataatcaagcatcgattgacgacgacgatggacgaaccatcgcagggcggtgaccagaagctgtcggccatggagcatgtcaagaaacgccatgaagagaagggcttcctctatgcctgcttgttcatgctgtgctgctgcttctgctgctacgaaacctgcgagcactgcctcgagtgcttctgctgctgctgcaagaaggacaactgatagagatcaagatcgatttcctggatttgttagcgaattgttcgtcgaaataataaaaggctagcttggtgtgattcttctcggttttaatttgtgtgttaactatgcgttaaccgtggtgagctagctaatagttatgtactccatgctgtgactatgagtgagcgagtgaattgcaggtcggattgtgggttgtaaggttgtaagctgggatttctgatttttcaatgtcagttcattgttgtaggtac

SEQ ID NO: 389743 - DNA, 1732 bp, Oryza sativa
  unsure (1)..(1732): unsure at all n locations
tctctcttcttctcttctcttctcctctcttccccgtcgccgcgcacctcccgatccctccctccgctcgctcgcccatcgcgccaggtgggctctttggacacccggtgatggatcacgcggagctgaccaccgagcaggttctcaagagggatattccatgggaatcatacatggcaaataagctgatttccgggacatgccttcagcttttgcgacgttatgaccacaaaccagaaagccaacgaggtcctttgcttgatgaggatgggccatcctatgttcgagtgttcctgaatatcttgcggaacatctccaaggaagatactgttgaatatgtgcttgccctgattgatgagatgcttgcagtaaatcctaaacgagcagcactgttctatgataactctctctctggtgaagacatctacgaccctttcctaagattgctcttgaaaggtaactggtttgtgcaagaaaaaagttgtaagatattgacccaaataataagtgcacgacccaagatgcagaatggcatagttccaaatggagaggcttcaaattcaaagagcaagctaacatctactcaagatgtgttaagaggtttggttgattggctctgttctcagctgaggaatcctacccacccaaactgttctgttcctactgctatgcattgtcttgccactttgctaagagagcagtatgttagagctttatttgttcaggcggatggtgtaaaactgctcattcctttaatttctccagcttccacacaacagtcgatccagcttctctacgaaacttgcctctgcatctggcttttatccttttatgatgcagccgttgattatttgtccactacaagggttatgccaagacttgtagaggttgtgaaaggttcaacaaaagagaaggttgtcagggtcgttatcatgtctatccgtaacttgcttgcaaagggtgcgtttgctgcccaaatgattgatcttggactgccacacatagtacagaatttgaaagctcaagcatggactgatgaggatttattagatgcgctgaatcagctagaaataggactcaaagacaaccttaagaagttgagttcatttgagaagtacaagcaacaagttcttcttggccatcttgactggtctccaatgcacaaagacccaagtttctggcgcgagaacattaataattttgaagaaaatgatttccagattctacgtgtgcttatgacaatcatcgacacatcggccgacacgactgctcttgctgtcgcctgctatgacctctcacagttccttcagtaccacccttctgggcgcattgtggtggcagatctgaaggcgaaggaccgagtgatgaagctcatgaaccacgagaacgccgaagtgaggaagaatgccctgctctgcgtgcagaggcttttccttggtgcgaagtacgcgagcttcctgcagacctaagacccagacaagaaactcttgaagttttgtatttatgctttagagccagagaaacaccaggccatttgtcataaatggtgaaaaccatgattgagaaagacagacctcgaaaattcttgtccagtatatcctgtcgttatttcatttactaaaccgatgtataataaataatcagctattccttgctcgatgtaataaagtgtcacagagcttgtttcttcctttcctcaaaaaaaaaaaaaaaaaannnnnnnnnnnnnnnn

SEQ ID NO: 389744 - DNA, 1250 bp, Oryza sativa
ctttctttcttcttctcctccgccgacgccgtcgttttctccgcagttcgccgctgcttccactccgcctccacctccgccgccgccgctgctcctcctcctcgcgcttacagtttcctctacttccccctccttggtcttggtctgcctcctcctcgccatggacgtcaagccggtgaggactgtgaaggtcaccaatgtctccctgagtgcaactgtgcaagacattaaggagttcttttcattttcaggagacattgaacatgtggagatgcaaagtggcgatgagtggtctcaagttgcatatgtgactttcaaagatccccaaggagcagaaactgcacttcttctttcaggcgcaacgatagttgatctttctgtcatcatcgcacctgctccagaatatcaaccaccccctacttcatctgctcctccaatgtatagtgcaaccagtgtccctgtcagtgaagacaacaatgttgtccataaggctgaggatgttgtcagcaccatgcttgctaaggggttcaccctggggaaagatgccgttggcaaggcaaaagcttttgatgagaagcatgggttcacatccactgctggcgccaaggtggcctccattgacaggaagattggtcttagcgagaagttcactattggtacttccatagtgaacgagaaggtcaaggagatggatcagaagttccaggtgtcggacaagaccaagtctgcattcgctgctgctgaacagaaggtgagcactgctggatctgctatcatgaagaataggtatgtcttcaccggggcttcgtgggtcaccaacgcattcaacaaagttgccaaggctgccactgatgttggtacaatgacaaaggagaagatggcagctgaagaccagcataagggctcgggtccttctggagggcactcgtacacacccatccagtgatgactccacgctctctcatgtgccgcattgtgttgtattgatggatgtaaaacatagatatagaacagaaaaagtcccctcctggcataccacatacttctatcagtgaacttttcgcattgcaggaattttgtttccagtagaataggaaatatgatggtgatcacaatgtattccgctggtttataaggcgtatgttcaaactgtttctggttgtagtaacttgcatgaaccttggcaaaagttgtggaaagctcctttaataatgtcatgttgatgttggttcaaaaaaaaaaaaaaaaaa

SEQ ID NO: 389745 - DNA, 470 bp, Oryza sativa
cggacgcgtggggcccgatgttgcttgatttcggctggcttcagcgatgctccaaaggtctggatgtaagggctttggaggaaaatctaggacaggccctactaaccctcccactcaagcagcagcagtgtctatttgaggagtggtttcagtgttttgcatccaaaggatcagagtgcccgggccttactagagctttccaggtatggtggagaaggtccttcgttagatcatcggtagaagggcagtgattatgtttttactacttgtatatgctggctggaccacttggaaaattgcgaattgttggaataactagtaggggtgatcaggtgaatgatgtctaccgtagtttagccctttcgattgtatgtgcataagcttgttaaatttattttgaggaatggatggctttggtgtgtgtatgttaagtttgagccttcttgattcattacagttaaccttgtgac

SEQ ID NO: 389746 - DNA, 581 bp, Oryza sativa
ccacgcgtccgcccacgcgtccgcccacgcgtccgcccacgcgtccgtgcggcgatgagcagcaacaagaaggagctggaagccctcccaatcgtcgacgccggcgaggttcgtgagctcatgagctccggccaccattacctcgatgtcaggcttgggaaggattttgacaaggcgcatgctgacggtgctcgcaacatttcctactacctctcagtgactcccagtgggaaggagaagaacccacactttgtagatgaagtggcttcactcttcggcaaggatgagcacctgattgtggcttgcaacacaggtgtgcgatccaggctcgcgactaaggaccttttggacgcgggattcaagaatgtgaggaacctgaaaggtggttaccaatcatttctccgaagtgaaagccagcaacctgcagctcatcaacagtaattatcagctgcagttcccctgctcggtgctcgctatccgggagatggaaaattcgtttcttcttatgcatagattcaatggtcgtgaagacgaataaatcaggatcagttgattccaagctttgcagtgtgtacggttta

SEQ ID NO: 389747 - DNA, 737 bp, Oryza sativa
aagcgagcctccgcgccgccgtcgcaccgttccgcaggccgcagccaccaccaccacaccggagcacagcgaggcggcgccgcagccccatcttctccggcgaagcgaaatggcgacggttccggagcctttgatctgggagattgtcaagaagaacaactgcttcctggtgaagcagttcgggaatagcaatgccaaggtgcagttcaccaaggagcccaacaacctgtacaatgtccactcctacaagcactctggcttggcgaacaagaagaccgtgacgatccagccatcaggcgtgaaggacgcggccgtggtcctctccacaaccaagaccaagaagcagaatgccccagcgaagtctaccacaagtctgtgatgcgcaaggagttccgcaaaatggctaaggctgtcaagaaccaggtgagtgacaactactacaggcctgacctgaccaagccggctcttgcgaggcttagctcagtgtaccgcagcctccaggtttccaagtctggtgccaagaagaagaacaggcagccaactaagctgtaaatcgcttaaagctcgcttttttttttgtcaaggggcctcgtggtgttcatgtttccagctacctctgttcgtaacagtgattgagacttgaattgatatctatgctagaattggatcaactatgctacaaatctactctagtttgtactcgctaaaaaagacagtttatctgctcggtgtcctta

SEQ ID NO: 389748 - DNA, 545 bp, Oryza sativa
  unsure (1)..(545): unsure at all n locations
gaagtccttgacgatccagccatcaggtggaaaggagggggctgtgggcctctccacgaccaagaccaacaagcagaatgccccagctaagctctaccacaagtctgggatgcgcaaggagttccgcaagatggctaaggctgccaagaaccaggttagtgacaactactacaggccagatctgaccaagccggctcttgcaaggcttagctcagtgtaccgcagcctccaggttgccaagtctggtgtgaagaagaagaacaggcagccagccaagctgtaaatcgcttgaagctgcgcgtttttgtcatggcacctcttgatgctcatgtttccagctacctctgtgttctaaaagtgtccagacttgaaatgagggatctctgttagaattggatcaaccttgtcacagatctgccgtgtagtttgtattctagacagtttatctgctcggtgcccttacaaattgtttgctttgcacttattatagtagctaatgtcatcaaattgtgggccccnnnnnnnnnnnnnnnnnnnnnnnnnnn

SEQ ID NO: 389749 - DNA, 909 bp, Oryza sativa
  unsure (1)..(909): unsure at all n locations
ttctcacgctgctccccccactccctcccgcggcgccgccgccgccgccaccgccgcatcgccgctgccgacggctgcgctccgaagaattctgtgaggatttaagctgagaagatggtgctgaagacagagctttgccgttttagtggccagaagatatatccagggaagggcattcgctttattcgtgctgattcacaggtcttcctttttgcaaactcaaaatgcaagcgctacttccacaaccgcctgaagcctgcaaagcttacctggacagccatgtacaggaagcagcacaagaaggatatccatgctgaagctgtcaagaagaggcgccgcaccaccaagaagccatactctaggtcaattgttggtgcttcgttggaagtcatccaaaagaagagagctgaaaagcctgaagttcgtgatgctgctagagaagctgctcttcgtgagatcaaggaacgcatcaagaagaccaaggatgaaaagaaggcgaagaaggctgaggtaaccaagtcccagaagtcgcagtcgaagggtgccgccccgaggggttccaagggcccgaagattggtggtggtggtggaaagcgctgaagatttcttgatccccaggaaagggtcgcctggttctcgccggctgtctaaatcgtatctcatcaaaagctaccctgtagaacctctgttaaattagcactactgccaaaatgttttaacatcgccactggagataatgtcatgaagtttgaaatgctatgtgggaaaaatgtttttctttggttgtgttactattacgagatttgacttggcttaatgtttctgagcaaagtttgatgctgcttggcattttaatcccaaaaaaaaaanaaaaaaannnnnnnnnnnnnnnnnnnnnnnnnnnnnnnn

SEQ ID NO: 389750 - DNA, 778 bp, Oryza sativa
  unsure (1)..(778): unsure at all n locations
ggacggnggcggagcgggaggcgctagggttttgctgctcccacaggtaaggaggcattgaaggtttggtgaggcagcgaagatggttctcaagacagagctgtgccgtttcagcggcgccaagatttacccagggaagggtatcagattcatccgtgcagactcccaggtgttcctgttttcaaactcgaagtgcaagcgctacttccacaaccgtctgaagccagccaagcttacatggacagccatgtacagaaagcagcacaagaaggatattcacgccgaggcagtcaagaagaggcgccgcaccaccaagaaaccgtactcccggtctatagttggtgctacccttgaagtcatccagaagaagagagctgagaagccagaggttcgtgatgcagcaagggaatccgctcttcgtgagatcaaggagcgcatcaagaagacaaaggacgagaagaaagcgaagaaggcagaggtggcaaaatcgcagaaggcttctggtaaaggcaatgctcccaagcctgggaaaggcccaaagctcggtggtggtggtgggaagcggtagatgctcccatttccagagctgatattatcttctagatcaaaaatctaatgttatttatccagacccttttttggaagaaaattttgcaccatcagttgtcctgagtaccatacaaatggagaacttagtttgaagcatttttggagcaatttttatcattgttctatctgaagttggtacttttgacatgattcaaaaaaaaaaaaaaaa

SEQ ID NO: 389751 - DNA, 800 bp, Oryza sativa
ccacgcgtccgcggacgcgtgggcgccaccaccgcagctgcgccgcttcaaggcaggacattgtgaaagtttcccaagtctgaaaagatggttctgaagactgaactttgccgttttagtgggcagaagatatacccaggcaagggtatcaggttcattcgtgctgattcccaggtttttctgtttgccaactcgaaatgcaagcgctacttccacaaccgcctgaagcctgccaagcttacctggacagctatgtacaggaagcagcacaagaaggacattcatgctgaagctgtcaagaagaggcgtcgcaccaccaagaagccatactcacggtcaattgttggtgctacactggaagttatccaaaagaagaggagtgagaaacctgaagtccgtgatgcagccagagaagcggctctccgtgagatcaaggagcgcatcaagaaaaccaaggatgagaaaaaggcaaagaaggcagaggtggcaaaatctcagaagacacagtcgaagggtggtgctacccagaggggtgctaaaggtcctaagattggcggcggtggtgggaagcgctgaaagtctcttgcatcatagggagagttcttctggcttagcttctctccggccatattcgtagaaacagtaccttggtcaagttagcctgccgtcttgaattttcacctttttctgtgagatgacttgtcctgaatgcttcgggtattttgttagtcaatttacaattgcacttatgtttgcctattataaaattatcaagttttctgcaaaaaaaaaaaaaaaaa

SEQ ID NO: 389752 - DNA, 576 bp, Oryza sativa
ccacgcgtccggtgtcagcagcggactttggttttgtgaactacttgttgcaaggttattatgagggcaagagggcaactgaagctgaactgctatcaaaattcacctatggcggagtgattttgaggcctggttttattcatggaactcgccgtgtcgggggcgtaaaaatacctcttggacttgttggttctcctatgcaaatggttctccaaagtgcgtagccgttgacgagattgccgctggttggcccactgttgacccctccagtgagtgttgcctccgtggcgaaggtcgctgtaagagcagcaactgatccagtgtttcctccgggtattgttgatgtgtacggcatcatgcgatacagtgaccagaagtagaaggtattaatattacaccggttcatacaaattctatctccgaatgaataagcagatgtggctggcacgttagactttggcgcttggttcgttttcatagatttttacagttagtaggggaaccttatttaactgatccatgtcaatcagtggtgaagatgtatataagtaataaatcgtatcatgctcaccatgt

SEQ ID NO: 389753 - DNA, 804 bp, Oryza sativa
cggacgcgtgggcggacgcgtgggccgccacttccgccaccgcctcgccccgttgctgacgagcccgccgcccctgctgcgtgcttcgccgccgtcgccgacggtcggtgctccaccctccgttgcggctgccatcgaagaaacggcggtggtgacggagccggcgccaaggaaggcagtggttgcgtcgagaagaggaggaccgtacgtcgccaggcggctccggctttctctagaggagtagagttgcagagtgacgtggaagccggtggcacacaggagctagccgacgagcttgacaccgagcagcttgggctggagagcaagattatggccatcaagaacttcttggaaggaccccgaccatgtcctccgtgatcccatttttactttctcgcagaatatgctccaaatatgcaactttcttgacatgaactgtgcatgttttttgtgttttgtctcagcccaaccgccccaacgacgtgctggtgaaatagtgagcttactgcaaaaccggctaaacatgaacatcaccttcatggagctgcagggtcatccagcctcctccgccggcgagggcgaccagcctgtactgcaggcttggaccgccgtaggggactgcgggcgccatggaggggccgtgctgtccctgtgaccaatggacgatgacagttgcggctgccgcgagtccacgccgactgcgaggcggttaatgtcgatgacatgttcagcctgcgtagggatagccagatcgggcaggatcagtttcatggcaagggtgcatggattcacatgtttggaatg

SEQ ID NO: 389754 - DNA, 951 bp, Oryza sativa
cccacgcgtccggtacaatgtgatggtgatcgatcttcttgggccaagccttgaggacctattcaactattgcagtaggaaattctcgttaaagactgtcctcatgcttgctgatcagatgatcaatcgagttgagtacatgcatcagaagggatttcttcaccgtgatatcaagcctgataatttccttatggggcttggtaggaaagccaatcaggtatatataatagattatgggcttgcgaagaaatatagggaccttcagactcacaagcacatcccatacagagagaacaagaacctcactggaacagctcgggatgcaagtgtcaatacccatcttggtgttgagcaaagcagaagagatgatctagaatctcttggttatgtccttatgtacttccttagaggcagcctaccatggcaggggctgaaagcaggcactaagaagcagaagtacgacaaaataagtgagaaaaagatgcttactcctgtggaggttctttgcaaatcttacccatcagaattcatttcttacttccactactgccgttcattgaggtttgaagacaagccagattattcttacttaaagaggctattccgtgatctctttatccgggagggatatcaatttgattatgtatttgactgggccattttgaaatatccccagataggctccaaaccactgatgaggccaagtgaaagaaccagtggagctgcgggaccttctatggagaagatggaaaaggccccaggtgaagcatctggcaggagggatccctactggttctttgaatcagagtgacaattattgcacaacggccgtcaatgtcactaaaggaaatcatgcatagcaccgaccggtccggcgaaaggaccgtggaaagaccccgtacatcctcccgtacaggcagtgcatcaaggagagcggttgcgtcaagcagc

SEQ ID NO: 389755 - DNA, 621 bp, Oryza sativa
attacgatcgatcttgaattcttgatcagttgagttgcattgcatgcagaaagctcatcacaagttcacaaccaatagcaatcaccaagttttttttttgacactgtgacagcatccaccatgcaagccatgcagagacttgtgctgtgtcttgttgtgtccatggccatcgcggcgtcggctcagggcccgacgtcggcgccggccgcgccggcgcctgcaacaaccggcggcaccggcgacgccagcgggcccgcgccggcgtcgacgaagacgacgaacatcacgggggtgctcgccaaggccgggcagttcaacacgctcatcaggctgatgcggtccaccggcgcggcggagcagatcgacaaccagctgaacagctcgcgcaacgggcttgcggtgttcgcgccgacggacaacgcgttcacgtcgctcccctccggcacgcttatctcgctgtccgaccaggagaagaactcgctggtgcagtaccacgtgctgtcctggctgagctccatgtcgcagttcgacaccggcagcaacccgttccggacgcaggccggcagcaactcgtcagggcagtacccgctcaacgtgacggcggaggggcagcatgtgaac

SEQ ID NO: 389756 - DNA, 636 bp, Oryza sativa
  unsure (1)..(636): unsure at all n locations
ccacgcgtccgcccacgcgtacgggaaaccctaagcgaagcggaggagagaaagcaatggcatccctgagcaagcgcggcggcggcggcggcgagggggagggcatcctggcctccttctcccggtcttcggtggcggcgcatgggcgcgaggcggcgaccatggcgaagaagctgctgcggagcacggggaaggcggcctggatcgcggggaccaccttcctcgtcctcgtcgtcccgctcatcatcgagatggaccgcgagcagcagctcaacgacctcgagctccagcagcaggcgctcctcggcgggccgccaccgcccgcgcctctcaaatgatccatccgtccatccttagcttctactgctgcctacctatgtcgtcgtcgtcgtcgtcttagtctttttcttcttttcttcttctcttagtgtacactgctgctactagtgtttttgcctgtctagtcggacaaatcaaaactttcttgttttcatcatcgatctatgctatgctgctctgatgagatgtcgctttttctttcctgctgctactttattttcacgctcatcttatcatgccgaataaatcgatcggttactatatttcattctgtgcannnnnnnnnnnnnnnnnnnn

SEQ ID NO: 389757 - DNA, 1007 bp, Oryza sativa
tttcccccaaatcgctctctctctcctctcctctccaccgccgccgatctcctcctcctcaggcgccgccgccgcgtcgcctcccggagctccggtgctgccaccagcctacgcagcgccgcctcctcctcctcctccggcatccgccaatcgccgccgcctggttcgtcggggagccccgcgccctaacgttttctagaggcgccgcggatccagcgcgaatcgatcgagaggtaaaggggaagttgatttgagtcggcggccgaagaaggaagccatgaactcgagaagcaactaccgcagcaccagaacttctctttttgatggcattgaggagggcagaatccgtgcaacatcctattcttcacatgagatagatgagaatgagaatgatcaagctattgatggattgcaggatcgagtcagcattctcaagcggttgtctggtgatatccatgaagaggtggaaactcataaccgtatgctagaccgaatgggcaatgatatggattcgtcaaggggttttctgtctggaacagtggacaagttcaagatggtttttgagaccaaatcaagtcggaggatgggaaccctcgtagcatcattcgttgcgctttttctgctggtatactacttgaccaggtagaagaggaccatgcatcacttgcctactgttgtgaagcgatgtgaactgggttgggtactcaagaacacgctgaaaatgtctgtgtcaatttaccgtggtgtcgtatatacctccaatatctcgctgtcataaagcaaaatatgttgaccagaatgtttctaactctgcactgtgtgaggattacaacatgttcgtcgtttgctctggtgctgtaattacctttacagaaaatgtttcctgctgtgttctgtaacatctgtttctgtatgcggtcatgctatctgtattatattataacttcacaagagattgtactttggagtcttaattgccatatataagacgctattagtatgtggtt

SEQ ID NO: 389758 - DNA, 530 bp, Oryza sativa
  unsure (1)..(530): unsure at all n locations
nnnnnnnnnnnnnnnnnnnnnnnnnnnnnnnnnnnnnnnnnnngcttctcaacaagcattccaccacagatgatgcatataaacatgaattcatgccttcaagcatctgatatttacacaccacatcacatttgccgcccggagttctgcagtttccacacgactattgacacaaccactttcctctactataaacacttgtgaatcttaaactgaatactgatccacattggggtacaactagcaaggacgcagtgtacatcttcacaagtgcaaccgaatatttacagacccccccatatatagggtcagtttggagctagcgctcatatgggcttccacgcagttatgacctcttggaacatttccagagtcagctcacgatctgcgtgctggaagaagctattgatctcctccctcacatcgtatatcttcccaaaaacaaacaggtaggtcaggcaccctttcttcagcttttgcagctggtacagccacgcgacgtgaagcctctcgaggacattgctagagtt

SEQ ID NO: 389759 - DNA, 1019 bp, Oryza sativa
ttaactttgttggtgcgaattttgaccagcgtcggcttcactcaccaaatcaccaacattctccagatttaaggaaagaaggcaccacaacatcaaaatatgaagctgaggttagcaggactaattctggcagtggctctggtcgacgagctggcttggacagcatggatgtgacaggttcacagatgggtagtcctgctcacgcaggaaggaagagggaatcatcgcggagtactgataggcagcgtgcagtcgcagaggccaaaacatggggggagaattcaagagaaagaaagtggccaaatgctcgtggcagctttgatagtacaaatgagtaaacctctgaagcagaaggttcagttaagtcgtcattctaggggaaaaaaaaagatgaatcacttgcagaacccaactgggtcgaattaggtacatggggcattttcgctccatctcggctctgcggtctatgtgaatagagcttctctttttcttttttctgtcctggagacaccaccgctgcttcagagctctcctctcgtccatacgaatagcatcaccgcgatctcatcgtcgacgcgcctattcctggcgtccattcctcgtgattgatcatgcaaatgtgccttttattcatcatgaagacagaaaccaccgtttggctggaaatgtaggtagaaagcaaaagagaaaatttgctctggagctatccattgggtatctcatgtccatgttgttgcatgatgagtgtcagcgcctgcaccattgttcctgagtgttctagctctatgtgaagtgaagtctgcgtacccagggatgtgatgttcttttttcttttcttttcttttctttttgtctcaatggtttgtacctagggggtacggcattttacctgtgtttcatacacctgtcatttgacaatttcatgtcggagttatctgttgtttcacctctacgagtaaggggcgcccgaaaagaggatcaagcaacgtacgcggcatcgccggatgctctaaatagtg

SEQ ID NO: 389760 - DNA, 771 bp, Oryza sativa
  unsure (1)..(771): unsure at all n locations
cacgccnttgttaaaacnccggcccattgagccccgcgtaatacgactcactatagggcgaattggtaccggccccccctcgaggtcgacccacgcgtccgcgggaaaaggaggtaagggcttgctcgccgcgaagacgacggccgccaagtcggcggagaaggacaaggggaagaaggcccccgtctcccgctcgtcccgcgctggtctccagttccctgttggccgtatccatcgccagttgaagcaaaggactcaggcaaatggacgtgttggtgctactgccgcagtttactctgctgctattctggagtacttaacagctgaggttctggaactggctgggaacgctagcaaggatctgaaggtcaagcgtatcacccctcgccatctgcagcttgccatccgtggagatgaggagctcgacactctcatcaagggtaccatcgctggtggaggtgtcattcctcacatccacaagtccctgatcaacaagtcctccaaagagtgaagattaggacaggagcatccttagtttaaactggacttttgtgtgatgagtcctagttaccgtgtaggttttagtcaagcttttcatatatcagcaatccatctgtgtaatggtttcctcgtactgcttcagtcattggaacactgtatttgtggtcggttgttaactttgattgagtactaaaccttaatgcaaacttggttccctttgcttaaaaaaaaaaaaaaaaaaannnnnnnnnnnnnnnnnnnnnnnnnnnn

SEQ ID NO: 389761 - DNA, 606 bp, Oryza sativa
gagaagaggaaaaaaaaaatctcgctttcgtccgcgtcgcgtcagggggtaggagaggaggaagccgaggctccgcgagctcgcgaaagggtttccgccgccggggtcgcgcgggcgttcgagcggagggaaaggggaggagacaggagagggagagggagagggagagagagcgatggcgggaaaaggaggtaagggcttgctcgccgcgaagacgacggccgccaagtcggcggagaaggacaaggggaagaaggcccccgtctcccgctcgtcccgcgctggtctccagttccctgttggccgtatccatcgccagttgaagcaaaggactcaggcaaatggacgtgttggtgctactgccgcagtttactctgctgctattctggagtacttaacagctgaggttctggaactggctgggaacgctagcaaggatctgaaggtcaagcgtatcacccctcgccatctgcagcttgccatccgtggagatgaggagctcgacactctcatcaagggtaccatcgctggtggaggtgtcattcctcacatccacaagtccctgatcaacaagtccttcaaagagtgaagattaggacaggagca

SEQ ID NO: 389762 - DNA, 631 bp, Oryza sativa
  unsure (1)..(631): unsure at all n locations
ggccggcgccgcccgggggggtcgtggcaggttttcctcgacatcctccgaaccgacgggcccctggggctctaccgcggcctctccgccgtnatcctcggctccgcgtcctcctccgccgtctacttcggcacgtgcnagctcgccaagtcgctgctccgcccccacctcccacccttcctcgtgccgccgctcgccggcgccacggcaacgtctcctcctccgccatcatggtccccaaggagctcatcacccagcgcctccaatccggcgccgccaagggccgctcatggcaggtgctccttcagatcctccagaccgacggattcttcggcctctacgccggctacgccgccaccctcctccgcaacctccccgcgggggtcctcagctactcctccttcgagtacctcaaggcattcaccctcaagcaacgcaacaagggagagcctcacgccgtggagagagtgtgctgtgcggcgctctcgcgggggccatatcggcgggcgctcaccaccccgctcgacgtcgtcaagacgcgcctcatgaccagggtgggcaccgaggggagccgcaatgaggttgggacaaagcgggaggtcgtcgtctaggaggggctgatgggcttgtc

SEQ ID NO: 389763 - DNA, 865 bp, Oryza sativa
  unsure (1)..(865): unsure at all n locations
catccccatagctgcactgcacggaggtcgccgcggctaccccatcgccaccaccaccaccaccgcatctctctcccctcgccgtcgccgtcgccgtcgccgcagcgcgagatggggttcgtctccttcgccgggagggtcctcttcgcctccgtcttcctcctctccgcctaccaggagtttagtgaatttggagctgatggtggaccggctgcaaaggcccttcggcctaagtataacgtcttcaccaaaaatatttctgcacatttgggagtagcagtgcctcatgttgagttgaagcacattgttgctgctaccattggtctgaagggtctgggaggtctcctttttatcctgagcagttcgtttggtgcttatctcctgctgatttacctcgcttttatcacacctgttgtctacgacttctacaactacgacatggagaagtccgaatttgtgcagctcttcatgaagttcacacagaatttggctctctttggggcgcttcttttcttcctgggcatgaagaactccattcccaagaggcaggccaagaagaaggctcccaagtcgaagacgaactagggcgttttagatagccatgcctccggcggtgatgggggacagtttattttggagtacaagcttacagtaccagttgtgctgcccttagatgtatcggattcatttttgaagggcacgaccctaatgaggtgtgagtggagggttaggggactagattgtatcagtatatgtactcgcgatttgtttgttgaactaggcttccaaggattaaattacccatttgattattttgcactcnnnnnnnnnnnnnnnnnnnnnnnnnnnnnnnnnnnnnnnnnnn

SEQ ID NO: 389764 - DNA, 781 bp, Oryza sativa
  unsure (1)..(781): unsure at all n locations
ggggcagaagcagagcttagctctcccctcctcctcctcctcctcctcccatggcggccgggtgggcccgccctgccggctttgccctgctggtggtggtggtgctggcggcggcggcgagcgcggacaggccggcgaggggcgggctgtcggtgacggccggggcggaggagtcctccgccgtgttcccgctctacggcgacgtgtacccccacggattgtactatgtggcgatgagcatcggcaacccgccgaggccctacttcctggacgtcgacaccggcagcgacctcacctggctgcagtgcgacgccccctgcgtcagctgctccaaggttccgcacccgctgtaccgaccaacaaagaacaagctggttccatgtgtggatcagatgtgcgccgctctgcacggtggtctgaccgggaggcacaaatgtgattcaccaaagcagcagtgtgactatgagattaagtatgctgaccagggatcatcacttgtgtgtgcttgtcactgacagcttcacactccgacttgcaaactcctcaatcgtccgtcccggacttgcatttgggtgtgggtatgatcagcaggttgggagcagcactgaggtgtcagctactgatggtgtccttgtgcgttgggagtggctctgtcagtgtgctttcacagccgaagcagcatgggatcactaagaacgtggttggccactgcctcagtacaagaggtggagggttcctcttcgttggngatgacattgtgccttactcgcgtgcaacgtgg

SEQ ID NO: 389765 - DNA, 840 bp, Oryza sativa
  unsure (1)..(840): unsure at all n locations
caattaactcttgatgattttcagaaggtcagtgaccaagttcctttccttgcggaccttaagcctagtggcaaatatgtcatggaggatctgcataagattggtggaacactgcagtaattcattatcttctggagcaaggtcttcttgatggtgattgtatgaccgtcactgggaaaactctagcggaaaatgctaaaatcttccctcctctgtccgaagacnagagatnaataaggcccctggacaacccaatcaaatcaactggtcatatacaaatactgtatggcaatcttgcaccagaaggttctgtagcaaaaattactggcaaagaggggatgtttttctcaggccctgcactagtgtttgagggtgaagaatctatgattacagctatatcagaaaacccagcgaatttcaaggggaaggtagtagtgatacgaggagaaggaccgaaaggtggaccagggatgcctgaaatgctgactccaactagtgcaataatgggtgctggtcttgggaaggagtgtgccctgctgaccgatggcagattttctggaggatcacatggatttgttgtaggccacatttgtcctgaagcacaggagggaggtccaattggtcttgttcaaaacggtgacaaaattaccattgatgttgtgaagagagtaattgatgttgaactgactgaagctgagctggaagaaagacggaggaaatggacgccgccgccacacaaggctgcccgtggagcgctttggaagtacacgaagctcgtgtcccctgcatcaagaggatgcgtccccgatgagtagatcctgctgctgctgctcgagtaat

SEQ ID NO: 389766 - DNA, 520 bp, Oryza sativa
ccacgcgtccgcccacgcgtccggacaaattgaactcttcccaaagtacagcaacaaacataaattcctcgtcctgtgcgtctcatctgggctggtgggttgttgtagcgaccgatcgacgacgacgatgtcggcggtcgagaggaagacggcgtgcgtcaccggcggcaacgggtacatcgcttctgcgctcatcaagatgctgctggagaagggatatgctgtcaacaccgacggtcagaaaccccgatgacatggcgaagaactcccacctcaaggacttgcaggcacttggccccttgaaggtcttccgcgccgacatggacgacgaaggcagcttcgacgatgccgtcgccggctgcgactacgccttcctcgtcgccgctccgatgaacttcaattcagagaatcctgagaaagacctggttgaaagccgccggcaatgggaaccctcaacccgatgagatcgtgcgcgaaggcggggacggggaagcgcgtgatcataacatcggcggacgct

SEQ ID NO: 389767 - DNA, 1082 bp, Oryza sativa
tcagagtaaggtttattctaaatgcaagctccatctggttgatcaacaagaaggttcggcttctaaggtggagctggtggggaggaataccgacaatgtggaaattagccatggaagcagttctggtgacaaaatgattgctgagttgaccgaggaggaattgacattgcaaggtgtgcccgcagatgagactcagacagacatggaatttggggagtgggaagggattgaaagaactgagatagaaaagaggtttggtgtggcagcagcgtttgcatctagtgacgccgggatggctgccctgtcaaagcttgatagtgatgtgcagctgcagctgcagggactccttaaggttgccattgatggtccatgctatgactctacacagccacttaccttgaggccttcatctcgtgcaaaatgggctgcttggcaaaagctagggaacatgtatccggagacagctatggaaagatacatgaatcttttgtcagaggctattccaggatggatgggtgacaatatctcggggcacaaaggaacatgaagctggtggatgatgctgtaggggtctgtcttaacaatgacttcaaatacaatcaaccaacatgacagtcaagggaatgaagacaatactggcatgtatgaaggtcacttgacaagttcccctaacccagagaaaggacagagttctgacatccctgctgaatgaacataacactcatggaagatttcttgcatcagtgatttcagcccattgctgagaccgctaccgatgccttcctcataagattagatttgtacagtgctcctgtggtgctaatattagtgttgtcatggtgttggtttgtgtatatatatgactgtatatatcagttcctgccggtcctactgcgtgtattccgccagcagcaggttcttatcttctggttttctggtgtagtctgtagagcattacttctggtgagtcgtaattatatgtcgatgcgttgcagtttggaagaagaaattaaagtggttggaaaaccagataaaagaaataaaaaataatatagtaaaaaccacatactttatttacccaa

SEQ ID NO: 389768 - DNA, 601 bp, Oryza sativa
cgggtcgacccacgcgtccgcccacgcgtccgcccacgcgtccgagatgataatgtccagcgtgagattataaatcaccgatcgttgaaacatcctaacattattaggtttaaggaggttattttaaccccaactcatcttgctattgtcatggaatatgcctctggtggtgagcttttcgagagaatttgtaagaatgtacggttcagtgaagatgaggctcgctacttcttccagcagcttatctcgggagtcagctactgccattcaatgcaagtatgccaccgtgatttgaagttggagaatacactgctggatggaagccctgctccacgcttgaaaatatgtgactttggctattctaagtcttcagttctccattcacaaccaaaatccactggaggaacccctgcttatattgcaccggaaggtctgttgaagaaagaatacgatggcaagactgctgatgtatggtcctgtggtgtgactctatatgttatggtagttggtgcatatcctttccaggatccagaagagcctaagaacttccgtaaaacaattcagcgtatcttgaatgttcagtactcaattccagaaaacg

SEQ ID NO: 389769 - DNA, 500 bp, Oryza sativa
ccacgcgtccgcccacgcgtccgaaaagagggaagaaacagatactgaatctgaaaacagggaagaaacagagagtgaatctgagagggcagaaatagactctgtatctgggaagagggaagaaacagtggctgtatctgacaagagagaagaaaaagagactgaatctgaaaatgggaaagccgcagtgacttcatcacaacggagttgagctgacaagcttgccaggcgaaggtaaaggtataaccccggcagattgaagtgtctgttcatcgtctgatccatgaataccaccatgaaaaatgcaagccaactgttgatatgaactccaacacagtgaattctcagctctcaccaagagatgaacaccaaatgttaactagaaacgctttaacacacagcaagaatgtgttgcctgacttgttttgtagtcggcaccaccatcccaaccttcgtgacctcatttgagaaccctttcgcaacaatatctgccagatgat

SEQ ID NO: 389770 - DNA, 533 bp, Oryza sativa
ccacgcgtccgaaggcatgcgggcataacgtagtcaagcttacagatgataggtttgtacgcctcgtggactgctaagcttggttctcttcgttggaaatcgaatgtcatgatgcggtgggacgatgaaatttcttgttggaaatttacaagaaatttctgcaggccaatccatctccagaattccttgctgcaatccttgaattctggcatgctggcaatccatggaagatttggccgctgacctgaatggaggatctttatgttagcccactgtactcgagcagtaactccaggctaagcacgcccccccaccagtaccaacctttgatggtgttatgggatggccaatctttgtgttatgttatgggacgccttaatatcgcaagtcggcgactcatggataactggacgattgttgatgagaagccttcgcttttggtagatcatgatttagcaagcttggagtgttcacttgttgaaacttgaaagatgttcataacagcgtccagtgggtgctcgtcctttcttgcc

SEQ ID NO: 389771 - DNA, 633 bp, Oryza sativa
  unsure (1)..(633): unsure at all n locations
ccacgcgtccgcccacgcgtccggcgccatcgacttctcacggttggaggaagaagacgatgtgctactgcgtgaccatgtgaagaagctgcagagggaagggcagctgggcgccatcgtggaccggaacctgagcagcaactacgacgggcaggaggtggagatgatgatacagatcgcgctgctgtgcacacaggcgtcgccggaggaccggccgtccatgtcggaggtggtgcggatgctggaaggggaaggactcgcggagcggtgggaggagtggcagcaggtggaggtgacgcggcggcaggactacgagcggatgcagcagcgcttcgactggggcgaggactccatcttcaaccaggaagccatcgagctctccgccggcagatgacgactgcgtacgtcctgatgcatgtcacttcccaatcccagtgttaatagatatacatgtatgtatatgtatgggtggctcttagttaccatagggttggttatgtcactaaagaacccatgtcaagcctccatttgtgtagaggaaaacagctagagacgcatgtgttcagagttcagacttcagaagtcccaagtcgcatctgcttggggaagccgagccacattttctaccatnat

SEQ ID NO: 389772 - DNA, 317 bp, Oryza sativa
ccacgcgtccgccgcctacggctggaccagcggcggcggcggcggcggccgcgcggcgccgtactgatcaacatcgatctcgccggagagaaaaaaaatggaggagaaggatcggagcgagccgtgcatggtgtaggatgaattaagctaagagttaatttcttcttccgcctttgctaatcatgatgctctcgtgttgtttaatctgtggcaatctgcttaattgcaagctcatcactgcaattaagcagcagctaaggatggttggatggttaaaactagtgctctctgttagtgttgatgttaattaattaatt

SEQ ID NO: 389773 - DNA, 865 bp, Oryza sativa
  unsure (1)..(865): unsure at all n locations
ctgaagtgatcggcggttgctgtggcggagcagctttcttcttcctcgggcagggcagggggaggtctcgttgcgatggcgggaaggggcgagatgccgatgaggcctgtgcggccagggccgccgatgcagtaccgggggcctcctcccatggctcgcgcgcgcgtcgaacccgtcgatcgcgagaagacgtgccctctcctgctccgggttttcacaaaggttggtggccatcaccaaaatgaagagtttgccgtgagaggaaaggagccgaaagatgaagtgcagatatacacgtggaaggatgccacactccgagagctcactgatcttgtgaaagaggttgctcttgcagcaagaaaaagaaatgcaaggctttcttttgctttcgtgtaccctgataagcatggtcgtttcgttgtcaaagaggtgggttcaaccttctcttatggccatggaaggggagatgatgctaaaactcttgcagagctaggattccagataggggattacttgagtgttgcaatctattgagtgacactgcttcacgaaatagtgtgtttctccctgcctaccatgctgaatccagctttcctgtggcggtacccagctttcctgtggtggtgaatatctctgtagtactagagacgtgataccagaactgtttgttatggtagtaaccttggaattcactcagtatttcgagtgtgttgaacacttaaaacgtttgatgtgattgcgtgttatatacctgttcgtggtttccttgggactgtgagatctgaacatcacgcgttttccattgattctctgcgccgagtaggattaaatgtgttctgtgctnnnnnnnnnnnnnnnnnnnnnn

SEQ ID NO: 389774 - DNA, 505 bp, Oryza sativa
ccacgcgtccgctcgcacctgctcacttggaccatgttcttgctgagcacacatccggagtggatgaggaggatcgggaaggaggtgacaactatgtgcggtgacgaagtgcccactggtgacatgctcaacaagatgaacttactcaacatgttccttctcgagactctaaggttgtacagccctgtctcactcatatcgaggaggactggcaccaatgccaaattcggtggcatcaaggtgcctgagggcaccatcctaaggatcccaatcgcaacaatccatcgtgacaaggaagtgtggggtgaggacgccgacgagttcaagccggcgaggttcgagaatggagtgtccaaggcagcgaagcaccccaacgcactactctccttctctaacgggccgaggtcatgcatcgggcagaatttcgccatgattgaggccaaagccgtcatcaccatgatcctgcagaagttctccttcacgttgtcccctaagtacgttcaca

SEQ ID NO: 389775 - DNA, 799 bp, Oryza sativa
ccacgcgtccgaatatgctcaaaggtcccgcgttcggaagcttcaatatattgcagagcttgagagaaaagttcaggcattacagtcagaagggatagatgtgtctgctgaaatggagtttcttagccaacagaatattatgcttgacttggaaaacaaagccttaaagcaaaggctggaaagtctagctcaagagcaactaattaaacgctttcaacaggagatgtttgagcgggaaattggtcgtctcagatcattgtaccagcagcagcagcagcaacagaagcagccgcaacctactactaccctcagtcgaagtaacagcagagacctggattcacagtttgctaatctgtctctgaaacacaaagaccccaactctgggcctcttcgtactcagtcctcgtcaatcttgtgagttccacacaaagttgccacaactcctagataactctttgtggctgtcatctgcatcaagaaaggagcaggcgcacctggaatcgtgtacccccatctatggtgaataataacactggaaaggctaataactgtggatctgatctttattcttttggaatatgcacctggcggtcatcctcagctcacttccattgttgatgctcgaccagtcggaggtgtttagggtttttctttgtagtttgatgcttttattatcgcatcgttgtaccattttcgaaatgctagggttctaatttgttaccgtcctgttccctgtgatcatgcattatgttagcgatatttggattagtcttgcctttatcaatggaatgtggagcac

SEQ ID NO: 389776 - DNA, 624 bp, Oryza sativa
cgcggcggcggggccttcgtgcgccgaacgtgctcccgctcgatgcagcacgagccccgaggtgaatgttcgaggtgctcaaagcagaggaccgacggcgcccaccgccgccgcgctcgccagggcgttcggcgcaatgccgtacctgtcgttcgacccggaggccgcggcgatggccagcggggagagcagcggcatgagcagcgactcggaggggtcggccgccggcgcggcggaggaggatgacgacgagtgggagttcatgcgggggctcaccgtgtgaccgaggcagccatcgccggcttcttggtgttcacgcgaggagttcttgcacctccttctcctcctccattgtacctgtcgcactgagcagtcgtcgtcgccgtcgtgttcgtcgccgtcgccgacggtaatctccacccagtgtgtggttgtatcgtgtcatggtcgttgtcgtcgggcgtctcgtcgccgtagtctcgccggagtttctggcgccacctttttatttcgcaagcgtcagtgtccactgtttcgctctccttttgaaatttcatcagagaataagatgaggaacaaataagtttcgttcgattaaaaaaaaaaaaaaaaaagggcggcaga

SEQ ID NO: 389777 - DNA, 588 bp, Oryza sativa
ccacgcgtccgcttggaaagcttgctcctacagttgagaagttaaaacgtggatttggcatgcacgtccctggagggaggagttagctctctggctctgatcatcctcccttgctttgcaaaaactcatttccacgtaaaagctgtcaagggagttaaattggattgtggcatggaagaagcctttagattgtacttcttgaagcttgagtgtgcagcaacagtaatacacgagtacctaagacgacctgttttttatatatatttaccacttactcattcaaagttgacaaattgtcgtacaaattccattacttcatttgaagcattctttaggtatatatgacctaagcatgcgaacagctctaagttcctcatgtgtctgggtatgttgtttcctgtcccctgcatatgttgttgatacagagcaatagagtatagacaatattctgggtgtgtatcgttgtgggcttgtaatatgtctgctataccagtgcctttttacattatattacacatgtatgtaaagttgtaaatatttaatcttaaccaccttttgctaggtggcagatgtgaatgtttgatgatt

SEQ ID NO: 389778 - DNA, 1298 bp, Oryza sativa
ccacgcgtccggcttggtcggcttgaagttgcaaaggcaattgccattgaggcacaaagtgagtccaagtggaggcagttaggagagttagctatgtcaaccggaaagcttgatatggcagaggagtgtcttctacatgctatggacctcagtggtttattacttctgtattcatcccttggtgatgctgaagggctaacaaaattaacatctatggctaaagaacaagggaagaacaatgttgctttcctttgtttcttcatgctgggaaaactggaagaatgtcttcaattgttaatcgaaagtaatcgtataccagaagcagcattgatgtcgagatcttatcttccgagcaaagtccctgagattgtaacattatggaaaaaggatctccaaaaggtaaaccccaaagcggcagaatcattggcagatcccgacgagtacccaaacttgtttgaagactggcaaattgctctcaatgtagaagctaatgttgcgcccaaaaggggtatttatgcaccagctaaggagtacattatccatgctgagaggcccaacgagactctggtggaagctttcaaaagtatgcgtatacatctagaggaggtgctgccagatgaaaatggagatgacactcacgaggctattgaggaaaatggagtagaagagagccaagaagatgctgttgaggttgatgttgaagctgatggttcgactgacggtactgtccttgtgaacggaaatgataccgaggaacagtggggtacgaacaatgaagaatcattagcataaaagctgtagttgagcaagttattgactcctgaccaatagtgaatcagcgggacagcaacctgatacactgattcagcttgtaaaggttgctgactcctactgaaactatgtgaaggccgttttcctccacttgtataatcattgggcgtgctttaagatcggcatatccgacgataaaacccacagaaattagtcatcgctttgtccttgtttgagatagaaaattttgtacctttttacacacataggtccttactgtggattctcagggggatgttcccttctcgttgaggttgaatttgattagctaaagaggatccatattttacacaagagtacatagggtaaaagtatgcttgctggatccagaatgtttctttgatgcaatctgcaagacaacactttgtgcgagctatgtatcatttcatttgtgctattccttggccagcgttaatagtgaataaattaaagtttagatacacagagtgattcttttatatggatat

SEQ ID NO: 389779 - DNA, 771 bp, Oryza sativa
  unsure (1)..(771): unsure at all n locations
cccaaagggggtatttatgcccccagctagggagtactttatccctgcctgagaggccctancgagactctggtggaagctttcaaaatatgcgtatacatncaagaggaggtnctgccagatgaaatggagatgacactcacgaggctntcgaggaaaatggantagaagaganccaagaagatgctnttgaggttgatnttgaagctgatggttcgactgacggtactgtcccttgtgaacggaaatgatnccgaggaacagtgggtattgactcctgaccaatagtgaatcagcgggacagcaacctgatacactgattcagcttgtaaaggttgctgactcctactgaacctatgtgaaggccgttttcctccacttgtataatcattgggcgtgctttaagatcggcatatccgacgataaaacccacagaaattagtcatcgctttgtccttgtttcagatagacaattttgtacctttttacacacataggtccttgctgtggattctcagggggatgttcccttctcgttgaggttgaatttgattagctaaagaggatccatattttacacaagagtacatagggtaaaagtatgcttgctggatccagaatgtttctatgatgcaatctgcaagacaacactttgtgccagctatgtatcatttcatttgtgctattccttgcgagcgttattagtgcataatctcagtctcgataacacaccaccaaaaccccggaggtcggccgctcgcgatctagaaa

SEQ ID NO: 389780 - DNA, 859 bp, Oryza sativa
ggcaaaggatggaccgactggtgacaagagccatgtctccacaagggtgatggggacttatggatatgctgcaccagaataccttgcaacaggccatctgaccaccaagagcgacgtctatagctttggagttgtgctgctagagatgctatcaggacgacgagcactggacaagaaccgcccaaccggggagcacaatctggtggagtgggctaggccatacctgatgagcaagcggcgcatcttccgcatcctggacgcccggttggggggcagtactcccttgccaaggcccagaaggtgcaacactggcacttcaatgcatctctgtgggggccaagaacaggcctaacatggagcaggttgttgctgtattagaacagctccaggattccaaggagacaggggcaaatcctccagctgcagaagaagtccagcagcaagaacgcaggcagccaatggatcgaaaccgtcatcgaaggggaagccccgcaaatgcgaggctggtttaagtgaacaatcatatatcatatgatcagatatagatctgttgagatgagtagtgtaggctcttagagggacctgtaaagaagaggagagttgtgaatccttggtgcttgcctgttttagttgtttttgcagcttctagtcagagtcttgtctgaagtaaaaagtatgtggtcgcctatatctgcatgcattcagttcagtgcattgtggattgtacagtttatatctagttctaatgctgcgaaatttttgttcgaggcaacagatgtgcccagatccagtttttcctgatttttaaatctacaagctgccccagatcatatttttgagttctaaaaaaaaaaaaaaa

SEQ ID NO: 389781 - DNA, 553 bp, Oryza sativa
ccacgcgtccgcccacgcgtccggttgggcagcttgctaagatcacaggatgctacgtggttggtagtgctggttctgatgaaaaggtcaacttattgaagaccaaatttggctttgacgatgctttcaactacaagaaggagctagacctcgaggcagccctaaagaggtgttttccagatggtatcgacatctgacttcgagaatgtaggtggggcaatgctagacgcagtgctacctaacatgcgggtagctggccgcatagcggcatgcgggatgatctcacagtacaacctggagcagccggagggagtgtataacatgatttgcatcgtcaccaagcgcctacgcatgcagggattccttgtgtttgacttctatgatatgtactaccagatcgaggagcagattgccgggtacctgaaggaagggaaggtggcatacacagaggatgtcgttgaggggctcgacgctgcgccggcagcacttgtcaagctctttactagcagcagcatcggcaaacagctcgttgccgtcgcacgggagtgatacg

SEQ ID NO: 389782 - DNA, 697 bp, Oryza sativa
tatgcagggagaaggataggtgcccccagctttgggaagacgttcatcacattgaaggggccctgattgttaatatcggcgatttgctacaaaggtggactaattgtgttttcaggtggctttctttcttcacacaaaccctgatttagtggttcaatgcttggaaagctgctgcagtgaggcatgcccaccgaggttcccacctataaggagcggcgactatttggaagaccgattgagggctagatacaaataatcctacgttggctgcgtacatccatgttggatgtaaaggccaggttttaatccattttctgaaaaacacaaataatcctacgtttttaaatgtgtaaagcttaagattagtgaacttcagtgagcagctattccgttgagatggacggaaacatcttgatcttatatgtagcccatctgctgttgctgatttctcgcgtgtgttaatactagctttacttatgagcaatcatgtcagcatctggtgaaatttgtaaccgccttcgagtgtcaacatatatttttgctcttcactgttttcaggaagactggacataacctccactgtattttctgttgccaaaacattggtatagagttttttgtataaagattcttatgatgctttcacgattaaggaagacacaaataaagtaactttgctctcaaaaaaaaaaaaaaa

SEQ ID NO: 389783 - DNA, 744 bp, Oryza sativa
  unsure (1)..(744): unsure at all n locations
ggaaattaaaactagccccaaacctgtgttccttttgctaacactacttggtcagtgtactacttaacatttttatataaataatatcgtggttgtgattgggcatctactggaaaagaactgtggttgattactaggggttgatcactagaggtgtgattcatgcttgtcagtactggctgtggtccagtatatgaatgatttgaatgctgcaagaggaacaaaccagaagaaaacagatcggggaagcttctggacctggctcttctcgctgtttggttgttgcaaaaagaaccaagaagtgggattgccagtataactgaagcatttcatcatctgtatgtatgttgtgaattactcaggtctgcaaagaaaggaaacgtggataatttggttcctcttgttttttttgtcccttttttttggtgtgtatatatgtaattttgtcatgtaaggtccatttctagttatgcaagacctattaagattcatttctgtgtgtaacttcatttgtatgatagcatgttactgcttccatattaaaaactgtcttacagcaagtattatatggttatattctagttactgctctttgctcttgtattagaagtgagaagtggcgacaatgtcagtttgtgcctcattctggttactgtgggggaaaaactgacccttgttcttgatcatatccatcatgctnatgtgccaaacctgnnnnnnnnnnnnnnnnnnnnnnnnnnnnnn

SEQ ID NO: 389784 - DNA, 1102 bp, Oryza sativa
ccacgcgtccggtccgcccaggtcgcatttaaaactggtgattttaaccaccaggtgatcttcatcggtggtttgacggatgggtttttagcaaccgactacttggagcctttgtcacttgcactagaggtcgagaaatggtcactggtacagccgttactttcttcatcatacactgggtatggaatttccagcttagagcaggatgcattggaactagatcaactcatcagttacttgataaacaaagaaaattctgatggagtaatattgcttggtcacagtactggttgccaggatattgtgcattacatgcggacaaattttgcatgttccaaggcagtttctggggtcattttgcaggccccagtaagtgacagggagtatagagcaacacttccagaaactgcagaaatgatagatttggcagcaaaaatgttaagtgagggccgtggaatggatttgatgcccagggaagcaaatccagatgctccgattactgcctacaggtatcactccctttgtgcatatatgggcgatgatgacactgttcagactcagactcttgagcgaatgatcaggatgaggcagagacctgggcattatgtcaacatcacagtgccaggttattttctcaatgggggatgaatatgtcccggaatacgttgataaggaggcacttgtggacagactatgtcgacgcattgggcaacgcggagaaagttgaaatagaatggggaaaccatgctctctccaatagggtgcaagaagcagttcgggccattgtagattttgttaagagagaggggcccaaaggttgggacgatccatggagctagatacaacagccatatgtaacatgtctatcccattttcctcccctagcaacaacgtcttgtttttacatgtttcttgatcatttttttatagtaataattcctatttgttttgctttgttgccttagtaagcattgtgagacacttttgtttattttgtggacatttatgtacaatacttgaatttgtaaattgtagtgaaactatctcaaatctctctttgtcaaattaacattggttaaacggtgtaatcaagactttggtt

SEQ ID NO: 389785 - DNA, 514 bp, Oryza sativa
ccacgcgtccgctcgagacgactcatcaacaaccgccgcgccattgatgactaattgagatcgatcgatagatagtgtaagagatcgaccaccggctctcgatcagcctagctatagctatagatagatatacaatctctctctctctctctctctctctctctctctctctgattgttctcttctgcttgcctcttccatggagtgggctcgaggtccagccatggcggcagcggcagcggcagcggtggtgatggtcgccgccgttctggccggccaggcgatggccgccggcgcgacgacgtacacggtgggcgcgccggatgggctgtgggacatggagaccgactacaaagagggggtcgctcgccggacattccaccccggcgacaagctcacgttcacgtactcgcgtgagctgcacgacgtggtggaggtgacgaaggcggtgtacgacgcctgctccaacgccaacaacatctccgccttacgctccggcaacgacctcgtcgcc

SEQ ID NO: 389786 - DNA, 851 bp, Oryza sativa
  unsure (1)..(851): unsure at all n locations
ccacgcgtccgtaagcagcatcaattttttaaagacattagctgggatacccttgctaggcaaaaggctgcctttgtcccctcctcagatagtgcatttgacacgagctacttcaccagccgttattcttggaatccatcggacgaaaacatctatgaagcatacgaatttgaggattccagtgataatggaagccttagtggcagcagtagctgtgtgagcaatcaccaagatgatatgggggatgagtctagtggcttcactgagtttgaatctagctcaaatgtcaactattctttcagcaatttctcattcaagaatctatcacaacttgtctctatcaattacgatttgctcaccaaaggattgaaggatgatccaccaacgaaatctgagacgtagcagttcgtgttatatcggaatttattcatttgaagtaaccaaacaatttacaaggtgctcgcgtggtgtagatcttgtacatatgaaagtgtgaggcatgggcttgttcctattgaggttgttcctacatttcgcggagccgagtacagttttgatgttgcttgttttcgaacaattcccgtgtcatcatcgatgaaacatccttgaccataagttgggaatgcgtcacctaggagcgctgtttttttcccttctcttaccgcacttcatcggccttggggtgccaccaagatttgggtcaaggttactgtatgcaaaataggaacccttgaaggatgtaggatggtctgagcaaatttttcattgtggcatgtnaattgggaattacccgaatgaaggttcctgtnatctcggagggtatccctgtactcggaactatcaacattcaa

SEQ ID NO: 389787 - DNA, 583 bp, Oryza sativa
gggagctggttgcgcaagaaacgaatcaaaaggtatgtacagatggaattcgaaagtagtaattagctgtccataaacaaatcacgaagaagaagaatgttcaaacgagttcatcattgattaattaaattttgaattataaaaagttccggagacgcactaaaacaaaagatgtggtatagcaaaagaattaatgtatgattaactatcatgtcataattcagaaatattctagtgctgcactcggagagggagcgacatcgtcaggcgaagtacatccaaggaaccttatggttaagacaaacgactacgggcgctatgacccatctccagccttctccaagcctcgcttcaagattattccgaactgatgattagacctgaacctgacttcccctttgttacggtgttcaaccaccgctcaactaattaacacagtacccgttagatgaagagtaatgctatatgtgtttgtctaaagtgtacgtactacaatattggatattagagaataggttagtactagaggtgggcaaaaacatggtatttgggtgcttcggcaccgtcggttcttggacggtaa

SEQ ID NO: 389788 - DNA, 349 bp, Oryza sativa
  unsure (1)..(349): unsure at all n locations
aacggccctnacgcctctacgccgcggcggcaactncaacaaggcccaaggccgccgcccacgccgacgccgacgagccgagggtcaccgtgctgtaaataaatcgtagattctctttggattcccgtgtaattatgtaccttacgcgtatgtggtctactgctcgactgctcgtgctgtcgtgcattgcagtgattgatcctttttttttacattgaggggaggatgctaaaataattatacgattttaagagggtaataagatgaaaccagcgttggatcggtcggacgatccggtgctcactccagttggtaacagaggaaaaaaaagaacaaacactaacggnnn

SEQ ID NO: 389789 - DNA, 582 bp, Oryza sativa
  unsure (1)..(582): unsure at all n locations
agagcatgagaaatgattctcctcgtcgcttgatgtatcatgggactagtggcaccagttctctgatggcacaggataagcaaatgagcctcagaagtcctagcggcaccggccggagaaaggcttcctgatttcaatcttgttcacttgacatggtgaatatcgtgagctgcggttccaccccttgctatctgcaatccccatttttccggtgtatgaaggtgtgtacagtggctttgtacatacctcaactcctcagcaccagtgctgttgtaaaagttactatgggcctcccttggctttgtactgctgttcctcgcgctgctgcttaatttgcgccaaatccctttcccttccgagggcttattccatgagcttgtagtttgtgctggggtggttgctttctttgagctattgctaattaagatgcaatgcatttcccgtgcaggcaaagacgaagcttgtttttgctttgctgttggaacagatcatgtactattaccaatccaaaagctgaaatgctcaggcacacttgctgccaatataataaaaagcttggagaaacctaacatttatngactg

SEQ ID NO: 389790 - DNA, 628 bp, Oryza sativa
  unsure (1)..(628): unsure at all n locations
ccacgcgtccggaactgaggtacttaaaacttgttatcaaagagaccttaaggttacatcctgtggtgccactacttctccctagggaatgtcgggagacatgtgaggtcatggggtacgatatccccataggtactactgtgcttgttaacgtgtgggcaatcggtagagaccctaagtattgggaggacgctgagacattcagacccgagcgatttgaggatggccatatagacttcaaaggaacagactttgaatttataccgtttggagctgggcgaaggatgtgccctggcatggcatttgcagaagcaatcatggagctcgctctagcctcgctgctctaccactttgattgggagctccctgatggcatctcgccaaccaaggtggacatgatggaggagttgggtgctacaattcgaagaaagaacgatctttaccttattcctgctgtccgtgtgcctttgtcaactgtcttatagttgtctacacttacaaatagtatgtttgtctcgtataaatagtatgtttgtctcgtatgtacgtgcctaaatgataagctatgtaacttttgatgatgtgtactcctacttcctatnctacctattataaatattatttaagt

SEQ ID NO: 389791 - DNA, 618 bp, Oryza sativa
  unsure (1)..(618): unsure at all n locations
atgtaaggtcatggggtacgatatccccataggtactactatgcttgttaacgtgtgggcaatcggtagagaccctaagtattgggaggacgctnanacatttagacccgagcgatttgaggatggacatatagacttcaaaggaacagattttgaatttataccgtttggagctgggcgaaggatgtgccctggtatggcatttgcagaagcaatcatggagctcgttctagcctcgcttctctatcactttgattgggagcttcctgatgggatctcgccgaccaaggtggacatgatggaggagttgggtgcaactattcgaaaaaagaatgatctttatctcgttccaactgttcgtgtgcctatgtcgactgccctatagctgtttacacttaagagccaaaatatttgtctcatctgtacgcgcctatatgataaactatataacttttgatggattgccgtactcctactttgcatcctactcgttctacattattactttgaatttagttattaacctatttaatttatatatatgatcaagagtttaactcgtgacaataatttgataaataatatgttttaaatgcccccaaaaaataaaaaaaccaa

SEQ ID NO: 389792 - DNA, 777 bp, Oryza sativa
  unsure (1)..(777): unsure at all n locations
cggcggtggctgctgggtcatgcacgagtacagccgcccccgcgcacggcacaagaagggttgcttggctgaggctgaagaatgggtagtgtgccggatatttcagaggagcagcagcggcagccggtcgccgaggaggcctgacaacgacgtgaggcgaacgatgccggccgtcgccgagctcggccggtcgccgtcgccatcgtcgtcgtcgtcgcaatccagctgcgtcacaagcagctccgaccaggaagaggtcagcagcggctagctagctgaagaagaatgcaggcagcagcagcaagcagctaagctgcctctcaaagagaggcttgagtgttagcctagctaagcatatatatttatagccggccaaaccctctgaaagtgatctgcatcaatgcatgcccccctttaatttcttcttcctccttaattattttttcccaaccatgtaatgtaatgtaatttaatgtaatgcagtgtaatgtaacgggaaggaagcactgaattaatcaaattaaattaacaaatgaagagtgctcaaaagtcccaaggaagcttctaaggttcaggagccagatattatctacttaattaattaattatgggcacatatctgtagttgctagctagctgcatatgcatctcgtcgttgtcgatccatttgtaacttgcaagttgtgttggtgtaatattgtaatatttttccccgatggttgagaaattaatctgaaatccattatagcnnnnnnnnnnnnnnnnnnnnnnnnnnnn

SEQ ID NO: 389793 - DNA, 537 bp, Oryza sativa
  unsure (1)..(537): unsure at all n locations
tcactgttggatcctacttgggcttctcaagacaatacatctacagccataggtaacatcgttgcccttcttcactcgtttttcagcaatcttccacatgaatggcttgaatctacccataccgtcatcaagcatcttcggccagtcaactcagttgccatgttaagaattgctttccgcatattgggtcccttgttgcctcgtctagcctttgctcgacctctgttcatgaagaccttggctttgctgttcaatgtgttgggggatgtatttgggaagaattctcaggcttcacctcctgtggaggcatcggaaattgctgacataattgacttcttgcaccatgcagtcatgtatgagggtcaaggaggtcccgttcagagcactagcaagcccaaactagagatattgacgttatgtgggaaagtaatggaaattctgaggccagatgtgcaacatcttctatcccacctgaagactgatccaaactcttcagtttacgcagctactcaccccangttagttcaaaaccatctt

SEQ ID NO: 389794 - DNA, 837 bp, Oryza sativa
  unsure (1)..(837): unsure at all n locations
ccacgcgtcccgccgcatcgcgccaccgcctcctcctccccctccccctccggcgagagagcccgcgccgttgccgccgccgccgccgccgccatgtcgctgatcgcgggggaggacttccagcacatcctgcgtctgctgaacaccaacgtcgatgggaagcagaagatcatgttcgcgctcacctccatcaagggtgtcggccgcagcttctccaacatcgcctgcaagaaggccgacatcgacatgaacaagagggccggtgagcttacgccggaggagctggagcggctgatgaccgtggtggcgaacccgcggcagttcaaggtgcccgactggttcctcaacaggaagaaggactacaaggacgggaggttctcccaggttgtctccaacgcgctcgacatgaagctcagggatgatcttgagaggctcaagaagatcaggaaccaccgtggtctgaggcactactggggcctccgtgtgcgtgggcagcacaccaagacaaccggaaggaggggtaagactgtcggtgtgtccaagaagcgataagcctaagaaccacccgagacttgatgaagcgtttcgttgggtgatgttttgccctaggataatattttgcagctatggaaccttgtcgtaatgtatcttgaagagtgtctttgggaactaagagtaatttacttttcttgaaactattgcagtattgactccttgtttattgcttttctccactttcttctacccacttaaaactattgcagtatcgactccttgtttattgctattctccactggcttctgcnttaaaaaaaaaaaaaaaaaaannnnnnnnnn

SEQ ID NO: 389795 - DNA, 749 bp, Oryza sativa
  unsure (1)..(749): unsure at all n locations
tcttcgctattacccagctgcgaaaggggatgtgctgcaaggcgattaagttgggtaacgccagggttttcccagtcacgacgttgtaaaacgacggccagtgagcgcgcgtaatacgactcactatagggcgaattgggtaccgggccccccctcgaggtcgacccacgcgtccgcgacatgaacaagcgggctggtgaactcactcctgaggagcttgagcgcctcatgactgtggtggcaaaccctcgccagttcaaggtccctgactggtttctgaacaggaagaaggactacaaggatgggaggttctcccaggttgtttctaacgccctggacatgaagctcagggatgaccttgagaggctgaagaagatcaggaaccaccgtggtctccgtcactactggggtctccgtgtccgcggtcagcacaccaagactactggcaggaggggaaagactgtcggtgtctccaagaagagataaattccatgcccatcggctcagcaaattcattttgcttgtcttatgagcgtttcaatgatgtcagtcttgataggcagttttgttggatgatgcttttgtctaagaagatagatcgtgcgttgcaggaatctcaaaacttttatatattgtaacttggttgtttggtaccgcaaattctgaagcctaatttttttactggatgtgtttctggtggatgtaaaaaaaaaaaaaaannnnnnnnnnnnnnnnnnnnnnnnnnnnnn

SEQ ID NO: 389796 - DNA, 424 bp, Oryza sativa
tggactcgtgggctcctcccgccgccgccgccgccgccgccgccgcctctccgcgcgagagacccagccgccgccgccgccgccgccgccatgtcgctgatcgccggggaggacttccagcacatcctgcgtctgctgaacaccaacgtcgatgggaagcagaagatcatgttcgcgctcacctccatcaagggtgtcggccgcaggttctccaacatcgcctgcaagaaggccgacatcgacatgaacaagagggccggtgagcttacgccggaggagctggagcggctgatgaccgtgggggcgaacccgcggcagttcaaggtgcccgactggttccttaacaggaagaaggactacaaggacgggaggttctcccaggatgtcttcaacgcgctcgacatgaggctcagggatgatcttg

SEQ ID NO: 389797 - DNA, 731 bp, Oryza sativa
  unsure (1)..(731): unsure at all n locations
ccacgaagccatggaggccaccaacgccggcgaggccgcttccatcgacgagttctcgcagagcctgaccgacgaggcactgaacaagatgcactatctgcacgctgcactgacggagacgctcaggctataccctgcagttccactggataacaagcagtgcttctcagacgatgtattgcccaacggattcaacgtcagcaagggggacatcgtgttctacatcccctacgcgatgggccggatggagagcttgtggggcaaagacgctgaatccttccggcctgaacgttggctcgatgagaacggcgtctttcagcaggagagcccgttcaaatttacagcttttcaggccgggccaagaatctgcctcgggaaggagttcgcgtacaggcagatgaagatcttcgcggccgtgctgctccgtttcttcgtgctcaaacttcgcgacgagaaggagatcgttagctacaggaccacgcttacactcgccatcgaccagggtctccatctgacggctacggcgagatgagtgcatgtcacactacacagcctgggcacatactgcagctgtcacctgtacactgtactcaatgcaagtgacagctcttgtgtgccaaatcgaatgatatctgtagaccttaataacgtctgatcgcgaatgatccgtattgcactctggnaataataaagctgccggtgcntgtnnntaaaaaaaaaaaaaanaaaaa

SEQ ID NO: 389798 - DNA, 732 bp, Oryza sativa
  unsure (1)..(732): unsure at all n locations
gttactgtgtggagggtactcaaagaatgcttgtctatgagtatgtaaacaatggaaacctagagcaatggcttcatggagctatgagtcaccgtggttcccttacatgggaggcccgtgtaaagattcttcttgggacagctaaagcgcttgcttacttgcatgaggcaattgaacccaaagtggtgcaccgtgatatcaaatccagcaatatattgattgatgatgattttgatgccaaagtatcagactttggtttagctaaacttcttggtgctggcaagagtcatgtcactactagggttatgggaaccttcggctacgtggcaccagagtatgcaaacactggactcttggaatgaaaagagtgacatttacagctttggggtagtacttctagaagcaattacagggagggatcctgttgactatggtcgtccagcgaatgaggtaaatcttgttgactggctaaaaatgatggttgctagcaggcgatcagaggaggtggtggatcccaccatagagacccggccttcgacaagagctctcaagcgtgcacttttaactgctctgagatgtgtggatccagattcagaaaagagaccaaagatgggtcaagttgtgaggatgctggaatcggatgacccaattcctcgtggggacagaagatctaagcacaaccgtggagggagcaccgaaatggattcccaaagggacaacaactncgacacg

SEQ ID NO: 389799 - DNA, 671 bp, Oryza sativa
ggtactcagcagatgaatacatcaatcaacaatgctatcatattgtttatgtactatttcataggatcatccataccgtcaggatttgttctatgggtcatgaaagatattcctcatcggcagacagtagaaaggcccacacaatcaagagttgttactttgttcagggatagaccatcccctacacaggatccacaatggaggactgccgttacatcctctaacaaggccctcaagtcaagccctatttaaccagaagacaaaccgttgatgtggaaacttcagtctgtttaatctgctagaatgttaccaatgcgtcatttgtgcactggcatctagtagctttctgacaggttgttggtacaaagatggatatgtaattcctacttcaaggaactcttagtgttcagaaaagaagggaattacctgtgaatgtagcatggttctccaatgagtgcacagtatgcgtttatccattagaattaactctgggtaaggctttaaggattcacaaatgtaaatagccatagaaatgagagtttttcatggtttggctggctgttcattcagattttcccgaccgtcacattagcttcctcaactcattttagttaatagaactggcaaagtaaggtttcagcttgtctatgagaagagattttgcccttgag

SEQ ID NO: 389800 - DNA, 1455 bp, Oryza sativa
  unsure (1)..(1455): unsure at all n locations
cttcccttctcttctccatcgcatctaccaccgagcgtgcaaggagggggggtgaaaatggcttcctcgacccagggccaggtcatcacctgcaaagcggcggtggcatgggaggccaacaggccgatgacgatcgaggacgtgcaggtggcgccgccgcaggccggcgaggtccgtgtcaagatcctcttcaccgcgctctgccacaccgaccactacacctggagcggcaaggatcctgagggtctatttccttgcattcttggtcatgaagctgctggaattgttgaaagtgttggggaaggagtaactgaggtgcagcctggggaccatgtcattccttgttaccaagcagaatgcagagaatgcaagttttgcaagagtggaaagaccaacctctgtggcaaagttcgtgctgccacaggggtcggtgtcatgatgaatgatcgcaagagccgtttctcaataaatggaaaacccatttatcatttcatgggaacatctacattcagccagtatactgttgtgcacgatgtcagtgtcgcaaagataaacccacaggcacctctagacaaagtttgcctgcttggctgcggtgtttctactggcctcggagcagtatggaataccgcaaaggttgaagcaggttccatcgttgctatttttggacttggcacagttggacttgcagttgctgagggggcaaaatcagctggtgcttctcggattattggcatcgacattgatagcaaaaagtttgatgtcgcaaagaactttggggttacagaatttgtgaacccaaaggaccatgacaaaccaatccaacaggtcatagttgaccttacagacggtggtgtggactacagctttgaatgcattggaaatgtttctgttatgaggtctgcattggagtgctgccacaagggctggggaacctctgtcatcgttggtgtagctgcttctgggcaagaaatctctacacgaccattccagctcgtcactggccgtgtctggaagggaacagctttcggcggtttcaagagccgaagccaagttccatggctcgttgagaagtacttgaacaaggaaatcaaggtggacgagtacgttactcacagcatgaacctgactgacatcaacaaggcgtttgacctgctgcatgaaggtggctgcctgcggtgtgttctggcaactgataaatgaaccgatgatggttcatctgcttttggctgtgcttctgagctatgtcacgccaaattgtaatccagatctaccagccttggaaattgaattattctgctcgtttcgcttagaagcactttgaactgtgacaccactctgctataataatatatgtgctgtttggatctttggggatgattgctgttagaanattgccgtgattttgttgaataaaaaaannantanttttnnanaannaaaaatannnnanca

SEQ ID NO: 389801 - DNA, 507 bp, Oryza sativa
ccacgcgtccgcggacgcgtgggcggacgcgtgtgcgatgagcctgtggtggatggtgccgcagtacgtgctgttggggctctgcgacgtgttcgccatgatcggccttcaggagttcttctacgaccaggtccccatcatgctgcgcattctggggctcgccttcttcctcagcatattcggggggggtcacttcttcagcagcttcatcatctccgccattgacggcgccaccaagaagagcggggcgagctggttcgccaacaacctcaaccgcgcccacctcgactacttctactggctcctcgccggcctatgcgccgtcgagctcgtcgcgttcgtgttcgtgtcgcgcgtttacgtgtataagaagagggttcctcacaacggttgtgatgtcatgtagaagtagaggttagctagctaattcttgtgcatgttcttgtgaaatctgaaaatgtttgtacaggtgattaaatcctagaaagtgaatacaaccttgatact

SEQ ID NO: 389802 - DNA, 881 bp, Oryza sativa
ccacgcgtccggcctcacgaccaggagcgtgctgccgctgtggagcaaggcgagcctgcggttccagtgggggctgcgcgtgccgcccgagctgaaggccgccctcgccgacgacgggtacggccgcaaggcgggtaacctggccatcaacaagttgccgctgctggtcatgaacaagatcacaattgagcacacgctgcggaatcctccacattccgatgccgacaaggggaagaagaaggatgcgccggaatttcagactgaagggttctcgctcgtcaagaggcagctcgaggtgctcaatgcagagagcatcatgctgcggcgtaccgtggaggacctgcgtgccgagatcggtggaaatagagccgcctcaatgcccggtaaaggcgacgcccgaaggatgccgtcgtccctggcaccaccaccaccacaaccattcctggcgaagccagatcgccacgggaacggcaaggagatggtggacagtggaccgaagccggtgtcgaatgaggcgatcgagcagttgaacaaggcactggaggctcgccggaagtgaagaagtatcagaatttgctgaaattgcaaccccctgcaatactgcaacttgacatggctgcttggttaaaattttgcgctcaataatacatttggtaggtgcagtttgcttccccagggaagcaaatggaattctcataaggtgatgtaataatctcgccttattttccaggccgttgcttgtgctagactgctactagtagtattatttatctccaattcgccatgtataaactcgctcttttgttagttgaagtttcagctccattgagatgtatgaaacgctttagttttccagatcatccttattacaatttcaatcc

SEQ ID NO: 389803 - DNA, 488 bp, Oryza sativa
ccacgcgtccgcacgacacaaaagtttgtcaacagcagccgcccgctgcttctagatacttcttcctccatttctttcctccttgccaccgtctcgtcccccacgctcttgcgacctcttataatttcaccgctatgactcgcggcgaccagagggagcgggacaggcagagggcgcaggcgcggaagccggttgtgaaggggcgcgacgacgggctcacgccggagcagcgccgcgagagggacgccaaggcgctgcaggagaaggcggccaggaaggcggcgcaggccaccgggcagggcggcaacggcggcgccggcgccaagggaaagagcggcgggaagaagtaggcatcggcatatgccggcatttgatctgttctcacctcacgtctggttgcgtgtgacaacacccgttctttcgatcgtcatctgctcctgatcctgcccatgttggcagatctgtactgctatttcttggatcttttg

SEQ ID NO: 389804 - DNA, 625 bp, Oryza sativa
  unsure (1)..(625): unsure at all n locations
ccacgcgtccgcggacgcgtggggtttcttgttccaatacttgattttgttcctgaaaagcgtccttcagccgctcaactgcttcaacatccatggcttgatgtcgggccccttcgccggcagcctaaacggccatcagacctgacacagaattcgtccgatgatggtgtttcagagaaacagaggattgagaatgaagagagagatgcaatggctgtgaacttggggaacattgccattgacggtgcttcatccaagacaactgaagacccccaagcaagtactatgcaaaataaaacaaatgctacccctgctaagtgagatgctattaattttacaagctgcattgtgtaagactgttttcagattagatatgtttcatgggaaacgagtgtttctttagatatattaggaatagttcctcggggaaagaaaagtagggcagacatttgttgtatggggttggttgggcaatgttagatttgttggggctgcagaaatgtagacacccctgacctttttcctggacatattctttgtacaactagaatctgcgattttttaaaaactctttaggagtgcacaatgatgaaatgagagtgatgaacctgagttantttttccc

SEQ ID NO: 389805 - DNA, 596 bp, Oryza sativa
  unsure (1)..(596): unsure at all n locations
acgnagnttactagctgcagctgctgaaatgacagaggctcttagatcccgggatgctgaagttgaagctgatgatggttttntcataggccccccaccgcctgccatggtcgctgaagcagcatctgcaaatgaagctgagcantttgaagaggttactcgaatattggcggcggatgagaactcgccatatgatgttgtgggcatcaattggaagatgtcatctgataacatcaagaaaaggtactggaagttatctcttctagtgcatcctgacaaatgtcctcatccttcagctcaggaggcatttgtgaaattgaataatgctttcaaagacttacaggaccctgaaaagagaggtgtgatagatgagaagataaaaaagaaagaggagatcggaccaatttgaaggtcgagcttaaagcaatgcgcgaggacgcagaatggaggcggctacaaggtgtatctcttgagggtgatgtagtgaacttctggcagttccaaaacaggcacagtgcacctaaaagagatgaatggatgaccacattgcctcctgaaagaaaacctgtagtaccaatgcattcgactacgttatt

SEQ ID NO: 389806 - DNA, 512 bp, Oryza sativa
ccacgcgtccgcaacgccaccgctcccctgctcgtcgccggcgccgccgccgggggagaagcccacgagatcggcgacccgcgcaaccatcccgccggtctcccgcgaccccggatctctccaacatgtctactgtcaagggacagaccaggagggagaggcctagaggagctcgccctcgtggattgacgaagcagaagaggcaggaaataaaggaggcgtttgatctgttcgacacagataactctggaaccattgatgccaaagagttgaatgttgccatgagagccttgggatttgagatgacagaagaacaaattaaccagatgattgctgatgtggacaaagatggtagtggatccatagattatgaggagtttgagcatatgatgactgctaagattggagagagagacagtaaagaagaacttacgaaagcattcagtattatcgaccaagataaaaatggacgatatcagatgttgatattcagcgaattgcctaagaattag

SEQ ID NO: 389807 - DNA, 391 bp, Oryza sativa
ccacgcgtccgagaaagcaaaagctatttctgtcctagagaagatttatgactctgaccgtctagaggaagaggtagagcttcttgcttcttcttcaatgcatgaatttcagtctgatggtactgggagctatttggacattttcaagtcaaaggaactaaggctagcattttttgctggagctggtcttcaggcgttccagcaatttactggcatcaacactgtcatgtactacagcccaacaattgtccagatggctgggtttacctccaacaagttggcattgctcctttccctcatagtcgctggtatgaatgccgctgggaccattggtggaatctacctgattgaccgctgtggcccgcgtctcctggcccttacaagcttggct

SEQ ID NO: 389808 - DNA, 537 bp, Oryza sativa
ccacgcgtccgcccacgcgtccgcccacgcgtccggacaaatccagacttgttaggctcgcagaagagttcagccagagcatgggtcttgcaattccgcctgccatacccaaactcattcttcgaacaatgggccttaacaatgttcctgggctgtcgatctgtgtaacccttgtgctgaaggttgagcaatttttttgctgccccccaagtttgaccacctcagttctaagatgactgctgcatcctttttttgaagccagctcttgaccaatctattatctccaccgggcaggttcaaagctgaaatgaacccagtgatccttcatataggagtaactattttttttcacaggtgtactgacctacatcatgtgggagcatatttttttccttcaccataacgactctgggccccaagtcctccctagtatggaaaatgaaatgtacctgttcttgaggcgccacaagacgcctcaccacataagcagtggcgtaatataatgcagtcatattgttactttataaaaaaccaaaa

SEQ ID NO: 389809 - DNA, 439 bp, Oryza sativa
ccacgcgtccgcccacgcgtccgcggacgcgtgggaaaaaaaaaccttccccaactcacaacaaaacccccccaaacctcgagcgcggagagcatcccacaccacccgtcccatcgcaatccaatccacgagcagccatggcgagaggaggaggaggagggcagcgagagggcaacgcgctgaagacggcggtggtcgtgaccggcggcctcgtcctcgcctggttcaccatggagtccgcgttcaagcccttcctcgaccgcctccgcggcgcgctcacccgcaacaccgaccccgcgcgcgaccccgacgaggagaactccgctgccccggcggacagggccgtcgaggagcccgccgcggcggcggccccggtggaggagggcgagggcaagggggtggagctggaggagaagggggaaggggccgccatgaccga

SEQ ID NO: 389810 - DNA, 602 bp, Oryza sativa
  unsure (1)..(602): unsure at all n locations
ccacgcgtccgcccacgcgtccgctctcttgactcctctctcttcgtctcagcttggagctcagtctttgatttttcttcttcttcttgtttgtgcaattgtgcatcgttgttagctgggaacaagcagaagaatggcggacagcacggcgacctgcatcgacatcatcctcgccatcatcctgccgccgctcggcgtcttcttcaagttcggctgcgggattgagttctggatctgcttgctgctcaccttcttcggctacctccccggcatcatctacgctgtctgggtcatcaccaagtaggaggagaattactacccttccaaggtgatggtgaattggtgatccggagcctgtgattggttgtgcctggtgtaagcggcagttgtcaaagctgtgattttctggttctttggacggatggtgctcgctgtggtgttgtgtatgctgtacatctgttttggtgtttgtgcttaggtccctcttctgttacaacaattgttttctccctgttcttccggggtaccttctccagtttatcttctgcaccttctcgtncctgactttgatattaattannnnnnnnnnnnnnnnnnnnnnn

SEQ ID NO: 389811 - DNA, 1218 bp, Oryza sativa
ctgacgcgtggggcgctgctcgtcgtcgccgccgtggcgcagctcggcgcgtccgacctgaggacggactactacaacagcacgtgccccaacgtcgagagcatcgtgctcggcgtggtgaaggacaagatgcaggccaccatccgcaccatcggctccaccgtccgcctcttcttccacgactgcttcgtcgatgggtgtgacggctcggtgctgatcacgtcgacggcgggcaacacggcggagagggacgcgcccgacaacctctcgctggcgttcgagggattcgagacggtgaggagcgccaaggccgccgtcgaggccgcgtgccccgaccaggtctcctgcaccgacgtgctcgccatcgccacgcgcgacgccatcgccctgagcggtgggccattcttcccggtggagctgggcaggctggacggcatgaggtccagcgccagcaacgtcgccggcaagctgccgcagccgaacaacaccctcagcgagctcgtcgccatcttcaaatccaacggcctcaacatgtctgacatggtcgcgctctcagcggcgcacagcgtcgggctggcgcactgcagcaagttctcggaccggctgtaccgctacaacccgccgtcgcagccgacggacccgacgctgaacgagaagtacgcggcgttcctcaagggcaagtgccccgacggcgggccggacatgatggtgctcatggaccaggccacgccggcgctcttcgacaaccagtactaccggaacctgcaggacggcggcggcttgctcgcctccgacgagctgctctacaccgacaaccgcacgcggccgacggtggactcgctggcggccagcacgccggacttcttcaaggccttcgccgacgccatcgtcaagctcggccgcgtcggggtcaagtccggcggcaagggcaacatccggaagcagtgtgacgtcttcaactgagaaaaatggcactacgacggcgacgactacggaccatttgtagatttgtgtatacacgatcgattgaaaatgtgtgtgttgacacgtatataaattgcaaaggagtgattcgttgggtttgccagttttctgtttgtacatcgatcgatcggtcttgttcaattcgttgtgttaaaatatgtgtgtttctgcacataatttggattcaatgaagtaataagtgaataaatactacactatcaacaaaacccaaaa

SEQ ID NO: 389812 - DNA, 544 bp, Oryza sativa
ccacgcgtccgcggacgcgtgggccgggatcgtgccggtgcagtaccgccgcgtgccgtgccagaggaccggcggcgtcaggttctgcctccaggggaaccactactggttgctgctctacgtgcatgaacgtcggcggcgccggcgacgtctcctccctctccggcaagacctccggtggcggcggcgcctggatccaggcggcgcacaactggggcatcaccgttccaggtgttcgccgcgctggacaactccgacggcctcaccgtcaagctcaccacctacagcacgccgcagcagaccatcatcgtctccgacgccatctccccctggtggatcaccggactctgctaccagggatccaacaacttctactaatcatcaatcgatcgatcatcagagcgagttctaaggtgcagtggttcatctcctcattttgtttctttcttctcggcttgcgctgctatgcgatgcgatgctagcttttgtcaaagtttatggactctctgattgttcgctatgctcatagaacgggttgcatttc

SEQ ID NO: 389813 - DNA, 666 bp, Oryza sativa
ccacgcgtccgggatcatccaaagaaaggaacagctgcaacttttttggtcagaaaatggctacaggtgttctgtgctccagggaatttgctctctgcctggcttgtgtgctcctggccgtgccattgctagtggctcaggacccttcaagcctgagcttggagcactactcaaagacctgcccgaattatgagcatgtcgtccggactgagatggaatgtgctgtgcgtgcggattcccgcaatgcagctctgatgcttcgtcttcatttccatgactgtttcgttcagggttgcgatggatcagtgctgcttgacgacactgcgaccctgattggagagaagaaggcagaacagaatgtcaactcgctgaaggggttcgagctggttgacaagatcaagcagaagctggaagctgagtgccctggaacagtttcctgtgcagacttgcttgccattgcagcgagggacgcagttgtgctggttggtgggccttactgggatgtcccagttggaagattggactccaagaaagcaagcctggacctagcaaacagggacattcccactgctcaacagggccttgtcaccctcattgccaagttctgggagaagggcctcgatgccactgacatggtagcccttgtcggatcccacacaatcggat

SEQ ID NO: 389814 - DNA, 1037 bp, Oryza sativa
  unsure (1)..(1037): unsure at all n locations
agttcattgcaattgaaggaaggaaatgcagaaacacctaaaagtggtggaggcgatcttcccaaaaaaaggggtcgtccgaaaggttccagcaatggtacacccaaaagtaacatctcggcaacttcaagcaaatcaaaggggaaagctgcaaggaaggatgacaatgagacacctaaggttggcagtgaccttaagaaggaagctgaagaaggatccgaagacaaagccactaagtcaactgagaagacaaaggatgatttgcctgaggatggtagcaacaagagtgccagtaaaccaaaggaggctagcagcggaggcaaggatttgaagggtgagagcaaaccaagtgaaggaagagccaagccaggtcgaaagccaaaggttgccggtgctgcggtggctggtgaggaatctaaggccaatgtctcagctgagaaagagaagcagaaggaagcagaaggcgaggcagcagctgaagtggagcaggggggatctgctggtggcgcttctactggaggaaagaagcgcagaaggaaggcttgaagttagggatccgctggtgccgcttctactggagaaaagaagcgcagaaggaaggcttgaagttacccgctaatttctcttgtacatggattcgctctctagactcaaaaggttcgcttagtctcaaaaggtgttaaaacattgcaccctgtgtggttgtaactcttcggtcgggtgacctattggaatgccaactgattgggcatgtagcggttttaactaggggttgtagacaagataaaaatgctgtagttgtgatgttaggcgcaagtgcgcaacttttaatggttggttgaaccccatgcttgccaagaggccaatgacatcatagttgtgtcggatgatgttgtagctagcctgttgatgtcttatttatttaggccatatgagcaaatgagttttgtagctaatgtgccggtctgtcagccctgcctggcaccattaagaaatcctgtttttcagagctcnnnnnnnnnnnnnnnnnnnnnnnn

SEQ ID NO: 389815 - DNA, 733 bp, Oryza sativa
catcggaggggttcttcttccgaaatccgaatcgatcaatcgagcaagggacgggacagggacgaatcgtcgccggagaagaggagagggagagagagagagaacagaggggcagaaggcgagacaagatgatactagcggtgctcttctccaactccgacggcaacatcctcatcgagcgcttccatggtgttcccgcggaggaaaggctgcactggcgttctttcctcgtcaagcttggcgccgacaacctcaagggggccaagaacgaggagctcctcgttgcctctcacaagtccgtctctattgtttatacaatgattggggatgtctgcctgtacattgttggcaaggatgaatatgatgagcttgctctggccgaggtgatatttgcaatcacatcggcagtgaaggatgtatgttgggaaaccgcctacggagaggctcttccttgacaaatacgggaggatctgcttgtgccttgatgagattgtttggaagggtctgctggagaacacgggagaaggacagagtcccgaggttgatcaggctaaagccgcccgttgagccatgattttctgatcactttggaatatgtgtgtatccttctcgtcgtgtaatcatatctctcgcagtttatttgctggcagttgtttttttattccctttgggatggatgattctgtatgtgtacaatcctaatacattttgccactgatgatttgtactgtta

SEQ ID NO: 389816 - DNA, 751 bp, Oryza sativa
  unsure (1)..(751): unsure at all n locations
ccacgcgtccgcccacgcgtccgcccacgcgtccggctgctgctggagctccgcgagctgccaaggcacaagttgttggatggccacctgtgcgaagctaccggaagaatacattggccgccagtgccacaaagacaaagggggaagaccaaggcaaaagtgaggtaggatgttgctatgttaaggttagcatggatggagccccataccttaggaaggttgacctcaagacctattcaagctatgaagatctttcacttgctcttgagaagatgttcagctgctttatcactggtaggagcagttcacataaaacatcaaaaagagacaggctgactgatggttctagggctgatgcccttaaggaccaagagtatgttcttacctatgaagacaaggatgctgactggatgcttgttggtgatcttccttgggacttgtttactactagttgtcggaaactgcggatcatgagaggttcagatgctgctggaatggctccgagatcactggaacagacaggtcagaacaaatagttgcccgagctttcatcatctggacagcaaatgtgtggaccaagtttgcttgtagcaagtttccgctgaggggtgcagtgttttacctgaagtatctccgctattagtttatttacgtgtgtagtgaaatactgtggcgtattgtaaaacagccattttggcctacgagggttgtcttgtgtcaatctgtagagggncgattttgtcttttgaag

SEQ ID NO: 389817 - DNA, 835 bp, Oryza sativa
  unsure (1)..(835): unsure at all n locations
cggtccggggtcgacgcacgcgtccgcggacgcgtcccccgaaatccagcagcggcggcggcggcggcggcggagatcgacgaatccagcggcggcgcaccccgaaggcaaccggagatgcagcagggggacggcacggaggcgcaggtgacgtgggaggaccagcagaacatcaaccgctttggccgcctcaacaaccgcctccacgagctccacgacgaaatcaagctcgccaaggaagcaaatgagaaccttgatgatgctgggaatgaactcatcctgtcagacgaagacgtggtgcggttccaaattggagaagtgtttgcccacatgccaagggatgatgtggagacaaggctggagcagatgaaagaggatgcagctaagaagttggagaggctggagcaggagaaggaatccatcgtctcccagatggctgaactgaagaagatactgtacggaaagttcaaggacgccatcaacctggaagaagattaatatcgagtaagctgccggatattgaatgatatgatgctctcttagttgagactagaggagctgtgtttgctagactaaactgtttctagtgatttaagaagacacgtttctcgtgatgcatcaacatggttaattcttatgctggattagattagcatggttttgcccagcagatacgtgaatcatgagttgcatggtttcaatttataaaaatgcagtatgggggaatttggacgaattggttatgttattactacatataagccaagttttcagttgcatcaaattgtgttaaaaaaaaaaagaannnnnnnnnnnnnnnnnnnnnnnnnnnnnn

SEQ ID NO: 389818 - DNA, 471 bp, Oryza sativa
  unsure (1)..(471): unsure at all n locations
ccacgcgtccgcctctctcctcctccggtctccttcctccccttcacctccgcggcgcgccgtcggtcgccgctcgccgccgccttctggttcttctccggtctatttccccgcgggattcgtcgcggacactccggttggttggtgtatcttcggttcgagttgccaaaatctgattgttctccggaggtgaaggtttactaggcaatcatggatgtcgataagcaggaaacgatggaagagaccattcttgttggtgatgatctcatgcgtgggttgccatcccctgtcataccaaaggaaattgcttcacatgtccttgacggtgttgagatttgtgatggcatactcaaaaatcttttcttatgtctggcaaatcaatgatattgagccgttttgncaagatgaaattggtactataccgacaatgtgctgagaaaangggacaagggaataaganaccggctgcag

SEQ ID NO: 389819 - DNA, 625 bp, Oryza sativa
  unsure (1)..(625): unsure at all n locations
gcggccgcggtgagnagctaggtctgcggcggcggagttgttgttgttggtggtggtggtggtggaggaggagttggcggcggagggggcgggggcgttggtggtggtggtggtgggagagtatcatggtgcagtgtctcgacggggtgaggcagctgctggcggtcgtgttcaagtgctgcgacctcgagctgaagcagccgcgggggctcgaggatccccaggtcctcgcgagggagaccgtcttcagcgtgacgaggtcgaggcgctgtacgagctcttcaagaagataagcagtgctgtgattgatgacgggctgattaacaaggaggagtttcagttggcgctgttcaagaccagcaagaaggagagcctgttcgccgaccgtgtatttgatttgtttgacacaaaacacaatggaattttaggatttgatgaatttgctcgtgcactctcagtatttcatccaagtgctccacttgatgagaagattgacttttcattccagttatatgatctcaagcaacaaggctatattgagagacaagaggttaagccagatggttgttgctacacttgctgagtctggaatgaatcttnctgatgaaaatatagagagcataat

SEQ ID NO: 389820 - DNA, 643 bp, Oryza sativa
ccacgcgtccgtgaacgacatgttctactcatggatcctgtgcttggtacaggtaactcggcaaatcaagctatagaacttcttataagtagtggagttcctgaggagcggatcatgtttctcaatctcatctcggctcctgaaggggtccattgtgtctgcaagcgattccctcgtctgaagattgtaacctcagagatcgaaactgggttgaacgaggagtaccgggtgatcccagggttaggagagtatggtgatcgctacttcggtacagactaatcagggattgatactggcttctttggcgatgtgaaaagatcacattagagctaacattaccgtgagagagatatatactggtgtttggttgtttgtggtataccattggaggtaccgaaatcgtgcgatttcgtgtgttagtgtttgctgctgtgataaaaacttcgggtgttgaattttgaaggcccctgtcgctagttacagcggcgtgtgaaaaaagggaaaaatttgtgacatgtagagcccacttctcgggcctgaatgcggcagatgccgtgtggtttcactttcagttgtgattgaactgcatgctaatgaaacttacatatgtatgtactgcaaagtccatgcatatggtcctgtc

SEQ ID NO: 389821 - DNA, 586 bp, Oryza sativa
  unsure (1)..(586): unsure at all n locations
ccttcgctcaacccgcagaagaacacagattcgaagaggcagaggcggcgaagagacgcgcgagccatgggcgtcaccaaggaggatgtcgaggccgccatcacctcctccctcagcccttccagcctcgtggtgacggatacttccggcgggtgcggcgcgagctacgagattgaggtggtgtcggagaagttcgaggggaagcggctgctggagcggcaccggatggtgaacaccgcgctggcgccgcacatggcggagatccacgccgtctccatcaagaaggcgctcacccctgctcaggcgcagccccagccggagccggccgccgataaggcgccccaggcttaagtagttcttgaactcacacctccaaactgttcgatcacatatgcaccacgagtgaaccgatgcacttggtgtagcgtttgtcatgggtgtttgagatgtgcgtcagctctctctgcttgaataatgtgcatacaatggcagaattggaatgatactatgcttgactgcttagaaatttcagtaactttgcgtgcttcccgngtcnnnnnnnnnnnnnnnnnnnnnnnnnnnnnnn

SEQ ID NO: 389822 - DNA, 564 bp, Oryza sativa
  unsure (1)..(564): unsure at all n locations
gnttcnggttgtatgtgtggggattgggagcgggtaacaatttctacacagggaccggtttggaccaggattaacgccaagctgggaatttaaccntccactaaagggaacaaaagctgggagctccaccgcggtggcggccgctctagaactagtggatcccccgggctgcaggaattcggcacggagggcgcatgttgttgattggtttcatcggtttgacttgggattttgttgatacctgagaatccagagcctgtctcattagctgactactgttggttgtacaatttacacttctaaaatgtgtatagctggtcgaagtttgattgttctattgttaatcgattttcttcatgtaatacttgatagacacaatataaattaaatttatgatagaacatttctattgctttctgtgaaaaaaaaaaaaaaaataaataaaaaaaaataaaaaaaaaatataaaataaattaaaaaaaataatatttaatataattattatatatttatataaattattttttttattaaatatatttttatattattttatatttttta

SEQ ID NO: 389823 - DNA, 499 bp, Oryza sativa
ccacgcgtccgatggttcagagtcatctgagagtaagaacaccaagcatcatccactattattgcagttgattgctaaagaagcgagactgcgggcctgatgagatatgtgactttgagctgcagttgtgcgatacccagccaagtactgtagcaggtgccatgaaagaattcatcttttcaggaaggcttgacaatctttgcatgtcattttgttcgttgaaggccctaatagaatcgacttcttctgaagaatctcttgcgcatgaatctggtgtgagaatggtggctctatttgaccatgaggaggttggatctgattcggctcagggagctggttctcctgccatgttagatgctttgtcaagaatcacagggtcttttaactcttcaaattcgaggttgctagaaaaggctattcaaagaagctttctagtatctgcagatatggcacatgccttacaccccaattatatggacaagcatgaggagaaccacca

SEQ ID NO: 389824 - DNA, 402 bp, Oryza sativa
ccacgcgtccgaccgccgccgccgccaccaccgccgccgtcaccgccgtcgccgtcgccgccgaacaacatcgtggggatagtggtcgtcccgatcgccgggctgctgttcctcggcctcctcgcggggctgttcctgctggcgcgggcgcggcggcggcggagggcggaggcggcggaggaggagacgatggaggaggtggacgacgtggaggtcgcccaccacgtgcgcgcggaggagcacgtggtggccgggccgtcgggggagatgctcaaggtgctcgacgtcaccgacgaggtcgacgtccacgagcacatcgttcgccacgagcacgagcacgaacgccatgacgttgtcgaaggggaaggatgaccatggatcgatgccatgggctctgatact

SEQ ID NO: 389825 - DNA, 481 bp, Oryza sativa
ccacgcgtccggtcgtcggaggggacgatagctactccctcggcagcatccgcgacgccatcgccgccgccacgggcgcggtgcccaacctcgagtgcaaccgcgacgccgccggcgagacgcagctgttccaggtgtaccagtgcgtcgaccgctccgggaagaagctcgtcgactgccaactcccggtgcagggcaagtgccgcgacaaggtcaagctgcccacgttctagctagctagctcccccgtcgccatcgtcgccggcgagagctcgccgtcgccggcatggcggcgcgccggcggctggctggtcttggatgtctgatggatgtcacgtgcgtttgcgttgttgcgtggtgcggttttcagattacgagagattcgaggatttgtccagttggattgctacatgtgtacgttacatttggcactatctgctgacttgctgaacagttgaataataacatatcaagttttacc

SEQ ID NO: 389826 - DNA, 739 bp, Oryza sativa
ccacgcgtccgtgtagctccagaagtcctgcgaaatgaagaatatgatactaaagtggatgtcttctcatttgctttgatacttcaagagatgattgaaggatgtctccctttttatgacaagaaaaataatgaaattgagaaggcacataattctaaagaaaggccacctttcagagctcctccaaagcattatgcttacggattgagagagctgattgaacaatgctggagtgaaaatcctgctagcaggcctgactttagaacgatcattgaacaattgtcttatatccagaatgaaatatctcagagaaaccgttggaaggtgaaacctctcaaatgcttcctgagctttgagggcatgtggaagaaagatcgaaatgagggcagcaccactcgttcatcacgttcatcgagatcctatttttaacagtcagttgggcctgttgttgatttcgtgtggaggattgtatgcatgattgatagaaaatcaactcattatataccatagatttgtgtttcactggaaatagttttgcaacttgttgcttcactgtcgatcacaatgcggttgtacatcagacagcattgaaagcaatacaaactggaatatacagactgttgtttttgttttcttctgtttctctttcagtaacattgtagcaacagttacagttgcactgtaaaacgtctgcaactagcatatactgatatactccatacaagtataagatgcccac

SEQ ID NO: 389827 - DNA, 620 bp, Oryza sativa
  unsure (1)..(620): unsure at all n locations
tttnttttttagacaggtcaccgggggtcatgtgggctgtgaaaggaagaaaacgaactcagcctaaatgttgacgtgggcttccaattagcaacttggattattatttttggtgggggggggggggataatagcaacttggatttattggccactatgatgattgaagagcaaaccaaaatttcagagcaaattcacctctagaaagaaagatcaattcaactcacgttatgtaggtggcacggcagcgccaaccatgcttaaaattggatatacagacaagaagggatcctggacatatatagatgaagcagaagcaacttaaaaagcaacagaagggaacacggattttcttttctagggatgaaagggaatccaagggttatgagcgtctaataagcggacgcgtgccggtctggccatgcatattgtgcaacaaacatatgtacatcttcttatatacagccgttagttcacgttaagcttgcacggatgcattacttttgcacgatgtagtagtgcatgctattgcgcccttgatgcctggagcatgctgtagaggtccctctacgcgaggacggacttgtacatctccatgaccagtctctgcccgagctcgt

SEQ ID NO: 389828 - DNA, 395 bp, Oryza sativa
agttccagaccaggatgctcttcaaccaggccttcagcagaggtctgcagatctcccgtatccctggcgggcacaagaaagaccgatcaacccggaacaaggagtagactgaggggcgagggctccccccaaaccaattgttgtagtagtatgcattatcctagtaggagtatccgcccccatttttgcgtgtgctctgattgtccccagattcagagaccgggggaggacgtatcagcatgtttcagtgtatctgcagattcacaacattcgcacctctccattatgtaaatctctatcgctcattagcaaatcggagcatctaatttagagatgtcttctgggttagtagtaatatatctggtgaacagagttgattgaatgtttgtgggagc

SEQ ID NO: 389829 - DNA, 420 bp, Oryza sativa
  unsure (1)..(420): unsure at all n locations
gncnnnnncatcttngtttgcattcttgnnnncatgccaactnnctggggtctgctgttggnngcgcaagctatcaagccagtaattgtgcgcatcgggttgtggggatcgatcaaggcgcnngcgaggggatatgagatcatcatggggctcctgctcttcaccccgatcgcgttcctcgcttggttcccgtttgtatccgagttccagaccagaatgctcttcaaccaggccttcagcagaggtctgcagatctcgcgaatccttggcggccacaagaaagaccgagctacacggaacaaggagtagtagcctgtctgccattcactggacatgtattctgttgtgtcttcttccctcctgttgctgctgtaatttgttactcctattctactactccacttatcttgattgagagac

SEQ ID NO: 389830 - DNA, 640 bp, Oryza sativa
  unsure (1)..(640): unsure at all n locations
cccttanggttgtccncgaacaacagtcagganttgtgatccaatgaaanataattttggttggatggccttcgcttcgcagttcgtgtattgctgcaacaagctgggatggacaggtcaaaagtaaacgtgaatggaggcgcaatcgccctaggacatcctcttggtgcaacaggtgcccggtgcgtcgcaactcttctgaatgaaatgaagcgccggggcagggactgcagattcggtgttgtcaccatgtgcattggatctggcatgggggcagcagctgtgtttgagcggggtgactcggtcgaccaattctcaaacgtgcgccaccattagcggcagttttctaagagaaatgcaaagcaaagcagtggtgcaaaatcatcatggtggtcagtccaatggagcatactctggcagtaagatctataccgaaaactaaatgcaggaaacacgtaatcttctccggtgaaaggtgtaacagtatattgaagatcttttcatgtaacattttgcactaataataatttatgcgaataaggggcatgcatgctcaatgtttgtttaaaaaaaaaaaaaaaaaaantngaggggggncccggnacccaattcnccctatagtgantcgtattacaattcc

SEQ ID NO: 389831 - DNA, 1827 bp, Oryza sativa
  unsure (1)..(1827): unsure at all n locations
ttttctttcgcgagagagagcgatacgaacaagagaaaatcttctccagacaccgcggcgggcttccccaccccatcggaaggaagaagacgaccagctcgcgcgctcggatctcagccatggagaaggcgatcgatcgccagcgcgtcctcctcgcccacctcctcccctcctcctcctccgaccaatcgctcctctccgcgtcggcgtgcgccgccggggacagcgccgcctaccagaggacttccgcctacggggacgacgtcgtcgtcgtcgctgcctacaggacacccatatgcaaggccaagcgaggaggtttcaaggatacatacccagaggaccttcttactgttgttctaaaggctgttctggacaacactaagatcaaccctggtgaaattggtgacattgtagttggcacggtgctaggtccaggctcgcagcgtgcaatcgagtgcagggctgcggctttctatgctggagttcccgaaaacgttcccgttagaactgtcaaccggcaatgttcctctggattacaggcagtggctgatgttgccgcggccattaaagctgggttctacgacatagggattggtgcaggcctggaatccatgtcagtaaatgctatgggttgggaaggaccagtaaaccctaaaggaaatggagtccagaaagcacaggattgtcttttgcccatggggataacgtccgaaaatgttgcgcaccgatatggtgtaacaagacaagagcaggatcaggctgctgctgagtctcataggagggctgctgcagccacagctgctgggaaattcaaagatgagattgttccggtgcctacaaagattgttgaccccaagactggagaggaaaagaaagttgtgatatcagctgatgatggaattaggccagggaccacagcatctggattggcaaagcttaaaccagttttccggaaggatggtaccacaactgcaggcaactctagtcaagtgagcgatggtgctggagctgttcttctcatgaggagggacgtagcgatgaagaagggacttcctattcttggtgttttcaggagctttgctgctgttggagtagatcctgctgttatgggtgttggtcctgcagtagcaataccagctgcagtgaagtctgctggactccagattgaagacattgatctgtttgaattgaatgaggccttcgcttcgcagttcgtgtattgctgcaacaagctgggactggacaggtcaaaagtaaacgtgaatggaggcgcaatcgccctaggacatcctcttggtgcaacaggtgcccggtgcgtcgcaactcttctgaatgaaatgaagcgccggggcagggactgcagattcggtgtgtcaccatgtgcactggatctggcatggaggcagcagctgtgtttgaggcggggtgactcggtcgaccaattctcaaacgtgcgccaccattagcggcagttttctaagagaaatgcaaagcaaagcagtggtgcaaaatcatcatggtggtcagtccaatggagcatactctggcagtaagatctataccgaaaactaaatgcaggaaacacgtaatcttctccggtgaaaggtgtaacagtatattgnaagatcttttcatgtaacattttgcactaataataatttatgcgaataaggggcatgcatgctcaatgtttgttttgtcaaggtgttccacacgaaacactgagaggagacangtggttgcaaatgttgaagggcctgaaaggggtaggcctgatcatggataatttggcccaaatcaaatctggcctgcctnngatcgntgtcc

SEQ ID NO: 389832 - DNA, 1227 bp, Oryza sativa
ccacgcgtccgggagcgggtcaccctttttctgaatctggcaaatgatcccaccattgaacgtatcatcacccctcgaattgcactgacaactgcagaatatttggcatatgaatgtgggaagcacgtgcttgtcatcttgacagatatgagttcatatgcagatgcgctccgtgaggtatcagcagcccgagaagaagtgccaggtaggcgtgggtatcctggatatatgtatactgatctggcaaccatatatgagcgagctgggcgtattgaaggaagatcaggctccattacccaaattcccattctaacaatgcctaatgatgatattacacatccaactcctgatcttacggggtacattaccgaaggacagatatacattgacaggcagctgcataacagacagatatacccacccatcaatgtcttgccatctctctctcgattgatgaagagtgctattggtgagggtatgacccgtcgagaccattcagatgtgtctaaccagctttatgccaactatgcaattgggaaggatgtccaggccatgaaagccgttgtgggagaggaggcgctctcttctgaggatctgctttatttggaattccttgacaaatttgagaggaaatttgttacacaaggagcatatgatacaagaaacatctttcagtcacttgacctagcatggacattgcttcgcatattccctcgtgagcttctccatcgtatccctgcgaagacattggatcagtactacagcagagatgctacccactgatctatgttcagaaaaatcaaatgttttctctcaagtgcagcttgaataaattgaaatgtttgaacttgtggcctttttgctgtagttatatatagtccggtcctattctttctgtcgggtgagcataattcgttcgtagatcactttgtcacggcaacttctgtaatattgtgccatgtatctttaaactttcacacttgagctctttttggttttcattcgccagaattgttagcaagagcattgtaggccaagatgctcgaacctccaactctccaaggcactggctgtatctacttttgtgaatgaataaagatggaacaataaactgcgatgaaatatacatgttgtacaatgcgggttctgaaaaataaatatatgcaaatttggtcgctttaaaatcaagtacaatatgatctattgcaattcgtcttatctattcct

SEQ ID NO: 389833 - DNA, 732 bp, Oryza sativa
ccacgcgtccgccgacgatggcatgacctacgtgctcaatggctgcaaaaatctcaagaagctggaaatcagggacagtccttttggtgacagcgcgcttcttgcaggcatgcatcagtacgaggcaatgcgctcactctggttgtcgtcgtgtaatgtcaccctggggggttgcaagtctcttgcagcaagcatggcaaacctcaacatcgaggtcatgaatagagcagcaagtatcaatgaggcagacaatgcttaatgatgcaaagaaggtgaagaagttgtatatttacaggacagttgctggaccgaggggtgatgcgcctgaattcatctcaacgttctaaatccatatatttttgaagttgaagggttgttcttcgacaaccaccttttgtttatatcatactctgctacgtcgagttgatctacatgttctaaagatctatctatcttcacggtcgaagggatcttctaggattattttgtgtaaattcctttgctatcacctctgctatgtcattatcttccagcagtgctacacttatgattaatctccaaaattgaaactctatagttatggttaacttggcagattgattacacatcatggtaacatctaagccttgtcgtaataccataattctagcaagtcatatgcgtggttcatcttcatgtatatacgatttcatatcgatgctctcatgtaatgtctgggaaatttgaagtgcc

SEQ ID NO: 389834 - DNA, 599 bp, Oryza sativa
ccacgcgtccggacgtgtacagcttcggcgtcgtgctgctggagctcgtcaccggccggagcccgatcgacccggcgttcggcgaggggaaggacatcgtgttctggctgtcgaccaagctcgccgcggagagcatcgacgacgtgctggacccgcgcgtggcggcgccgtcgccgtcgtcgtcgtcggcggcggcggcggccagggacagggaggacatgatcaaggtgctcaaggtcgccgtgctctgcaccgccaagctgccggcggggcggccgacgatgagggacgtggtgaagatgctcaccgacgccggcgccgggccgtgcagcccccgcggccagccgccggcggcgagggcttgcgcccggagcaagagctgctgctgaattttagagtagactctgctttctcgcctctgtctgcatctgcatttctgcagccaactctcgctgaattttaatctttgctgtgtactagggatcatactgtagatgataatgcatttgcaggtattttgtaaaatggttgacaattaaggtagtagtccgctttaattatagtttaaacctctgattttgtcatgcttttattccgag

SEQ ID NO: 389835 - DNA, 740 bp, Oryza sativa
ccacgcgtccgcgctaagttcaagctctgcaaggtccggtctgtacagtttggacagaagggtattcctttcctgaacaccaacgacgggcgcacgatccgctacccagacccactcatcaaggccaacgacaccattcaagattgacttggagaccaacaagatcgtggacttcatcaagtttgatgttggaaacatcgtgatggtgaccggtgggaggaacacggggcgcgtcggggtgatcaagagcagggagaagcacaagggcagctttgagaccatccatgtcgaggatgccctcggccaccagttcgcgactcgcatgggcaacgtcttcaccatcggcaaggagaggaagccgtgggtatctctccccaagggcaagggcatcaagctcagcatcattgaggaggcgaggaagcgcaatgccgaggctgccgctgaggcttgatttctgaaaatctccatgaatgaaactgttgatttgagcagtctatttatatagattatttagctcttaagatcatatgtccattggagaccgtcaattggcgcttcattgttcgatacttgtcgagctgttttgaaactatgaattcatcatctgttaccttcagcataatagatccagaatccttttttagcttgtgtaatctttcccaaatgagaagctaccttgcatactgaaatgaattccacatgatgtttggatttgcaagtaaaaaaaaaaaaaaaaaaaa

SEQ ID NO: 389836 - DNA, 789 bp, Oryza sativa
  unsure (1)..(789): unsure at all n locations
gaaacagaaagaaatcgcactcatggcgaacgcatgcttcttctggtcgtcgccgccgccgcactgctactcgtcgttgcagcctccgccaagaaatccggcgacgtgacggagctccagatcggcgtcaagcacaagccagaatcctgcagcattcaagctcacaaaggcgacagagttaaagttcactaccgtggaaaacttactgatggaacagattttgattctagctatgaaagaggtgacccaatcgaatttgagttgggcactggccaagtgatcaaagggtgggatcagggcattctgggcatgtgcgttggcgagaagaggaagctgaagatcccttcaaagctcggttatggtgctcaagggtcaccgccgaccatccctggtggagcgactctcattttcgataccgagcttgttgctgtcaatggcgagccagccagcaaatccgatgaggacgatgatgacagcgagctttagatagccaggatggttcacatcttacgcgccaaaacaaagtctagttggcgaatcaaatagtgagtagtgaaatgcaatgcatttcaaattcaggaccccatagagaaatcaacccccttttttttttttttccccatgcccttatctgctattttataacataagcttctatttaacctttagcctttctgaacaaattgcatgatctgtgatgcatcttttggtccaaattgtagacttggtttgcgattggttttgtttgnnnnnnnnnnnnnnnnnnnnnnnnnnnnnnnnnnnnnnnnn

SEQ ID NO: 389837 - DNA, 951 bp, Oryza sativa
gaaaccagaggcttctgtgcctcttgtatcaggggtttcgaatccgatcaccatcgtgtcgcaagctgtgactctccccaagagcttttctagctccaacgactctgcggggccgaaatctggaggcctaccgttggctgttactcctttgagccaggcatccccgtcccagccgattccagtagcaaccacaaatgcttcggctatcatgccaagagctgtgcctcaagctcgaaaagcatctctcgcccgattcttggagaagcgaaaggaaagagtgtcaagtgttgcgccatacccatcctcaaagagtccactagagagcagtgacaccattggcagtcccagcacaccgagcaaatcatcgtgcacggacatcaccccttcgaccaacaactgcgaggactcactgtgcttaggtcagccaaggaacatcagcttcagcagccaggagccccccagcacaaagttacagatatgagacctggtgatcattgtataccgaagattcagctcagcgagagtcggctgaccttgatgccagatcggacgccttctttcgcatccgtgttagggtatgatgagacataggaagagatcactagatgctgtttctatcctggctgcaaaatctttctttggctagagctgtttataagtgctgatctagccacagccgccgccacttagtagtacgagagctgtgacattgcaggtaatttcaggctgttcttgattatttttgccctgagccatagcggcattggacttgagaggaaaagaaatgctgctgagttgtataggattacagattcggcgtatgtaattttgctgttttttggttctagccttaaacatacaaagctagcttcagaattcaaacagagtttcccttgatgccaatatgcccattgccatggccatttttatatgttaaaaaaaaaaaaaaaa

SEQ ID NO: 389838 - DNA, 673 bp, Oryza sativa
  unsure (1)..(673): unsure at all n locations
gttgcatngggagngaatggtgtggnggcgcatgntggctgtagagatggagacanatcgcangtccttgaggaaacaatattgcgtgantgggggnggttgccaacgcatccgcgaccccggtgaccttgggatgcccttcttcaaccatgaagtggtgaagaaagcgcttgttatgccaatggagaaggagaatgaagcaaggatcttggctctgctacaggagtgcttcggtgaggggctcgataacaatcaaccagatgacattaggcttcactcgcgtcaaggaaggcctcgatgatctgatcctcgacatcccaaatgcacaggagaaggttggagcatatgtggatctcgcaactgaacgtggatggctgcttccacccttcgcctaggcgggtaaacttgatgaatcttctcaatgtacatctccacccctgctgtctttagcaccataccaaaagttttcctgttcctagtgtacttgttgtgttaccgtataccggaggatgataggttggttggccgtgttggtacttgttgaggtagtgttcatcattggtttggtttgggagtttatgccctgggagagttatgaataaaaaaaaaaaaaaaaaactcgagggggggcccggtacccaattcgccctatagtgagtcgtattacaattnc

SEQ ID NO: 389839 - DNA, 558 bp, Oryza sativa
  unsure (1)..(558): unsure at all n locations
attnggatangatcccgggngcggattggcagggcatgggaagngatgaaccaggatttgttttnnacaggatgttcgggggggggtgatacatcaccagtgacattgggttcatttgcntcaaggaggcctcgatgatntgatcnttgaatcccaaatgcacaggagaagtttggaagcatatgtggttctcgcaactgaacgtggatggctgcttccacccttcgcctaggcggttaaacttgatgaatcttctcaatgtacatctccacccctgctgtctttagcaccataccaaaagttttcctgttcctagtgtacttgttgtgttaccgtataccggaggatgataggttggttggccgtgttggtacttgttgaggtagtgttcatcattggtttggtttgggagtttatgccctgggagagttatgaataaccatatcgtttcaggttatgacatgctatgcaatgaaaaaaaaaaaaaaaaaaaaaaaaaaaaaaactcgagggggggcccggtacccaattcgccctatagtgagtcgtattacaatt

SEQ ID NO: 389840 - DNA, 486 bp, Oryza sativa
  unsure (1)..(486): unsure at all n locations
cgccgcggcagaaccgccgggacccacgccgcttgtttcaacgcaggcctggacgatctgggcctcgtcttcccaaatgcacaggcgaagcttggagcatatgcggatctcgcaactgaacgtggatggctgcttccacccttcgcctaggcggctaaacttgatgaatcttctcaatgtacatctccacccctgctgtctttagcaccataccaaaagctttcctgttcctagtgtacttgttgtgttaccgtataccggaggatgataggttggttggccgtgttggtacttgttgaggtagtgttcatcattggtttggtttgggagtttatgccctgggagagttatgaataaccatatcgtttcaggttatgacatgctatgcaatgaacaatagagctgttcatgaccagtggaatttttgtaattagctggcgatgggcttccagcttctggaacaaataaantaaattcccatttagt

SEQ ID NO: 389841 - DNA, 569 bp, Oryza sativa
  unsure (1)..(569): unsure at all n locations
caagatctctagtttctttgatttcttgatcagacgacgatgggagggagcaaggatgagcagcaagacagggggctcttctccaacctgatgcacggcgtcgcgcgngcgcggcgcncattggctatccgtaccctcctcagcaggggtactacccgccgccgcccaccgcgtatcctcctcctcctccggcggggtacggcggcggctatggctaccctcctgcaggttaccccggctcgtccgcgccatgccttcccggtaaccatggcggaggaaacatggggatgctagctgcaggtgcagccgctgccgcggcggcgtaccggcgcgcaacaaagctttcccacggtcatggccatggaggctacggctacggtgagccaccacggcggcctcttcggcggtcaccttggccaccacggcggcttgtttggaggccatcacggacaccacggcggcggcctcttcggcggccaccacggccaccatggcggcttgtttggcggtcaccacggcttcggtggccaccacggacaccatggccaccattgatggtgatcaccata

SEQ ID NO: 389842 - DNA, 900 bp, Oryza sativa
gttcattggagcaattatggttagcccagaaatatcagatgttattcattctcagagcaataagctcggttcatttgctcatggatttacatactctggccatccagttgcatgtgctgtcgccatagaagccctgaaaatttatcaggaaaggaacattcctgatcatgtgaagcaaatttctccaaggttccaggagggagtcaaggcctttgcaggaagtccgattgttggagagatacgtggtgtagggttgatacttggaactgaattcgcagacaacaaatcgccaaatgatccattccctgctgaatggggcgtcggcgcgatctttggagcggagtgccagaagcgcggcatgctggttagagttgctggagacaacatcatgatgtcaccaccattgataatgacccctgatgaagtcgaggagctggtgagcatctatggagatgcactcaaggccaccgaggagagggtggctgagctgaaatccaagaagaacaattagaccgagttgacaactcctcatcttgcaactgcacgagacgacgatgacgatgataatgctggcagcgatgatgatgatggtgatggtgttcttggtggatgtacagagtaataatccctcgtctgtcagaaaactctactcagagaacagtaataacgctgttcttagcgtgcaaaaaataatcaaaacagcgatcatgcattcacccagaaccggtgaatcttcaccagatttcagtcttacgcacgggattagctgccgtggtgaactggtggtgactgtcatcttgtagaccaaatcaggttggaataaatcaaatttacatgaagtcgcatgaactgcactgtttctttgagaatatcaaacttttactcaaaaaaaaaaaaaaa

SEQ ID NO: 389843 - DNA, 889 bp, Oryza sativa
ccacgcgtccggaggaagcaagagaggaagaagaatatatccatagttctatacacaaagcgtacctgttctttcggtgtctttgttccagaagccagaaaaactgcgagcatgggcaaattcggtggagctgcggtccttccagtataccgtgaagaagaagatgaagacttgttcgagacatcatcgtccatctcaggcgactccgatgatgaggctcaattttcagacagcgaggaagctgaagctcaagaagaccagtttgcgcagagccagcgagaaggatgaattcagatagcctctacgatctgtcatctatgaaggcacaactccctgtcaagaaaggattatccaaatactacgacggaaagtctcaatcttttgcatgtatgtctgaggtgagatgcctagaggatctacgcaagaaggagaatccatacaagaagatcaaatcatccaagagctatgtagcactggatgggaaccaggaagcttgtcatatacctggcgcaaacagcacatcaatagccaagaagtctggaagttcttgcgcaaatctgatggccaggaataacaccaaaagcatgctctataggcctcccccaattcctgtaaacaaaagcggatatcatcagtaggaacagtatcgaaatgttttttttttggggggtcagggtttcatctctgttcttttttcgttgaggattttgttgacaagcatattagcctgtcacggatgtaagaggatttcgttctctgccatatacagagagtcgtcttgttcaaggagacatcgattctgtttgtaaatactacaatgaaatttttcattggactgcctggggatgatgaacagccttctgtcgaaatttaaaaaaaaaaaaaaaaa

SEQ ID NO: 389844 - DNA, 403 bp, Oryza sativa
ccacgcgtccgacttgcagcatttgcgatttctctctcagcttaattcgcatcaagtcaaccatgtcttcggcgacggcgacggcgtccggtgggctgcatgccgccggcggcgagtggctcggcgagctctccgccgcgctgcaggggaagtggcaggccatggtgagcacagaccagcggcggcggcggcagaggggagatgaggcagacgagaagaagggggtcgccggcgccggcgccgccctcggcgtggagaccaggaggagggaagaggagggagacgtttgcgcgtgcggtggcgccatgttcgacaccaccgtctttctccttcttgaccacttcgggcccagctgatccgtcctgacgtcacccatggcgcgcccccgagctaatcgtgacgg

SEQ ID NO: 389845 - DNA, 972 bp, Oryza sativa
  unsure (1)..(972): unsure at all n locations
ccacgcgtccggctagagatgcatcacatctggatgagacgcacttgcattcttctgcactgacatatgatttgtacaacccatcaggaggcatctaccatcctggaaatgctggcgagcatgaccatgacacagtctatatagagccgactagttccaattcatgcccagacactgacgacagtttcccaatggatgaagaagtaggaaagaggttttaccccatggtgccagttccccatgttcctaaaattaatggagagatcccttcagtcgatgaagctaccatggaccatgaaaggctgacagaaaggttgaggttgtatgaactagttgagcacaaggtgaaaggagatggcaacctgtcagtttcgggcacctatcagatcaactgtatcaaagtcccgatcaccatgagtttgtgaggcagcagattatgagccagcttaaaagtaaccgtgatgcctacgatggatatgtccccatggcatatgacgattactcggagaaagtatcacaaaatggtgaatggggtgaccatgtgactctacaggctgctgctgacaagtatggagttaagattttcgtgatgacatcgttcaaggatacgtgctacattgagatccaaccaaaggttcagaagtccaacaaagtggtgctgttgagcttttgggcggaggttcactacaactccatatatccgcagaacggtgagtaggccctgcctgccattggcatacgatgcaatgcatgtccggtcttcgtcgccagcatgcgccgaggtcgcagacgacgaggaagaggagatggtggccgttctctcacaaccaccaccatcaccaccattgatgcctgngctgcaaagcttttcttccttgatcaagatgacccaggttgatcaagatgacccagaaagaaagctggtgctcattggcttgtgggctgatgacaatcatggacatctgatagtag

SEQ ID NO: 389846 - DNA, 870 bp, Oryza sativa
ccacgcgtccgcccacgcgtccgctttgaagtgttcaagccatgatggtcctttcagtaatggtgatcatacaagtattgtgcaaccaatggactcggatcctcctaccgttactgctatggacaaacaaaattccagtgatggccatatactcttctggattgggacatcaaaccttgcagtagcatcaactcttcaagttggagattccttagctgaagtggattgtatactgaactgtgacagcacatcaaatttacctttgacttcatcagagaattcttaccttgaactacctatggtgggatcaaaggacgaccggttttcgttgatgaaaaaccttccaaaagcagttagctttgcaaacaggaatttgatagcagggaagaagctactaatatgctgtcaaaatggagaggatataagcatctgtgtggccttggcgataattacacgattatttgattgcgatggattctgggatcatggcaattcatttctgaaaggagacgtcacgaagttggagatgaggaagaggctggtttttgtttgcaaatatgctgttaatgcaagaccatctagaggaaacttgaagcaggtctatggtttcctttgcagcgagaaggaacagttttcttgtttgacgtagtttatttacgtctagtcttgtggatcctgatcagttgtttcctttcctatcccctgcaagatgcatctatgtgttccgatcagttagggaagctctggtttctgagtttttcatgtcaactgatgaactgctagtgtatatggggaaccaatagtcgcaaattgcccttgggatttcactgacaaacaacctggagttgatctcataccaggttaatcgac

SEQ ID NO: 389847 - DNA, 792 bp, Oryza sativa
tttttattctgaactatcttgctggtttaatcattagtcacgacaacggtggacctgagggttgtgatttaaatgacctacagactttgtcagaattaaggcaccttcacatagagaacctggatagagctacttcaggcgcttctgcacttgcaaacaagccattcctcaaggatctacacctctgtgaacaggcaccattgatagaggagcagcaatctgaacatgaacaagagaatcaagatgaccaaaaggaaacagaggaagaagagaaggaagtacttgatgtaaccaatagccaatttagtagagaggaatcaatcaaagcgagcgaaaagatatggaacgaactcaccccaccccagaacattgagaaactagtaattaagaactaccgaggtggaaagtttccaaactggttgacaggtccaaagctgggcatatcattccctagtcttgtgtacttggatatcgacaactgcatgtcatgcacggcactgcctgctcttggcctcctaaaccaactccagtccttgcaaatctcgaatgcagactcagtcgtcaccattggtcctgaattcctcggtgctgcttcatcatcatcggccactgcttccttccccaagcttgagatattaaagctcagaaacatgaagaaattggaagagtggtcattagccgtggaagagaatcagatattgttaccatgtcttaaatcactgcacatacagttctgccccaaacttaaagctctaccagaaggactgaagaatgttcgctggtgagcttatg

SEQ ID NO: 389848 - DNA, 623 bp, Oryza sativa
  unsure (1)..(623): unsure at all n locations
ccacgcgtccgcccacgcgtccgcagaagcaagaatctttgctaaagtccgtggatgggagactgagaatgttgaggagatcgcgttgaagatttcccagcttccattggcctctggaaaacaaaagaggattgccgtgattactcaaggtgctgatccagtagttgtcgctgaggatggacaggtgaaaacattccctgtgatcctactgccaaaggagaagcttgttgacaccaatggcgctggtgatgcctttgttggaggcttcctctcacaattggttcaacaaaagagcattgaggactctgtgaaggctggttgctatgccgcaaatgttatcatccagcgttctggctgcacttaccctgagaagcctgatttcaactagggctaacccaaccacatattgaggaacaattattcgcacatccaacctactagtggtttggtgtgttctacctgtaccatctcgaggctttccatatgatccggccaatatttttttgccgtgatttttgtttcactgctgcaaaccttactttattctcggtataaggcacaattgccaatcggtgtgtttgttttggtcaaaaaanaanngntnaancaanaaaaaaaaaaaa

SEQ ID NO: 389849 - DNA, 863 bp, Oryza sativa
cggattcccggtcaccacgcgtgcggactggcttcacgctataataccggatccagctgatcgcgatccaaactatagcgaatagtcacttctgcaagaggacagtggaggatcacatgcatggagcgatctccacctgaaggatgcaagtggtctagcaaaccaatccagcagattggcccatatacaaagccatgctattgcaaactcaaactctgtatccatgaatcaaagaggtgaccgcctgttccatgcatcaactcttacagagagtagtgcctctacaggccatgtgacctatgatggttaccataatgcacactattctcagctgaattttcaaagtcgccatggacaaccatttcagcggtataaccatatgactgcgagctacctacgtccaatggggaatcatcacaatggtcagcctgtatggcctaattatggcatggcagaacctccacctgctactatggctgacggaatgccttggggaggaaggcctggtcactcttttacagcaggcggactgccgtcttcctttgcaggaaaggattttggaaggattttctagtatggatctggaggaatgccattcaattggttgcattagtagtttgtatttgcaactcttggttgcattgcttacgggctgttgattttgcagtttgttgcattcctctaattgatcccttcgcaatgctccggctcatagaactgtatggtatgggtctgtaattgtagcattctctgttggtttcttcttttcgtttttggtttatttgttatacatcgagcggaggcttctgcctgctgcaaaaacccagcgggaaaaagaagttgaccagccccttctttcagac

SEQ ID NO: 389850 - DNA, 716 bp, Oryza sativa
  unsure (1)..(716): unsure at all n locations
aaagngnattttgnttnaaaancnnttnaagttgggtaancccagggttttcccagtcacgnccttgtaaatcaacggccnttgaacacgtntaatacggactcactatagggcgaattggntaccgggccccccntcgaggtcgacccacgcgttccggtcgtcgtcgtcgaaaaccctagccgcgcgcgccgccgcctcctctcccgcccggcgcctgcagccgtcgtcttgcctcgcgccgcctccggccgaccgccgcgctccaccagcgccgctgcgtccgatggatccgcaacaacctgagcccgtcagctatctctgtggagattgcggagctgagaacacactgaagccaggagatgtgatccagtgccgtgaatgtggctatcgcatcctctacaagaagcgtacccgccggattgttcaatatgaagcacgctgaagataagggaaggcatcagtctttctaaagcaatgtaatgagtgacccctcaaaagtatgttagtgggactgtatggtattcagttgtaggcccgtatggccatttggactttcgataggaagtggttaaatccgagctgtgttttgagatttgggaaatttaaggtgatgccacgcttatattgcctgagatcttgaaatcaaatgcatagttttattgnngttgcnnnngngnngcnnnnnnnnnnnnnnnnnnnnnnnnnnnnnnnnn

SEQ ID NO: 389851 - DNA, 501 bp, Oryza sativa
  unsure (1)..(501): unsure at all n locations
ccacgcgtccggagctgtggaaaatatagaggccatttttggggttcatgttgctgatgttgtacctattggtgtggtggcatccaggccaggacctgtaatggcagggagtggattcttcgaggcagtaataagtggaaagggagggcatgctgcacttccccaccacactatagatccaatactggctgcatcaaatgttattgtaagccttcagcaacttgtttcccgggaagctgatcccctagactcacaggtagtaacagtaggaaaatttcaaggaggtggagccttcaatgtcatccctgattctggtacaattggtggcaccttccgagcctttttaaaagagagttttaatcaattgaagcagcgaattgaagagggtcattgtgtcacaagcatccgtgcagcggtgcaattnctgtcgtagctttcctcgacaaagaccgcctttcttccctccaacaatcaacagcgcggggtccacgatttctttgt

SEQ ID NO: 389852 - DNA, 497 bp, Oryza sativa
  unsure (1)..(497): unsure at all n locations
ccacgcgtccgctgacgcttgcgaccagctcccgttgcgtcccgaccaaggcgattctgctggaaattcttctggttcgctgtcccctgtgacatccaacattgattcactggcatctcagtttcaatctgttggactcgagggggcaggctaccatgcaagtcaaggaatgcccggtgaagctctccttactaggtcagcaacttcagttagtctaggttatcaggcaccccccttgggaggggtatacagcaacgggagtggaccactttttgggcagaagtctgcaagaagtttactccggagcgataccttttgagggtttacacaagaaagattacaacggcattgccgagtttctttggttacggcacgcgtaccttatctactggngtgaggagtgaggaccttaaatcaattgatttggaagaaaacccccaaaaaagggaattaaacatccaaaaagagggtggaatccccaaaaattttaaatttaa

SEQ ID NO: 389853 - DNA, 768 bp, Oryza sativa
ccacgcgtccgcctagtgcttgttgcgaaatcatgcagtaacgatgcatcaagattgacattctggctgtccaatacagttgtgctaagggagataattgcacaaactattggtatctcatgccaatcgtcttcaaccattacagccatcaacatgaatggtagtgcaaaaagtcttgatgggagatcgatgccaatgctatggacaaatagctccagtggcaaacaaaccaaatttactggcatgcaggtaccggatgattggcatgaaacaagtacacttttggctgcattggagaagattgaatcatggatattttctcggatagtagaaacagtgtggtggcaggcactaactcctcacatgcaaactccggtggaaggatcgtcaaccccaaagactgggagagtgttaggtccttctttgggtgatcagcagcaaggcaccttttctgttaacctgtggaaggctgcattttcacgatgcattcaacagaatatgccccctccgtgctggtggacatgaatgtggctgtttaccagtattggcaaaattggtgatggagcaacgcgtaggccggttaggtgtgccaatgtttaatgcaatccttcgtgaatcggctagtgagatacccactgatcctatttctgacccaattgttgacccaaaagtcctgtcgattccagctggtgatctaagctttgggtcaggcgctcagtttaagaattttatcggaatgggtcagatgtttacagataactttggaat

SEQ ID NO: 389854 - DNA, 784 bp, Oryza sativa
cacatggctggactgggactatctgatattgattcttggaatatgattgagaaaatagctgagagaaacaacttgggttacaagcagctcatcaaacttagagcattgctcacacatctgcaacaactgcgcattggctattggggagtcgctacagggaaaggacaacaaccgccatcatatggcatggcttccccccgtgcgcttgatgtatctgatgaaagccaacaacctgccgaggcatctggattgggtcgaaattgggtgcaaagcatgtttagtagggacagaagcttaagggctagctctttcaaccgaactaatgaagtgaaggttggtgctactgcaggcaaaactgacctacctgctgcacaaaagaaaattcaaacaaatatgaggacccttagaggacatacaggtgctattactgctcttcattgtgtaacaaggaaagaggtttgggatcttgttggtgatcgtgaagatgctggctttttcatcagtggaagcacagattgcacggtaaaaatatgggatccaagttttgcgtggttctgaacttcggacaacacttaaagggcacactaggacaattcgagcaattagttcaggatcgtggtaaaaattgtttctggggctgatgatcaatctgtcatagtctgggataagcaaacttttaaacttttggaggaacttaagggtcatgatgcaccgggtagttctgtccggatgctctcaagagaacgtgttcttactgcatttcatgatggcactgtcaagatgt

SEQ ID NO: 389855 - DNA, 489 bp, Oryza sativa
atccggcctcgccgatccccatcacctgcgacggcgagcagcgtcgccggcgtccggctgcctccgccgcatactcggctcggtcgtcttctcgaccttcactctccggaggtctcctcgctagccccgccgcgccgatttccatccatccctcccgcgaggtgggtgccgccgtcctgccgcttccgcctccgctccggttggctcctgaagttgattaggtggtgccatgggttcaaaggattctcaagtcgaagctactttacaagatgggaacaaagaagatgaagaggatgattgggaggcgatcgcagatcgtggtgaaaacgatgagacgctaacgctagcgcgttctctcgagcagcaagcaaaggtttctcctagtagttcttctgagaaaattagcactccatcttcagggcccaagaggaggggaaggggttcgttctttaccacaagagtggtctatacagtgatcagtgtgggcta

SEQ ID NO: 389856 - DNA, 549 bp, Oryza sativa
gttatccgacaaattcaataatgctataaaggatgtgagcgtcaagttgacgagcagaaaaatgaatgcattgctcagttagaagagaaccgcttgctgagaagtaaactcaaagaccttgcagatcaatataatatcacacagcagaaatatgctcatcagttgaaagaaaagatgctggaacttgagctcgccgatctgaaaatgcaacaacatcaagagaaaacagctcaggaacaaacccagatgcagctatatgctgatcaagtttctcaacttatgtctaccgagaagaatttaaggttgcagctagctgctgaatggagaaagatttcagcagtttcaggatgccctcacaaaaagcaatgaacgtctttgagacattacaagaaggagatgggaaagaaggtgaagcttataaaggatctaaagaaggataatgaattcatgaagaggtaatgtgggaattcagatgttgctctagtgaagatgattgaggagcgtgagttaatgaaaaagcaagttgatagttcaggatcaaaaagagaa

SEQ ID NO: 389857 - DNA, 759 bp, Oryza sativa
ccacgcgtccgctccttggaaaaagttttttcagaagttggatcaaagtcagagatgttatcagtaaagctgcaaagagaggcagacaaccttctctttaactttgaagagcctttgaaagattatgtacgtgctgtgcagtcaataaaagcaactatggtggatcgagccaatgctttcaggcagcatcatgatttatttcagcagaaggaatataaaggggttaatctcgaaaaattgaagttcgtgaaccctgataaattttctgaactagaagctgaggtccgagagttgacagcagacagtgaggaggctacaaagaggtttgagcacatagttgcagtaatgaatgaagagcttgcacgtttccaagagcagaaaacagctgatattggattcgcattccatgaatttgccaaaggccaagcaaagttagctaaagatattgctgatgcatggcgaggcgtcctcccaaagctcgaagcctgttccacttcataaatgctccgtgttagcttatgttgtttggtttagtggttgacaatcggcgagttttaggctgttttttccccaggccaccttgacaccgcgtcctgtatacttcaactgactctgaaaaagggctagtttttagatacaattggcatcatttcctgcctgctctgtgtgtatccttctttttacgaccaatcaatattgctactggaatatctcaagaatgatgcagtaaagggaaaataaactttaatttggtactgt

SEQ ID NO: 389858 - DNA, 460 bp, Oryza sativa
  unsure (1)..(460): unsure at all n locations
tctattgataaagtgttgttttcacgatgcaatcagcacccccttctttgctcccatctgaattttcttttgaattcgtgaattcaactgtannttatgttcaggaaaagctgggaaaaaggaaccaggaggatccatattgcatacagttctaaagtgatcgaggtcctacgcatggatgccaccagtggtgatggcgccacccaggaatgctgcctccttgttcgccgtccccttaatctggcctgccaaatgcaatgaactgaaccctgtaggtgggcggtctgacttcagatgcttttccagtggcgatgccctctagttagttaaaggaactaacagcaatgatgtaattagcctgtgcaaggggctgggctcatatcagtagatttttttccattgtctttttatttgtgattggctttttctaatatttttactggacgatggtgaaatgcgc

SEQ ID NO: 389859 - DNA, 834 bp, Oryza sativa
  unsure (1)..(834): unsure at all n locations
tttgtgcatggcatgcagcaccgacgccgaagggatcggagggctggaagaagctgcgccgtggggcggcgaggatggccgacggcgtggacgccagcgccggcggccagccgagaagccccaccgtatacgactgggtggtgatcagctcactcgacaggtgaaggcgtgatctatctaatcgagcagctaagctctgcatccggcgagaaactgcacctgcacaatatgaagcagctagaaactgaaggcgagcaaagaagaaaaaaaacactaaattctgctctttttcagttaagtttcagctcgtcgatccagagcatgaaatgttcagtgttcagctatctgcactactacagactgccgattttgtagccaaggatgtataaacgtatgcatgcttgtactaccaccgtataatatacgtacgtgtacgtagtagatcgatgcagacaaaaagtcttagcagaagaggggatccttgtacgtacacaacctgtagtgtacgtacacgatgcgatcgatgatgaactgatagtatatgtatatggcgcagctggtgtattatattacatgcgctagctggagggagagtgtgctaatgttgtactagtactacgactgatctgtttgcttctcctctgctttctttgtctccagaaaagagggagaggagagaagtttttcccctgtttttgtggaatatgtaaaagatggctgcagtgcatgcagcagtgtaaaagtgtgaaaagaagtgggcaataatgcatggccaaataatgttatgaacctatacttaagctgtttaaaaanaaaaggnaaaaaaaagggcgg

SEQ ID NO: 389860 - DNA, 553 bp, Oryza sativa
gaagccaccgtctcctcctttccaggaacgcgtctcctctcctctcttctcttctctctccggcggcggcggcggcggaatccgatccgaaccaagcaaaaatgacggccggatacattgctgggtccttggttggatccttcgccattgcttacctgtgtgacacatttgtttctgacaagaaggcatttggaggttccattccaaagactgtctctgacaaggagtggtggcaagccactgacaccaagttccaggcctggcctcgcaccgctggaccaccagtcatcatgaaccccatcagccgccaaaacttcatcgttaagtccacttagacgagagaaactggttcagtgtcgtgattttaccatgaatatgaagtttgttttctaggccttgagattgtaattaagatgcaacagtcaggatacgttttgcatttttcacttcacctgtgagcaaacattggagcttacattatactcacatttgatgaattctgttcctcggtgaaaaatttccactgggcagtaaagaattacattgttttcct

SEQ ID NO: 389861 - DNA, 740 bp, Oryza sativa
  unsure (1)..(740): unsure at all n locations
tcatatttgactaccggcatttcctacacaattgccgcttgactatatgtacgctggagcttattccctttggtctgtctgtggtgtttatcccaatgaacaagaaagctgcttatttatagtttgagaacaactacagttagcaggggacttgtttttctagaactgtgatgttcactcatgcttctcttcatatgaataatctgtaacattcattttctattcagacttgataatctgtatgccatttccatgattgtgcagcaaaaatgacggccggatacattgctgggtccttggttggatccctcgccattgcttacctgtgtgacacatttgtttctgacaagaaggcatttggaggttccattccaaagactgtctctgacaaggagtggtggcaagccactgacaccaagttccaggcctggcctcgcaccgctggaccaccagtcatcatgaaccccatcagccgccaaaacttcatcgttaagtccacttagacgagagaaactggttcagtgtcgtgattttaccatgaatatgaagtttgttttctaggccttgagattgtaataagatgcaacagtcaggatacgttttgcatttttcacttcacctgtgagcaaacattggagcttacattatactcacatttgatgaattctgttcctcggtgaaaaatttccactgggcagtaaagaattacattgttttcctnnnnnnnnnnnnnnnnnnnn

SEQ ID NO: 389862 - DNA, 746 bp, Oryza sativa
  unsure (1)..(746): unsure at all n locations
gtaccggtcccggatcgaccgcacgcgtccgcccacgcgtccgggagatcctcatgtcttgtgctttgttgattttgataaccctgcgcaagctactcttgctcttgaagcattgcaaggttataagtttgacgaacacgatcgtgattcagcccatttgcggctgcagttctcacgctttcctggtccgaggtcagctggcgggcctcgtggtaggcgttaagtcgcgcgagtctggttttgaggtgcttgcggaacctacgtttatacgagcgttcaaactctgcggcgtaacgcttctatattgcgctgatatctccgccggtggcttcttcgtagggttcggcatctcatggtttgaaatcgtgaaagggatgatgcaataatcgatattcagtctccattagattgcgtaccgtatgatagaaaattggaactctgagagtacttcctcatactgtatctgcttccttaatatttatggtcaactgtatttgtatctcgcggcgtcacccagacagtatggcttgttatcaggttattgttatctctagttaacatttgcttcccttttttttgggcatatttagtaattttaagagcttactgtttctcgcaaatacatgacaacatcttaggtttaatctaatataatgtaatccttttgcctttctgtggtgttattatttgccttaatatatgtagttgcgctggnnnnnnnnnnnnnnnnnnnnnnnnnnnnnnnn

SEQ ID NO: 389863 - DNA, 784 bp, Oryza sativa
  unsure (1)..(784): unsure at all n locations
ccacgcgtccgaacctatcacaaaaactgaaaactgtgagagcttctttaacttcttcagcccacctcaagttcctgatgatgatgaggaaattgatgaggatacagctgaacagttgcagaaccaaatggagcaagattatgacattggttctaccatcagagacaagatcattccacatgctgtttcatggtttactggagaggctgctcaagatgaggacttcgaaggcattatggatgatgaagatgatgacgatgaagatgacgacgatgatgaagatgaggatgacgagggtgatgatgaagacgacgaggatgaaaagaagggcggacgagttcctgcaggggaagggcagcagggagagcgacctgcagaatgcaagcaacagtaagatgcttcctacctgagcgtttccaaagtccggtcctggagtgaagaagaatgtttggttcggcttgatgcaatgtctcgtccatttggtttggagagccagttggggaagtgttgggattgagttggtttagtggaactggcgggggatatttttttcgggacatggtattatatgtttggtagctttttccattgttgtattgggtcgacatatcttgtgcgaagcttatggttgagtgatgaatatcgccggtttggtattatcatattgccaataccactggcatagtgctgagaaattttgatctaggagaggcaatgtttttgtgcgaccaagttgcatctttgatggcaaggaaattgttctttttttnnnnnnnnnnnnnnn

SEQ ID NO: 389864 - DNA, 575 bp, Oryza sativa
ccacgcgtccgttctccacattggttgcttctattctggaaaattttggtttgagtgaagagatgcacaaccctgtatcaatcttcctgctggtagcaattgtcttgactggcgctggttttggttggtggatggtcagaagattcatcctttcaaaagatggtagtgttgatgctgggatagcacagtttgtgaagtgggctatgcgtgttgttgctatatgctttgttatgcagagcacacttgatcctcttctagcgttattcgcgctggccgctagttggtggatttgttctgtgttcacagcatatagagctccaaagtcaatgacactgaagcaaaagcaatcaaaggcttctactcagccaatgtataataaaggatcacctaacctctcgccaaatccaaattcttaagcccatccaagagggatattggaagaaccacatcaaacagttcagccacacagtatggctggagcaatttagccaatggaggactggtgtcttcaacacttacaaagagggtggtacccgataatcaagatgaagaccactactccaccttgcacaata

SEQ ID NO: 389865 - DNA, 469 bp, Oryza sativa
ccacgcgtccgaagagatttaactcaacgaaagtttctccgaaggttccttctgttacttataacatagctcaggtgagctatgaactaaatgtccttggcacaagaggtcctagacggatgcgttgcatgatgcactccatacctgcctcctcggtggagcctggtggcatagtccctggccagcctgagcaaattgtacctcgagctctggaggactcatttcgcagcaccacctccttctctcaatcattccggagcaccacctccttctctaagtccatcatggacccatccatggatttcagtagtgctcgcttctctgacatcagtggttctataatgggtggtgatgacaatggtgaaatcaaggagaggcccttagtgctccgtaacaagcccccgagatggcatgagcagctacagtgctggtgcctgaacttccgtggccgtgtcaacattgcctcagt

SEQ ID NO: 389866 - DNA, 478 bp, Oryza sativa
  unsure (1)..(478): unsure at all n locations
ggccgctctagaactagtggatccccccgggctgcaggaattcggcacgaggnaaaacatcttcctattctccttttgtccccctcatctccaacttgggcataactcatgggcaggctactcgtgcccggttgcccttttgccaaaatcccatggtctagtctggtcagtaatcgttaggcctatttgttatttactatttaggtcttcggtttgatttgattggttctttgtccaattttctcccctttttttctggggggatcagaatttatattgtaatgggaggggccggatgcccctcccctggtcaggtccccgagctttgttattggaaaagctcgtgttcctcttggcgtctggaaaaggttttccgcatctgtgtcgggtctccggtgtcgttcatttcaatcttcaccgtattgtaaattgcaaagaagatcatagttgaaaaaaaaatcacattggaaaaaaaaaa

SEQ ID NO: 389867 - DNA, 1331 bp, Oryza sativa
  unsure (1)..(1331): unsure at all n locations
aagttttcttcttctctctctcgatcccgtctcgtctcgacagttcggacccggttgcctccccgccgctctcctctccggtctactcctccgccgtcgccgtcggcaccgccgccggagctcctccctgctccctctactgggttggcggggagtggatcggggatctgcacgcaggggccgatttcttctcttcgtaaggagtagataacacagaatagttgaagatgagcagcataggcacaggatacgatctgtccgttaccaccttctctccggatggtcgcgtcttccaggttgagtatgccacgaaggctgtcgacaacagcgggactgttgttggaatcaaatgcaaagatggaatcgtcctgggtgtggagaagctagtaacttcgaagatgatgctggagggatctaataggaggatccattcagtgcactggcactctggcttggctgttgctggtttagctgcagatggcaggcaaattgtttcaagagcaaaatcggaagcggccagttatgagaaggtctatggtgaacccatttctgtaaaagaattggctgatcgtgtggctagctacgttcatctttgtacactctactggtggctcaggccttttggttgtggagttattcttggaggttatgatagggatgggccacagctctacatgatcgaaccctcaggagtctcatacaaatactttggtgctgctctgggtaaaggaagccaggctggcaaaaactgaaatagagaagttgaagctttccgagcttacctgcccgggaaggcattgtggaggttgcaaagatcatttatggagtacatgatgaagctaaggacaaagcttttgagttggaattaagctggatatgtgatgaatcaaatcgccagcatcagaaggttcctgctgatcttttggagcaggccaaggttgcagctcaggcagcgcttgaggagatggatgctgattaagaggagacccgactatgttctacgtttggccactgatgaaatctttgatgtcattactggcacacagggacatggccattctgtcggattttaaaacttcgcatgtacttatggtactaaattcatggaaagtttgatgctggacagtgaatggatatctgacttttgactgaaaaagtttgatgctggacagtgaatggatatctgacttttgactgaaaaaaaaaaaaaaaaaataaaaaaaaaaaaaaataaaaaaataaaaataaaaaaaaaaatataaaaatagatgaatattaaatattttatatttnttattttgtggggaattaaaagttattttttttatttt

SEQ ID NO: 389868 - DNA, 544 bp, Oryza sativa
tcctagacgacacactccccccaccttcttgcgccacaagccgaagccgccggaatcctcgacgagacgccccgccgccgccgccgccgccggcgacgccccccctcaccccccgcaggcatcggagaaatataatataaatacagttaaggggttgaagcaacttcacaatgagtagcatagggactggttatgatctttccgtcaccaccttctccccagatggccgtgtcttccaggttgagtatgctggcaaggccgtcgacaacagcgggactgttgttggcatcaaatgcaaagatgggatttgtccttggtgtggagatgctggtaacatcaaagatgattttgaaggggtcgaatcggagactccactctgtgcaccgacactctggcttggctgctgctggcttagctgcggatggtaggcagatagtctctagggcaaagtcagaggcagccagttatgaaaaggtgtatggagaacccatgcctgtaaaggaattggctgatcgtgtagctagctatgtacatttatgtaccc

SEQ ID NO: 389869 - DNA, 417 bp, Oryza sativa
ccccgccgccctggggttttagcggcggcggcgagaggagaggaggaggaggagaggggaagatgagccggagcctggggatcccggtgaagctgctgcacgaggcggcggggcacgtggtgacggtggagctcaagaccggcgaggtgtaccgcggcgccatggtggagtgcgaggacaactggaactgccagctcgacaacatcaccttcaccgccaaggatggcaaggtcgtcgcagctggagcacgtcttcatcagaggaagcagagtgagatttatgattataccggatatgctcaagaacgcacccatgttcaagcgcctggaggcaaggattaggggcaaaggctcagctattgtagtcggccgtggccgtgccgttgctatgcgttctcgggctgcttctggtcgtggt

SEQ ID NO: 389870 - DNA, 540 bp, Oryza sativa
  unsure (1)..(540): unsure at all n locations
cgcgtgcgctccaccgtcgccgccgccgccaccggagcggatcaaccacatcatgctagggacgggaaatcactggcgggggggagaagaatcaatttanatggattgagatggcgtgtatttgacgcaaagggccaggtccttggacggttggcatcccaaatagctgttgtgcttcagggaaaggataagccaacttatgcaccacatgtggaaaatggagacatgtgcgttgtgcttaatgcaaaagatatcagtgttacaggaagaaaaatgaccgataaaatctactactggcacacagggtatattggccatttgaaggaaagaagactcaaggaccagatggaaaaagacccaactgaagcaattcgcaaagctgtcatgcgcatgcttcctcgcaatagattgcgtgatgacagggatcgtaaactgaggatattttctggaaatgagcacccattccatgatcgccctcttgaaccttttatgatgccacgacgccaagtgcgcgagatgcgttcccgggcaagacgcgca

SEQ ID NO: 389871 - DNA, 662 bp, Oryza sativa
ccacgcgtccgcttagcaagctgggagccgatgcaataattcctgctatgccaggacatgtgatgcaagcttttaccttgttgaaatcaagcccagaggcacagggtgttgttgcatctcttgcctctgataaaaatgtctgggacgcagtgttgaaaaatgagaaggtcatggaattttacaagacgcaccagcaaagtctggtttatactttccctgagggcactgcctcggtagtttcacctgagaagcttgcagacgcctcctcagagaattcatcctccggggagaagcctgagagctccccttttgcagacttcatggataatgcaaggaagacggtgatcgacattgtgaacaatataaccaactttttccaagatatgttccgcaaacccaatgaagcccaagattcttggtggatcattcatggctctggccatagcagtcatcctgttaattatgtttaagaaggcgtgagattttggttcgacctcccttgggaatgattgtgctttaaattcgtccaaaataactggcatcgtattattaagtactactacaatgtaatactatatagctgtgtctactgcgtccttgaatatatttgaggacacaggacagtacaataaagacatcgttttatctaatatctaatattg

SEQ ID NO: 389872 - DNA, 565 bp, Oryza sativa
ttatgcgcagagagacatatctgtcggacagggaattccatactgtattcggtataacgaaggaagagttctaccagcagccagggtggaaacaagaactacagaaaaggaagcatgatcttttctgaagcatgaatctctttcccactacaaaggctgcatgtttactagttttgcttgattggtgacatggtacgtgagaggccatgtttgccagcaatcttggtcatgtttcgaagacgattggccggtggcttactctgccgttatcccaagttttacagggtattctttatttgtacatggtctgctctatgcagcaccaagggcgtcactacattgttccgagctttgttctggttcttgtccatccatgtgtatattatttttaccctcaatttggcacaagcggttatttctagcgaggttttggaatgtattatgcacattgatgttcagacttccacttttttgtttctcttgtattgagattcctggtactgtcatactgtataaatcttcttattgttgagtggtgattatccatggttctagtcctagtgcg

SEQ ID NO: 389873 - DNA, 1733 bp, Oryza sativa
ctggttgcggacctcaccctaaaccctagccatggcggcggccaaccttctctctcgcgcgctcctccctgctctaaaccctaacccaagcagccacagcaaccgcgtcagcccttcggccgtatctctccgctgccgccacggcctgacggcctccgttcgcgcctctctctccacggcagcgccgtccccgccgccgcggccggcggcggcggcggccgacggtcgggcgccgaagcgctgtttccggcgcggcgccgatgggcacctgtactgcgagggggtgagggtggaggacgcgatgggggcggcggagcggacccccttctacctctacagcaagcctcaggtggtgcggaacttcaccgcctaccgcgacgccctcgaggggctccgctccatcgttgggtacgccgtcaaggccaacaacaatctccgcgtgctgcagctcctgcgggagctcggctgcggcgccgtcctcgtcagcgggaacgagctccgccttgccctccgggcaggattcgatcccactaggtgtatatttaatggaaatggaaagacattggaagatcttgttttagctgcagagagcggagtgtttgtaaacatagacagtgaatttgatttggagaatattgtcactgctgcgagagttgctgggaagaaagtccctgttttgctcaggataaacccagatgtggatccacaggtccatccttatgttgcgactggaaacaaaacctccaaatttggtatccgtaatgagaaactacaatggttcttagactctatcaagtcatactcaaatgatatcacactggtgggtgttcattgtcatctgggatctaccattacaaaggtcgatatatttagagatgcggcaggtcttatggtgaattatgttgatgaaattcgagcacaaggttttgaactggaatatctcaatattggcggtggcctgggcatagattatcaccacacggatgcagtcttgcctacacctatggacctcatcaacactgtgcgagaattagttctgtcacgagatcttacactcatcattgaacctgggagatccctcatagctaacacttgctgcttcgtcaatagggtcactggtgttaaatctaatggtacaaagaatttccattgttagttggatggccagcatggcagagcttatcagacccaagtctatatggagcataccagcatatcgaactggtttctccttccccagatgcagaagtagcaacattcgatattgttggaccagtttgtgaatctgcagatttccttggcaaagacagggaacttccaacacctgataagggagctggtttggtggttcatgacgcaggagcctactgcatgagcatggcttcaacctacaacttgaagttgcgaccacctgaatattgggtagaagatgatgggtccattgctaagattcggcgtggagagtcatttgatgactacatgaagttctttgataatctctctgcctaactcgttttcctgcaattgtaataagatttttctcttgttatgtgtggctgtatcaggattcggattgatagcgcagtacagtttgctgtagaatcggtatttttttttattgtactgtgatgtcggtaccttattttatccaaagatttttggcaaattttgctacaggacacttaaaatttgaagcctttgctgtaaaacactaaaaaaagaaaatcttcatg

SEQ ID NO: 389874 - DNA, 818 bp, Oryza sativa
ccacgcgtccgagattatgttatactcacgcggagatatcatgtgaattagcgtgggcgccttatacaaaaggatacacaattgtgcccacatccatccatcctggagaggaagcaccttttgttttatcagtttttacaaaagcaccaatcaagctagaagctgtttaatgcaagattcatactagatgtgttcgctgctggtagctgtgccttgctgttgctggcccaggctcctttggggttcaagtgatgcagattccagctgtgggttcaagaggatcagataatggtgtttgctgcagcaatatgccggtacctgggagatatgaagcagcagctctgctcttgaacctgaacattctgggcttcatcagacgctacatgcaaccgcataagcttgattgcttcctaacgtgacaggaaaggcaatctttctgtcagcaggcatggtgttgatacatcagaatcatttgatcgccgtgcatgactctggatgttttctagtcgatgcttgtagaatagtggtggcaactaacatttagacctggtagccccatcccgtgtataggtatcccatgtcaccgtgtacatactatagaattagatgagttaaccttgtggtgtcgtttcctgttagcgaaatagagctcttgtgcagctgggaaataccattttagcatgctgcagttttgctgatcaaggcgaccagtcgtcggccatagcgttttcattgattgcctgtatgtaagcgaaatctgccctcatccaatggaagctagtttcggggcccgaacaatagatcaaagcaattttttg

SEQ ID NO: 389875 - DNA, 472 bp, Oryza sativa
tgccttacgtgacgttcctggacatcagcagcggcaccatgatcggggcgcgcgcgctggaggcgttcggcaagaactgcaagtcgctggtggggctccggcgggtgatgcacccgacggacgtcgccggcaaggcgtgccagcgcgacgaggcgcgcgccatcgcctgcaccatgccgaggctccggcacctggagatgggctacatggtgatcgcgacggatgcggtgctcgacatcctcgcgcggtgccgcgacctccggttcctcgacctccgcggctgctgggccgtcgacgacaagttcctgcaggagaggcacccggggctgagggtgctcggccccggcgtcgacgactggcttcgagaacagctaccttggaggagtgctccgactactccgacgactccttcatctactcgtgggagctcatggaggacgacgacgacgactactacgccgtcgggagcgac

SEQ ID NO: 389876 - DNA, 530 bp, Oryza sativa
  unsure (1)..(530): unsure at all n locations
cccacgcgtccgcccaaccatctcttcgcagatccacctgctccgccgccgccgccgccgccggcctcctccgacccgcgcgtctcagccgtcgaggatgacagaggcaccatttgtgccacgtgagaagctgtttaagcaacagcaatattttcagaatttaaccaagcacacctacctgaaggggcgttacgatgtgatcacatctgttgccattccccttgcgctggctggcaccagcttgttcatgattggccgtggagtttacaacatgtcccacggtattgggaaaaaagagtaggcggttcagtatctcaacttggcatggaagtggtaccatccaggctacattgtctttggttgcaaaataatactgtcaatctgagcacattttggttcgctttgttgttatttgtttatatctgatgtcagcaaattgatgctaacttatcagaaatgtgagaacattggcatcgttgcatttccccatttaattgcatgttcctgctttgtgttttcaaaaaaaaaan

SEQ ID NO: 389877 - DNA, 457 bp, Oryza sativa
cccccacgcgtccgcccacgcgtccgcccacgcgtccgcatcgacccacctcaaattaagtatggccatcaagtgtcattgaaggatcagacatgtacatgggtctgggacgaagttaataataatccattgatggcagctaacaataaggtaaaggctttgttgtcacatcaccaattcagcatactaaaaattccagtcactaacccctctgatgacctctctgatggcagtaagcttccatttgaagctatctttgtgtcctgcaaggacagttcgcacaaaccaactattctagtccttcatggtggcccacactcagtatctgtatcaagctattcgaaaacatcggcgttcctcgcatcacttggatttaacctacttattgtaaattatcgagggacaccgggttttggagaggaggctttgcagtcacttcctggaaaggttggatctc

SEQ ID NO: 389878 - DNA, 590 bp, Oryza sativa
ccacgcgtccgcacagatcatccctcctgcagtaagcaacatgcagttcttcaatatagacttgtagagaaggagcagccagatggcatgatgtcaaagcaagtgaggccttatctgatggatcttggtagtaccaatggaactttcattaatgagaatcgtattgagcccagccgttattatgaactctttgaaaaggataccattaagtttggcaatagtagccgggagtatgttttgcttcatgaaaactcgaaagattgaggattgaaattgctggaaactttgctccattgttacctgagattttgacgtccctctgctgcttgttgtttgtactatggtttcagtcgcctgaatatttttcaagaatgcctgaaggaacatggcagaggccggtaatcttccgttacatttataggattctagagcctagactttgtttattatccagtggttgatctagtaccgctactgacttcatgggtttgtcaaatacagtgtcatattgtcactgccatatcataattataatctgcaatttgtgactagtgaaatgttggcactctaatctatttgaaatctgagaa

SEQ ID NO: 389879 - DNA, 415 bp, Oryza sativa
ctcgtattcctctcctctctctcggtcctctctcgtttttctctcctctctctcggtcttctgtttcgctcactcccctctctctatcggagcggcggagagaggcggcaggcagcggcgcaagaggggaggcggctggcgacgggtggcggcggcaggtggagacggtgcggcccagcggcgggaggcggcatcagcggcgatggtggcgccctcccctccacggcagcagcgtgcggcggcttcggcagcgtgtggcgggaggagtggcagccgcccggaggcgccatcccttcgccagatccgacgggaggaagggcttcagagccgcgccgccaccaaatgcgccggttgccttgatgctgtccctgccgccggcccgcgtcgagctcgtccacaagcccgacaaccacgc

SEQ ID NO: 389880 - DNA, 958 bp, Oryza sativa
ccacgcgtccgcggacgcgtgggtcctgacggatctttcgatctaatgacatacagacttagcacccaggtaaaaccacttatctgggtggaagcacaaattgagaaacattcaagaagccgaatagaacttatggtgaaagcaagaagtcagtttaaggaaaggagcacagcaacaaatgttgaaattgaagtgcctgttccttcagatgctacgaaccctaatataagaacttcaatgggctctgctgcatatgcacctgagagagatgcaatggtctggaaagtaaaatcatttcctggtggcaaggattacatgtgcagagctgaatttagtcttccaagtataactgcagaagaagcagctcctgaaaagaaggcaccaatacgagtgaaatttgagataccatatttcactgtgtcgggtattcaggttcgctatctgaagatcattgaaaagagtgggtaccaggcgcttccttgggttagatacattacaatggctggtgaatacgaactgagacttatatgagttatctctgatatggctgctcaaagattttgatgctaaatttcaactcccaagatacatgtttgatgctcgatatacaacatatagttggcattgggacgttgccatggaagtctttgaaaagctcaaccatgcaaggtttttctgtctcgttgttcatcttgttagtgttactttaccatggttactgtaagttacccatcaagtatagctttgaaaaaaactttttttttgttcacttgcatcattattgatttatttttgtgggggtcgaactttcccccttttggtctacccaaaaatcttgagctgacttgggataaatgaaatacctgggcggtgcttttgaagtcccgattaaaactgctgaacctgtagaactatttttaaggcatgctttctgttgtgtaaaaaaaaaaaaaaaaaa

SEQ ID NO: 389881 - DNA, 915 bp, Oryza sativa
cgcatttgtcgcagaatagcaagttcgacttccacaaatacatcaagaggtcattagaggacgatttcaaagttgtcgttggcatcagcctcccattgtggtttgtcgcgatccttgtgctcttccttgatatccaagggttcggcacgcttatctggatctcttttgttccactcgtcgtaagtgcgaattatatatatttcttgacttcttgtgcaaatgaatagtcaacagaatcatgattttatcctacaaggtatgcaaaacatttgacaaaaaaaatgcatgccgttgtctttagatcctcatgttggttgggacaaagctggagatggttatcatggagatggcacaggagatacaggacagggcaactgtgatcaagggagcaccggtcgttgaaccaagcaacaagtacttctggtttaaccggcctgattgggtcttgttcttcatacacttgatactgttccagaacgcatttcagatggcacatttcgtgtggactctggcaacccctggcctgaagaaatgcttccatgaaaacatgggcttgagtatcatgaaagttgtagtggggatattcattcagttcctatgcagctacagcaccttccctctctacgcactcgtcacacagatgggatcaaacatgaagaagaccatcttcgaggagcagacgatgaaggccctgatgaactggaggaagacggcgagggagaagaagaagctccgggacgccgacgagttcctagcacagatgagcggcgacacgacgccgagccgcggctcgtcgccggtgcacctgctgcacaagcaaagggtgaggtcggaagatccgccgagcgcaccggcatcgccggggttcgccggagaggccagggacatgtacccggtgcccgtggcgccggtgga

SEQ ID NO: 389882 - DNA, 578 bp, Oryza sativa
  unsure (1)..(578): unsure at all n locations
gcctccntcccctngccgccgccgccgccgcctccaaaccctacctncccggaaaacctagccccgcgcctcctcctcccctctcctccccgccgccgtttccctctctctcccgcctcttctccaccaccccctcctcctcaggtgattccagcatggtggtggtcggatcggcggagtccttcaccagcatcatgtccaaggtggaagcggagaagcttccggccgtgttctactacacggcggtatggtgcgggccttgtagagcgatggcacccgtgatttcaaaactgagcagccggtaccccaagatacctatctacaaagttgacattgacatggatggggttggaagcaaactaagtgatctaaaaatattctctgggccaacattccatttctactaccaaggtcggaagacaggtgaggtggttcggtgctaatgcgacaaaacttgaatcaaccatggaaagtcttcaacaagcacctataggaaggttttgtgggagaatatgacccggaggtggccagatgtcttcatgtgcctttcatcaacgtgtttgacattgatatttctg

SEQ ID NO: 389883 - DNA, 1034 bp, Oryza sativa
  unsure (1)..(1034): unsure at all n locations
cacgttttggccatggatctgcaaagcttgctcgtcaagctcagagcaaagagaaaactcttgctaagatggaacgaggtgggctcactgagaaggttgtcagggacaaggtactggtgttccgctttacagatgttggcaaacttccaccaccagtgctgcagtttgttgaagtctcattcgggtataccccagataacctcatctacaagaatctcgactttggtgttgatcttgactctagaatcgcactggttggccccaatggtgcgggcaagagtactcttctgaagctcatgacaggtgacctagctccattagatggtatggtcaggcgccacaaccaccttcgaattgcgcagtatcatcagcatctcgcagagaagctggacctggacatgccggccctacagtacatgatgagggaataccctgggaatgaggaggagaagatgagggctgcaattggtaagtttggcctgtctgggaaggcgcaggtgatgccaatgaggaatctctctgatgggcagaggagccgcgtcatctttgcgtggctggcttacaggcagcctcaactgctgctgcttgacgagccgacgaaccatctggacattgagaccatcgattctctggctgaggcactgaacgagtgggacggtggtttggtcctggtgagtcatgacttcaggcttatcaaccaggttgctcaagagatttgggtgtgcgagaagcaggcggtgaccaggtgggaaggtgatatcatggacttcaaggagcacttgaggagcagggctggtctctctgactagttctatctgcccttcgtttttatcttcctctcttgacagctcctcggaggtttattataatagccaaaccaagttttgtcttgtatcttggagtctaatttatttgtagtagcctgctatcttaattatcactattgcacttggagagttataagagattatatatttttttcttttaagtttggcgtctnnnnnnnnnnnnnnnnnnnnnnnnnnnnnnnnnnn

SEQ ID NO: 389884 - DNA, 710 bp, Oryza sativa
ccacgcgtccggtctcgtcaaggggcttgctggtatcgacaccaattccactgggacctcaaaggctcccgacgaagatggcgactatgctgagctctacatgtggaagtggacaacgcttctcatcccaccgacgaccatcttgatcattaacctggtcggtgttgttgctggtatctcatacgcgatcaacagcggctaccaatcatggggaccgctctttggcaagctcttctttgccttctgggtgattgtccacttgtaccccttcctcaagggtcttatgggtcggcaaaaccgcactccgaccatcgttgttgtttgggcaatccttctggcttcgatcttctcattgctgtgggttcgcatcgatccattcaccacccgtgtcaccggcccagatacccaaacatgtggcatcaactgctaagaaagcaggggattgtagagacagaaatactgccagttgtgttttttcagaatacaaagtgccactgccaccaattgtgttttaagttattaggaggtggctttatttacagctacgtacagaccagaaaatattgctcatcagaaagttacttgggtcgatatggattcttttgttgataagttatatactattttgatgagagtggctgacactgtcaacgagttttgtatcttatgaaggacacaataaactattagtttgcattctttaaatttcc

SEQ ID NO: 389885 - DNA, 1073 bp, Oryza sativa
ctttggtgtcgagagaagtcaaatcacaaccacttcaagagaaaaaggccccaggaaagaagccacctgctggtgctcctgctcctgcacctgttccagctgttgatgcttatcagaagattctctcgtccattcctgagttctccgggtttggaaggctcttcaagtcctcagaacctgtggagctgacagaggcggagactgaatatgcgattaatgtggttaagcacatatacagtagccatgttgtgttgcagtacaactgtacaaacactatacccgaacaactgctagaaaatgtgactgtttatgttgatgccactgatgctgaggaattttcagaagtttgttcaaagccacttagaagtttgccttatgattcacctgggcaaatttttgttgcttttgaaaagccagaacatgttcctgctactgggaaattttcaaatgtgctgaagtttattgttaaagaggttgacacatctacaggggaagttgatgaggatggtgtggaggatgaataccagatcgaagacctggaaattgtttcggctgattacatgctgagggttgcagtctccaacttcaggaatgcctgggaaaatatggacccagaaagtgagcgtgtcgatgagtatggacttggtgttagagagagcttggctgaggctgtgagtgctgtcattagtatccttggtatgcagccttgtgagggcactgaggttgtaccaaagaatgcaagatcgcacacttgcctgctgtctggtgtgttcatcggcgacgccaaggttcttgtcaggctatcgtttggactgagcgggcccaaggaagtggcgatgaagcttgccgtcaggtcagatgatcccgaagtcagtgacaagatccacgagattgttgccagcggctaaagcggggcgccctgcccctgatataaaatgatgtagagccggtagatagtctttttcacctttcgtgataaaatagttatactacacctattgatgcctcactttttacagataacactcctgcctcgtgcgtattattgctcaggtagtgtattagtgtatcca

SEQ ID NO: 389886 - DNA, 628 bp, Oryza sativa
  unsure (1)..(628): unsure at all n locations
ccgacacaaacccaaagctaagcttcgagctcccccattgatcagtgagctagctagtagctggttggttaaaaggcctttttgttttgtttgagttggagcagaggagaagaatggcggctctgcttgtggtcgtgttggttgccatgtcggccatggtggcgacggccaactttaaccaggagttcgacatcacctggggcgatggccgtggcaagatcctcgaggatggccagctgctgacgctcacgctggacaggacgtccggctcagggttccagtccaagcacgagtacctctacggcaagatcgacatgcagctcaagctcgtccccggcaactccgccggcaccgtcaccgcctactacttgtcgtcgcaggggccgacgcatgatgagatcgacttcgagttcctggggaatgtgaccggggagccgtacacgctgcacaccaacgtgttcacgcaggggcagggccagcgcgagatgcagttccgcctctggtacgaccccaccaaggacttccacacctactccatcctctggaaccccaagcacatcatattcatggtggacgacatgccgatcagggacttcaggaacctggnaggggaaggggatcgcgtccc

SEQ ID NO: 389887 - DNA, 669 bp, Oryza sativa
  unsure (1)..(669): unsure at all n locations
aatccacactgatcccagtagctctcattgtcctcacgcttcgactcgcttgctagatctttgggttcttgtgtgttgtgatcgcgcgatgaggacggtggcgcttggcattgtggcgatggcctgcctggtggccattgcgcatggaggcaacttcttccaggacgcggaggtgtcgtgggggcagggccgcggcaagatcgtcgatggtggccgtgggctcgacctcacgcttgacaggagctccggctctgggttccagtccaagagcgagtacctcttcggcaagatcgacatgcagatcaagctcgtccccggcaactccgccggcaccgtcaccaccttctacttgtcgtcgcagggttcgacccacgatgagatcgacttcgagttcctggggacgtgaccggcgagccgtacacgctgcacaccaacgtgttcacgcaggggcaggggcagcgcgagcagcagttccgcctctggttcgaccccacccagtccttccacacctactccatcatctggaacccacagcacgtcatattcgcggtggacgggacaccgatcagggctttcaagaaccacgaggcccgtggcgtggcgttccccaagagccagccgatgncggtgtacgcgagcctgtggaacgcggacgactgggcgacgcan

SEQ ID NO: 389888 - DNA, 1019 bp, Oryza sativa
cgattacttgagcctcgacggcgacgaccccacgccggcggcggagatgaacgcgtgccggctagccggggacatgacccacctcctcagcgtggtggtgctcctcctcaagatccacaccatcaagtcctgcgcaggcatatctctaaagacccaggagctatatgcacttgtgtttgctgctcgttacttggacctgttcattcattttatatctctgtataacactgtcatgaagttggtctttctggcaagttctttctcaatagtttggtacatgaggcggcataagattgtccgaagaacctatgacaaggatcatgacacctttcgtcatcacttcttagtgttgccatgtttggctctggccctccttattaatgagaggtttacttttagagaggttatgtgggcattctccatatatttagaagctggaccatgtctacctcaacttgtgttgctacagcgcacgaggaatattgacaacctgactggccaatatgtcttctttctaggtgcataccgtgtgctgtatatccttaactggatctaccgatacttcactgagccccatttcgttcattggataagctgggttgcgggcatcgtgcagactctcttgtatgctgacttcttctactattacataatgagctggaagaacaatgtgaagctggagctaccagcctgagctcatttttcatccaagataggctaggtaaaacttgttaaatagatagaaaggcatgatacaccaaggccactgctccaggttatgatatatgcatcttggtttcctgctctatcctcttgtttatttcttttcctatttgtcggatgagaggaaatccaagggtcaccttgtatcttgttagacaattaagcacagagagatgagtaccaggacgttctgagttatgataggttttgagacacaatggaaatgctatcttttagtgtacaatgtggtatgatccttcagcttggaagaataaagtattctgtgttctgtcttc

SEQ ID NO: 389889 - DNA, 711 bp, Oryza sativa
ccacgcgtccgctttgggttagcatatgtggtataccgtcaccagataataaatgtgtacaaccaagaatatgaaagtgcagcagcattttggccaagtgttcatggacgcataattgtagcattaatcgtatcacagctgcttctccttggattactaagcacaaaaggtgctggccagtcaacaccggtgctccttgttctccctgttgtaaccttttatttctataaatactgcaagaatcgctatgagcctgcttttgtggaatatccattacaggatgcaatgcggaaggataccctagaacgcgcaagagagccagggttcgacctcaaaggatacctgatgaatgcctacatccacccggtgttcaaaggcgacgaggacgacgagaagttctccatctccgacgaaccagaggcggagcaggttctcgtggcgacaaagcgccagtccagacggaacaccccagttccgagtaaatacaatgactctgaatcaccttcccttgctgaaattgtaaatgatcaacggctataaatataatagaggtgatggctagtaggtttgtagtttcgacatgtacattaagtaaaagagcaccaataatggttttgaggatcggttttgtttacagcaaggagcaatggcagaatatatatatataccaatgggctcccgatgttgctttgctgtaaaaacaaccaaaaa

SEQ ID NO: 389890 - DNA, 380 bp, Oryza sativa
  unsure (1)..(380): unsure at all n locations
cttgacgcgcgtctccaggncgacgaggcccagcggactccggactccaccatgaccgtcaacgcctccgggacaacttcgccgccaagggcttcgacaccgagcagctggtcatcctctccggcgcgcactccatcggccagggccactgctcctccttcaccggccgcctctccgagccgccgcagcagatcaccccggcgtaccgcgacctcctcaactacaagtgctcccaggccgccaacccggacgtcgtcaacaacgtccgcgacgaggacgcctccgtcgtcgccaggttcatgccgggcttcggcagccgcgtccgcaagatcagcgacttcctcgacaacacctactagcacaacaacctcgccaagatc

SEQ ID NO: 389891 - DNA, 606 bp, Oryza sativa
ccacgcgtccgccaacatccccttcaacaccgtcgtaccagtttatggggtacatgccgggtgccctgggtccaagggctggcttctctccgatgcagcaacaagctccacggccacctttcattcagcagcctgcgctgcagttcgacgggggctctttccctccaggaccttctctcccaccggatttcagactccagttgccccctcatgcactctcaaggcaaccagatgaaacaaccggtgctcaatcagctccgccagtctccgcgagtgcagctgcaactccaaccacagacagcaaggaagcatcaaagactgtagaatcaaattcagatctaaacacctcgaactgacttggtgaactgaaaattcttccgaaatgactcaatgtcagcccaacatggtgccatggtggtctgtaacagggctccaagcactcatttcttgactgaaaaaaacgcaccaaaagaattgttctttcattatttcatattcttttccaattttcacaatgcatttcttcggtgaatccattgtatggcccaactgaacttcacgaaaaaaaatctgtaattttccataatatcaaaaaaaaaaaaaaaa

SEQ ID NO: 389892 - DNA, 560 bp, Oryza sativa
  unsure (1)..(560): unsure at all n locations
ctgcatccatgccggtggccgtgccgtgctggatgagctggagaagaacttggagttgactgactggcacatggagccatctaggatgacactgtaccggtttggcaacacatcgagcagctcactctggtatgagctggcgtacaccgaggcgaaggggaggatcaggaagcgggacaggatctggcagattgcatttggatctggtttcaagtgcaacagcgcagtctggaaggcgctgcaaacagtgaatccagcgaaggagaagaacccctggatggatgagattgacaacttcccggttggaggtccaaagatatcaaaggttggaaatgcatgacatgaaatgcccttgtttgtctcaagagtagtaaaaaagtatggtgggttgagtggcattgtgcattggcattggtagggccggaagttcatcttcagggttctaaatccatttgcaattgtntcagaagttcttgttnttcagtgtagcatctgtgaggggacttaaaaagaaactgtactgattaattaggagaaaaagggggttttactaaggtgct

SEQ ID NO: 389893 - DNA, 461 bp, Oryza sativa
ccacgcgtccggcttctgatacgggcactgatgcacagcaacacactattcagagagttttccctgatatcaatgaggagagttcctgagctaccagtaggaccacacaagttgcttgccatcctggctgaaccattgaaacaaaaagaaaatttaatttcactcgaagatcctgaggtatctgataatttacgggagtttgaagattggcatgaatattactccctggatgctacttaccggagttggcttaaatttgagatggagaatgcgtctatttctcctgaaatgctttcagcagaagaaaagagtcaagctgttgctgcagcgaaagaaacgctggagttagcattcttattattatacagggaagatattccatggttaaatgctgtcgagagtagtccaatcgagccctcagaacatgtttttcttgagttacatgcaactgcaatactctg

SEQ ID NO: 389894 - DNA, 850 bp, Oryza sativa
tcagggagcgcgtgggggccgtaggggccgtctgctcctccggatcgtggggcgatgagcatgcattcttcaagagggatgagaatgagataagtccgtactcatggaatatcacagggacatataaaggaagttggaactttgctggttccacaaatggttcttctaggtttcttgagtttacaaaattgaagggcgatgcggttttggaactattaagtacaccgacaaagataagcggggtgcactatgttcagggatctgttacattccatgatgttctagacaatgctcatgatcgtggagttgctcagataaggttagaaggcgtggacatatggccttttcggcaacttcggatggttgcaaacagtggtgcagatggcgagccacttcaagaagaggattacttcttatcaaatccatatcatttgctgcggattttctcctctcaagtgttccaagaaacctctgaagagaagaaccggaggaagaattctcttacttacgacatggagaagcattgtagcgtccaaatagctgctaaggtggtccgtgtgtcctctaacctaaatgagggagagcatgagaaataccgtttggagggattgatggagagtacagcagtggatgatgatggagagtgtttctcaccgatcttattaaatgcaacatcattgaatgttgaagtttattacaacaaagcagtcaattatacactgatggtcacttttatctccttcctccaagttttgttactgattagacaaatggaacatagcaacacccaatctggagctgcccaggtttcaattctaatgatagggcaacaagctatcatggatgctta

SEQ ID NO: 389895 - DNA, 303 bp, Oryza sativa
  unsure (1)..(303): unsure at all n locations
aaagctcgccgtgatgaacttcaatcgcctccgctggaatcttttcaatggcagcagttgaaacagggtggatagtttatcatagtaccactactgagcatcgcatgaacttttccttggtctagtatctgaacattattttagatcggcaacattcgttttgttaatgtagtgtcatcagcagacccctgttgaacttgagtatcatgttagcttcaggaatttactcatttggcccatgatagttaatagtaagcactaaatcagtaaagaagaattatgtgtatctnnnnnnnnnnnnnn

SEQ ID NO: 389896 - DNA, 603 bp, Oryza sativa
  unsure (1)..(603): unsure at all n locations
ccacgcgtccgcccacgcgtccgcgaattcttcctctcctacagtagtagagatttttccaggcagctataggtttgatcaccatgaaggagaaactgaaggcgaggtttcagatcatcgccgtcttgctcgccttcgccatggtagctcaagctatggcgattcgcggcacgggtacgacggcggagcaggataacaccggagggagcacgagtgcgaaacataccctgcctcaggctgttggaagtggcacctctgtggacaaccaccatgccatccctcgtgatcagtacagcaaccatgggggtgatgatggaggtggcagtactggtactggtgatacaaacaactagtgagttgatgatcatggatgtgtggagattaatttctgagcttgatgtgaggggagatttaaatatatatgttgtgttaattaaggtactaagtactggttgggatgtgttttgatatcagtagccctaatcctgagaataagctgcttctcttcatggggatagaggagagcttctaaatatcaatgtatgcaatanttctggtgtgtgccataagctgtttactcttatgacaaattaataaaatcta

SEQ ID NO: 389897 - DNA, 1321 bp, Oryza sativa
  unsure (1)..(1321): unsure at all n locations
ctggccgcctccccggcccgtaccggaacggcatggccgacccgccccacgcgtccgttatgacggaactatcatgacgatctcgaaggacagagttaagccttctcccttgccagacagctggaagctgaaggaaatcttcgctaccggtattgtgcttggaagctaccttgctctgatgaccgttattttcttctgggccatgcacaagacagactttttcacggacaaattcggtgtcagatcaatcaggaacagtgaacatgagatgatgtctgcactgtacctccaagtcagtattgtgagtcaggccctcatcttcgtcacccgttctcgcagctggtccttcatcgaacgccctggtcttctcttggtcactgcattcatgcttgcacaactggttgcgacattcctcgctgtctatgccaactggggctttgccaggatcaagggcattggctggggctgggctggcgttatctggctttacagcattgtgttctacttccctcttgacatcttcaagttcttcatccgctttgtgctgagtggaagggcctgggacaacctccttgagaacaagattgcattcaccaccaagaaggattacggtagggaggagagggaggcacaatgggccaccgcacaaagaacacttcacggccttcagccaccggaggtcgcctccaacacgctcttcaacgacaagagcagctaccgcgagctctctgagatcgctgagcaagccaagagacgagctgagatcgcgaggctgagagagctgaacactctcaagggccacgtcgaatcggtggtgaagctgaaggggctggacatcgacacgatccagcagaactacacagtgtgaggaaccccctcggcattcaacgagagatcgtcatcagcgctggagcgggaattgcaaacggcgctctggttaaaggaaattttcgatgaatgattggaagaacaaaaaacaaaaaaacatggctgatctgaacagccctagttgtaaagtgctaccaaatatatggtccggtttccctcttctagagaggttttacgttctagtggagtaccgtacgtacgtgttggagtacgacgacgtgttgtgatcgtttttggtctttttttactcttttccccctaactagcggtcttcttgcggaatgcaagatggagaaataatggatgaaaaattttctgccacgttaattctcactttggcaaatgggtctgcttcaattnnnnnnnnnnnnnnnnnnnnnnnnnnnnnnnnnnnnnnnnnnnnnnnnnnnnnnnnnnnnnnnnnnnnnnnnnn

SEQ ID NO: 389898 - DNA, 597 bp, Oryza sativa
cactagcagatgcatcttccagaggatgaagaactataccatttatgcagtttccatcaccatccgtatagtgcttggatttttgcttattgctctgatctggaaatacgacttctcacccttcatggtccttatcattgccatcctgaatgacggtactatcatgacgatctcgaaggacagagttaagccttctcccttgccagacagctggaagctgaaggaaatcttcgctaccggtattgtgcttggaagctaccttgctctgatgaccgttattttcttctgggccatgcacaagacagactttttcacggacaaattcggtgtcagatcaatcaggaacagtgaacatgagatgatgtctgcactgtacctccaagtcagtattgtgagtcaggccctcatcttcgtcacccgttctcgcagctggtccttcatcgaacgccctggtcttctcttggtcactgcattcatgcttgcacaactggttgcgacattcctcgctgtctatgccaactggggctctgccaggatcaagggcattggctggggctgggctggcgttatctggctttacagcattgtgttctactt

SEQ ID NO: 389899 - DNA, 653 bp, Oryza sativa
ttccgggtcgacccacgcggccggcgccgccgtgcctcctcctccggtgagacgcgccaccaccgggactcttcctccggcgagaaggataagcccttctcctctttcccctcctctcatcctcctagggttcccgttctcctcctctagggttttcgcctccgttcggtctcatctctcgcatcgcaggcacagaaacgcggcggtgacgcagcggcgcctcggcagcacgggcgcacagcaccggcggaggaccggggggagatccaaggtggcgcgacgcaccggcggaggaggcgttgaggcgcagatccaagttttggggatcaacaagtgacaagagtaaagattaagaccagttgcaccgagatgattatttgaaaattccaaggattatatcttttccacttaacctttgcttacatgtgtgtctatttgtgtgccaactgttaatgattgcacattagttgttgaaaagacatcacactaatgttttagcttgctttatctgtcattttaatgtatgcctatgtaaaatattccaatcatccaaggttcaatttttgtaatttttcatattttgtattagctgaatgttgaatttttcaaattatttgtgaattttctggatttttaccaaaaaaaaaaaaaaa

SEQ ID NO: 389900 - DNA, 593 bp, Oryza sativa
ccacgcgtccgcggacgcgtgggcagcaatgatgttggcacctctggcgcaaaggacagtggaaatcaccaagatcatgtagtgctaccagatggagctgagtcagatgcgatgcatcctgaagcaactgatgcagcagatactagaactgattttgattcacacatgccatctgacaaacaggttaacaatgttgaaggagtaactgaacaattaactgataatgagaaagaaactgcagttgttgagaaagcaaccactaatatgggtgacagtgctcaagttgattcacttgataaggaatatcttcaagatgttccagctgatctgcagaggagcacaaatacaaatacacctctgtttgtgctagatgacatgcctggtccagatgtggttctggatagctctgatccagtttctgcacaagcagtggatgatatgaaaggggggtggtgggacattgtccatgacaatgtcaatgcatttgacaataaggatatgccgacttctgagattaccgtactggaatttactcaaaacgctttggttttctcagcaacaagatgaaaatgttgtcgatggggaaatctgat

SEQ ID NO: 389901 - DNA, 565 bp, Oryza sativa
  unsure (1)..(565): unsure at all n locations
tcgaccgcacgcgtccgcccacgcgtccgctcgtcggcacgctccaggccgtcgtcgagaccttcgccatggagcggcgccgcccctccgtctgggccatcggcttcgacatgaacctcctcgccgccgcctacgccggcatcgtgacgtccagcatcgcgtactacgtgcagggcttggtgatccagaggacggggccggtgttcgcgtcggcgttcagcccgctgatgatgatcatcgtcgccgtcatgggctccttcatcctctccgagcagatctacctcggcggcgtcgtcggcgccgcgctcatcgtcgtcggcctctactccgtgctctggggcaagcacaaggagacccaggagaagcaggctgacaccaagctatcactgcccacttccaaaggcgccgccgccgctgcggagggcggagggatcaccggcgccgtagaagacgacggcgacggcgtcgatgtcgcggagcgcagcaagaaccaccgtntcgagggtggcgtgggtcatcatcggactccaatggacatggaactaagggcggttgatggacacct

SEQ ID NO: 389902 - DNA, 824 bp, Oryza sativa
ccacgcgtccgcggacgcgtgggctgaaaatgagcctttgttatcttctgaaggtgataaaaatgtttctacttctctaggatcgaagataatgggcattgttagaagcatggttaagttcctaaaagacaagcagcttcttcagccaccaattattgcctctgtttttgcaattgccattggtgttgttccagtcttgaagaattttgtcctcactgatgatgcacctctgttcttcttcacagacagctgtctcattctaggggaagcaatgatcccttgcattttgcttgcagtggggggcaatcttgtcgatggtcctggtgaaggaagtaacaggcttggtgtgcggacaaccgttgctattatttttgcacggctcatcttggttcctcttgctggggttggcatcattgtgttggttgataaacttggtttcattcctaaagatgacaaaatgttcaagtttgtcttgctactgcagcattctatgcccacatctgtgctgtcaggtgctgttgcaaacctgaggggctgtggaaaagaatctgctgctatcttgttctgggtgcacatctttgctgtgttctccatggcaggatggattattttgtatttgagcttactcttctaagtacgtcataccctgatgctatactgcacaggaacgtccataagatcaaaatatcaccagatttaccagaaaaggattgttccatgacatgtacattagccagttaaccatggcgacagcctgaaggtactagtcgtatcagttttcaatttagatatggttctcttgccctagtgcccaatcgcttaag

SEQ ID NO: 389903 - DNA, 555 bp, Oryza sativa
ccacgcgtccgcggacgcgtgggcggcctacctagatcgggagaatggctgacagctccgccgcctcccccattccggtggcctattcatccggtgatcctccgtctgcgacgccggtgcccgttccaggcagtgatcttccagctgctccggccgccaagtctcaagaagcctctccagctgttccggtgatcgatcctagcaaagaggagcgtatgggttctgggcatccacttcccgggggtaaagattaaatacactgggcacagggacgtgttaaaaccgttctcctacatcgaatgtccggaactgccttacgtgtactgtgcaccgtgagattgtgatgttgtttcagataatttcagacactatgatcagggaataaatccccactggcgttaggctagttactgctagggataatgcagatcaggctgtgcaattgtagacaattgtcttgtatcaataaagtgcagccagttggtgccaaagtatacctctctacatgcctcagatggttcagcacttcttctgtattgattttatgtgatatct

SEQ ID NO: 389904 - DNA, 685 bp, Oryza sativa
ccacgcgtccggaaagtgtatgcctacattcacaaaaatgggtataaaacaaagttgatggctgctgccatacgcaacaagcaagatgtgtttagcctcctggggattgactacatcattgcacctctgaagatattgcagtctttggaagaatctgtcactgatactgacgtgaagtatggttatgtcccaaggctgactcctgctcttggcaaaacgtacaacttcactgaagaggagcttgtgaagtgggaccaattgagtctagcagctgcaatggggccagctgcggaagaactacttgcttctgggttggaaggatatgtgaaccaagccccccgagtggaggaactcttcgggaagttctggcctcctccgaatgtttgaacacattctatgatgagggccaggccatgccccagtcttctattccaaagaataatagccccagccccggacagtgctggccagcatttgctcgttcccttcaaagaatacttctcttagccctgtctgggttgggactttgtagttctctagctatctagcaaatctcccgatggcatgtcaagaacatctttgttttcttttcgcaaagattggatacggattttctcgagtatttcattagcccgtgagatgtgtaccatgaaatgtcacccaaatgctctgttggattgttttt

SEQ ID NO: 389905 - DNA, 469 bp, Oryza sativa
gatggacctgaggggcggccacttccagctcgtcccgttcggcaccgggcggcgcgtgtgccccgggatgcagttcgcgctcgccaccgtcgagctcgcgctggccagcctggtccgcctcttcgactgggagatcccgccgcccggggagctcgacatgtccgacgacccgggattcaccgtgcggcggcggatccctctccggctcgtcgccaagccggtcgggtcagaagacgacaagtagccgaatagtgtgatctgtgtggtttttttttttttgtctgggagacgggagaccgcgtggactgtgttaatttaggaataaataaataatgggccgaatcgcgcgtgttaatcgctgggagctttttgtccagcccatcttggttctagtttgcaagttcatgtgtgtgcagtaattttggcaggaataagttcatcagagctccctttaaataaaaaaaacaca

SEQ ID NO: 389906 - DNA, 485 bp, Oryza sativa
ccacgcgtccgcgaagtgagcaatcactcttgtgaaacttttgcagacgccagccatggcgatcaggggcatcccgtcctctcgcgagatgaccgtggacgacttcaagaactggctgaagcagttcgacaccgacaacgacggccggataagccggggcgagctccgggaggccatccgccgccgcggcggctgcgttctccggcctgaaagccggccgcgccgtccgccacgccgacagggacaacagcggcttcgtggacgagtccgagatcgagaacctcgtcgccttcgcccagaaaactctgggcatgaaggttactgcctggtagaactgaacactactggcagcaataagcattattaagctagtttcatggattttcatatgctttgagcttaaaatgggtagagagcactgttggcagtagtgctagcttttggattaagctataaaaatatcgccttctaggtgcttttcaaaa

SEQ ID NO: 389907 - DNA, 704 bp, Oryza sativa
  unsure (1)..(704): unsure at all n locations
tccggaatgaccgacgcgacccacgcgtccgcaccacgcgtccggattatggaatggataagctcgttcagagcgcagcacctcagcctagtgaccagcttcctgaatccagggaggctgctcgcaagctggctttggagctacaagcattctatgagaaatcccaagcttcgagttctggtgaagttgacgacgcacctgctacctcacctgatgctgatgctgatgctggtgctgaatcatgggaagctttctgccaatcaaagctttccccattaagtgcacaggcaatccttcgtgtcacctctacgacgaaagagggtgtggctgtgggtgtcacctctacccctccgaaagaaggcgtcactgttggttgctagcatcaggaggtagtagatgcaatgaggttgtggtttttccatccgattcaccttttgctgtacatggttatggttgttctttctctacatccaatctgggattcgttcgttaagcatcggttcgagagttgaggtgtgacctgtgggtgttaatattggtgcgagatatacctgttatagttgaccgtatgatcttccttttctcccactgcttggtattgattggtcaggcgaattgtagaatttcttccactattcaatattactacacagtaatttttccnnnnnnnnnnnnnnnnnnnnnnnnnnnnnnnnnnnnnnnnn

SEQ ID NO: 389908 - DNA, 663 bp, Oryza sativa
gggtggaggagtacgggcgttcgtcgtcgccgtcgtccaacctgcagtgcttcttggactgcaccacccccgccgtcgacacgcacctcctccccaaggcgaatggccggttttcgagcgattcttggcaccacgccgagatggacagcgtcgagtacttcaacctcgcggacctatgggagcagtactatgagtggagcgcgtacggggctggaactacggtgcagctgtatggaggggaaagagtagtccaatactatgttccctacttgtcagggatacagctatataccaacaaagcccagactgcatccaggagttttggtgaagataatggcatggactattggagcgatgatgaggacaatgagaagatgtcaagatcttggagttcaacatctgaagactcattatttaactgtgatgcaataagtggcaatagaaaacgccaccggccacatgtattttgagttctttgaggtttgctctccttatggaaggattccactcattgacaagggtatgaactatcccagagctatcctggttgacatccctgagaagtgtgacctttcgcctgctagttgttgaagtgcctggatccatctaccatatcctaccacgcatgtgaagactattgatgcttctaatatatacattcct

SEQ ID NO: 389909 - DNA, 569 bp, Oryza sativa
gtttttagcagcagcagtacagtagttggctgggtgctaccactacacgagctcggcaggaaggaaggaaggaaggaaggaatcgcacggcgaacagcccgtccgggcggaggaggaggtgctcgcgatggggtccgagggatccgccggggtcgtcgtcgttcccagaaactgtagactgcttgaagagcttgagcgaggtgagaagggcattggtgatgggacagtgagctatggaatggatgatgctgatgacatatatatgcgttcctggacaggaactatcattggccctcctaatactgttcatgagggacgaatctatcagttgaagttgttctgtgatacagactatccagacagaccacctactgttcgattccagactcgaatcaatatgtcatgtgtgaatcaagaaactggaatggttgaaccaagtctattccccatgcttggtaactggcaaagagaacataccatgcaagacatcctgatcggcttaaaaaaaggaatgtctgctccttagaatcgtaggctccatcaaccccatgatggccattgagatcaaa

SEQ ID NO: 389910 - DNA, 413 bp, Oryza sativa
agggccagctcctccaagctcggctcttcctcctccttccgcggctagacgccgccgccgctggatgcatgaccgaaggcattcaagtgtagatatatcgatatcagagagggcctccggtcagctcgctgttaatgatcagctagctgttcgtttgcctgccagagctagtttatcctcggtttctggctttctgcgtcagctagcttcttgatcatcttcagcttctgtaattcctgagctatgctgcataattgtttgctcaatgtttcttccaggtgtgcttttcatgttaactttgtatgtgtctgtatgtatatatgcgagctgtgtgcatatggtaccaaaaaactgtatgcactctatatgaaaaagtacttcgatgttttcccccaaaaaaaaaaaaacccaaa

SEQ ID NO: 389911 - DNA, 577 bp, Oryza sativa
  unsure (1)..(577): unsure at all n locations
gtcgacccacgcgtncgcccacgcgtncgcccacgcgtccgagcaaggcttgtttctcataacattcgcagttgccgcctaagagctttcgccttgccaggtttgagagctaatgctgctaattccttccttggatgtctgatgcaatgcaacaccaactgtattctctttaaattattgttttgccacttctataattaatgtttactgaatgtaagtgagctgttgatggacgcctaatgatgctaaaatttctcatagcatctgcaggtactgcctaatagctttcgccctgccaggcttgagagctagtgctgttaaatccttcgttgaatgcatacccaagctcactattttgatcaacctgtgtttttaataaatataaattctaaaagttcgatgaaatgttgatttcatgtgaaacttgtctgttcgagttgtgaattcagctattgagacagtgaaaagagcagttattccacaagatccagctattgagacagtgaaaagagcagttattccacaagatcagaactagacaagaacacttccaacctgtaaaatcttattttgtact

SEQ ID NO: 389912 - DNA, 742 bp, Oryza sativa
  unsure (1)..(742): unsure at all n locations
ccagaaaaacacaacaccatcaacccccgcatccgccaccgccgccaccaccccctaactccgatttgaagcgaccagaggccgcggctaaggtccgggatgtcggggcgcaaggagacggtgctggacctggccaagttcgtcgacaagggcgtccaggtcaagctcaccggcggcaggcaagttacagggactttgaagggctatgaccagcttctaaacttggtgcttgatgaagcggttgaatttgaaagagagcaagatgatccattgaaactatcagggaaaaccagacagcttggtcttattgtctgtaggggtacagcggtgatgcttgtatcgccaaccgatggaacggacgagattgccaaccccttccaatctgatggtgcataaacctgcaggagctgatggttctcctagtcaagatccatgctctcccagtagagaggcctttgtattaactcatgtaatctggtgccacagtctcttatgactcgtgtctcttatgaacaccaggtggtggtctgttctgtaccactcgaaactgatttctgaagatccttgctttgtgtcagatatatgaatcgcattatgctcttgttcggtttgttcaaaaaaaaaaaaaaaaagggggggcccggtacccaattcnccctatagtgagtcctattacaattcactggccgtcgttttacaacgtcgtgactgggaaaaccctggcgttacccaacttaatcgc

SEQ ID NO: 389913 - DNA, 624 bp, Oryza sativa
ccacgcgtccggcgtggcgtatggcgcggcggaggttcttgacagcaagcgggcggcgccggagctgaggacaggcaactacgacgacgacaaccacgaacgcggcggcgacgacgacgacaacgacgctaccggccgggagcgtggatccgccatcgactatcctcaggagcatggctctggcggcggagaggctcccaggcggtggatctaaggtggccgggctcggcgaccttgaccacgcacggttactccccaacctctatctcttctggatctggcttggggccgaggggaggagaccggcggcggcggcaacagctgctcctccagtcccaaatctggcagcggcttctttatgcatttgatttgaatttggggagcgcttgggaactacggttgctagatgtggatttttctcaatgcactatcttcccattctattgcagatttatttgatgtagatgatttatgtattacgtaatagagatgatgtagatgctttgatttgtatgtcatgtttgatcagtggaaataagcagcaaaggaaatgctttgatttgtatgtcatgtttgaatgtttgatttgtggaaataagcaggaaaggaaaaaaaaaaaaaaaa

SEQ ID NO: 389914 - DNA, 996 bp, Oryza sativa
  unsure (1)..(996): unsure at all n locations
ggccagggacaatgttcttaagatggaggctcagcttgccaaggatgttgtgccattcaatttcctgacacctttgcggattatccgggatgctatacttgctgagggaaaccctgctcctgtagtggtctcagaaggggcaaacaccatggatgtcggcagggcagtgcttgtgcagaacgagccgaggactagactggatgcaggtacatgggggacaatgggagttggattgggattctgtgttgcagctgcagttgctgagcctgatcgccttgtggttgctgtggagggtgattctggatttggattcagtgcaatggaggttgagacattggtaaggtaccagctgcctgttgttgtaattgtcttcaacaataatggagtttatggcggtgatcggagaagccctgatgagataaccggaccgtacaaagatgatcctgccccaacctctttcgttccagctgctggttaccataaaatgatggaagcttttggaggaaaaggttatcttgttgagacaccagatgagctaaaatccgccctttcagagtcgtttcgtgccaggaagccagcggtgataaatgttatcattgatccttatgctggtgcagagagcggtagaatgcagcataagaactgaaggtgtttgtatcataccagaacgcaggtcccagttaataagcaatgtcctattgaaattaaaacggacacccatggaagaacatcttatatcactgtccctgaaataagaaagatcctgggtagtactccgtacttaatggcatgtgagatatcgaattcaagctgtctgttttgtaatgtaccgtacccgtgttaccgtgtacagtatactaaagaaaaaatgtttgtggttagtaattcactcatgatgtcgatgcatttataagtttgtacctgtatgactataaagtttatatacagtaaattgcgatgtgtctccattttgttgnnnnnnnnnnnnnnnnnnnn

SEQ ID NO: 389915 - DNA, 1037 bp, Oryza sativa
  unsure (1)..(1037): unsure at all n locations
ccacgcgtccgatttggtgggccagtggtcgttgaagctgacgcggatttgaatgcaatagctacaatacccaatgccaaagcgtacaacaatggtcttatcagacgtgtgcgctccggatccccaggtaagcaccacctctctgcctacatcttctctcttttcaacgagaacttgaagcctgggccagccacggagggacactttggcctattctacccaaaccgccagcaggtgtatgaggtcaactttcaaggtggtagaagtccctgtccaacgaatgcaagctggtgtgtggcgaacccgaatgttgataatgcggcattacacagagcgttggactgggcgtgcaataatggcgcagactgcagcgctatccagctgggcaaagcatgctatgagccgaacaccttagttgcacatgcatcttacgcattcaatgattactaccaacgcaagggccaggctagcggcacgtgcaacttcaatggtgtcgctttcatcgtctacaagccatcaccaagcatctgcgatccgaaccccaagttggtgcgttgcgaaagatagtgtcggggaagcacaactacagaatgcactagactacgcgtgcggtagttgtgccgactgcagcgccatacagcgcggtgcacagtgctttaatccggacaccaaagtggctcacgcaacctatgcattcaacgactattaccagacagccggtcgggccagtggctcgtgtgactttgccggtgccgcaaccattgtcacacaacaaccaaagattggaaactgcctactcccaccaaacaacgctggatcagaacaaactgtctaggaagaccaaaagctagcctagctagctaccaaaggcagtgaggatgggattaaagaataattccatattcttctacagagaaaataaggattaaactttttgtatttcccgttggaaattttaaataaataaatgtactgtttgctcctgttgaatgaaattccgtngttacttgtttnngnnnnnnnnnnnnnnnnnnnnn

SEQ ID NO: 389916 - DNA, 790 bp, Oryza sativa
cccacgcgtcccatatcagacaagtaaatctagcttgctgtaaacacagttagttcgtaattatcgcatagggccatggggaagtacagtgtgggtctcgtggttttagggttgctggcccttgcgttttcgaccactgtgctggctgaaacacatgttgttggtgactccaacggttgggacttctctgtgtcgtttgatagctgggctgatggaaaggtcttcgctgctggtgacactcttgttttcaactacaaaccgggcgcacacaacgtgctggccgtggacgcggcgacgtacaggagctgcaaggtgggcagctcggcggactcggtggcggcggcgacggggaccgcgtcgttcctcctcaagaagggcgtcaactactacatctgcggcgtccccggccactgcgccgccgggatgaaactccgggtcgtcgccaactgatgaaactccggcgacagatcaatcccttaattaattaaaactatgtgggtgtctctgcagcctgaagcagcatatagcttgctcggtttagggattggtcgcgtatatatagttgtaattgtagccctatgtactggagtggctgacactgggtctgtcatgctcctgcatctgcatgcgtgcatggctgcatgctatatatcagctttgtgcgttctaaataatggcccgaatgtgcacctgtgtggctgtgtggctgtttgttggaacttggaagtacttatatataatatataggtcccttctatggatggagattcacaaaataaaatttaataat

SEQ ID NO: 389917 - DNA, 521 bp, Oryza sativa
tcgacccacgcgtgcgatcaaaagcagtgtggctggtctgttccagatacggagttgcgtgagtcactaagacttgcagttgctgaaatcctgttgcctgcatacagatctttcctaaagcgctttgggcctctcatcgagaacagcaaggcacccggaaaatatgtcaagcacacaccagagcaagttgagctactgcttgccaatttgtttgaaggaaaacaagagcgtacttgattggggtatgtggctgcttaatatacaccagcgacgatgtgatgtcattctctgtaaattgggaccctggtagcattgcttttgtttgtgtagcgctgctgctcagaaccgttgctatgtgcacctttccttgctggggtgcatgatttgtatagatactgtcctagttgccatttattggttttggtgatttggtaggtgctaggttcgttctgatatgttggaaactcgtgttagtgcattcattattcagtatcagcagtgtgcaataattggtcaatgtt

SEQ ID NO: 389918 - DNA, 667 bp, Oryza sativa
ggacgttctcgagacgtccaccccgccggggcccggcgtgaagcacgtactcaaggccagcctcgacgacgacagaaacgactactacgccatcggcacctacgacggcgagaccgatacctggacgccggacaacgccgacatcgacgtcgggatcgggctccggtacgactacggcaagttctacgcgtccaagacgttctacgaccccgtcgggcggcgtcgcgtgctatgggggtggatcggcgagacgcggcagcgagcgggctgacatactcaagggctgggcctcccttcagtcaattccgaggacagttatgctggacacgaagactggcagcaacctgctccagtggccggtggtggaggtggagaacctccgtatgcgcggcaagagcttcgacggcctcgacgtctctcccggctccgtcgtgccgttggacgtcggcaaagcaacacagctggacatcgaggccgtgttcgaggtggacacttcggcagccgacggtgtcgtcacggaggctggagcagcagcatacagctgcgggcacgggcggcggtgcggttggccgtggcttgatgggccccgtcggccttctcgtgctggccgatgatcagttgtcggagcggaccgctgtcttttttacctggtaaaggaagtcgacgg

SEQ ID NO: 389919 - DNA, 674 bp, Oryza sativa
  unsure (1)..(674): unsure at all n locations
cttttcttcaggaagnagtttagtcggaatatccagctctcccttagtgttctcctttttggtgttggagttgcaactgtgactgacctgcagcttaatgctgtgggatctgtcctgtctttgctcgcaatcattacaacctgcattgctcaaatcatgacaaacacaattcagaagaaattcaaggtatcttcaacacagctgctgtaccaatcatgcccataccaagcattgaccttgttcatcgtcggccctttccttgatgggtttttgactaaccaaaatgtctttgcttttgattacacatctcaagttgtgtttttcattgtgctgtcatgcttgatatcagtctcagtgaacttcagcacttttcttgtgatcgggaaaacctctcctgtaacttaccaagtgcttggccatctcaagacatgcttggttcttgcctttggttatgttttgcttcacgatccatttagctggagaaatatacttggaatcctcattgctgtgattgggatggtatcgcactcatacttctgcacaaaagaggctccaccaaaacccactgaagcctccccacaacttcaaccaggtanangaaagcgantcggaccccttgatctcgggactctttgagcactgctgcaaaatgggggcaacggaggcgcaggacg

SEQ ID NO: 389920 - DNA, 691 bp, Oryza sativa
gagaaatagagggagaagatacaaaagatatgcatcttgctgaggagaggggtttatatttggatgatgactttgaccatgatgaagagataaaatattcagcggtgcgcagagatacagacaataccaaatttaagtcatctacaaatgtcttgagcaatacaaatcaagttgattcactcaccagggcaggcaacactaatcccaaggctttgttatcaactgcggatgaagaatcatcttcccatttatttggcactgatttgcctgtcactaacaatgttagccagttagtatctcagtcccagctgaataaacttttgcccattgatgaaagcaggttggatgacaaactgaccaaagatagcagtggtaatagggacacaagcaatttgcaaactgagaatattatatctgaaggtggcaggtcatcgatttctgaagacttggaagtgccatcttcaagctcgcacgcttctgagccttcatcatctggtcaagcaaagaaatcctcagaaagtctacctgcagattcttctttctctagaaaagttccttcttcgggggaatatgtgaattcctcccaaggacctggtagttctacatcatcaacatctgagcgcattgctgcaagctcagttgcatgtgctccaggcttgtccccgagctcttcaatgggttctcttagctt

SEQ ID NO: 389921 - DNA, 741 bp, Oryza sativa
  unsure (1)..(741): unsure at all n locations
ccgggcatcacaggatcgaggcgataccggaggagcccccgccatcggccatcctccttcgcgtcgcgcctccggatcccgagcttccagagagccgaccggttcgtcggccggtcgccggagatggaagccaatcacgcctcgcgggggcgccgcaccctggaggagatccggcagaagagagccgccgagaggatgcagcagcagcacaacccggccgccgcggcgtcccttgtcgacccttacgggaacccaggagccggagctgagcttcttggtcgagttagagaactttgaaaatgggaacataccattggagagggaaaaccaaatgctgttatccaagattgctgagaaggaagtcgagaaggattccctcgttaaccgcttgaacgaccttgagcggaatatagtaccctccttgaaaaaggctgtgaatgacatttctttggagaaagatgccgcagctgttgctaaggaggatgctctcgcacaactaaggagcatgaagaaacgactgaaggaggcagaagaggagcaatacagggcagaagaggactctgcatcattgagagcacagttaaataccctgcagcagcaagtaatgagcaactcttatactggattttccagttggtgtatcaaatgagcacattcttgctatggaaaaggaggtagaaaanttgcaggctcagctgaagcaagaatcattgctaaggcagcaggagcaacaagaaactt

SEQ ID NO: 389922 - DNA, 1194 bp, Oryza sativa
cgggcgaggagcgttcgggcgtcgctgttctcgccgaagccggcgacgcccaaggacgcgaggccggccaaggtgcaggagatgttccgtgtacgggatcaacgcagcggcgaccgcgaagagccccgcctacctccgcctcagcgccaagcagacggagaacgccctcggcgatctcgtccccttcaccaacaagctgtacagcggaagcctggacaagcggctggggatctcggcggggatctgcatcctgatccagcacgtgccggagcgcaacggcgaccgctacgaggccatctacagcttctacttcggcgactacggccacatctccgtgcagggcccgtacctgacctacgaggagtcctacctcgccgtcaccggcggctccggcgtcttcgaaggcgcctacggccaggtcaagctcaaccagatcgtcttccccttcaagatcttctacaccttctacctcaagggcatccccgacctgccgcgggagctgctctgcacgcccgtcccgccgtccccgaccgtcgagccaacgccagccgccaaggccaccgagccccacgcctgcctcaacaacttcaccaactagctcaacccgcgctgtacatcacttccaagttccaattgctactgttactactctgccaataattgatggagatgcagatcgagctgcctgattagtttagtgttaattgcggcatgtgcggtgtgtatcgtatcactgataaggaagaggaatcgaggacaagatatttgtttcctcccctgcgatgagccgatgaactgatccgaacaagaagaggcttcttggtagtaggtggattggaatatcgaaatgatatgattgtgatccgcaactacaacgaccgccactacggagagctcatgctatttgtttgtttgtttttgtactagtgctcaaatatatactccagctcatgtccatgtgtatgttttgctgctattatttttttctcctgaaaataaaatatataacaacgcgcattggcatgatgtgaaaaaataaaaaacagataataaaaaaaaaaaaaaaataaaagaaaataaaaaataaatatttaagatagaattatataatttgttatattaaaataaaaggggggggccgttttagaggtacaaaatatatcgtccggttgtatgggaagaataatttttttt

SEQ ID NO: 389923 - DNA, 716 bp, Oryza sativa
  unsure (1)..(716): unsure at all n locations
cccacgcgtgaagaaccaatccaagaagaagcgatggcatctcgtctcgttgcggcggcggcggcgtcctcctcgtcttccccgctcgcccgcctcgtctcccgccgtggcctcgccggcgctgcagatcaccatgggcctccgaaggtcaacatttggcaagaaccgatgaacccggctaactggaaggaagagcaatttgtgctagccagcttagctatgtggggaggtattttttatggtgtcggcaggctttttagtgggaagaaggaagacaaaactactgaggcggcgccagcacaggcataataggatttaccagagccttatttcatgctgcagacgtgcaactgtatgaaataaagaagaattttatggtctgttttaagtttgtatcgctaatggtaaattgtggcgactagatgggtgattttgtaagaggcgagattttgtggacctacacttgtcagccagcatgaataatctttaccgcagtggaactttggttgagaaactgcaacagcgtcttgatattttgttgtcatcacatcaattcatgttttgtaatcaatattggtgcgattgatcatgatcttgcgttatcatactcaggttgattacgttaccgtctggggagtcgaattacttccatgttctaactaaattgatttgtctattttgactgtttggattnnnnnnnnnnnnnnnnnnnnnnn

SEQ ID NO: 389924 - DNA, 692 bp, Oryza sativa
ccacgcgtgcgacctgtcagggggttattgctttgaacatggaggatggcactcttcaccgtttccgtgctacaaatacaattctggccacaggaggttatggcagagcctacttctcagcaacctcagctcacacatgcactggagatggcaacgctatggttgcacgtgctggtttaccacttcaggaccttgagtttgtgcagttccatcctacaggcatttatggtgctggatgccttatcactgaaggttcccgtggtgaaggtggtatccttaggaacagtgaaggcgagcgtttcatggaacgatatgctcctactgcaaaagatcttgcttctcgagatgttgtttcaagatctatgacaatggaaatcagagaaggccgcggtgttgggccattgaaggaccacatctatctgcatcttaaccatctgcctcccgaagttcttaaggagaggcttcctggtatttctgaaactgctgctatttttgctggtggtgatgtcaccaaggagcccattcctgtcttgcctactgtgcactataatatgggttgggatcccaacaaattaccatggagaggtagtgactatgaagggtgacaattctgattctgttgttcctggtttgatggctgcgggagaagcagcatgtgcatttgttcatggtgcatatcgtctgggtgcaaa

SEQ ID NO: 389925 - DNA, 413 bp, Oryza sativa
ccacgcgtccgcgcgccctagccaagccagccatggcgccgtcgtcgaggaaagagagggcggcggaggcgagggcgagcacctccaagccgtctcctgcgccggccccggcgccggcggtccaggtgcagcggcggccggtgggcgggggccggtggacgagccgccggatatcgttctacgcctcccgcgccttcttcctcctcatcatcctccagatcccgctcttcagggtcccttgtagagcaggcacatgcacaacgcccattcaagttacatcttcgcagttggtctcaaatgagatattcccaccatctgttgtgaaagcccttctcttccctggggctatagcaagcaaccttactaagagcatgacatttcctaggtggaatgacctgtttgatatttacaat

SEQ ID NO: 389926 - DNA, 369 bp, Oryza sativa
ccacgcgtccgcccacgcgtccgcggacgcgtgggttttttttttttttttttttttttagataacccttttacattattatttcagacggtgacaaacacctcttgctttctcagcaccttactcgtcgttgtcccctagagttgcaccgaaacacggaatgcattggcacggatcaatgcccaggcgcctagcatcatccacacaacaagaacaagaaccccacagaagcacaaacacaaaccgataccaataatgtttcagccggccgatgtcacggacagcgagacacagccaggattactatgcacgcactcagacggatagcctcttggcggcgaactcttccgccttctggaacgcgcccgg

SEQ ID NO: 389927 - DNA, 790 bp, Oryza sativa
  unsure (1)..(790): unsure at all n locations
ttttacgtgtccgattatgngtgattccagcgtgngttcgagggtggccccgtgtttatttcagaagactccaacacgcaccggcatttgtgtgagttcgttggacttgacatggaaatggcaatcaaaggccactactctgaggtttgtgatgttgtggataggctgtttgttgctatgtttgatcatctgaacaagaactgcgccaaggaacttgaggccattaacaggcagtatccgttcaaacctttgaagtacttacccaagacactgcgcattgagtatgacgaaggcatccggatgctcaaggaagctggggtccacgtggaggccatgggagacctcaacacagagtctgagaagaagctgggcgagctggttcataccaagtatgacactgatttctacatgctctgccggtacccgtcggcggtgaggccattctacaccatgccctgctccgacgacccacgctacagcaactccttcgacgtgttcgtccgaggggaggagatcatctcgggagcgcagagggtgcacgtcccggaggtcctggcacgacaggcggaggagcgggggatcgacgtcggcagcatcgccgcctacgtcgacgcgttcaggtacggcgcgccgccgcacggcgggttcggcgtcgggctggagagggtgtgatgctcttctgcggcctcggcaacatcaggaaggcttctctcttcccacgcgaccccaggaggctgaacccttgaaaacaaaaaaacacaaccaactatccaccccaaaaccaactggt

SEQ ID NO: 389928 - DNA, 430 bp, Oryza sativa
caagatttgtgcagggtcaaacctccaacgtgcagtttagccaacagttgggcatgggcaattttatcccacatcattcaaatcaaggaacattcatacccagaccaagaatcactcctctgtgtatacctaataccgaaaaaacatattttaatccaaacgctcatagcagcatccaggctgatcatgctgccacacgaattggccagtatgcacataatgagcgatctcattcacctgaagaatcatacaagcgcttttctccagataatttcctccatacagatgaagttgtggctttgatgcaacctcacttagtgcctccaagcaacagcgagaatttcagtaacctgctcaacctatcaggcaatgaccaaacctcacagcaaattgccggtccattccagccatcaggacaacaggtttgact

SEQ ID NO: 389929 - DNA, 434 bp, Oryza sativa
  unsure (1)..(434): unsure at all n locations
tcctcctctgcacttggcgcagacaaagtcgattcctttccgcctcagcggcgccgcttgtttcgatcgaagcatcgcgagaggcagcccgccgcctgggtttcgtgccgattttaatttcctttttcttggccgcctctgcctctctctctctctctctctctccctttcttggttcgattgttcctggttcttggcctgattggttgaacctgcttcttctggaatcaattaggggagaaatatttgcaggagaggggcggtggcgatggcggagttggttgggccgcgggtgtacagctgctgccattgccggaaccacgtctgcctccacgacgacatcatctccaaggcctttcaggggaggaacggccggccgtctctttttctctcatggtatgaacatatctatggggncaaaggaggacaagcag

SEQ ID NO: 389930 - DNA, 388 bp, Oryza sativa
  unsure (1)..(388): unsure at all n locations
atcatctcacctatttctactcccccgcccccgcgtcccctccgctaatcccctccggcgccgcctcctctccgctccccgcgccccccacctccggtcacgcccgatcggattggttgagttgcctcgagggatttttgctctcgaggtatggtgttcatggcggagctggtgggtccgcgggtgtacagctgctgcaactgccggaaccacgtctgcctccacgacgacatcatctccaaggcttttcaggggaggaatggccgtgccttgctgttctctcatgccatgaatgttgttgtgggcgcgaaggaggacaggcaacttatgacggngcttcacactgttgctgatatctattgcaatgattgccgggaggggttgggct

SEQ ID NO: 389931 - DNA, 689 bp, Oryza sativa
tcccgggtcgacccacgcgtccgcccacgcgtccggattgtgccacagtacaaactacctcattctccatcaggtgcacaatagaagaaactaagattctcaaagtgatggcggggatcaccggatctcgagcactcatggtggtggcgctcctctgcgctgccgcggccatgactgctgcacaagaagcatccaacgtgcgagccacgtatcattattacaacccacaacagaacaactgggacctgaacaaagtgagcgcatattgtgccacatgggatgccaacaaaccgttgtcttggcgccagaagtatggatggaccgccttctgtggacctgctggtcctaggggccgagactcgtgtggcaagtgtatccaggtgaagaaccggggaacaggtgcgacaataattgcgaggattgttgaccaatgcagcaatggtgggttggatctggactacgagaccatcttcaagaagatcgacacagatggtcgtggctaccagatgggtcacctccaggtcgattacaagttcgtcaattgttgatttggtcatgcctctttgcatgatcatatactggaataagaaatatatggtgttatacaataagatggaagaggttggcactctgtaatcatgctgaataatgaataaacgaaattacagttcaacaaaaaaaaaaaaaaa

SEQ ID NO: 389932 - DNA, 838 bp, Oryza sativa
  unsure (1)..(838): unsure at all n locations
gacgcgnccatcctacaagccgcagcccaagccgaacccgccacccacgtacaagccgcagcccaagccaaacccgccacccacgtacaagccggcgccgccaacctacaagccgcagcctaagccgaacccgccacccacgtacaagccgcagcctaagccgactcccactccctacactccacccacgtacaagccacaaccgaagccgactcccactcccactccctacactcccacgcccaagccgaacccgccgccaacctacaagccacagcccaagccgactcccacgccgacgccgtacaagccgcagcccaagccgactccttctccctacacccccaagccaactccgacgccgccgacctacacaccgacgccaacgccgccgtaccacaagccgccgccgtcctacacccccggcccgccgccgccctactagttgtgttccgccactctccgtcacgttccgaccaaaggaggtgaccgaccgaccagagttgtgcgagaggccaaagaggctcttccttccgtgaagattgctgtgcatgccgagctgcgctgcctttaattacctatagctaattaattagctagggccaatgttgcgaggagaataatgcatgcttgagtgccaatgttgctagctcgctccctctctagatgtgatgtgtatcatgtgttgtgtgttgctcgaatttgtactgtctagcgtacgtcgatcccgtggtgatttgtggagtatggtattgttgtgttacggtataaccaaaaataacagcggaaatggaagtaaaagctgttttcgatcgtccaaaaaaaaaaaaaaaaaaaa

SEQ ID NO: 389933 - DNA, 467 bp, Oryza sativa
  unsure (1)..(467): unsure at all n locations
ggccgcgaccntcaacggcggcggattcctcgccgcgcgggccccgcgctgtaccggggcggcgtcggctgcggcgcgtgcnaccaggtgagatgcaaggacaagaagctgtgcagcaacgcggngcgcccgtgtcgtcgtcacggaccgcgccaggacgaaccgcaccggcctcgttctgagcagcccggcgttcgccgccatggcccgccccggcatngccgcgtcgctcaccgagctcnccgccgtggacntcgagtacaagagggtaccgtgcgagtacaggcacaggagcctctctgtcagagtcgacgagagaagtcgcggacccaacgagctcaccatcagcttcctctaccaaggcggccaaaccgacattgtcggcgtcgacgtcgtccaggttgggtcgacgagctggaagttcatgactagggagcacggaccgtcgttgagcattggcgtacgcg

SEQ ID NO: 389934 - DNA, 545 bp, Oryza sativa
ccacgcgtctgctcgccatcgcactccacctcgggtgaaagccggcgccttttggatcacccctctcctccgatcgaccgggtctctgctgaggtctccacgccgccgacaggtagcgcgagctagagagatggccgagacagtgttcactccctcgttggagggtatgaagcatgttaagtcagagagcagtgtcatactcaccaagccctttcttgatgtctgcaagcaaatcttgcctgttttggataaatttggagctgctatggcacttgtgaagagtgacattggtggtaatatcacgaggctggaaaataaatattcttcagacccatcaaaatatgagcaattgtacagcatggttcaggaagaggttcaaaacaagactgcaaaaggttcgtcaagctgcacaaatggacttctgtggctcacgagggctatggacttccttgttgaattattccgtaacctgcttgagcatcaagactggactatgagtcaagcttgtactgattcatataccaaaactctgaagaaatggcatg

SEQ ID NO: 389935 - DNA, 568 bp, Oryza sativa
  unsure (1)..(568): unsure at all n locations
cgtaaccaccacncccgccgcgcttaatgcgccgctacagggcgcgtcccattcgccattcagntgcgcaactgttgggaagggcgatcggtgcgggcctcttcgctnttacgccngctggcgaaagggggntgtgctgcaaggcgattaagttgggtaacgccagggttttcccngtcacgncgttgtaaaacgacggcccgtgagcgcgcgtaatacgactcnctntagggcgaattgggtnccgggccccccctcgaggtcgacccacgcgtccgtacaaggatgttgctggcaatgggcagcgagctctgcagcattttgttgtctgcgtcagagtaaaaatggccgggaaatgtttggacatgggagagagccgattgcttcttcccatgtgagtgaaaaatttcatttcaaatatgcacggtttgcttgcatttcaactaaaatgtgaggtacttcctccgtttcacaatgtaagactttctagcattactcacattcatttagatgttaatgaatttagatgttaacaattnnnnnnnnnnnnnnnnnnnnnnnnnnnnnn

SEQ ID NO: 389936 - DNA, 636 bp, Oryza sativa
  unsure (1)..(636): unsure at all n locations
agaacagggttatcaagttagagagcttgctaccaagtatcgattgcgtagaggcagtagcatgtgagcttgcacaaccagnaccgattggctttgtggatggngctgatatcgttttcgttagaacagntgctggcatcttcatgattgagctcaaatcaatgtgtgttaggaaggtttgcgagagaggatacggcaaagccgtcttcccctatacgagcttctgcactccaggcgtccatctccagcaaaacagagttcaggtcagtaggaagcggttgctggaactaagagaaggcgatgtggcaacaggtatgcaatccaacggcaagagccacaaggggcgacagccgtgacggccaaagaccacctacaaggatggtgctggcaatgggcagcgagctctgcagcattttgttgtctgcgtcagagtaaaaatggcagggaaatgtttggacatgggagagagccgattgcttcttcccatgtgagtgaaaaatttcatttcaaatatgcacggtttgcttgcatttcaactaaaatgtgaggtacttcctccgtttcacaatgtaagactttctagcattactcacattcatttagatgttaatgaatttagatgttaacaatttgccc

SEQ ID NO: 389937 - DNA, 939 bp, Oryza sativa
  unsure (1)..(939): unsure at all n locations
cccacncgtccgaaaccaacaaaccagcagcaagaaaagaaaagaaaaaaaaggagaagacagtgagaaaaagaggagaaagaaacatacacatgaggatccacccatcaccagccacgaccgccggcggcagctgcggcggcaagaaggatctccggcggctgccgcacgtctacagcaaggtgctggagctgccgttcccggcggacaccgacgtcgcggtgttcgaaggccccgacgcgttccacttcgtcgtgtccgccgccgccgcgctcgccggcgaggtgcgcgtgcgcaccgtncaggatccaccccggggttgtcagggtggtggtgcaggccggaggaggaggcgtacacgacgacggcgacgacgacgacatggagctcgacaagtggaggtcccggctgccggaggcgaagctgcccggcgatggccgtgggccggcttacgtcaacggccagctcgtcgtcaccgtgcccaaggggcgcggcggcggcgaaggtgacaacgacggcgggagaggaggccttggaaggtgcttgcaatggagggaagattagtggcaggctggtggttgtacagtagagaaatcatcagtagagtgatagccctttgtctgcgctaattgttcatctaatctacttattatctagtaatgtctttgccatctttgtttttgggtaaagatggggttctttgatgtttctcttccatcatagttcaaggaagagctgtttcatatgctgtctttcaaacagcttttcttgaggcaaagggaaggaagctactgtaagttttgtaagttgtagcttctctttgtttttgtttttgtttttgttttttttctttcctgaaaccaattgtaaatacaggagaatatgtgattaatttttatcttgatttttctcttgattcnnnnnnnnnnnnnnnnnnnn

SEQ ID NO: 389938 - DNA, 567 bp, Oryza sativa
atgatgatgatgatgatgttgataccgacgaggaagagtccgagtcggaagatgattcaggggaggaattccatgccgagccttccaagaaagctgtctacaacaaggaggggatcctggagaagctcgaggacattgcgtggccggagaatgtggactggaggcacaagctcactatcgaacatgaccagggggagaaagtcgatgtgaacgacgatcttgctcgtgagcttgcgttctacacgcaggctttggatggtacgaggcaggcctttgagaagttgcagtctatgaaggtccggtttctcaggccggctgattactatgctgagatggttaagaccgacgctcacatgcacaagatcaaggggaggctcttgtctgagaagaagaagattgaggaggctgaggagaggaagaaggcgagagaggccaagaagagggcgaaggaggtgcaggcacagaaagaaaaggagagggccaagcagaagaaagaacagattgagtccgtcaagaagtggaggaagcagaggcagcaagggggctttgccaagggaaatgatgatg

SEQ ID NO: 389939 - DNA, 715 bp, Oryza sativa
tctcaaggtcttcttggtctttttcttgaaggatcagattttgcgaagatacaaccgggaggaatcattggacatacctcctgtgccaccacagggaagaaattggaagggcagtgttgttgcaccttttgctggtaacaatatgttggctttgtaccagtgcccaggaaaaactgatggtggtaagatttctcgggatcagaagagctcatacttcgtgcaggttatacacaatgaagctccagtttcaatgccgggatgcgggaacaaagatttctgcccatttgaagagttcaaggagaagatagttgaaccccacctgaagcatgactacgacgccctatgcaagataaggccggtggcaagagaggagccttcctccttcagttccaggatgtccaatttcttcctaggtttgttctcgcagaaaggataccgtgttagtgctcaggatgtgaagtcggagctgtaggtttatactaggcagatggtgcatcttctacctttcgcactaagctgctactatccatctaccatggataaccaagggactgactcgtggactaaactacggtgtttctgtacttgcaaccctcagtttgatgagcgagtccaatgtgtaacaacacgctatcactggtgcccctcttctttcagatagaagacgtttgttgatcaatgtaatctttgttttaatcaaaaaaaaaaaaaaaaa

SEQ ID NO: 389940 - DNA, 685 bp, Oryza sativa
ccacgcgtccgcccacgcgcccgcaaaaggataggaaggagccaagaacaccaagaacttgttggagctgagacagcagcaccaagcaagaaaccggatccaatccatccatccatccatagtttccaatggctggcaagtacatcgccgctggtcttgttggttcctttgccatctcatatgtttgtgatcattttatcgctgagaagaagatatttggaggcaccacaccacataccgtgtccgacaaggaatggtggcaagcaactgacaagaagtttcaagcctggcctcgcactgctgggccaccggttgtcatgaaccccatcagtcgccagaacttcatcgtcaaggatctcgagtcctaagattgtagtgggagcatatatgctgaaggttgcgccgtgactaagatggcgatggctgtggctacaaactacctacctatgccgtactcccgaaccagtacgtgagtacttggtctcaataaaacagaactattttgcctagtgcagcctgaacagaacctgaagcatatctgctttagacattgtcatcttggtgattgttcttatgcagtaacaacctctactttgtgcttgtgctattgtgagtgaatggaactatctgtctgtcacactggaatatgtgccttgtctactgatgcaagagattttaaaaaaaa

SEQ ID NO: 389941 - DNA, 693 bp, Oryza sativa
ccacgcgtccgcccacgcgtccgcccacgcgtccgcccacgcgtccgcccacgcgtccggaaactcatctgctggatcgagcttctctgttaattaatggcgtcgaaagcctttgcactcgtgctgctggcggcggcgacgctggccatggcggccagcacggcggcggcgcagagctcgccgcaggacttcgtcgacgcccacaacgacgcccgccgcggcgagggcgtcggcctccccgacgtggtgtggaacacgacgctgcaggcgttcgcggagagctacgtggcggtgctcgccgccacctgcagcctcgaccactcgaacagcgtgcagctgggctacggcgagaacctgtacatgggcggcgccggcagcgcgtcgacggcggcggacgcggtcggcttgtggatggaggggaaggcggactacgtgtacagcagcaacacgtgcacgaggggggcgctgctcgactgcggccactacacgcaggtggtgtggcggagcacgacgtcgatcggctgcgcgcgcgccgcctgcagcaacggcggcggtgtcatcatcagctgcaactatttcccgcccggcaacttccccgatcagcgcccttactagtacactatacttactactacatgaatgtacgcatcagatatatatttatatgaataaattaatcacgttcatgtatgt

SEQ ID NO: 389942 - DNA, 636 bp, Oryza sativa
ccacgcgtccgcccacgcgtccgcccacgcgtccggctagctatccacatcgtcttcaccgagttacctcgccgggattgctcgccatgccgtgaagagggccgacgtccgtggttttcgtcaccgacgacgttcgtccacaagcctcttgctggaaaccagaactcctcaaccatttttgtcaagccatcacagcgcctgatgtccaagtgccttttcgctcccgtcgctggttgttcgtgagcttcggaacagacattattctccagcgagctgcattacctgaaagcatgccgcggcttccaaagtgtgcgagcatgagaagaaatgtgaagcgtcgttccattcatgatgatgatgactttgtcgcccctccttcaaggaagaaggctgttcgtgttaaattcgtggcaccggtttcgcgtttgtgtaccatcttccatcacacctatcatacagagatttagtgctgaaaagaaagagctggtagctgagataattatgtcattcatcttgtgggatatacatgtatacgtgttcgctctgtcactcatcaacctatgtgttcatgtacacctgtaaaagtacagattatgtctttactcgtttagtcttcatacccgcattttttcaaaa

SEQ ID NO: 389943 - DNA, 1068 bp, Oryza sativa
gagagagagagagagagctacccttcccttcccttctcctcctcctgctccgccgccgccatgggcaagtactcgacggagccgtccaacccgaccaagtcggccaaggccatggggagggatctcagggtccacttcaagaacacaagggagacagcgttcgctcttcgcaagctgcctttggtcaaggcaaagcggtaccttgaggatgttattgctcacaagcaggcaattcccttcagaaggtactgtggaggcgtgggccgtactgcacaagtgaagtctcgccaatcaaatgggcagggcaggtggcctgccaaatcagccaggttcattttggatctgctgaagaatgctgagagtaacgctgatgttaaaggcttggatgtcgacaacctcttcgtttcacacatccaggtgaaccaagcccagaagcagagacgccggacataccgtgctcatggacgcatcaatccttacatgtcctcaccctgccacgtcgagcttatcttgtcagagaaggaagaggccgtgaagaaagagcctgaaaccaccatcgccccgaggaggcagtgagcttatccgcccagagtcgcaactttagttcattttctagtactttgttatggcattgtgtgctatttatgtttctggtaccattgtttagtcggaacttgttaagtttgatgctatcctttcgtttgtgtatgttcaaatggtaacaattacttgccaacttatctgccaaaattttactgccttacaaaaaaaaaaaaaaaaaaaaaaaaaaaaaaaaaaaaaaaaaaaaaaaaaggggggggcggtttaaaagaaccaaagttaactaccccggcatggcaaggtaaaagttttttaaaggggcaaccaaaatcaaatcaatgggccgcggtttaaaaacgtgggaatgggaaaaacctgggggtacccaaattaaatggcttggaagaaaatccccttttggcaagtgggggaaaaaccaaaaaggccggaacgaacggcctttccaaaaagtggccaacctgaaagggcaaagggaccccccctgga

SEQ ID NO: 389944 - DNA, 579 bp, Oryza sativa
ccacgcgtccgcggacgcgtgggcggacgcgtgggttccccgattcgttcttggtctagtttgctgagtgagctgcagcgatggccgcgaaaggtcagccggtgaatgtgcagaaggagcaggtgaatatgcagaaggagcagatgtttggattggcagagaaagagatggaatatagggtggatcttttcaatcggcttacacaaacatgtttcagcaagtgcattgagaaaaggcataaagaagctgaactaaatatgggtgagaatagctgcattgatcgatgtgcttcgaagtattggcaggtgactaatttagttggacagctccttggaaatcagcctcaaatgtgagcttagagatgcaattgctcttattggtagtagaacatcattgtcttccttttttggcatggtagttcggcaaattattgagcacaatgagaggagaaaattgtcagttcctcccatttgtatctttgacatgagtctgcttgaccaacacataatgtttgagatacattccaacctgtatcagtactttcagcttgcagaaaggcggcatctgttggctgctgtc

SEQ ID NO: 389945 - DNA, 645 bp, Oryza sativa
ccacgcgtccgcccacgcgtccgcccacgcgtccgcccacgcgttcgcgacactgacagtctcctcttccaccactggcctagggcaagagatcgacgagaggagcggagggaggaggaggagatgggcggagtggagcaggagcagctgctcagcctgggcgtcctcatcgacatcgtcgacgagcagtggatgcgcgacaccctcccagccgacgatgtccccgtgccgcccgccatggccgtgaagacggaggaggcggaggatccagcacccgccatagatcaggaaagccaaccagcacaaggggatgtgtggcgtgatttcacattggagaatctctgatcacttgtgacctacaagtgcttccagagatgaatataccatgctgggaatctaggagctacgtggtcattgcaatttctgagcttcaatataactataaggtcatctgaacttagacgtactatctggttttgtttcagctgtagttcgtcgaaacccatgctttaaaccgatgtaaatgccccagatattggtagcccattgctgcatgatgaccccgacccttgtgatgagaaattatatgttgtgaactatgatggtgatgagaccagttattcagatctggaacatatccaatcc

SEQ ID NO: 389946 - DNA, 637 bp, Oryza sativa
gcgcagttcccacttccatctcgccacgagcgggatctgcgcctgccgctctccccccctcgccggcggcaagcctatggcggctcccggctccggctccggcggcatccccatcaaggctgatcaggactcggatggctcggcgcagagcactgctgatatgaccgctttcgtgcaaaatcttctgatgcagatgcaaaccaggttccaatctatgtcagagaacatcatttcaaagatagatgaaatgggcgcaagaattgatgagttggagcagagcatcaatgacctcaaggttgagatgggcactgaaggtattaccccaactaagccaaaggacgaagaatcgaagcctgcgggtagctctgccgaatgaaagaaacagaagcagttgaaatggtagcatgccattccagatttgatttccgtatcgacatctccagccattcatcactgacaaattacatgctgtaagatcttagcagggcacttttatgcatctgagatttgtggtagcagttgagaatctctcttatagatgttgttgcatgtgttactgtgaacttctctgtggatattggactgtactgcgcagagcactgatcataataggtttgtttagatgtcagttagatac

SEQ ID NO: 389947 - DNA, 611 bp, Oryza sativa
ccacgcgtccgcgctcgctcgaggaggacgtcgcggcgcacgccactggtgacttccgcaagctcttggtgccacttataagtgcttaccgctatgaggggccggaagtcaacacaaagttggcacattcagaagccaaaattctgcatgagaagatccagcataaggcatatggtgatgatgagatcatcagaattctcactactaggagcaaggctcagttgattgcgacattcaatcgttacaatgatgaatatggtcacccaatcaacaaggatctcaaggctgatcccaaggacgagttcctttccacgctgcgtgcaatcatccgctgcttctgttgccctgacaggtacttcgagaaagtcatcaggttggccatcgcaggcatgggaacagacgagaactccctcactaggatcattaccactcgtgccgaggtggatctgaagctgatcacggaggcgtaccagaagaggaacagtgtcccgctggagcgtgcggtcgcaggggacacctccggtgactacgagaggatgcttcttgctcttctgggtcaggagcagtgagccatgcctatcttgcccagtcacacacttcatgtgatcatg

SEQ ID NO: 389948 - DNA, 865 bp, Oryza sativa
ccacgcgtccggttctggtaatgatagctctgtcccttgcgaacttgaaaagattgaattcccggacttgaatgtggtgaatgagaatcaaattatggtctccaagtatttcgagatggagaccttgagctatgaggattcagttaaggttgacaacccaaagttagtgcaatctgatgcagctgttcctggtactgaattatttaacaagaatctcgatgaatatcgggagggaagtcctcaaagttgtgtatcaaccacagactactccacagccacatctgtcactccacattcagtttctgagccatcagacaccatccttgcagcatctcccactggaagccagagggagaaaagccaggatgttaccgatggcgaggctgattcttccgatgtaccactcaagggtgaagttgtcaagcctgtgatcagcattaatctcaaccctggtgagtctgttgttcaggaggacatagttaacatgtacatgaagagcatgcagcagtttactgaatcccttgcaaagatgaagctgccattggatgtggagaacagtagcccctcaactgaaaacaacactgactcgattacagctgagaagccatccccatcgaagggttctagggtcttctatggaagcagagccttcttctaagatgctgatactaagtaggatcgtgtattagtatacatggttcgtatttgtccgactggctgtcatgtgtttaatagttatatatatgcttcctaagtttctgttgctacaatgagtttctaggactcactctacacttgtattgcttacaatgtcatggtcagttaaaaatataagcattttggaataaaaaaaaaaaaaaaaaaa

SEQ ID NO: 389949 - DNA, 591 bp, Oryza sativa
  unsure (1)..(591): unsure at all n locations
aattcggcacgagaggcggccggaggaaggcgcggggtggcggcgggggagcggaggaaggcgaaggcgaaggaggcggcggtgggcgccatggcgagggctctgttctacccgacgctgctgtacaacgtggtgcgganaaggtccaggccgagttccggtngtgggacgaggtcgatcagttcattttncttggagctgttccattccgtaggatgttcctcggttgcagaagcttggggtgtatggtgtcataaccctgaatgaaccatttgagactttggtgccatcgtcgatgtatcagagtctgatgaaaggttgttggcttactgcaaattcagttatgttcaattggaagtttcttatgacacggaatgctcctctgctgaaattttcagtctcgtgggattgatcaccttgttattcctacaagagattatatgtttgctccctcacttgtggatattagtcgagctgttgatttcatacatagaaatgcatcttgtgggaggatgacatacatccattgcaaagctggaaggggcaggagtacaactattgtctngtgtaatctggtagtcctaattaccc

SEQ ID NO: 389950 - DNA, 675 bp, Oryza sativa
gacccacgcgtccgcccacgcgtccgcccacgcgtccgcagtgactggccaagtgtccgcagatagaggagtagatgtgaacatttcatcaaatagcacatccctgattcagggagacagaagggttgatacaaatgtgacctcaaacaccacagccatggttcatggtcatggggattccatgacatcaaacaccacagctatgattcgtggggatagaagagttgagatgaagatcccaacgccccaccttattcatggagacggaagaattgacatgaacatggcatcccctctcttgatgcagagggacagaagagttgacatgaacatggcctccccacacatgatacagggggacagaagagttgatatgaacttggcatcaccacactttatacaaagcgacagaagggttgatatgaacctggcatcttcgcatctgatacaaggggacagaagagttgatatgaatatgacatcccctcacttgatacaaggtgacaccagagcggatatgaatatggtatctactgctcagaatggaatgcactcttttgatttggtgaatgtgaacctagaaagtggtcctttgccaatggctgcaactgatttcatggcaatgcattagcacccacccggttacccatcaaaacaacttcttaatatgagaga

SEQ ID NO: 389951 - DNA, 751 bp, Oryza sativa
  unsure (1)..(751): unsure at all n locations
ccacgcgtccgccgtgtcgcactgccgctacccgccccgaggcgttcgcggcgccgcccaccccatcgtccgcgcgtccgcgtacggcctcgacgactcctacctctcccgctgcgaggacgagacgctaatcatctgccaggtcgagaccgccgctggcattgcggaggtcgacgccattgccgccgtcgacggcgtcgacgtcgtccagatgggaccgctcgacttgtcagccagcatggggtacctgtgggacccagggaacaggaaggtgcgagccaggctgagggaggccgagaagaaggtgttggatgccaggaagaagaatgtgacagcttcagatggcaatgtcgcatatctaggcggattcgcatgccgaacgacccggcagagcagctcaagctgaggggttaccacatggtgtctggtgcagtggacattgggatgttccggaagcggcgttggaggatgtcaagcggttcaaggaggcagtgatggaaatcggcgaggaggaaggcgaggaggacgatgaaaagaaggacaaggaagacgacgggtactggagtgagtnagcactgagcagagttgagctgaagatgatcaaggaactgtggtgatggtgtcttttgtttgtcttctgaattcagattgagaggtctaagtggttccattttccaggggcctcttggtgtactcttgtttagttgtcaggtcgattttnagaccatcatgtttggcatcttaggatncc

SEQ ID NO: 389952 - DNA, 682 bp, Oryza sativa
  unsure (1)..(682): unsure at all n locations
aaatgtnctgcaaggcgattaaatttgggttaacgccaggttttcccagtcacgacgttgtaaaaacgacggccagtgagcgcgcgtaatacgactcactatagggcgaattgggtaccggccccccctcgaggtcgacccacgcgtcctcgagatcagaagcgaaaccctagcggcgaatccccacacgacgcgccggagcggggagaggggccatggcggcggcggcggcggcggtggagaaggtcaaggcgctctgggactcgcaggtcaacgacgaggaggcttgggcgttcaactacaagctgatgaaggctggtggtctgtttgttgcatccatcttcgtgatgcgcaactttggtgacctgatggccatctaaagaggagctgatgcgacagtaacgtggatccaccagagctgtgtgtcttgttagctgttagttttcacttttatgtcagcaacgcaaccagacttgttcttaggatcatgaattacaaactgctcactcgagaattgagatagttttcatgatataatggaagccagagtgctactggttttgtgaatcagcaggcgaatctgcgaaaactcaattgggatatcctttagttgagactggccaagttctctacactccaatccatgatgtagtgcattgtactaaaaaaaaaaaaaaaaaaa

SEQ ID NO: 389953 - DNA, 579 bp, Oryza sativa
cgattcgatagtgacaagaggaaaagcgcggctctctccgtctccggcggcggtgacgcgaggaggaggaggaggaggagcccgcgccgccgggccaagccatcatggacgaggagcagctgcgcgcgctgctccgcgacctggacgcgctcaagcagcgccccgaccccgccgccatcgatcggatgcgagaccgcgtggcgggaatggtgaccccggccgccgctgcacggtccaagatcaaggatatgagctcggaggtggtggacagcaatccctacagcaggctcatggcgctgcagcgtatggggatcgtggacaactacgagcgcatccgtgattactccatcgccatcgttggtataggtggcgttggtagtgttgctgctgagatgctcactagatgtggcattggtcgccttttgttgtatgactatgatacagttgaactggccaacatgaataggttgttctttcgcccagaccaggttggaatgaccaagacagatgctgctgtgcagacactatctggaataaatcctgatggtacgttggagagctattcattaaatattacta

SEQ ID NO: 389954 - DNA, 603 bp, Oryza sativa
ccacgcgtccgcgaggaatcctattgatagcagcacgatagatctacttgaaggcaaacttgcagttcttcggttccaaatgcaaatcaagcaagaactagagttcatggcttcacagcttgaaaatctgtcaggcagttctgaatcaccaaatgatccctttcctcgtgataacattctagctgatgcggatactgctagatttgccatggacaaggctaaagagctttcactgaatctaaagagtattactcaactttacaacgattatgctgttccatttaatctttgggaggtttgcctggaaatgctcaactttgcaaattattctggagatgctgacagtaaaattgttcgagaaatttgggccaggcttcttgaccaggcacttacaagaggtggtgttgcagaagcatgttctgtggtgagaagagtaggttcaaaacttgatcctgcagatggcgcttgtttaccattggatataatatgccttcatctcgagaaggctgcattggatagattaagctcaggagaagaattagttggtgacgaggatgttgcaagagcccttctccgagcctgtaaggtctacctgaacctgtg

SEQ ID NO: 389955 - DNA, 564 bp, Oryza sativa
gtccacgtagtcgtccaccgtgacgacccccatggccgccgaaacgaccaccaccaccacctcgccgatcccgcggttcgattgggaggctcttctagctcgctctcgctctccctctcctcctcctccgatgggtacactactctacactacactacactacacacgttcaccttttctttgtccattcatctcgtgagctcattcgatcggtcgcactagcacctgatcgatcagcagcgctcgccattgtttctttgatttcttctgttcattcttcctcttctttcttttttcttcatgttccttttttcatttcgagagtatatctacggaaacaaaaaagaagaaacaccatgggtgatcgagtgtgttcagtacgtatgtcatcactcaagtcagttcatcaatccaatgcatggtcagtcacacagccaaaaaagaaaaaagtgggtggtatcatgacgaagaattttccggtggcactatatatatacaaaaaaaacagcatgtatatgtgattcgaaacacattgaattttcttccaaaataaaaacccaaaaa

SEQ ID NO: 389956 - DNA, 646 bp, Oryza sativa
  unsure (1)..(646): unsure at all n locations
ccaggtaattgntcatcatgttgccccttgccaactactacacgaacccccagatatcagagaaggacaaaaagaagtgtaccaataatgctgaaaaatacntcnctgtagctttcaaacacatggttatcnccaaatgcaatactgtgaccttttcttgtaccccccccccccccttcttggattttgtttgcgatgcctttctgcatgtagtgtaacagctgagatgagatggttgttactttgcagggaagcgcgtttgtagagcagctagtggaggatgaaagccagatggaaggcatacctgctgactgctctcaaataatgaactggcatgtgccattcggatctgaaagtgttgtctatcctaaaggatggcgggttgctacagatctggatgtaattatccctctaaaatagtatcaccagctatgttcaccaaagtgctaactcctttgacaggcatatactgtagaaattaggccttggcaagtgtgcagagacatttatactntggagagcatctctcggaaagggaagacttcttcagctgttgcttcataattttgtaggattcataattgcttggacggnctctatccaaatccaatccaaaaaccttttttttgccgtgtatatgttcatg

SEQ ID NO: 389957 - DNA, 685 bp, Oryza sativa
ccacgcgtccggccacgcgtgcgaagaccatgacaatatacacacgcaggtcctctagttgacctgcgctgcgtgccactacatctccaatacttcctttggtaaagctctcgctcgtcttaaggcatcatcgccctatcggagagcgaaagcacatcgagagagcctgcagagagtatatggaatttcttttcctgattctagtcggctcaaggaatataaacatctgctagaagaggctaagaagcgtgatcataggctattaggacagacccaggatctcttctttttccatcaacttagtccaggaagctgcttcttccttccacatggtgctataatatacaacaaattgatggattttttgcgacagcaatacagagatagaggatatcaagaggttttgagcccaaatatttacaatatgcaactctgggaaacctctggacatgctgcaaactacaaggagaatatgtttgtttttgagattgagaaacaggaatttggtctcaagccaatgaattgtcctggccattgcctaatgtttgagcacagggttcgttcatacagagaattgcctctccggatggctgattttggagtccttcacaggaatgagcttagtggtgcacttacaggtttgacacgtgttagaagattccagcaggatgatgcccatattttt

SEQ ID NO: 389958 - DNA, 512 bp, Oryza sativa
cccacgcgtccgaattaatcatgacggagtaccattttttttctctcgaacatgcagcgtgcacatcatcattcccggcgttcacggcggactacggcctggcggtggcgaacgggacctacgcagttactgccaaccggtgtgtccagtgcagctgtggcccaggcaacttggacctgttctgcgtgccggcgccgctcgccgactcgacgtgctccagcatgcagtgcgccaacagcagcatgatgctcggcaacttcactctcctcatgaccagctccggctgcagcgtcacgtcctgcagctacggcggattcgtgaacggcacaattctcaccacgttaaccacagcactcaagcctcaatgcccaggtccgcatcagtatcctccgctgattccgccgccgacgtcgtccttcttcgagacgtacctcggcccttcgccgacgccgatggcatccgaaggaggcgtcatggccggcatggcgccgacgagcaccccggcggcgagc

SEQ ID NO: 389959 - DNA, 331 bp, Oryza sativa
ccacgcgtccgcccacgcgtccggcgtggaagcgggggtacctcctgcacggcccgcccggcaccggcaagtccaccatgatcgccgccatggccaactacctcgactacgacatctacgacatcgagctcacctccgtccgcaccaacaccgacctccgcaagctcctcatccagaccaccagcaagtccatcatcgtcatcgaggacgtcgactgctcccgcgacctcaccggccggcgcaaggccaccggcgacggggaagacgacgacgacgacgccaagacgaccaccaagaaagtgatcgatcgcggcggcggcggcggcggcgt

SEQ ID NO: 389960 - DNA, 617 bp, Oryza sativa
acgcgtccgagttctcgatctcgatctgagcgaggcggcgacgaggacgacagaacgaagatgagttcgtacatggaggcggcggcggcggcgagggcggcggaggcgaagacgtaggggcttctccggggcgcgtgcgcgctgctggcggcggcggcggcgctgctggtggggctcaacacgcagacggagacggtgctgttcatcaggaagaaggccaccgtcaaggacgtccaggccctctgggtgttggcgatggcggcggcggcggcggccggctaccacctgctgcagctgctaagatgcttctacctcagccgcttcgccgacggcaagccctgccggcatcgcagggccatagcctggctttgcttcctcctcgacaagggttgtgcatacataacattcgcgacgacggtggcagcggctcaggcatgcgtggtggcactatatggcacgcacgcgttgcagtggactaagctttgcaacatctacacccgcttctgcgagcaggttgctggtagccttgtgtgtgccatgctcgctgccgtcggtactggccctctctccgtcgtctccgcccgcaacctcttccgcctctatccctccatgctttc

SEQ ID NO: 389961 - DNA, 1322 bp, Oryza sativa
  unsure (1)..(1322): unsure at all n locations
cttctccagaaaggttatggtttgggttctggcatttctctctttattgctaccaatatctgtgagaatatcatctggaaggcatttagccccacaactatcaacagtggccgtggtgctgagttcgagggggctgtcattgcattgttccatctgttgattactagaaccgacaaagtccgtgccttgcgcgaggctttctaccgccagaatcttccaaatgtgaccaacttgcttgctactgttttagtcttcctcatagttatctacttccaaggcttccgtgttgtgctaccagtgagatccaagaatgcccgcggtcaacaaggctcatacccaattaagctgttctacacttcaaacatgcccatcattctgcattctgcactgattaccaacctctatttcatatcccagcttctctacaggaggtacagtggaaattttctggttaaccttcttgggaaatggaaggaatctgagtactctggccattcggttcctgttggtggtctcgcttactatgtaactgctccatcaagtttggctgatgttcttgcaaatccgttccatgcgttgttctatgtggtcttcatgctgtcagcttgtgctctcttctcaaagacatggattgaagtatctggctcatctgcaaaggatgttgctaaacagctgaaggaacagcaaatggtgatgcctggccatcgtgagtcaaacttgcagaaggaattgaacagatacatccccactgccgctgcatttggtggagtctgcattggtgcattgactgtcctagctgatttcatgggtgcaattggttcaggaactgggatactgctcgctgttacaatcatctaccagtattttgagacattcgagaaagaaagggctaccgagctaggtttctttgggttttgatcaccttagctgtataactcctagctggaacttcttgcgagtcgcagtgctgcttggccggctgtcatgtaatgggagacctcagaatcagcttaggttgccgacttacttacaatgagaatcttgtagcagtatgcgttttgttcatgccagtgtatggagttatttgtcctgctcctgccccgagtacagcaatggccatcgtagtaactggatgtgttgcgatcaatttttattatcttttaaactggatagtatatttgattcctgatctcttttttnctgcaaccttcgtgactaatgtttctaatcactggaaactaatctggtgttatgtctccctgctgcttctcttattgcaagtgtttggccacatggataaaatgttanctttcaaaagacaa

SEQ ID NO: 389962 - DNA, 476 bp, Oryza sativa
gcccacgcgtccgcccacgcgtccgcccacgcgtccgcccacgcgtccggctgacgagtcgaagttagcagaggtcagaagtcagaagctacggatactgtagagatcattacatgatgaggcgcctcctgccattcaccgtgctctgcgtccttgtcctgctctgcgtggcgagcctcgtggatgtcacggaagggcagcgaggcggaggcggaagtggaggacttgcaggcgccgcaggcgaggacagcataccattcggggccggagtcggcccgcgcggcctcagcagcggtacgtgggccgcatggtccgcctcctcgctgctcgccgcggtcgccttgctcctgtagcgcggcgcctatatggtaaagcgcgctgttgtttgcttttacatgcttttttgtactacgtgatatgggtgatgtgtgcttggggagaagagggtcctgtgctgaatgcacttctgaacccat

SEQ ID NO: 389963 - DNA, 946 bp, Oryza sativa
cacgcgtccgcccacgcgtccgcccacgcgtccggtccaagagagggggacactctgcctccagccatgagccgacggcggcgcaggcgccaagggcgcgggcttcggcatcccccccgtcggcatgggcacggcggtgcaggggccgaggccggagcccatccggcgcgccgtgctcaaggccatcgaggccgggtaccgccacttcgacaccgcggcgcactacgagaccgaggcgcccatcggcgaggccgccgccgaggccgtgcggtccggcgccatcgcctcccgcgctgacctcttcatcacgtccaagctctggtgcagcgacgcgcaccgcgacagggtgctccccgcgctcaggcagacgctatggaaccttcagatggagtacgtggacttgtacctggtgcactggcctgtgtccatgaagccgggccggtacaaggcccccttcaccgccgacgacttcgtgccgttcgacatgcgggccgtctgggaggccatggaggagtgccaccgcctgggcctcgccaaggccatcggcgtctgcaacttctcctgcaaaaagctcgacaccctgctctccttcgccaccatccctcccgccgtcaaccaggtggaggtgaacccggtgtggcagcagaggaagctgagggagctgtgcagggagaagggcgtccagatctgcgcctactcgccgctgggcgccagcggcacgcactggggcagcgactccgtcatggcctccgccgtgctccgcgacatcgcccaatccaagggcaagaccgtagcccaggtgtgcctgaggtgggtgtacgagcaaggggactgcctgatcgtgaagagcttcgacgaggcgcggatgcgggagaacctggacatcgtcggatgggagctgacggaggaggagaggcagaggatcgccggcatcccgcagcggaag

SEQ ID NO: 389964 - DNA, 727 bp, Oryza sativa
ccacgcgtccgcgttgatgttgccaatgtggagcgcctcaacctgctcgaccttgcccctggtggccaccttggccgcttcgtgatctggaccgagtgcgcgttcaagaagctcgacgaggtgtatggtggcttcgacacaccggcgctgaagaagaagggcttcgtgctcccgaggccgaagatggcgaatgccgacctgtccaggctgatcaactccgatgaggtccagtcggtggtgaagcccatcaacaaggaggtgaagctcagggaggcgagaaggaaccctctgaagaatgtggccgctgtgctcaagctgaacccctacttcggcactgcgcgcaagatggcagctctcgctgaggctgcgcgtgtcaaggccaggactgagaagctcgactccaagaggaccaagctcagcccggaggagtcttctaagatcaaggctgctggaaaggcatggtacaaaaccatgatttctgacagtgactacacagagtttgagaatttctcgaagtggcttggtgtgacgcagtgaattttatgatttgatgaagttttagtagattacattaagttctggaattatgattttggttattattgtcatatgacacttggtatgtggagttcagagatgatatgtcgttttggtagctctctttgccccgagacttatacacctggatacctttcatgagacataatatatggcatattttggcggc

SEQ ID NO: 389965 - DNA, 478 bp, Oryza sativa
ccacgcgtccgggtgcaattactgtcttggtgaattggggtctggggtctcaacctctgcgcagagtgtgaggtcactggatcaagtgtattgttgctcatttgtatccgatttttgacgtagaagctcctacagcacgatctcgaagccaaataacgctatttgtacgtgggaaggattttgctgcctacagtggagaaatgggcacaatgatctgtctatagactataaattgggtttccaaatccattcatacacgggggttgctgagctgctagtgttgtctatacaggctcatcgaaaatctgtaatgtttggggtgcatagttcagattccatttttgtggtgttcatttttgttccgtgtaaacctgaacagtgcccatcttttgttcgacaatcgacaggcagatgtatcatgcatatggtgtagcgaggaaggaaaaattcgcagatgtatcatctttgctcgtggttc

SEQ ID NO: 389966 - DNA, 485 bp, Oryza sativa
aatggctcgttcaccacaattcgcaagcaacgtccgtgcaagtagtgctccattattctagcaaagaaggcaagcagaattcatccgcttaaggatcagaaccagatcgatcagttcgatatatcgatcgacaatggttgttgcatcagcagcatcgccgtgcgagtccagtgcgttgttcgcgacgttcgaccacgacggcgacggcaggatctccgcggcggagctgcggcttgtgcatgaagacgacgctcggggaggaggtgtcggacgaggaggcggggcagctggtggcgtcggtggacgcggacggcgacgggctgctgtgcgaggcggagttcgtgcggctggtgcaggcggcggaggtggaggaggaagacgagcggcggggcaccggcctccgggaggcgttcggcatgtacgagatggaaggggaaggggcatcacgccgacgagcctcaggcggatgctgcgccggctgggct

SEQ ID NO: 389967 - DNA, 637 bp, Oryza sativa
gcggttacaatcagcacacgctctctgctagtctgagcgctctcgccatcgcacctgtgtctcgtcgaacaatggcctccaccgccgccgcttcctcccctttcgactgcgtcctctttgacctcgacgacacgctgtacccgggaagcgcgggcatcgggctggcgacgaagcgcaacatcgacgagttcctcatggcacggtgcggcgtcacggcggagcgggccgccgcgctccgcgtcgagctcttccgctcctacggcagctcgctcgccggcctcatcgctctcggctatgacgtgcacccggatgagtaccacagctacgtgcacgggaggctgccctacgaccggatcgccgccgacccgcagctcgccggccttctgcggagcatcccgcagcgcaaaattctgttcaccaactctgatcgcgcgcacatgaggaaggcgctgcagcggctgagcgtcgacgagggctgcttcgacgccgtcgtgtgcttcgagaccatgaaccctcacctcttcggtgaggcgccgtgcgcctccggcgatgacccgccccggcgtgatcctcaaaccgttctccgatgccatcgtcgcggctctgcgcatcgtcggcaccaatccacaccggacgc

SEQ ID NO: 389968 - DNA, 985 bp, Oryza sativa
ccacgcgtccggtctttggtgttgattgtgcgtcaggtgatacatttacagatggatcagtgaaatataccatgacttccatgaatgtccctgaacctgtgatgtccttggctgtctcccctatatctaaagatgctggaggacaattttcaaaggctctgaatcgtttccagaaagaggatcctactttccgtgtaggtctggatccagaaagtggagagacaattatttctgggatgggtgagctgcatttggatatctatgttgaacgcatcaggagagagtacaaggttgatgcaaaggtcggaaaacctcgtgtgaacttcagggaaactatcactcagcgtgctgaatttgattacttacacaaaaagcaatctggtggtcaaggtcaatatggacgagtttgcgggtacattgagcctcttccatcagaatctgatggtaaatttgagtttgataacatgatcattggacaagcaattccttcaaacttcataccagcaattgagaagggttttaaggaagcttgcaattctggttcgttgatagggcatcctgtggaaaatattcgaattgtgctgactgatggtgcttcacatgcagtggattccagcgaacttgcttttaagttagcttctatctatgcttttagacagtgttatgctgctgctagacctgtaatattggaaccagtgatgaaagtggaactaaaagttcccacaaagttccagggcacggtatccggtgacatgaccaagagaaagggtatcattgttggaaatgatcaggaaggcgacgacacagttgtggtttgccatgttcccctaaacaatatgtttggatattcaacagctcttcggtcaatgacacaggggaaaggtgaattttcgatggagtatctggagcacaatgccgtatcgcaggatgtacagatgcaactagtgaatacgtacaaggccagcaggggcacagagtaatccag

SEQ ID NO: 389969 - DNA, 671 bp, Oryza sativa
ccacgcgtccgcagcattggccacgccggtgcaaaccttgcaaactcaggtgccggcagccctatcgtgaaagacttacccacggttgaagaattacctgcggaaagttctgttgctactaacttaccatctgccgaagaactacctgcagaaagtcctattgccaacaacttaccagcagttgaagaattagctgcagagagtcctgttgccagtagcacacctgctattgaagaactacctgcagaaggtaccgtggagaaggcaagtattgatcatcctgccagttgatcttttgtaaagtaactgcatatgtatttgttcatggagggcttttaaatggctcacggtggttttatagtttgctgcactgctcgttgctcagaaagcacacagcttctgttccaaacttccaatgttttgtgcttgctacatagcatatgcatgttgcaggatagtggttttcactggtagtgctagataggatgttttccttgtgtttcgggcacggggcaaggctcatttttcaagtccagtaacagatcttgattaaaggggtgttcttgcatttttcttttctggagtgtatatgattgtacagtagtactatttgaggtgcgatgaggggtcattttcggctttttaataatggattataatttttgttgtac

SEQ ID NO: 389970 - DNA, 670 bp, Oryza sativa
  unsure (1)..(670): unsure at all n locations
ccacgcgtccgaggaaatgcatacaaagatggtgtgacacgaaggggaacatcacatgtgaaatctgcaaccagggttactgctccaaattatgtcctccctccaaccaagtgttgttcagctgaaatggacatggatcttaggcaaagctgggttggacgaattgatccccatgattcgcattttcttgccattgccattgcagagcagcagctgctgcaagctgaatttgatgattgcgtgtcctcaaattcaagtggtgccacatgctgccgaactgttgttttaattctgacgttacttttgcttgtgcgccatgtagttgtgtttgcgagagatgttagcatgctgcaggatgcaacagtgttgtttagcgcaactcttcagttcgcaggattctttcttccatgttatgttatagcccgctcttgttatgcttttcaacaccggaggcgaagacaggtttaggggccacctgaacctggctggaagcatttactcaaaacaactcaacaccatcacagagagacgagaggaaaagcttgtnaagaagtaactcaaactccctttgcttggagcctctgcgaaanatttggcttaatttctcccccaacaagatgtagttgccgatttagaccatggggcctcgtgaagctcaactgtacatagg

SEQ ID NO: 389971 - DNA, 763 bp, Oryza sativa
ccacgcgtccgcttccttgttgcccccttacccaagttgatccgtcgccgagttcgcctgagccccaatctccgatcccccaccatcgccggcgccgccgccgctccaccctgccgcttttcctcccgccgccgcatcctcgccgcgcgggatggccggagcgacggatctccccccgaagggcgggttcagctacgacaattgcgcgaggaacgccatgcttgtggagaagggcttgaagatgcctgggttcctcaagaccgggactaccatcgtcggtttggtctttcaggatggtgttgttcttggggcagacacgagggccaccgagggtcctatagttgctgataagaactgcgagaaaattcattatatggcgccaaacatatattgctgtggagcaggaactgccgctgacactgaggctgtaacagatatggtcagttcccagcttcaacttcaccgttatgcaactggtcgtgagtccagagttgtaacctctcttacattactgaagtcgcacctttttagctaccaaggtcatgtcagtgctgcccttgttcttggtggagtagatgttactgggccacacctgcacactgtttatccacatggctccacggacactcttcctttgccacaatgggttctggatcccttgcggcaatgtcagtgtttgaatcgaagtacaaagaaggcctcacaagggaggagggaatacaacttgttgctgaggcaattcgtggtgtatcttcaatgactt

SEQ ID NO: 389972 - DNA, 1008 bp, Oryza sativa
  unsure (1)..(1008): unsure at all n locations
gtaaatactttggcttagaggcagaccaagtgacatttttccaacaaggcacccttccatgtgtttctgctgatggcagatttattatggagacaccatacaaggtagcaaaggctcctgatggcaatggtggagtttatgctgccctcaagtccagaaggttgctggaagatatgtcttcacggggtgtaaagtatgtagattgcgtcggggttgacaatgcactggtccgcgttgctgatccgacgttcctaggttacttcatagacaaagctgtatcttctgctgcaaaggttgttaggaaggcttacccacaagagaatgttggagtatttgttcgacgaggacgtggtggacctctctctgtagttgagtatagtgaaatggacgcagctatggctactgaaattaatcagtcaacgggacgccttcgttattgttggagcaatatttgcttgcatatgttcactttggattttttgaatcaagtagcaaacagccttgagaaggacagtacttatcatcttgctgagaagaagatcccttccatccatgggtacgcaatgggcttgaagcttgaacagtatatattcgacgcgttcagttactccccatccacagcactttttgaggttttgcgggaggaggaatttgcgcctgtaaagaatgcgaatggcgcgtcttatgatacccctgatagcgcaaagctgatgctgcttcgtctccatagtagatgggtagttgctgctggtggcttcttgacccattctgtcccattgttcatgccaggtgtggaagtttctccacttagctcctatgctggagaaaacttggaagccatttgccgcggacggacattccatgcgccgagtgagatttccttctaggtgtacctgtgacacaaacagctctgtaacttcaaatttgtggaacagtggcagagaaaggattgcaggatttcatctcnnnnnnnnnnnnnnnnnnnnnnnnnnnnnnnnnnnnnnnnnn

SEQ ID NO: 389973 - DNA, 694 bp, Oryza sativa
ttggttgtccaactctcagcagagcataacgtaggcattgtgtcagtgagaaaagaattgcagtcaatgcacccggaagataggcatattgttgttctcagcctcggcggtcgccggggaaaaggtctaattcaggtctgcagatcaattggtgatgcctatctcaaaagatcagagttcaaccgggaacctttgtatgcaaaattccgcctccgggaaccttttcacaagcccatactaagttcagaaccatcgattagtgtgcaacccctacaaccacatgatcaatttctcatatttgcatctgatggtctatgggagcacttaaccaatcaagaggccgttgacattgttcacagtagccctcgcaatggaagtgctaggaggctcataaaggcagctttgcaagaagcagccaagaaaagagaaatgaggtactcagatctcaagaagattgaccgtggtgttcgccgccacttccatgatgacataaccgtcatagtagtcttcctcgactccagccttgtcagcagggcgagcacctacaggggcccttctgtttctttaagaggcggcggcgtgaatctgcgcagcaacacacttgcaccttatgcatctcaaatgtgaccctgaatgcatggtggaggcaacacacctgactgaagaaggttttcttcccctgtggtaaagtaaa

SEQ ID NO: 389974 - DNA, 451 bp, Oryza sativa
ccacgcgtccggcaatgttgtatgctgcgagaggtgctcatttgttatgctatcccggtgcatttaacatgactacagggcgcattgcactgggagttgctgcaaagggcaagggctgcagacaatcagctgtttgtggcaacctgtgcaccagctcgagacaccagtgcaggttatattgcttggggacattccactcttgttggaccttttggggaagtgattgctaccgctgagcatgaggagaccactataatggcagaaattgattattcattgattgatcagaggaggcaatttcttcctctgcaatatcaacgccggggcgatctctatcagttggtagatgtccagagatccggctctgatgagtagccagcctggatgcattgcgccactaggcgtgatccgtgaaaatattattcgtccgcgagatgcatgtgcccaccct

SEQ ID NO: 389975 - DNA, 812 bp, Oryza sativa
  unsure (1)..(812): unsure at all n locations
ccacgcgtccggccatagcaaaggagtatatcatagagatttgaagcctgaaaacctgcttcttgactcacgtggaaacttgaaagtttctgattttggacttagcactttggcccagaaaggagtaggccttcttcacacaacttgtggaacaccaaattatgttgctcctgaggtgcttagcaacaatggttatgatggatctgcagcagatgtttggtcatgtggtgttattctctatgttttgatggctggataccttccttttgaggaagatgatcttccaacactgtatgataagattactgcaggtcagttttcatgcccttattggttctctccaggtgctacatcgcttatccacagaatactcgacccaaatccaaaaactcgtatcactattgaacagataagggaagacacatggtttaagaagacttatgtagccattaaacgtggtgaagatgaaaatgttgatctggatgatgtacaggctgtttttgacaatattgaggacaagtacgtttctgagcaagtgactcataatgatggtggccctcttgtgatgaatgccttcgagatgattacattatctcaaggtttggatctttcagcattatttgatagacagcaggagtttgtcaaacgtcaaactcgttttgtctcaaggaaaccagcaaagactatagtagctacaattgaagttgttgctgagactatgggtcttaaggtccactctcaggattacaagttgcgtcttgaaggtgtatcttcaaacaggatgagcccccttgctgttgtnctacaggttt

SEQ ID NO: 389976 - DNA, 467 bp, Oryza sativa
  unsure (1)..(467): unsure at all n locations
acccggtcagtgctgcagacaagccaccccctgcctcgcgtagactgctccccccacaaacaaaagcaatcctaatctcggattcgaggcgaacgagcggcggcgagggagggggactagcggcgatcgcgattggagtcgggtggacaccgatcgcggcggcgctctgggggatcggggtgtggaatcgagggggagggaggaggagacggaggcgatggggcggctgttcgtgatgcacctggaagggaaggtgtacagctgcaagcacttgccacacgcacctcggcctctcctccgacatcatcttcaagtccttccattgcaagcacgggaaggcgtacctctttcaataaggttgtcaatgtgactttcttgagtnaaagaggatccgattatgattaacccgattcatactntgtcttaaatcttctgtgtttggtttcgatccnttttttgattgaata

SEQ ID NO: 389977 - DNA, 453 bp, Oryza sativa
ccacgcgtccgggcgccactggtggagtcaccgctcttctcacgtcagacaaaccaatctttgagagtccgcatgctgtgaccggcatcatcggccttgcactccttaccattcagtctatcctgccgacattgttcgagggtaatccttcgctgagaaatgcacatggactcctcggcagcggcatcatgaccctgtttctaatccacgcagccttcgggctacagctcgggctcagcttctaatcctcagccacaacatctggggtttgcttctctgtgattagctctcagaggcatccctgttacacacatcgaagagaaatgaaacacagagagagttttctctctcttgttttccctttggttcttttcaccctgcgaatgttgacaataatgtagacctggtgttggattgtgtattgacgacaacgaattcaaaaaaaaaaaaaaa

SEQ ID NO: 389978 - DNA, 789 bp, Oryza sativa
ccacgcgtccgcggagatacttcatggtcattggcatcaacaccgcattcagcagccggaaacgaagagattcacttcgtgctacgtggatgcctcaaggtgaaaaaagaaggaagcttgaggaagaaaagggaattatcatccgattcgtcattggtcatagcgcaacatctggtggcatactcgatagagctatagacgcagaagataggaaacatggtgacttcatgagattggatcatgttgaagggtatctggaattggctgcaaagacgaaatcgttctttgtgacagccttgtccatgtgggatgcagagtactacattaaagtggatgatgatgtacatgtaaatatagcaactcttggtaacatattggctaagcatcggtcgaagcctcgagcttacattggttgcatgaaatctggtccagtcctggctcagaagggtgtaagataccatgagcccgagtactggaaattcggcgaatgggggaacaagtacttccgtcatgcaaccggccagttatatgcaatctccaaggatctagcttcttatatatcaatcaaccagcatgttctccacaaatatgctaatgaggatgtatcattaggagcatggttcataggtctagacgtcgaacacgtcgatgatcgcaggctttgctgcggtacacaaccagattgcgaatggaaggcgcaggcaggcaacgtgtgcgccgcgtcgttcgactggagctgcagcggcatctgcaaatcggcggatcggatgaaggaggtccatcaacgat

SEQ ID NO: 389979 - DNA, 1305 bp, Oryza sativa
  unsure (1)..(1305): unsure at all n locations
caggatntttcaaagaaaatttcatgaagaagagtcagtgccagcagccagacgtgagagtgttatgatcttgcatagtgaactaaagcgccagagaaagcttgtgaaaactctcaagaagaagtctttgtggtctcgaactttagagacgattgtggagaagcttgttgatattgtcgtatttttacataagcaaattcgggattcattcagtgaagctgtttctgtaggtgctgaccttttcaattcagagcaagctcaaaacaaaagactaggttcctgcggtctagccttacattatgcgaacataatcaatcaaattgaaaatattgtttctagaccactctctcttcctcctagtgctaggggacaatctgtatcatggtctgccagtaacagtgaagtcagctctcagatccgcggttgcaaatcagttaatgcccaagaagagcgtactgtagctcaaattaaagctgaaatgcagaaaactcttcgctggattctaccgattgctgaaaatacaataagagcacatcaaggttttggatgggtcggcgaatgggcaaaccttggttgcgaaatgaacaagaaatcaggctcccagctcagtatcacccgtgtccagactcttcattacgccgatgaggcggagacggagcaatacatgctcgatctggtggtgctgctccaccatttagttgtccaggtgaagaacagaggctatgggagcaagtcctcaaagcacgaccagtcccgatcccgcaagggaatggatcttcaacctgaatccaagctcaacacatctccagtgaacaacgccacatatccgagcccgttgtcggagtccgaacgcgagacgctggaccacctgagcttcaagaggacgggctacggtaggagcaagagctgcgagcctccacccaatagagggaagaaggcacatcgaacctgggattcatgccggagccatggcagctcgccggcgagggaattcggtaggaactcagcttcagagcttgacaagacgatggacctggatgtaatagatgggttagatagagtgattttaccacccaacatcccccacattttgttaggtatatggtgcacaaaaataggtattcttttggtgttcctacggttgattgatcgtatatatatcttgtaaatgtgtgtgatctacctatatattgtgttacatgtacatatatacatagcttagtagtacagccctgagtttgagtggaaatatagcaagatcacaagtgaaaaaaaaaaaaaaaaaaaagtggagagtagttgtgt

SEQ ID NO: 389980 - DNA, 455 bp, Oryza sativa
  unsure (1)..(455): unsure at all n locations
ccacgcgtccggaagatcagaagaatatcatacagaccgagaggcaaggtactgggatgtaggagacgacaactgtaaatcattgggtggtgctggcatccttgagtctgctaacctctctcttgatgaaccgtagttcgagcttgccatgatagaaaacatcgtgtgatgaagaaaaccaaatggaaatcaagacagaagcttagcttagctaagctacccatgcttcaacttgtctggcgttttgaactcccagataacccctgtaatcgagtatgttttggctaagaacatgcaagactagagctaggtagacttatgggatgtttggctgtgtaagctggatggtgctgttgatcaatgttggtggagggcaattgaactttctttacctggctaattggcagctaatctgccagatttttgcaacttgcnnnnnnnnnnnnnnnnnnnnn

SEQ ID NO: 389981 - DNA, 541 bp, Oryza sativa
ccacgcgtccgccctcccgtccggcgaccgccgctagatctggatgcgccgacttcggctcaggcgacggccgacggcgttaggcgcgttggcggcttgctggctggcgggctgagggtgtgaggtaggcggcgtcgcgaatcgcgggcgcgcacagcggctgcgccgtgcccatgagcgatggacggaaaggcgcggaggagcctgcaaccaggcgggtggcggccaggcgagcggccgacgcccgtgaaggctgcgtctggggctccaccaggaatcgccaccaatagccggctctcacgcttcagatccgaacgccagctgaccagcgccaccctctggaactggagaatcccagtcactgctcgtgcgcactgctggcccggcctctcgacgtcctcccttctggcagccgctgcttgattgcttgtcttttgcagtgaactatgattttggtggtgcggcctactcagtgctcacccatcacactcatacctgagaaactggtgctatgaaaatctgcatattggactggttatgc

SEQ ID NO: 389982 - DNA, 901 bp, Oryza sativa
  unsure (1)..(901): unsure at all n locations
ccacgcgtccgcccacgcgtncgccagcagcttgcacttctgtctcagcagcaagctttactaatggctgctcttggagctggaaatgcaccccaaatgattccagggaacgccagtctgctaaatggtaatggttctaatcctgccaatggaggcttgccttcacaaagctggacaaatcttgcttatcagaatcctgggttggctccagtagcagcacagaatggtgccaccaaggttgcgaacaacaatcaggaattctcttttgggaatttcaattttagtacacctggagcatacaacactagctcatctgtcccagcaaatggggccgcaagtgcagctgctaacaagagcacatccccgacctcttcttccctcccctctcaatcaggcaaagaatatgatttttcatcattaactcaaggactgttctccaagcgatgaacacttgctatacttggaaattaaacaaatgggcctgtatgcaacgatggacacagaagattttattagggggaaccgggggccttgtacactcttttatgaggcagcatttcttcttgtggatattacgacaccttgtagctgtcctggacaaataagaggaagaatatagcagctaattgcatatgttgtttcctacagctgaagagagtcgatattgttcatgatgccgatctctttgaatagaggacgccttgtggctttgttggacttacatttataagagcataatgcaactattttattctctttgttcatgacatagttacaatacgtgacgccgattattttctactgtaccatacttggattttgttattcacaaaacatttgattgtattattatgccaagtgagctattacacgcactgaaccaaaaaaaaaaaaaaaaaaa

SEQ ID NO: 389983 - DNA, 751 bp, Oryza sativa
  unsure (1)..(751): unsure at all n locations
tttacgtgtccgggattggttggggaccaccncgcccgccgggagggggcggggtttctttaacttcctcctctcttcctaccacgagtttagtgaatttgggactgatggtggaccagcagcaaaggccttggggccgggattcaatctatttacgcagcaagtgtccaagagcttaggaatggcagtgccacatattgatataaagactgtcattgctgctaccatgtttcttaaaggctttggtggtcttctgttcatcatcagcagctcatttggagcattcctactgctcctgtacttagcagttataacacctgttgtgtacgacttctacaactatgaaatggagtcttcacaatttgttcagcttttcgtcaagttctcacagaatttggcactttttggtgccctgcttttcttcttgggaatgaagaactctattcctagaagacattccaagaggagggccgggaagaccaagacaaactgaaaccagccactgtagtaggggaagctatttgtgctccttatgtttgcatactttacaaagtacatgtctcaattttcctcttgatactccatagaaattgtgaattggggacttaacagaacctagtatgtaggatacctaagtatgtctttatcagttctgttatcggtatatcccgttgtgtttcttctgtcatgaaagtaccattttgctaccgaaattgtttgtctatggaagatcaaatagattcatacaatt

SEQ ID NO: 389984 - DNA, 570 bp, Oryza sativa
  unsure (1)..(570): unsure at all n locations
gggtcgacccacgcgtccgtctccctctccccttccctcctccttcctaccccgccgccggtgcttgtcgccgccgccgccgtcagagagggcgaggagggcggctcgaggaggagcagcagcagcagcagcaggaggaggatggggttcatctcgttcgtcgggagggtgctcttcgcctccatcttcctcctctccgcctaccaagagtttagtgaatttgggactgatggtggaccagcagcaaaggccttgaagccaaaattcaatctatttacgcagcaagtgtccaagagcttaggaatggcagtgccacatattgatataaagactgtcattgctgctaccatgtttcttaaaggctttggtggtcttctgttcatcatcagcagctcatttggagcattcctactgctcctgtacttagcagttataacacctgttgtgtacgacttctacaactatgaaatggagtcttcacaatttgttcagcttttcntcnagttctcacanaatttggnnctttttggtgccctgcttttcttcttgggaatgaanaactctntccct

SEQ ID NO: 389985 - DNA, 665 bp, Oryza sativa
  unsure (1)..(665): unsure at all n locations
cgagcagcgncgacgtgnttccgccgcaccctcgntcgccggtgtccgggnatttgcattcagtgacaaaagttcttcagctgcggagtccgggccgcccagatacgcatagtgatgaaatcttttatgagccaagctaacaaggttcaaggggttattccatacgcgcagaaggttggattgcctgaatcacgatccttgtataccgtgctacgatcgcctcacatagacaagaagtcgagggagcagttctcgatgcatgtcaagaaacaatttctggtacagaaggcggagacgcacgagctgcagaagaagctgttctggttgaagcgcctgcgcctgcttggtgctcagtatgaactccagatcagtttcaagacccgtttggacaagaagctgctccaagctgctttgtcgtcaggttgctagagcacttcacttaccaccattcacccttgaacaagactgcttttgcttctatgatgtcttcatgatgagattgtcaaacagtacttgcatccattaagcatttcatatgatgaaactacancatttggaaggagtttgaagggaatgtaggtangtaatccatnccaaaacgttcaagatgctctgaattatgaaagatgtngcatgatatgaaacagntatccttcccgtttcaa

SEQ ID NO: 389986 - DNA, 994 bp, Oryza sativa
tctaaacaattcaaaggacgcagcgatggaaaatctggaggagtcaagtgttcgagctgctgacttaattggttcgatggccaaaaacatggatgcacaacaggcagcaagagccacaaatgcccctaattgctcctccaaagtgccagaagggaaagataagaaccgtgataatattatgccatcacttgaattaagtttgaaaaggtcaagatcgactggggatgatgcaaatgcaatccaagaggaacaacggaatgttttgagacgatcagatctctcggcatttacgaggtaccatacacctgtggcttccaatcaaggtgggacaggattcgtgggaagctgttcgccgcatgataatagctcagaggctatgaaaacggattctgcttacaacatgaagtcaaactcagatgctgcaccaataaaacaaggttctaatggtagtagcaataacaatgacatgggttccactacaatgaacgttgtgacaaagcctagtacagataaggagagagtaatgtcaccctcagctgttaaggctaatggacacacatcagcatttcatcctgcacagcactggacgtctccagctaatacaacaggaaaagaaaagactgatgaagtggctaacaatgcagcaaagagggctcagcctggtgaagtacagagcaacctcgtacaacaccctcgcccaatccgccacgcggcccatttcgatgtgtcacgtgagaatggtggatccggggcccctcaatgtggttcatccaatgtatttgatcctcctgtcgaaggtcatgctgccaactatggtgtcaatggaagcaactcaggcagtaacaatggaagcaatgggcagaatgggagtacgactgctgtaaatgctgaacggccaaatatggagatcgctaatggcaccatcaacaaaagtggacctggaggtggcaatggaagtggaagccgcagtggcaatgacatgtatctgaaacgc

SEQ ID NO: 389987 - DNA, 798 bp, Oryza sativa
  unsure (1)..(798): unsure at all n locations
ccacgcgtccgcggacgcgtgggcgcggggatactccgcctcctcgacgagcgcctcgtccccgccgccgccgccgtcgacgccccggtcttctacctcaagatgaagggcgactaccaccgctacctcgccgagttcaagaccggagccgagcgcaaggacgccgccgacgccaccctcgccgcctaccaggccgcgcaggacatagccatgaaggagctgtcgccgacgcaccccatcagactgggccttgcgctcaacttctccgtgttctactacgagatcctcaactcgcccgaccgcgcgtgcacgctcgccaagcaggccttcgatgaagctatttcggaactggatacccttggggaagaatcctacaaggacagcaccctgatcatgcagcttcttcgcgacaatctcactttgtggacttctgatatgcaggacgatggaggtgatgaaatgagggatgcaaccaagcctgaggatgagcactagctaaagatcctagtgacagtcgtctgtctcttaaccgctgggggtagttatgatgcttgtacaaggaccattttcttgtgtcctttcgtcgggtctttgcttaccctttgtttacttatattgctatcgccatcctcatgtattatttgttactttcctgctggaatcctgctcgtgtgtgggagagtgcctcaagcctttaactaggacaaggattgtcaactcttgtttactatgattgaatggctatgcttgttcgatatttnnnnnnnnnnnnnnnnnnnnnnnnnnnnnnnnnnnnnn

SEQ ID NO: 389988 - DNA, 488 bp, Oryza sativa
gggccaaacaaaccgccaacagagggccaattaagtaaatcaacgggcggcccggggagcccgctaaaccaaggtgtcacggccaccaaccatggccagcccgcgctccccagcttatcctgggagtgagctcctgcctccccatcatcatcagtggccagaccttggtcccgtctgacccccgtagaacttgcgaaaggaaatgtcgtggcggtggtactcgaggtactccggtgcgacgccatggatcctaactagcccccctatctagtgtaatgtctgaacctgaatcagggaagaaaactgtagccgttgcatctctagccagctcttctggtgtaggtgctgttactattggagaccagactcaatgtgttatttaggtggttaaattgtttttttatcttccagacaccgatgaaaaagctcattgcttctatgtaactatgttgagcatgttgcggttagcttgaggctcagttctttta

SEQ ID NO: 389989 - DNA, 564 bp, Oryza sativa
ccacgcgtccgggcggaggcggcccggccgggagagggatggagcaacaacaacagcttgccggggacaggttccgcggcccacataaagagaagcctcttgtgtcaaccattgggaaatcaaccaatatactgtggcacaattgcccaattggacaatctgtgaggcagaacttgttggggcaaaaaaggatgtgtcatttggaatcacagggactcagctggctctagggaaaagcactcttgcatgtgcactgtatcgggagttgcattgcagcggccaccttacttatgtccttgatggtgacaacctaaggcatggcctatatcgagatctaagcttcaaggcagaagaccgtgcacaaaatataccaagagttggagaagtggcaaagctattcgcagatgctggaatcatatgcattgctagtttgatatctccatataggagagaccgtgatgcgtgccgtgtgctgcttccagagtctagatttattgaagtatttatggatttgccactagaaatttgtgaagctcgtgatcctaaaggtctatacaagcttgc

SEQ ID NO: 389990 - DNA, 487 bp, Oryza sativa
ccacgcgtccgaatactgctcttttgccttctgggacgaaaaaagaagcaaggatcaatgaacacttgcgtaaagccgcagaatgagacagcgagctatgtgccgacaaatggcagccatgggcatggctcatcaatgcagcttgagaaccgacggtttacttacaatgatttagagaagataacaaacaactttcagcgagtgctcggcgaaggagggtttgggaaggtctacgatggcttcttggaagatggcactcaagtggcagtcaaattaaggtctgaatcttccaaccaaggggataaggaatttctcgcagaggctcagattttaactcggattcaccacaagagccttgtatctatgatcggttattgcaaggatgggaaatacatggcacttgtctatgagtacatgtcagaaggaacccttcgagaacatatttcaggtaaaagaaacaacgggagatacttaacctggagagaga

SEQ ID NO: 389991 - DNA, 1041 bp, Oryza sativa
  unsure (1)..(1041): unsure at all n locations
aatggatcacatggataccgatgaaccaaatgcagtacgtggaacaattgggcatatcgcaccagaatatctttcaactggaattatctctgagaaaactgatgtatttggttatgggattatgcttttggagcttattacaggacaacgtgcctttgaccttgctcgtctagccaatgatgatgacgtcatgctactggactgggtaaaaggattactcaaggagaaacggctggagatgttggttgatccagatctacagagcaactacattgatgttgaggtagaatcactaatccaggttgctcttctttgcacacaaggctcccccacagaacgccccaagatggcggaggtggtgaggatgcttgaaggtgatggccttgccgagagatgggaggagtggcagaagatagaagtagtaccgcaggaggtagagcttggcccgcatcggcactcagagtggattgtcgactcgacggacaaccttcatgcggttgagctatcagggccgaggtgatgacagcgcactggtagtttgctgctaattcttgtccgtcggaagagtgatttttatcagccatcctagtcgaatcgccatttgttcataccaaccaattggcccaatgtagccagctacaactatggtttgatgtatattgcttgatttgctccttgatgtgccgccttggatatcggtgacccgaaaacagcaggagcccaaggaactattgtcctgaagcttgcaagttgcaacaagatcccagtatgttaaagctcacaaggtagcagctaggagtgaggttgctgcggctgtttgctggacctgtgaaaattgtactgactggtgacatctaactattttgtaccaaatgtaaggaaaaaccatggnattattactttggcctcctctnggaaaggttcagaactttcagatgatgcagttggcctnactggtatactctatttggacatttgattatgangtgtttactgtaaangatacccagttctnatcaaatgtacctctgcatacagatg

SEQ ID NO: 389992 - DNA, 383 bp, Oryza sativa
  unsure (1)..(383): unsure at all n locations
gagcaacccaattgctagatggcatgtttgccaaggttcaatcaacgccatctccttttcaccagatggagcatatttagcaactgttgggcgagatggttatttgagagtgtttgacttttcgaaggagcaactaatatttggtgggaaaagttattatggtgcactattgtgttgcacatggagctcggatggcaaatatctgttgactggtggtgaagatgatcttgtgcaggtatggagcatggatgacagaaagatagtcgcgtggggcgaagggcataattcctggcggtcagtggagtttcttttgattcgtattggtctcctccgaattctgatggaacaggagaaaataccgtgtatcgttttnggttctgttg

SEQ ID NO: 389993 - DNA, 996 bp, Oryza sativa
cgacgcgtccgcccacgcgtccgcccacgcgtccgcccacgcgtccgctccttccccgacgacctgctcgatccgatccaatccgctcctctccagtccagatcggaaggaagccaggaatggggcacccccacccccacccttacgcgccggcggagcttcacctcccgggcttcgtgcctctccaactgtcccaggcccaaatcctcgtgccctacctcgccacctccctcttcctcctcctcgccgtctggctcatctccgggagatgcagtcgtaggctttccgacaccgaccgctggctcatgtgctggtgggccttcaccggcctcacccacattatcatcgagggaacctttgtctttgctcctaatttcttctccaaccaaaacccttcttacttcgatgaagtttggaaagagtacagcaaaggtgactccagatatgtcgccagagaccctgctactgttacagttgaaggaattacagctgtcttggaaggccctgcttcactccttgctgtctatgccatcgcatcgggcaagtcctacagccatatcctccagttcactgtctgtcttggtcagctctatggatgcctggtgtactttattacagcctacttggatggcttcaacttctggactagcccgttctacttctgggcttatttcattggtgcaaacagctcgtgggttgttataccaactatgatcgccataaggagctggaagaagatttgtgcagcatttcaaggtgaaaaggtgaagactaaataggcaaagggtgcaccttagtcacagtttggttggaaattaatagacatttgtgctatgaacaacatcattgttcctgcaattgaaacccttgtgttactgaaaaattgcattgtacccttggagggaacatcagtgttaattggatgtgactttatgcagctattatgtattgctgcaaaaagaaattgggtttgtttatcctctatcattcaagctc

SEQ ID NO: 389994 - DNA, 568 bp, Oryza sativa
ccacgcgtccgattattattagtactaattcaacctccccctcgccgccgtcctcctcctcctcctccgcgtccgcacggcagccggaggcgggaggcgaggcgaggcgaggcgcgcggcggagatggcgatcctgtacgcggtggtggcgcgcgggacggtggtgctggcggagacagcgcggcggcgaccaacgcgggcgccgtggcgggcaggtcctcgagcgcctccccggcgggggagccgacagccacgtctcctacacgcaggaccgctacgtcttccacgccaagcgcaccgacggcatcaccgcgctctgcatggccgacgaggcgccggacgggaaatcccctttgcgtttccttgaggatatccatggaaggttcgtgaagacatatggccgtgctgcattgacatcccttgcttatggcatgaatgatgagttctcgagggtcttgagtcagcaaatggattactattcgaatgacccaaacgcagacagaataaatcgtatgaggggtgaaatcagtcaggtccgtactgttatgattgacaatattgataaagt

SEQ ID NO: 389995 - DNA, 775 bp, Oryza sativa
ccacgcgtccgagcataccctcaacctggtcatttctacccaaatgctgttggatatggtgtggctggaaaccaaggtgttgacttcccaatgcagtacagtaatgtgcatccttatgcaggtcctgaatttggttatgtgcctgcacagccagtccataagactccggtgaactttaatgccatggtgccaactgctgcgctctttagaaatggagcgccagaagtcataaaccctgtcattgtaaaaccagacaggcagcatcgccatacccttcctcctgagccgaagcgggtggatcctgatcctcagaacggctgttcagaagataacaagaagccgcaagatggctctgtgcctttctcgttgttccatttcaaccttcccatatcctcgcctgcccaggcatcatctgaagaccaggtgagtggaggattgtttggcgtcgagatcgccaactccaagtgctcaaaaagctcagccttgctcaagggaggagaccaacataaaggagtacaacctgttctctgcaaggactggagtggaatttcccttcttctagacaacagacgcgcctattatttggcacagaacaatacatagcgagtgatttgtattctccaaaaaaacaaaaacaaaataagttacctcgaggtttttaccgtgttccctcgaatatttatttatttcttcttccatttgttttggttgcccttgtgtgtaaggaaattgcaaagatagtgagtggtatagtttctaaaaaaaaaaaaaaaaa

SEQ ID NO: 389996 - DNA, 576 bp, Oryza sativa
aagctacttcttcctccctcccttcctcctctcgccgccgccgccgccgcatcatcgccgtcgaagcgtagagggagtaaggggaggatggggagaggaagaggggtgagcagcgggggagggcagagctcgctgggctacctcttcggcggcggcgagacggctcccgcggcgaaggcgaacgggcttgcagcggcggagaaggagactacgccggcgccagtgaagaaggcggcggtggcggcggcggcgtcgccgtcggcagcggagaagatgaaggagatccccgcggggatacaaagcacccaggccaacaactacttccgggcgcagggccagaattgcggcaacttcctcacggatcggccgtcaaccaaggtgcacgctgctccgggcggcggctcgtcgctcggctacctcttcggcggcaagtgatgcgaaaaaaaaagaagaaagaatcctctgctcgagaaatttctctctagcagataacgtgattatttttaaacctgcttttgggtagattgcctgcgtattgtgtgttgtgatgtgttcttgtgtgtttgcagcttcttt

SEQ ID NO: 389997 - DNA, 687 bp, Oryza sativa
  unsure (1)..(687): unsure at all n locations
attgaccatngcaaaagatcctcatgtctccatctctctcaccggcctcgccatggtcgtcttcctcatcttcagctcctccttcctccaggccgcccaaggtacgtacacaccttcatcttcacctgcttcatcatgcatcttggtgatccttccaaaagtcgatcggattccattaattgattttcatgcatgcaggaccagacaagaagatggtgatgaagtacgacgtgccggtgaagaggttgatgtaccggccggcggcgatcggcacggaggcggcggcgtacgagccgttcgagctgtgcatgggctgccggtgctgcgcgtcgtcgaacgcgagcagctgcgtggacacccggtgcggctacgccatcgactgcaacatccccggcaagccctttcggcgtctgcgccttctccccccacacctgcgactgtagcgccaccaattgcaccagccagcagccatgaccacacacctcttgctgctgctaattcaattcgatctcttccatgatcaatatgcatatgcgcctgaattattcaacggttttctgatgcgattgcaaacgtattaagttttttttttcagagattcttgggactagatatgcttaaggatgtcattgttcctgacacgggcatgttgatatctgaatgtttaactgcatataagatcttcag

SEQ ID NO: 389998 - DNA, 570 bp, Oryza sativa
ccacgcgtccggaggtctcccaggccccatccgatgtctgggttgtggtcttcctctacaaggatggaataccagaatgtgggttgcttcagacttgtctggatgaattggctacaagatacccagcaactaagtttgttaaaatcatctctacagactgcattcccaactacccagatcgaaatgtccctactatacttgtgtacaataacagtgctgttaaagggacttatgtcggtctgcagaagtttggtggaaaaagatgcacacctgagtctgttgcattggcccgttgccagtcagagccagtcctgaatgatgggcagagcggcggtgattcatcccgggacaatgtcatagaaggcgttcgcaggaagttcatcgaaaaggttgtcgcccagcatgaagagcgggaggaagatgacgatagtgactaaacatactctcctaggatgtctcagttcactgatactattgatgatgtgggtcaagttttgcctgagatcactaattgtactcatatttgggtctgttctgaaaatgctgaattttctctctacgatgagctgc

SEQ ID NO: 389999 - DNA, 536 bp, Oryza sativa
  unsure (1)..(536): unsure at all n locations
ccacgcgtgcgcccacgcgtacggtgaagccagacaaagtaggagacgaagaagttgacgtgcctgaatacanctggctcatacgagcctcaggaattgatatctaaatatagctctacagtgagggatcttctattcgagaaagtacctggatcatgcactcaagcccagttcagatctgatgtcatgaaaccactgaaaattgagcaactcatggacaggcaggttccaactctttctggaggggagctgcaaagggttgcgctttgtctttgtcttgggaagcctgctgatatttacctcatagatgaaccaagtgcccatcttgattcagagcagcgccttcttgcagcgaaggtcataaaaagatttatcctccatgaaaagaaaactgcttttggtgttgagcatgattttatcatggcaacctaccttgctgataaggtggttggtttttgagggcaaatctttttctcttccctttctatcacattttccttaaccccctggttccttatatatattccatatttttt

SEQ ID NO: 390000 - DNA, 540 bp, Oryza sativa
ccacgcgtccgtccacgcgtccgcccacgcgtccggaccaaatcgccgcagcagggcgcgccatggagccggcggcggagaagagggaggccgagcaggaggagctgcagcagcagcacgacgagcccgccgtcccttccgccgacgacgacgaggctgaggcggaggagaacgagcgccgcaaccgcgagctcaaggccggcttccatccccttaggcgtagattcgtgctatggtacacgcgccggactcctggggcgaggtcgcagtcctacgaggacaacatcaagaagatcgtcgacttcagcactgttgagtcgttctgggtttgctactgccacctcacgcggccggttagcctgccgagccccaccgacctgcatcttttcaaggagggcatccggcccctctgggaggatcccgcacataggagcggtggcaagtggatcataaggtttaagaagaccgtctctggtcgtttctgggaggatttggtgttggtgctagtgggtgatcaacttgattatagtgatgatgttt

SEQ ID NO: 390001 - DNA, 898 bp, Oryza sativa
ccagggggcccctcgagctcaagaacaccagggggaggacgcccgtgctcgacatcggcgcgctcgcctgggtccgctccggcgacatcgaggtcgtgcccgggatcaggaggctcctccgcggcggcgccgagctcgtcgacggccgccgcgtcccggccgacgccgtcatactggccaccggataccaaagcaacgtcccccagtggctcaagggaagtgacttcttcacacaagaggggtacccaagggtgccattcccagatggttggaaagggggagtcagggctctactctgttggcttcacaaggagaggcctctctggtgtctcctcagatgctgttaaagttgcacaggacattgccatggcatggaaccaccaaaccgccaccacaagatgattgatttaacttgctaaggaattaaccatgatcagcttgcttactgcaaacaaattgcaattaatcaaatatcttgaggcgcaacatggcactcaactggctaagaactgcatgctacaaactctgttccagagacagacaccaaaatattcagaaaccaagtccagggtccaaaaaaaaactataaaacaggggggagatgaagcttcagagtagatgaagcttcagagttcaggagatggatgccacaacaaaggggaaaaaaaggggtgctatggatgctaggtttaacattgatgaggaggccagattaagatgcatcaagtagagcccaaattttgttgtacccatgggcctttatgtacagaatgttatgtagtggagcttgtgtacatctaatggttggtagggaatctagagttgacattcatatgtacttggttaatgtttacgtaatatggaggtgatgatgatgagacgcaaaaaaaaaaaaaaa

SEQ ID NO: 390002 - DNA, 742 bp, Oryza sativa
acacggttcggacgtatacctgttcaagaacaatcccgaggactttgcgatatactgcaagacggcgctgctggtggagaccgctttcagcgtggggcgcagcgggcagctggcctccctcacggctgccttcagcgcggtggcctcgtcgccgctccggttcctgacgaccagcgctggtgggctggtggttgtgacgagcggcatgtactgcgtggggcgatatgtctcagatatcggtgttcgccgcgatgtcgtcaaagtgcccgtggagaggctggtggagcactggccgccgcgggatgttgctgttgctcctcctcaggaaagccatcaagaatgccaaggaaatgatgttgctcctcaagaatgccatggagacggcgatggcggctgcgtctcggagtcgctgagctaagctcttactaataggaaaaaggcagtgtgccattcgatctgttgccgattgtaccgattatgaatgtatcatcgtttatgttgctcctcaagaatgccaaggaaatgttgctcctcaagaatgccatggagacggccatggcggctgcgtctcggagtcgctgagctaactcttactgataggaaaaaggcagtgtgccattcgatctgttgtcgattgtaccgattgctctgcgctgtttgtattctgtgattctgtccatatgaatgtatcatcgtttttatttactgtatctgcattctggtaaaaaaaaaaaaaaaaaaa

SEQ ID NO: 390003 - DNA, 699 bp, Oryza sativa
aaaacctggtatctttgctattggagatgtagcagcttttcccctcaagatgtatgatagaatgactcgagttgagcagtggatcatgctcggaagtctgcacaccactgtgttgaagcactcctaacatcacacacaaagccgtatgactaccttccatatttctattcaagagtttttgagtacgaaggaagttcaaggaaaatttggtggcaattttacggtgataatgttggcgaaacaattgaagtgggaagctttgaaccaaagattgctaccttctggattgactctgatagtcgactgaagggtgttttccttgagagtggtagctcagaggaattttcgcttcttcctcaactcgctaagtctcagcccgttgtagacaaagctaagctcaaaagtgcaacctctgtcgaggatgccttagagatcgcaagaagctctctccactctggttcttctgtttagctctcaagcatctagaaaaattcagtttgtgtcctgttacatcttttaaaacaccgagacttcaacaataattctccacaatcccacggcattcgtttatgcgggattgtaaaattcttagatgtacctacgttcgcatttccaatttgaaataaacttggttgccctttgaggggtttgataaagatatgataatgaaacccatggaatgttaaaaaaaaaaaaaaa

SEQ ID NO: 390004 - DNA, 1195 bp, Oryza sativa
  unsure (1)..(1195): unsure at all n locations
gcccacgcgtccggttcatgtgctgaacttgatactgataaaatatatctgtttgacactggggctcagtatcttgggggtactacagacatcacaggaactgtacattttggcaaaccctctgagcatgagaagtcatgctacacagctgtgttgaaaggccacattgcactagacactgctgtatttcccaatggaaccacagggcatgctcttgatattctcgcacggacaccactttggagaagcggtctggactatcggcatggcacaggccatggggttgggtcttatttgactgttcatgaaggtcctcatcaaattagcttcagaccttctgctagaaatgtaccactacaagcatcgatgactgtaacagatgaacctggttactatcaagatggaagctttggtataaggttggagaatgttctgatagttcaagaggccaatactaaatttaattttggagataagggttatttggcatttgaacatataacatgggctccgtaccagacaaagctgattgacgccactttgctggcccctgccgagattgaatgggtaaacacgtatcactcagattgccgaaggattttgcagccttacctgaatgagcaggagaaggaatggctgaggaaagctactgagcctatcgctgtgagctgctgttaaaccatcaactagctggttggctctacatggacacatggcacagggtctcgaccggccattcgtgctagatgtgcagaacgacaaacgatttgtggcgtgccatgcgtagataaatggttatcccgcaattcaattgcttgcaataagtgtgaacagcagaataaacatcgcaattgattctttggcttgtcatgctgctgaggttcatgtgagggacttagaaataaagctaggactggaaagcttccctcccatgaatctgcaggtttcatgtgtacagttatattgttgggtatcgagtgcctaatatgatttgcaatgaaaaataaagggtttgaaaccgtcaannnnnnnnnnnnnnnnnnnnnnnnnnnnnnnnnnnnnnnnnnnnnnnnnnnnnnnnnnnnnnnnnnnnnnnnnnnnnnnnnnnnnnnnnnnnnnnnnnnnnnnnnnnnnnnnnnnnnnnnnnnnnnnnnnnnnnnnnnnnnnnnnnnnnnnnnnnnnnnnnnnnnnnnnn

SEQ ID NO: 390005 - DNA, 1451 bp, Oryza sativa
  unsure (1)..(1451): unsure at all n locations
gcgagcggctgccctttttttttttttcaaccaattgtcgncggatcctctcctgttccctcaattttacatcattgagaagccttatccatccacctgtgaagaagccatccaagcttggtgaaaacttaacgagtcttgctgcagtagtggagaatgagcacaagcgtcttcttgcgaggaaatcaattattgaaaaacgcaaagaagatcttgagcgccaaatattggaaaaggaaaaggaagaagaaaaaaagagattgagtgttctcaagaaatctgcagaagatgaaaggataaggcttctcaatgatgtaaaattgagggaacaggagaggatccgtcgacaattggttgaaaaagaaaagatagaggcagaagaactgcttcagaaacagataaaggagatagcaaagagaggaggaaaaaaacctgtccttcagggggaagttactaaggaggctgtgatggaattggctatgaatgagcagtttaaggagcgccaagagatggagaaaaaactacagaagactggtaagcaaatggattacttggagagggcaaaaaggcaggaagaggcacctctaattgagcaagcttttcaaaaacgccttgaagtagagaaaatccttcatgagcaagagcagctgagagagattgagctcagcaagcaacaccatgcaggtgacctgcaggagaagaacagactttctcgaatgttggagcataagaacattttccaggaaagaattgtccaacgtcgtgaagctgagtttagtcgtcttaagaaagagagggatgaaaggactagtcaattgatatcatcaaggaagcgtgaaagggatacagtgcggaagttaatgtactatcttaacttagaagagcagcgcctccaaaggctccgtgaggaagaggaagctagaaaacgtgaagaggaagagaggagaaagagggaagagactgagaggaaggctaagctggatgcaattgcagccaagcagctgcagagagagagggaactagaagagaagaaggaaaaacagagaatggaagctctcatgggaagaggagctggagctgctgagcctgcacgcactcctgatgctgctccggttgcacagccagctcagccggtagctgcaccggctgctgctgctgccgctgctgcaccagctgctggtaagtatgtcccgaagtttaaacgaggtggtgatggtggcagtagtgctggcggccagagacctgctgtggcacctgagcaagaccgttggggttcacgggatgatcgcccacgtcctgatatgcgtccgctccgccaagaggcaccccctgctcgcgatgctgctcccccaagcccgccaagatgggtcctacaggcacatggcgacccttcaaagattctcaaagttcatcaatctttccttaacctttgtgcaagaanggtgaaactt

SEQ ID NO: 390006 - DNA, 676 bp, Oryza sativa
ccacgcgtccgcccacgcgtccgattatctcaaaattgatccacaaggtgaaggagctaggtggcggcggacatttggccaggaaatatactcccctcttcttattgcttttgcagagcaggatggaggtaattgggtgaattcacacgttacaaaattctctgcaatggatccggcctacagcttgcctgataatgttgcattgcttactcttcaggaacttgaagacggaactgttcttcttcggttggctcacctatacgaggctggagagcacaaggatctttcagctctagctagcgtcgacctgaagagagtttttccagacaagaagattgtcaagattggtgagacaagcctatcagcgaaccaagaacgttcagccatggagaaaaagaggctgaagtggaaggtggaaggccctcctgctgatgaaaagatcgtccggggaggccccgtagatccttccaagctcgtcgttgatctgggccccatggagatacgcacattcctcatcaatttcgccccgcagtccggcaaacagttgatgtgaggggtgacatggccttggcaccaatgttttatttttagcttgagttcttctcatggtgatgagcaataagaaataatgtggccatggtgattggtgacccgatgcagagatgcactggtagca

SEQ ID NO: 390007 - DNA, 492 bp, Oryza sativa
  unsure (1)..(492): unsure at all n locations
cgttagactccttaaggtcgtgaagacgccacatcccgtgcctgaagtttgtaggaaagcatcaatgatagtggagagcctagtctctgagcctcaaaacaggatgcatctccttgtccatgagaatactttttctgagatactcacgtcggaagggaaatactccgacacatttgcaaggattctatatgagctgactgcaaggccgagcaacaaagtgacagcagggcaagctatctgggggaacataaactgatgcatcattgtattgttaaaatctactagataagatgtactttagtagcttaggtacctgttatgttgaaaatgccttgggtttctgactgtatgtaacaagcttttagctgtatttagttgcagccttgcaagcttacattttaacgccttgatcttccttttctgaagtactacacttgcttccagagtttcagagaactatatatagagatattttgtgttnacccattntnt

SEQ ID NO: 390008 - DNA, 1014 bp, Oryza sativa
gagccacgcgtcccggggaatcaagaaaatatggtacaaccattgctcctggtctgtatgcacctgttcaccaacacttttttgttgcccgtatggacatggctgttgattgtaaacctaacgaggctcataatcaggtggttgaggtaaatgtgaaagttgaaaatgcaggcacacataatgtgcacaacaacgctttctatgccgaggaaaaactactgaaatctgagctgcaagcaatgcgagattgtgacccttcatctgcacggcattggatcgtaaggaacacaagggctgttaatcgtactgggcagccaaccggctacaggctcgtgcctggttcaaactgtttgccgctggctctacccgaggcaaagtttctgaggagagcgggtttcctgaagcacaatctctgggtcacgcagtacaagagcgacgaggtgttccctggaagggagttccccaatcagaatccacgtatccacgagggcttagctacctgggtcaagaaggataggcccctggaggaaactgacattggtctctggtatgtgtttgggctcacccatatcccaaggctggaggactggcctgtcatgccagtggaacgcatcggcttcatgctcatgccacatgggttcttcaactgctcgccggcggtcgacgtgcctcccggctcctccgacgctgacatcaaggaagccgagtcgcccaaagccatccagaacggcctcatctcgaagctctgaagagctttccgctgctcttcgtttcgaagaaatgcaactgtggcatgtcactgctacgtatgcttctcgtcactatattgccccaaataaaagctactcccatggtgttattcctgtgttctgtactgttatgactttcctgctgcgctgtttgatttgtgaaatgtgtcctgttgcgccatttgatttgtgaacttgagccacgtctggtgaaatttgggatggctgacgttaatgcctgtattaataaaagcgcgtgttagac

SEQ ID NO: 390009 - DNA, 871 bp, Oryza sativa
  unsure (1)..(871): unsure at all n locations
ggaacccttaatgttctaggctcctgcaagaaagcttccattagaagagttatcgtgacatcatccatggctgctgttgcctacaatgggaaaccaagaactcctgatgtagttgttgatgagacatggttttcagttccagagatttgtgaaaagcatcagcaatggtatgttctgtccaagaccctagcagaggaggctgcttggaagttttcaaaagataatggatttgaaatagttacggtgaacccagcaatggtcattggtcccctgctgcagccttcactgaatactagtgctgaagcaattctgaagctaatcaatggatcatcctcgacatatcctaatttcagctttggctggataaacgttaaggatgttgccctggcacatatccttgcatatgaagttccttcagcaaatggaagatattgcatggttgaaagagttgcgcactactcagagctcgtccaaatcattcgtgagatgtatcccaatattcctctgccagacaagtgtgcagatgacaagccatcagtgccaatctaccaggtatcaaaggaaaagataaaaagcttgggcctggaactgactcccctgcacacgagcatcaaggagaccatcgagagcttgaaagagaaaggatttgttacttttgattcaagcaacctgtaaaacaacagagctccatacacatgaacttgcttgtcatagctagtactctagcggtaactttgcatgaactactacagatgtggtctgtattctgtactacgatctgaaataaagtggaggcaaattgcagtgttgattaaaaaaaaatgtttcttggactggaatcatactgtggcgtatcatcagaacatanaat

SEQ ID NO: 390010 - DNA, 633 bp, Oryza sativa
ccacccagcccagcagcactctccttctccaggctccagcaaacacacaaaccacggaaccaccaccaccaccagcagcagcaacagcagcagctcagaggagaggagaagagcaagttaaaacaacttacaagcaatggagtacagctatccctgcaacagctgcagctgcaacaaggagaagaggcctccgctgaagagggggcagctcaagctgcagatcgccaaggccctgggcagcctcgtggtgcccggaaagaacagggatcacagcttcaggagatgagcgtcgtggtgccccggaggcaagaactgggagccacagctcaacacttgagcagcagcgcctgcaaactgatggaagttctggtgtactacggtggtgggcataggaattgtgcatagttgttggtgtgtagttttcccccctttccgccccgtagcgtatggcttgagacttcgagagtatctcgcttcctcggcaattgctttgttcttgagtgaagaaatagttagggagagactcggaggtgtgttcctggcagtctcatgtctggtttggtaatgtactgatgtgcagcataattttgatggtaatgagagtgttattagtacttcaaaaaaaaaaaaaaa

SEQ ID NO: 390011 - DNA, 553 bp, Oryza sativa
  unsure (1)..(553): unsure at all n locations
ccacgcgtccggaagagattccgtagcgtaggcgagaggcggcggcggaggcggaggagaggaggagcggcggcggcggcggcgatggcgaggagcgacagctgcttggcgcgcgtcggcgccggggtcgccatcggcggcgcggtcggcggggccgtcggtgctgtctatgggacttatgaggctatcagatacaaggtccctggcttgctgaagatcagatacattggacagaccaccgttggtagtgctgcaatatttggacttttcctgggagccgggagcttgatacactgtggaaaatcatattagttagcattctaagttttgaactctacccttgtccgttgggcctcaaaggatcgaccaagtgaacatttatttgatctttatgtaaaagattactaatacctggtggcttgggttggaaaggacaatcagattcttctgttatcatgggtggctcttccttttggtggggaaataaaatttgttcatctgtatgagggatgctgatggttgaagcagcnccggtgaaaaaannnaaaaaaaa

SEQ ID NO: 390012 - DNA, 699 bp, Oryza sativa
  unsure (1)..(699): unsure at all n locations
ccacgcgtccgggtgactggggacaactgggggactgccaatgccattagcaaagaggttggcattgaggacacaggtgcagaagcgaaaccagagcacaaagctgagaaggtgaaagaacttcagtcggccggaaggaccgtggcaatggttggtgatggaatcaacgattctccagcgcttgtatcagccgacgttggcctggcgattgtcgcatgcactgacnncgccattgaagcggccgacatcgtcctcatgaagagcaacctggaagacgtgatcaccgccatcgatctgtccagaaaaaccttcttccgcatacggatgaactacgtctgggcgctcggctacaacatcatcggcataccgatcgctgccggggtgctcttcccgtcgacccggttccgcttgccgccatggtgtcgccggcgctgcgatggctgcttcctccgtttgcgtcgtctgctggtccctgctgttgaggtactacaagagcccaaaactgggccgttgatcatgcagtacacacgcatagcatttgcttagaataagaggtgtagatatctgttgacaatgtgctaatgtggttctaaaagaaatgtgctagtgtgtgttgtgtggcacctgaaatgtgtacattacctacgtatatatgcaccgtgtgtttacaagtgtttaaaaaataaatatattatttat

SEQ ID NO: 390013 - DNA, 903 bp, Oryza sativa
cccgccgttgccaaccacccccttcccctcccccctcgccctcgccgccggggccgtctcgtcgtcggtgagacctagagagccaaacagcgcgttggttgttgagctcggagagggagagagagagagagagaggatggaattggagtcggagcagcacggctgcgagcattacacgaggggatgcaggatcagggcgccgtgctgcggcgaggtgttcggctgcaggcattgccacaacgaggccaagaattcgctcgagatccatctcaatgaccgtcacgagatcccccgccacgaaatcaagaaggttatctgctctctctgcgacaaagaacaggatgtacaacagtactgttctggttgtggggcatgcatggggaaatacttctgcgaaaaatgcaacttctttgatgatgatgtctcaaagaaccagtatcactgcgatggatgcggcatatccagaactggtggtgtggataagttctttcactgcgacaaatgcgggtgttgctacggtaatgtcttgaggggttctcatcactggtgtaagaaggagcaatgcatcacaactgtcctgtctgctttcgacgtacctatttgactcgacgaagggacatcagcgtctttgcactgcgggcgacacgatccatctggaatgcctgaacgtcgatgagagccgcatcatcacttcgcttgtccccggtgtgctcacggtcggcctgcgacatgtcggacgcgtggaagaagctcgacgaggaggtggccgcgacgccgatgccggagttctaccagaagaagatgatatggatcctctgcaacgactgcggcgcgacgtcgaacgtgaacttccacgtcctggcgcagaagtgccccggatgcagctcctacaacacccgggag

SEQ ID NO: 390014 - DNA, 756 bp, Oryza sativa
ccacgcgtgcgccacgcgtccgggagcccgctgccggcgcccgacgtcgtcaccggcaacggccatgagcacgcgatcgcgtacacggcggcggaggtgtacggggcgcgggcaaccatcagcgtgtgggcaccggagatcgacgaggccaatggcttcagcctctcccagctctggatcctctccggctccttcaacggctccgacctcaacagcatcgaggccggatggcagtcaggtcagccctgagctgtatggggacaacaggccgaggctcttcacctactggacaagcgacgcttacgaggcgacggggtgctacaacgctctgtgcccggggggcgtgcagacgagctcgcggatcgccatcggagcctccatcctcgccggtgtcgtcggtgggagggccacagtacgacatgacgctcctggtgtggaaggaccccaagctcggcaactggtggctcagctacggcgacggcgccggcggcctcgtcggctactggcccgccgagctcttcacccacctctccgaccacgccaccatggtcgagtggggcggcgaggtcgtcaacacccacccgcccggctccgcccacaccgccacgcagatgggctccggccacttcgccgccgagggcttcggccgggccgcctacttccgcaacctcgagacggtggacgccgacaacagcctcgtccgggtacccctcgacgccatccagacaatggcggaggacgccggctgctacgaca

SEQ ID NO: 390015 - DNA, 887 bp, Oryza sativa
ccacgcgtccgctccgaggcctccatcacgctcgaccggtcgcaggcgctcatgatcccgctcgcgagctcctgcagcctgctgctgatgttctacctgttctcgtcggtgtcgcacctggtcaccgccttcaccgccgtggcgtcggcgatggcgctcttcttctgcctgtcgccgtacgtaaactgcgtcaggtcgcgcctcggcgttggggacccgttcgtgtcgaggtgctgctcgaagccgtttacccggttgcaggggttgctggttgcgatctgcgtcggcacggtggttgcctggttggtatcggggcactggttgttgaataacctgctggggatatccatatgcatagcgttcgtcagccatgtgaggcttcccaacataaagatctgcgcgttgctgctcgtctgccctgtttgtgtacgacgttttctgggtattcttctcggagaggtttttcggagcaaatgttatggtgtccgttgccactcagaaggcatctaacccggttcacacggtagcgaacaagctcagtctgcctggattgcagctgattacaaagaagctagaacttccagtcaagcttgtcttccccaggagtttgatgggtgggcttgctccaggaagcagtcctggggactatatgatgctcggccttggagacatggccattccagggatgcttctagctcttgtactctcatttgatcgccggaagatcaaagacatgagtgtttcacaagacatgcctccctcggaacagcggaaatatgtatggtatgcgctgacaggttatggtgttggcttggtaacggctttggctgctgggatcttatcccagtctccccagcctgctttactgtacctgcccgggcggccgc

SEQ ID NO: 390016 - DNA, 1135 bp, Oryza sativa
  unsure (1)..(1135): unsure at all n locations
cctcatgatgcaggtgacggagttcagttgcggagggttcgtggtgggcctgatctcggtgcacacgatggcggacgggctaggggccgggcagttcatcaacgcggtgggcgactacgcccgcgggctggacaggccgagggtgagcccggtctgggcccgcgaggccatcccgagcccgccgaagctgcccccgggcccgccgccggagctgaagatgttccagctccgccacgtcaccgccgacctgagcctggacagcatcaacaaggccaagtccgcctacttcgccgccaccggccaccgctgctccaccttcgacgtcgccatcgccaagacgtggcaggcgcgcacccgcgcgctccgcctcccggaacccacctcccgcgtcaacctctgcttcttcgccaacacccgccacctcatggccggcgccgccgcctggcccgcacccgccgccggcggcaatggcggcaatgggttctacggcaactgcttctacccggtgtcggtggtggcggagagcggggcggtggaggcggcggacgtggccggggtggtggggatgatacgggaggcgaaggcgaggctgccggcggacttcgcgcggtgggcggtggccgacttcagggaggatccgtacgagctgagcttcacgtacgattccctgttcgtctccgactggacgcggctggggttcctggaggcggactacgggtgggggccgccgtcgcacgtcatacccttcgcgtactacccgttcatggccgtcgccatcatcggcgcgccgccggtgcccaagaccggcgcccggatcatgacgcagtgcgtcgaggacgaccacctgccggcgttcaaggaggagatcaaggccttcgacaagtaaaatgcttgtgaaatgtgaactttgttattgttactacttctatgggctcgttgctcaatgggcttttttttgcttttgttttgtgtgtgtgggccgacacgattggtcaaaagggatttggtggaggcccagttgtaataagatggtccacgcatcatggattaatcgttaattgtaaggtagtactacacggatttgttaacaaggaataagttcacttggtgacccaaaaaaaaaaaaaaannnnnn

SEQ ID NO: 390017 - DNA, 564 bp, Oryza sativa
ccacgcgtccgcgacaagtggcgccggggcagctgacgaccctcatgagcagcaccaacatcagcagcggcgccgacgtcgccgcctacgaccgcgcggtgacgcggctgctggcggccaccgcggagtacgcggcgggggacatcgcgaggaagctgttcgcgacggggcagcgggtgggcgccgacccggggttccccaacctgtacgcgacggcgcagtgcgcgttcgacatcacgctggaggcgtgccgcggctgcctcgagggcctcgtcgccaggtggtgggacacgttcccggcgaacgtcgacggcgccaggatcgccgggccgaggtgcctcctcaggtcggaggtgtacccgttctacaccggcgccccgatggtggtgctgcgtgagtaggcgctggccatgcgtgaagctagaataaaatggcacaaattaagagtgttccaccagaataaatgtattgtatactgaataaacctgcatgcaggatatctatctaagctgtaaccggattatactattgtactatcaaataaaaaaaagtgtctatatgatt

SEQ ID NO: 390018 - DNA, 713 bp, Oryza sativa
acaagccacagctctctcacacgagagctcgagtctctctcgtcggcgacaatggcgagcggcggcggcggcggaggggagggggagacggtgctggtcaccggcgcgagcggcttcatcggctcgtgtctcgttcgccgcctcctcgcccgcggctactccgtccacgccgccgtcctcaaccccgatgacaaggccgagacggaccacctccacgcgctcgccgccgccggcggcggcgagggccgccgcctccgcgtgttcccgggcgacctcctcgacggcgccgccctcctcgccgccgcgcggggctgctccggcgtcttccacctcgcctccccctgcatcgtggaccgcgtcctcgacccccaggcgcagctgatggtgccggcggtggaggggacgctgaacgtgctgcgcgcggccaaggacgccggcggagtgcggcgggtggtggtgacctcgtccatctccgccatcgtgcccagccccggctggccggccggcgaggtgcgcgacgagcgctgctggactgaccttgactactgcgagaagaacggggttttggtaccctgcttcaaaaacattggcagagaaggcagcaatggaagtttgcagaggagaatggatatggattgtggttgtggtaacccaggaactgtcatgggccttgtaatcccaccgacgatcaatgtagaatggcatgttgttgc

SEQ ID NO: 390019 - DNA, 692 bp, Oryza sativa
cggacgcgtgggcggacgcgtgggccgaacgcatggatagagatactgaaactcccctgggaacggaggagaatggagactaccccgagatgtttgctgcattaagaacttcattattaagggcattttatgtaatggacagggatcttaagtttcataaaaccattgactctgtgttcagtggtactacagcagtcacagtgatcaagcagggacatgatctcctgattggaaacttgggggattctagagctgtcttgggaactagagatgaatatgaccagttttttgctgtacaattgacagttgacctgaagcctaccattccaagtgaagctgcacgaattagggaacgaagtggcagaatattctctctgccagatgagccagatgttgctcgtgtttggcttccgaagtacaacatgccagggttggccatggcaagagcatttggagacttttgtctaaaggattatggtctaatttctatgcctgatgtttcctaccaccgcatcactgaaaaggatgaatttgttgtgttggcaactgatggggtggtggatgtactttccaactcagaagttgttagcattgtcagccaagccaagtcagaagcctcagcggcacgatttgttgttgaatcggctcaacgtgcatggagaacacggttccccacatcaaaaattgatgac

SEQ ID NO: 390020 - DNA, 553 bp, Oryza sativa
  unsure (1)..(553): unsure at all n locations
tactgacatacctgagctcttgcctccaaccaagggctcctgaggcagagaaccaagaattaagggcctaaccttataactgtttaccacgacacgcgcgattggagtgctgtcgcatgaaggtgatcccacttctttaacaaagtcaagttttcacaagaatcttattggtcatcaactcatcataggtgtaggcctcactgcttcatcagcatataattttccaccagtatatgctgaatatagctgattggattttgaacttttgataattacaaaggtttttgtactcctatccgcccgcgcctccgggttattatgcggattgatgcatgaatatcagaatgtgcatcatgtcgtctgtagtgtaagctgttgcaaaatgatttctactggttttaatgtagaagcattatctactcattttgttaacgaagaacattctattccaaaaaaaaaaaaaaaaaaaaaaaaaaaaaaaaaaaaaaaaatttaannnttaaaaaaggtgatcaattaagaaaaaatcaaatttatatatacgtgcgtgggg

SEQ ID NO: 390021 - DNA, 755 bp, Oryza sativa
ccaaaacaacaccaggaaacttcttttcaatcgatcactccactggtgagtagtgagtggctagtgactggtcagttcatcacttgtgaaggttttgcaatcaggaaaagttcagaagatcatgggcaagctctggacaatcctcactcacgttcattcccttgcagggcctaccgtcatgctcccgtaccccttgtatgcgccggggcgggccatggagagcccatcgaagcttgacgacgagcagtggctggcctactggatcctcgactccgtcatcaccctcgtggagatgcttctcgagtccctcatctactggataccgatctggtacgagctgaagctgctgttcatcgcgtggctggcgctgcccaacttcaggggagccgcgttcatctacaacaggttcgtcagggagcagctcaggaagcatggcctcgccggcgccggcgccggcgccgccgccagcgtcggcaagaaggacaagtcgtcgccgtcgtcgtcacccaaggacaaggagaagaccaagagcaagttcctctccttcgtcactcccaagaaggatcatgaagcttactgagccaagaagtgctgatcagtcggatccctgaagatagttttttagtgtgtgtactgttccatttgtgtttgtccctcttcctctccttcagaagaggcagctagctagcttcatgtttggctggtctttttggccatctgtgcatgtctgtaaactttattggagtgaggggaaa

SEQ ID NO: 390022 - DNA, 1184 bp, Oryza sativa
  unsure (1)..(1184): unsure at all n locations
cggacggcagngntngatgaggaatcattcaatgagagttttgcagacatgccttggcttgccatccctcagggagacaagatgggtgagaagctggctcgtggttttgagctcagtggcctgcctacgcttgtcctgattggtcctgatgggaagacactgaacgacgatgttgctgacataattgatgagcatggtccagatgcatgggaaggttttcctttcactgcagagaagctcgaaattcttgctgagaaggcaaaggctaaagcagagtcacagaccctggagtcccttctggtcattggtgatttggactttgtgcttggaaaagatggagcaaaggttcctgtatcagaacttgttgggaagactgtcctcctctacttctcagctaaatggtgcggaccatgccgagccttcctgcctaaacttgtcgaccagtacaacaagatcaaggagaagcacaacgacttcgagatcgtcttcatcttctagcgatcgagaccagagttcctacgatgagttcttctctggcatgccatggcttgctcttcctttgggagacgaaaggaagcaacaattgagtaagatcttcaaaatcactgggatcccttcgcttgtcgccattggtcctgatgggaagacagtgaccaaagatgcgaagaccccactggtggcccatggcgccgacgcttttccattcaccgaggagaagcttcaggagctggagaaggagaaggagaagaagatcaatgacatggcaaaggggtggcctgagaagctaaagcatgatctgcacgatcatgagcttgtgctgactcgctgcaccacgtatggctgcgatggatgcgacgagatgggcgactcatggtcctacaggtgcaaggaatgtgacttcgatctgcatcccaagtgcgcgctggaggagaagggcgatgtggagatgggagaggagaatgctgaggctgcccccgctgggtatgtgtgcgagggagacgtctgcagaaaggtctaaaggagttgttttgtttcccctggcttctttttatctctgtgccggttgaatcgtgcctgaatgtttgggatgtgaatcctatgtgatgagtataataaaacaatcgtctcctggttttgcttataatatgtttgggctggatgatacattggtatttgtggatatt

SEQ ID NO: 390023 - DNA, 565 bp, Oryza sativa
  unsure (1)..(565): unsure at all n locations
ccacgcgtccgaaaacctgccaaaggccagtctgcgaaggatcttatccaactactagaggatgtgtacatccaagatgtatcggtatccaaccccttcgagaaccctattgcgaaaagattatatgatgaatggcttgggcaacctggttcagaaaacgcaaagaagtatctacacacgaagtatcacccagtggtgaaaagcgtggcatcgcagttgcagaattggtgataacacagtggtggaaagcatttcccagtgtgggcagttgcttgtgccatcttggtgccctgcccacactaagcaaacactgaacacacagaaaagaaatacacgtcatcaaagattttgcatgcgggcaaatgaattttgttagattgtaggttttaccagcttttcttggtaatgtttgtatactacctcctcactgggaaacacagatgagattgtaacatgtaaaaacgaagtgaaccaaatagtagttgatctactcagctgataattccattgcaatttttcaaacagggccnnnnnnnnnnnnnnnnnnnnnnnnnnnnnnnnnnnn

SEQ ID NO: 390024 - DNA, 1044 bp, Oryza sativa
ccacgcgtccgcccacgcgtccgctcatgggacccttgcaagagaccaaaggctgcagaagttctccagcatacttgctttcagggctgtacatttgttccacctactgtccggtcaaaagctggagtgctccctaaaacgcctccatgtgttggagtaaaaggagtttcggagcacggcatgcctcgaagatactctacaggaactctatcaacaaccaaacctcatagtaatgcatctctgaaatcaagtggcttatctaagaccggtgtacaaagaaaacttcaaatggatcgtcaggcgccacagaagattaaaaaacctactgagagtaataataaactaaccactaatcgagtacctgcaaggaatagcccaggtcaccctgtattaaggcattcacgcagtttacctgaaactggccgggcaacaatgcacaaggtttcaacccttaccgagagattaactcatatgtctgttacctctcgaacgcgtactactcccaagcctgctgccccgttactgaaggctgggctcggcaagtctgacttactgggaaaaacagacgaaatacctcctgcaaagaggttgacaagaaaattagtaagctaacgtagcagcatccatacagtggaagctggttagctggtgcagagaggtgttataagctacagagcaaaatcccggtctgctgaaaatgatggcactgccggagtgtttgccaaatttgctgcatccaagtgccatagtagaataagtcgagcctgccgatccacgtggatctgcttttgccccaagtttgttccatgtttgaatagaacatgagtgtgctatatcgatttgaattgttgtcgaccagtgttcactcgcagatgcggtctgacaaatgatagacccgcgagcgggaggatgtttggcttttgcttgtacagttaatgagcttttgggtggcggtcaagtctttgtcgggtccttgccaaatgcttcgttgtatagcccggtttttcattaaaaaacaaaaaaaaaagtaaggccggaagataa

SEQ ID NO: 390025 - DNA, 444 bp, Oryza sativa
tccgggtcaccatcgcccccgcgcaactactacccaaagccatcactcgcatttttacaggattcgctgggcaatcggttttcagtgacactccaagcagtcactaggggcagcaagcttaaaaaatggatggctggagattatgttggatcgtagactaactcaggacgatggtcgtggtctgggccagggagtggtggacaaccggcctatgaatgtaatcttccacctcctcagggagtcaaatgtttctgccttgcctaaaactcacagcttgctaactctacaaccatctcttctctcccaccgtgtgggtgcacacctgaactacccaatccatgcttttgtgagcaaaaaagctcatgaaaaatcgttcaagcttgctcaacaaacatttgctccattaactttttcttcgcccttgatgtacatgtggtgaacttg

SEQ ID NO: 390026 - DNA, 1274 bp, Oryza sativa
  unsure (1)..(1274): unsure at all n locations
agatcttgttggaagtgcatattatgtggctcctgaggtcctaaaacgactatatggagctgaggcagacatatggagtgctggagttatcctttacatccttctatcaggggttcctccattctgggcagaaaacgaggacggtatatttgatgctgttctgcaaggtcatatcgacttctcatctgaaccatggccttctatatctagtggtgcaaaagacttggtcaagcggatgcttcggcaggacccaaaggagcggttaacttgctgctgaaattttgaaccacccatgggattagagaggatggagaggccccagataaaccacttgatattacagtgatcagtagaatgaagcagttcagagcaatgaacaaacttaagaaggttgccttgaaggtcgttgcagagaacttgtcagaggaagagattgtgggtttaaaggaaatgttcaaatctttagatactgataacagtgggacgataactcttgaagaactaagagctggtctaccaaagcttggcactaaaatttcggaatcagaattaaggcagttgatggaagcggctgatgttgatggaaatgggtccattgattatgttgaatttatatcagcaacgatgcacatgaatagattagagaaggaagatcacatatataaagcatttgaatattttgacaaggaccacagcgggttcataacagtcgatgaattggaagaagctctgacaaagtacgacatgggtgatgaagcgacaattaaagaaataattgctgaagtggatacagaccatgatggaagaattaactaccaggagtttgttgccatgatgaagaacaacagccctgagattgttccaaatcgacggcggatgttttaagcctttcctacagttattgtgaagtttttttcctttcacaaattctatatggttccatcttagggaagtgagcattatctttgtaaatgttacaagagcagttcgtatcggcggaattcaatgaagtatatgcaaggcatattggactcgttatgtatcatggtggatagctctctgaagtgggtgtggtgcgtttgtgtatgtatgcttgtgctttctggccatatgttttctgtctcttgataaaaagagctctgtaaaacagtttctactgatcatatcaggcaaggcaagataacgcttttctggtgaagctgnnnnnnnnnnnnnnnnnnnnnnnnnnnnnnnnnnnnnnnnnnnnnnnnnnnnnnnnnnnnnnnnnnnnnnnn

SEQ ID NO: 390027 - DNA, 708 bp, Oryza sativa
ccacgcgtccgcccacgcgtccgcgcatccacacaccgcaccaccaaccatcgaccgcctcgccggagaggagagagaaaggaagagcgcgagatggaggcggcggcggcggccggcgtgcagctgggcacctcgaagccgcagatcgcgacccaggcggagatgtcggaggcgcgcctcccactgccctaccgcgaccagtgcgcccacctcctcatccccctcaacaagtgccgcgtcgccgagtactacctcccctggaagtgcgagcccgagcgccacgcctacgagaagtgccagtacgagctcgtcatggagcggatgatccagatgcagaagatccgcgaggcgcaggaggccaagtccaagggcgccgccaccattggcgtccccctcatcccttccaccgccaagctctcctgatccccgctccgcttcgatctgctctattcagggctggttatgacagcacgaaggacattgtgcaaggatcgtggatgctagttctatgaaccaaacatctgtttgaatttagcataaagttaactgttgtcttcttctctccgcctttactccgttggtgagcatcttcgagtttcaatatgaaataaggaactacctgtttatactcaatgactgaaatgacgccttaaagttttgaatgcaatgcgtggactttgtgcttatgaaagagctactttaatcagt

SEQ ID NO: 390028 - DNA, 604 bp, Oryza sativa
  unsure (1)..(604): unsure at all n locations
ttgacnccgcgtaatacganttcactataggggcgaattgggtaccgggccccccctatcgctagcggcctccctttcccaccgccgccgccgccgccgaaaaagaagaagaagccgacgaggaggcgaccatgagggccaagtggaagaagaagcgcatgaggaggctgaagaggaagcgccgaaagatgaggcagagatctaagtaggcgaaggagatgggcgatcatggtgatggcgtgtcgcagtgatccatgtcttcggctgccaagctcgttgatatgtcaagctgcttggcgtggtgccaccattcgactgttgaatggcttatttacctgtgctgttatcatcttatatccctagttttaccaagagttttgcaccaagacatgtcggttcagttatgtgaacttgttatggagccgtatttgctgctaatgtttacctaccgttgagtaattgctttgttggctctgtggtaacatctattgattgctgctttatctgttaaaaaaaaaaaaaaaaagggnnnnnnnnnnnnnnnnnnnnnnnnnnnnnnnnnnnnnnnnnnnnnnnnnnnnnnnnnnnnnnnnnnnnnnnnnnn

SEQ ID NO: 390029 - DNA, 666 bp, Oryza sativa
ctgagagatgcagaaaatgctaagtttggattaaagccacaaggaaaggccagcagctcaaaagaaaatgagggttcatcaagcaatgctggggaatcatccagcatggatattgacaaagccgattcttctgtgccaaagaaacatttgactggcatctatgatttaattgctgttttgacgcacaaagggagaagtgcagactcaggccattatgttggctgggttaagcaagatgacgggaaatggattgaatttgatgatgacaaccctagcatacgcaaggaggaagagattttaaagttatctggtggaggcgactggcacatggcttacatttgcctgtacaaagctcgtgttatctgaattggaatgccagacaggctgatgagctgatttgtttacatttctcaagttgccagtagtttgcttgccttttgtaatgcatgagcgaacgtattattgatttttccagtttggttcaaactgagaagtaagcatgtgacttgcattggtgctggtgtttggtcggtggtcactgggactttagacgtgtaattttgagatgttgaactagaatattttacagtagtaaacaaatatatactgcaaagaaactgagcggaaaatataatttatttcatggaacaaaaaaaaaaaaaaaaa

SEQ ID NO: 390030 - DNA, 484 bp, Oryza sativa
  unsure (1)..(484): unsure at all n locations
cttttatacccttctcttgttcgcttgcggctcggagaagaggaggagaggaggggggcaaggcaagcaaatgctcggcgccgctccggcgtattttggtggaatagtaacttaatatagagttctgggacagaaaattatggagagggaaatttctgccttatatgaaccaaaaagaaacaatgaaataagaatttttgagagttcagatgagatgtcaacagatctggctgagtatatctcgcaagtttcagaaatatctgtcaaagaaaggggatactttgctattgccctttctggaggtcccctagtcagttttttggggaaactttgtgaagcgccatacaacaagaccttggattggtctaaatggtacatcttctggtctgatgagcgtgctgtagcaaagaatcatgcagagagtattataggataccaaagaaggntcctgtccaggaccatcncatggcagcacctaacaacg

SEQ ID NO: 390031 - DNA, 765 bp, Oryza sativa
  unsure (1)..(765): unsure at all n locations
ctcaaagaaggcatgcagaaaatatggctcaacactaaaggatactgagattcgtgatcttatggaggcggcggatgtggacaacagtggaaccattgattatatagaattcattgctgctactctgcatctcaataaactagagcgagaggaacatctagtggccgccttttcttatttcgacaaagatggcagtggttatattacggtggatgagcttcagcaagcttgcaaagagcataacatgccagatgcttttctcgatgacgtcattaaagaagctgatcaggataatgatggtcgcattgactacggggaattcgttgccatgatgacaaagggcaatatgggtgttgggaggagaacaatgagaaacagcttgaatataagcatgagatgagacgcacctggtgcactatgaagtctgaacgtccacagtgcagctttgaaacttcttcaatctccatgctctatacggacactgcctgcaatttttgtacgctgtcagttgtagccttgtaggtgtgggtatgtgtttcaggttcaggggattctaattgttcatctaattcaacagtcggtatgtgtttcaggttcagggaattctaattgttcatctaattcaactgctcctgttatttctacgaaatgcacggggtgggaaagtgcccatgccatgcgcaaactaggctacaatgttcatatacgttgccacagggcctaatttctgcagttcgtcacnnnnnnnnnnnnnnnnnnnnnnnn

SEQ ID NO: 390032 - DNA, 563 bp, Oryza sativa
  unsure (1)..(563): unsure at all n locations
gagacaaaagtcttcctgcacaagatgctctggttacttccggcatcgcattgctttatgtatcagctggacttgccatatggtccctagtggtgtacatgagaaagatatggcggatacttctaaaatagccgtagcacatagtgtaatagaaggaacaggagcaagccagcaaggtgatattacatttcaagagcatacaatttttgaactgcggagttgattgatggacctagaattggttgagatcctcagctacttacgcattgtctcagtttggcggattagttgctaagttgctgtgcctgcaagatctccgtagaaacaaaaaacatagtagcaagtagtatgttgcccgggtgattacttcttcgaaagctattttcagagcctatcacggctcgagtgttggacactgggtgtaatgatctgcaaaactgaaaaatgcagaagattgtaaccgtatacgaatacaaaaccatgaggtttgagtgtgtgactctggggtttctatagtttctaccattgtaagtttncccnnnnnnnnnnnnnnnnnnnnnnnn

SEQ ID NO: 390033 - DNA, 688 bp, Oryza sativa
  unsure (1)..(688): unsure at all n locations
ttcccccggcctgcaggttaaganggccatatatgcatgcncagttgacgagttcaatcagtatatngacctaatcaaaggtgaatctgacaagcttgctgaatggcttctggngattaancccgagcgatggtcagatgccttttncaaagggtcaaggcatggncagtattcangcaatttccctagcactattgttgagtggttccccaccagatacgagctttcaattgtccagttagttgacatgataagatgcaagctcatggagatgatgtacacacgcagggagtcttctaatgcgtgggctgagttattaacacctgcagctaatcagaaattgcaggaagaagtgagcaaagcccacaccctgaacgtcatcccttctgaaagtaatgaaaatggcaatgtgttcaaggtgtgtgatgattctgttaatgttgtcaatattgatgcatgggagtgtacctgccgaaagtggcatatttctgggttgccatgcatgcatgcaattgcagtaatagagcggattggacactgcccttacgattactgtgtgaagtatttcagaacagaatgctaccgctttgacctacttcatgtcgataaatccaatacccgatgttatgctgcctcctgctatattaagggatcaatcttaaagtccagttacacatgcaaccccaat

SEQ ID NO: 390034 - DNA, 529 bp, Oryza sativa
ccgccatcctcaaggagcacaagaccccgattgcagagtgcctcgtcaaggagatcgccaagcctgccaaggacgcgatctctgaagtggtgaggtcaggggatttggtgtcgtacacagctgaggagggtgttcggatactgggggaaggcaagctgctggtgtctgatagcttcccgggcaatgaacggaacaagtactgtttgagctccaaggtacctcttggagtagttttggcaatcccaccatttaactatcctgtcaacctagcagtctccaagattggcccagcactaattgctggcaatgctcttgttctgaagcctccaactcagggagcggtggctgcactacatatggtgcactgcttccaccttgctggtttccccaaaggcttgatcaattgtgtcaccgggaaaggttctgaaattggtgattttcttacgatgcatcctggagtcaactgcataagttttacgggaggtgatactggtatagccatttcaaagaaggctggaatggtcccgct

SEQ ID NO: 390035 - DNA, 745 bp, Oryza sativa
  unsure (1)..(745): unsure at all n locations
cggaancccggtcgacccacgcgtccggccgccttctccatcgacaagcccagagagggtttttgtgtttcttgatccactcccgcaggattcacggcctctagggggtgccatgcttcctcgnatcaggcggcaatctcctggctatagttcagttcacacagcttccttcagttcacaacacaatcaattgagcacggataggtcaggtactgttatggcagaaagggagctaatcgacaaggataaacttatacttaaaggtttgcagttccatggtttccatggagtgagacatgatgagaagactctgggccaaaagtttgttgtggatgttgatgcgtggatggatttgagtgctgctggggaaactgacagcatatctgatacagttagctacacagatatttacaggattgccaaggatgttgttgaaggcccatcgcggaaccttttggaggcagtagctcatcgcatcgcgagtgccacattgctgaaattccctcaaatctcagccgtcagagtgaaagttgggaaacctcatgttgcggtacaaggaatcgtcgattatttaggcgttgagatattgaggtacagaaaagacgtaggaggcgatcgtcaggagcttcattgagcctgctctgtgctgaggatggcgttaccttactactcaacaaatgcatttttgcagccgtttgtacctcaataatttcaatggaatggtgacctcatgagctgttccctt

SEQ ID NO: 390036 - DNA, 414 bp, Oryza sativa
cccggtcgacccacgcgtccgcggacgcgtgggtcgcccacgcatcctcccactcgtcctgaccaacgctaatgatcagtatcttcccccatttgtgattgttgacgggagtgcattgctgttgggcctatagtccatcgtgatgcagttgtgaccttcaatttccgtgctgatcgcatggttatgattgctaaggctttagagtatgaagattttgataaatttgatcgtgttcgtgtcccaaagatccgatatgctggtatgcttcagtatgatggtgagtgaagcttccaagccactaccttgtttcaccaccagagattgagaggacattcggtgaatacttgttgaaaaatggcatcctcacctttgcttgcagtgaaactgtgaaattcggccctgtcacatttttct

SEQ ID NO: 390037 - DNA, 926 bp, Oryza sativa
cccacgcgtccgcccgaccaccacaatccctacccttttcaaaaagaggagagaggggatcggaggagaatttctccacttcacccccaacaagcatcccgaccaccaccaccccccgctaccccaggagagattcacccgcaatgtccgacgaggccaccaggcgcttggccgggggcggcgggggcggcgcggcgctgagggcctcctccgacgtcgaccgcaagccggccgccgcgggctccccgcctcctggcgccgccgccgccgcggggcacaagatccagctcaagagcgccgacatgaaggaggagatgcgccaggaggccttcgacatcgcccgcgtcgcgttcgagaagcacaccatggagaaggacatcgcggagtacatcaagaaggagttcgacaagaaccacggccctacctggaacttgattcgtcggccgcaactttgggtcctacgtaacacacgagacgaactactttgtgtatttttacatcgattctaaagccgtcttgctattcaaatctgggtgattggcgtagctaatatcccctgcgcttgttgtcttgtatgcctctttcctccgcgttgtctgcaaccaaagctggaagcctggaattctgagagcctgcatgttgttgatgtatcagccgcggatcttttccatattccagcaaatgtgagattagattgtgtgtctattttacgtctgatacatctaggtggtgtcctgacattgccttattgtaatctgattgccggaaagtcagacagaggttgtcatcaacaaggtaaaacttgtgctgatctgcttaaaaaatacattctctggccaccgggttgcagaaatggcaatgatttcaatgaatgataccctacatgaactggctatatatgatatggccattgtgatataagtacc

SEQ ID NO: 390038 - DNA, 1102 bp, Oryza sativa
ccacgcgtccgcccacgcgtccgcccacgcgtccgcggacgcgtgggccattccaagatatttgaggaacatgaagcacctggatcaagatccttctggacagagataatcgcatcaatatcggatataaaattttcaagggatggaagatacatccttagtcgcgattatatgactctcaagctatgggatctaaacatggattcaggtcctgtttcaaccttccaggttcatgaacatttaaggcccaagttatgtgatctgtatgagaacgactcaatatttgacaaatttgagtgttgtcttagtggggatggactccatgttgcaactggttcatatggtaatttatttcgggtttttggctgtactcctgggagcacagaagcgaccactttggaggcaagcagaaaccccatgaggcgtcagattgtaaacccaacaaggcccacacgcacactaacctctctggcccgtggtgtgcggagaggtggggaaaatcaaggcgttgatgccaatggaaattcatttgacttttcgacaaagttgctccatcttgcatggcacccaactgagaattctatcgcatgtgctgctgcaaataggttggggatgtattatgcgtagagaaggtgcttgagaaaatttattgtttttggttcgctcttggaggccgcgtgccttcacatgcaaccagagatatggtgcaggatgttgtcgtcaattcctcccttggggccaaaagaggccgttgatgcccacaagatggcttttgttgctgtgactgcgtccttgttgattctttagtacatgtgtaaattatgtcctaatcatcagaagttttggtcccaaaggatgtggtcgcagttgccgtacattccaaagttagcagtccaaggcacaaatcaaagatagaaaggattcattgtgctaatttctgcagtaaaggacataagcaaatatgcattgcaatgggtgtatgattatcttttacatgtaatgccaatcaggcaaggctaatcagttgttttaggaccaaaaatccctggaccataggtaactcagttattgtagtattctttcatttctcttctatttcatt

SEQ ID NO: 390039 - DNA, 952 bp, Oryza sativa
caccgccgcctccaccctctctctccccgcggccgcagccgcgagctgatccaatggcgccgacgtcgaagctgtcgcagggcatcaagagcgcgtcgcggtcgcacacctaccaccgccgcgggctctgggccatcaaggccaagaacggcggcaccttccccaaggccggcaagcccgccgccgcagccgccgccgccgagcccaagttctaccccgccgacgacgtcaagccccgcgcccccagcacccgcaaggccaaccctaccaagctcaggtcgaccatcacgccggggacggtgctgatcctgctcgccgggaggtacatggggaagcgcgtcgtgttcctcaagcagctcaagtccggcctgctcctcatcaccggaccttttaagatcaatggagtgcccatccgccgtgtgaaccaggcctacgtcattgccacatccacgaaggttgacatctctggtgttaaggtggataagtttgatgacaagtactttgcccgggacaagaaggcaaaggcccaagagaccgagggtgaactttttgagacagagaaggaggcaaccaagaatctgcccgacttcaagaaggatgaccagaaagctgtggatgctgagttgatcaaggctatcgaagttgtcccagacctgaaatcctatcttggtgcccggttctctctcagggacggcgacaagccccatgagatgacattctaagttagtcggtacaagtttcaagttctgaggaagtctttttgcctagtgtgtttctgtacttctgaattttgtacccgggtagtgaactctccatttctgttgaagtctgcctgtcaaatattatgagaagattaagagaaggattatctactttggtggttcatggttaccgtacctactcaaatgtgcaatgcataacatttgagccataattaagctattgcgttgcc

SEQ ID NO: 390040 - DNA, 576 bp, Oryza sativa
ctcaaatccggcctgcttctcgtcaccggaccttttaagatcaatggagttccgatccgccgtgtgaaccagccctacgtcattgctacgtccacaaaggttgatatctctggtgttaatgtggagaagtttgatgacaagtacttctctagggacaagaagcagaaggcgaagaagaccgagggtgaactttttgagactgagaaggaggcaaccaagaacctgccggagttcaaaaaggaggaccagaaagttgtggatgccgagttgatcaaagctattgaagctgtcccggatctgaaaacttaccttggtgcgcggttttctctcagggacggcgacaagccccacgagatggttttctagattagttggcgctaggctctagttctgaagccactttgcctgttcaacctcagtgcgctcttgaattttgtatctgactggtgaaccattcgtttccattagtatctgtctgtcaaatcttacctgaagtcttatacactttgctgggttcaatttagtgatgttctgcatcatacattcatactatacacataagccattttgccactg

SEQ ID NO: 390041 - DNA, 594 bp, Oryza sativa
cttgctctctcctcctccgccgccgcgccgatcgatcaggagtagcaatggccaggttctccgcagccgccgtgatcgccttcgccgtggtggccgcggccgcgctggccaccgtggcgtccgccgccgacgcgccggcacccgccccgacctccggcgcggtggcggccgtctcggcgcctctctccgtgtgctgcgtcgccggcctcctcctcgccttgctccgccactgaagcgttcttcttcctctgaatgcttttgcttcagatctagcagtacagtggtcgtgcgagtcttacttagcatttagtattagagcttagtagcgatgatgacgtgtgcgtgtggaggcattgttttttggttggatctatggggttttacgggttggtttggagtgaggaggatttgagatggggattattagtatctgttagactgttactactactggtttatttattttggtagtcttttggtgtgatgggtttgggatctgtgtatttaccacttgagtacactgttctgagagatcgttattgatattattatgattattattattacgtattaaaaaaaaaaaaaaaacgtccg

SEQ ID NO: 390042 - DNA, 577 bp, Oryza sativa
  unsure (1)..(577): unsure at all n locations
ccacgcgtccggccaagacgacgacgacttgggaattcatttgcatcggcaacgacgatgaagctcgccgtggtcgccgtcgcggcgctcctcctcgccgccggcgtcgcctccgccgatgaattcgacttcttctacctcgtccagcagtggcctggctcgttctgcgacacgcaggctgggtgctgcttcccggacaccggcaagccggcggcggagttcggcatccacggcctgtggcccaactacgccaagtgccgtcccgccgccggcgccgtcgccgacgacgacgacggcgtggtggagatcgtggtcgacggcggcgccgccgtcgagcgccaccaccggcggcggcagaagtgctggccggagtactgcgacgacggcaacaagctgcggccgtgggagatcaaggacctcgtggcggagctcgatgcgaactggccgacgctgtcgtgcaagggcggcaagagcttcnagttctggagctacgagtggaagaagcacggcacctgctcgggcatgggccagcacggctacttcgcggcggcgctggagctcaagaagcggcacgacc

SEQ ID NO: 390043 - DNA, 680 bp, Oryza sativa
  unsure (1)..(680): unsure at all n locations
ccacgcgtccgcgcaccctctccccggcgaggtaggagggatggggcgggaggtggcggagagctgcgtcgacggggtggtcatgcagatggtggcggcctactgcggcggcttctacgccgccaagccggagctcgccgcccgtcgcatcgaggccatcggcttccaggtcggccaccagctcaccgagagatatactatggagcgccctcgatttagtgatcatcttgaagcaatcaaatttatctgcaaagacttttggtcagagttattcaagaagcaaattgacaatctgaagactaatcataggggcacatttgttcttcaagataaccatttccggtggcttactcgtgtttctgtagatccatctgtagagagcatggatgcaactgagaatgattctacaacactaggtgatagcgcagcccaaacaacaagcatgcttctgtactttccatgcgggataataagaggtgccttgaccaatttggggatttcttgttctgtcactgcagacatgtccaaccttccagcatcttcttttgttgtgcgcataaagacatgagctgcaataaatgatttgaataccattatatgcattgctgtggtataaagtggtctgacattcaaggangggggaaaccccgcgngtagcttgtcttttttttttttccttc

SEQ ID NO: 390044 - DNA, 328 bp, Oryza sativa
  unsure (1)..(328): unsure at all n locations
ttcccggtcgacccacgcgtccgcccacgcgtccgagcaatcatcagaagatatctgcataaaaatggtggcactagacttgagaaatcctccctccgccgccacgaccgtcaaggaggaccagcagttcaccatcttcatcgacggcgtggagacagccctccacgagggtgtgatccagtggaacggcggcacggtcactttggtcagcacgggtgtcctcgcggtcgaccgtctccagcacgtcctggtgcgcggcgggggcagtggtgccgtgttacccgtgcggttcgggcgcaccggtggagtcanttttttctttagtagg

SEQ ID NO: 390045 - DNA, 1168 bp, Oryza sativa
tcacgcgtccgttcgaggcgatcctcgtgctcaaagtccatgaacctggaccagctgcgcaaggagcaggacgaggtggtcaccgagatcaacaagatgcacaagaagatcctctcctctccagagatggttgataaacaggttgatgctacgttgattcggcttcgtgctttatatacacgtgccaaagaactttgtgagagtgaagtcagtgcatcgtctgctttggttggactattggatggtttgttgcaatctggaacttcagctgcacaacgaaaaaagatagttggtgagcagaaaaagaagaggatgaagtctgatacagatactacacgattctcctctgcatctatgaggagccaacttgaccaagctacaaacctgaaaggagaacaggttgcagctaaggtcaaatcagacgaagaaaaagatgaatggtttgtggtgacggtgatacatttcgataaggaaacaaaagaatatgaggtacttgatgaggagccaggtgacgatgaagagagtgcccaaaagaagtacaagttgcctatgtcagatattattccatttccaaagagaggggatccttccagtgccccagattttgggcagggtcgacaagtcttagctgtttatcctagcacaacagcactatatagagctactgttgcctctaatcgtaagaggaaatctgacgattatctactcttgtttgatgatgacgaggaggatggaaatctaccacaaagagctgtgccgttctatagagtggttcctctcccggagggccaccggcagtgaaaatctcagttggatccgtctttaccccggccagtgtagtgtgtgaagataggagtgtgagagtgtctgcctgacaatgtagtaattttgttttatctgcaccttgtccgcagcatgcagattgtactaccaaagtgacttctaagatgtccaaggttcagcgatcatgtaaataggttgattcagtgttgctctataacaaaaataagtgatttccccttcgaaaaacgcaccgccgcacaccttatctggcctctgcttggtgtgcttcgagttattgcaacgcagggcactacagtcgtatcgtcatattgtaattgatgccttcgttgcatttaaagatgacgcggcatttgtgcattgcccc

SEQ ID NO: 390046 - DNA, 615 bp, Oryza sativa
  unsure (1)..(615): unsure at all n locations
nagtgaaccttgtgtttatagcagaaaatgctttcctgattctcccatccgactatgctgttctgcactggcgcacggcaccaaataaaagcctcggctcgcctcgactgttccccccatcccccaactggagagtagtagatcgattcgatccaccctccgattcctttaccgaaccgtgggggaaatccgcgccggggatgtcgtcgtcggtcggaggcggagggggaggtggcgcggtcggttgctgcttgtggttgaggtgcggacattgcgagcctgctggatatggccaaggagctggaccagctgcgcatggagcaggacgaggtggtcaccgagatcaacaagatgcacaagaagatcctcttctcttcagagatggttgattaacaggttgatgcttcgctgattcggcttcgtgctttatatacacgtgccatagaactttgtgagagtgaagtcagtgcatcgtttgcttttgttggactatttgtatggttcgttgcaatttgggactttctttgttcccgaaaagaagatttttgtttgtcacattcgatgttggaaggtgttttcggacatgaatgatacaactaattttatttctcgtct

SEQ ID NO: 390047 - DNA, 684 bp, Oryza sativa
ttctttcccctcctccaagccaagccggacgcggacgccaccgccctcgccttcacctccatttatacctccggcgagcgccgcggcggcggcgacgcacgcatccttccttcctcctcccgcaccaccggcgaccggtaaaacggagagacccgtgggcgagcttgttcgaggcggggcaccaccaccatgtcggcccccgcggcggtggagcagcggctgcaggcgctgcggcagaagctggggaggaagcagcacttcgaggaggccgtcgccgacctcgccgccgcggtccgggaccaccacgccgccgcctcccccgccctccgcgatctgatgtattctacagtttgccgtgtggcaactgtccttcagactagatatacagcacctggattctggcgtgctggtctgaacctcttcttaggtacagagaagctggtaactaatccttcagaaaaggagcaactgaagactttcattctgagggcccgggagcatcttgatgagaaagagaacgaggaatccatgccaaacaacagggaaacagatacaagatttctttttgaagggcatcttacagtgggacctgaacctccacctcctgcctggcttgttgcccagaatttagcacgagaacttagcattttagctgaaaccttctgagatcaaggtgcgaacaac

SEQ ID NO: 390048 - DNA, 886 bp, Oryza sativa
ggccgccgcctggaggagtccgacatcgccagcctcccctacctccaggccgtctgcaaggaggccatgcggctccacccctccacgccgctcagcctcccgcacttctccttcgacgagtgcgacgtcgacggctaccgcatcccggcgaacacgcggctgctcatcaacatctacgccatcggccgcgacccgtcggcgtgggaggacccgctggagttcaggccggagcggttcatgccggggggcgccgccgagcgcgtggacccgctcggcaactacttcgagctcatccccttcggcgccggcaggaggagctgcgccgggaagctcgccggcatggtgttcgtccagtacttcctcggcacgctgctgcactcgttcgactggcggctccccgacggcgaggacaaggtggacatgtcggagacgttcggcctcgcgctgcccaaggccgtcccgctccgcgccctcgtcacgccgcgcctcgcgccggccgcctacgcgtgacggccggccggcgacgacgaggacgacgccgtgtatgtgatcgatcgagttcgccgcggcggcggcggcggcggcgatctgatgttgcggttgtctgtacgtaaatatattcttcgtttgtcggtttcgaaagcaaaacacaattaagaacgcccaaatattgcaagcaaatacgcctgtgaattgatttcttctatgatctgtttcatcgatcctagctaacgtgttttatcgaggcaagttaattagaacgaattgacggattgtaattgttggggttaacttaggacaacgtacgttgataatggtaggaggacaaatgtcatccaactttgaaaaatgaaaatcgagtttcaagaaataaagtttattgagt

SEQ ID NO: 390049 - DNA, 1010 bp, Oryza sativa
ccacgcgtccgcccacgcgtccgctaacctctgcttcttcttaaggtagagagagaaatagagagagagagagagagagagagagagagagctcaggatcgacgagacaccagcgaagacgttgaggcgcgcacgtgggcagcccgcgcgtcccctcccccatcgccgccgtgctgcttagatccgtcgagctccggtcccgccgtttcttgcggcggcgagcgagcgagcgagcacaaggagttcttgctgcgcctgggaggaggaggaggaggtgcagcacgatggctgtggaccgtgggctcctcctgctcgtcgtctcggccgccgtcctcgtcgggctcgcctccgcgtcccccttcatttccgacagcgtgttcctggggagcgtcggatctacggggaggagcttgctgcaggccaagaagaattgccctgtgaattttgagttccaaaactacacaataatcacaagcaagtgcaaagggccacggtttcctgctaaacagtgctgcgatgctttcaaggaattcgcatgcccatttaatgaatatatcaacgacgagagcaatgactgtgcatcaacaatgttcagctacatcaacctctatggcaagtatccacctggtctgtttgcaaacgagtgccgagaaggcaagctaggtctttcttgcgaaggcgtttcccaaaaagatagtgtcgtttcaagtgctggccagcaagctcagagcagcttgcttgctttcatcatgctgacctttggactagctgcattgtggttccattgagttattatgtcttccatttatccaaagttggtgtgctgttgtaaccaatgaggattgagttagttcacccggctgggcattttccttttgcgtgtaaaatcctttgtaatttatggcagaggctacgtattatctggaatctcacttctcggttgactacttagaactcaccttctgtcgctgcattgttactgctacattatgttgcatcaaattcatgtc

SEQ ID NO: 390050 - DNA, 407 bp, Oryza sativa
  unsure (1)..(407): unsure at all n locations
ccacgcgtccgggagagttcttggttggcttttcctcgacggagggagtagatgcaaacatcggcacaagccgcgacgcagattgcatcagatctcagaaggcgccgacgattctagggtttttcccgcgccgtcgcgcgtctcctccccgtctcatcctccggcctcctccgccagttgccgtcctgatccacgccgccggcctcctccgccctcgccgcattctgggacgaggagtcctcctccccctgacgcctagtatcccgccgccggcagccgccctgctcctctcgccagatcccggcctcctcccctgcagcaaagtgctagaatgggtcggaaggcttggtgcgctgtacaataaanccaaagaagttttggtggtggcgntaaaaccctgcatgatt

SEQ ID NO: 390051 - DNA, 455 bp, Oryza sativa
  unsure (1)..(455): unsure at all n locations
tccggacatactaccttggaactcacagtggccggagattgacatggcaaacaaacatgggaacagctgacataaaagccacatttgggaaaggtcagaagcatgaactaaatgtatccacttatcagatgtgtgttctcatgctgtttaattctaccgatgggttaacctacaaagacatcgaacaagatactgcgatacctgcctcggatctaaagagatgccttcaatctcttgcttgtgtcaaggggaagaatgttctccgcaaggaacccatgagcaaagatatatcggaggatgacacattctacttcaacgacaagttcacaagcaagcttgttaaggtcaagattgcgggcagtagtggcgcaaaaggaatctgagccagagaacaagagactcgtcaacggggtttnggaggccaggaacctcaaatttnggctgctatcgtcagg

SEQ ID NO: 390052 - DNA, 751 bp, Oryza sativa
  unsure (1)..(751): unsure at all n locations
ggacggcngaggnattcggagagagctactcctcgtcgttagccatggcgtccaagcggatcctcaaggagctcaaggacctgcagaaggatccccccacctcctgcagcgccggccctgtggcagaagatatgttccactggcaggcaacactgatgggtccatcagatagcccttatgctggaggcgtgtttttggttaccattcattttcctcctgattatccattcaaaccgcctaaggtggcattgaagacaaaggtgttccacccaaacattaatagcaacggaagcatatgccttgatatcttgaaggagcagtggagtcctgcattgactatttcaaaggtgctactctcaatttgctcgctgttgacggatccaaatcctgatgatccattggttccagagattgctcacatgtacaagactgatcgggccaagtacgagtcccaccgcaaggagctggacccagaaatatgctatgggctagaatggttaacaataagaaatgtgagatatgccattgcattgccttgtattctcctgtaactctttcaacatttaagaaacagcaagaatcaaattgaactctcgagttgttgtatggaatcctactatagatgttcagctattgtaaattatgtagtgggtggttctattgattgttcgatgagcacttggaatggtacttttatgttcccaanaaaaaaaaaaatataacactacaatgaattttcaactttaactnn

SEQ ID NO: 390053 - DNA, 882 bp, Oryza sativa
ccacgcgtccgcccacgcgtccgcccacgcgtccgcaattatcggtttgtttgttcgtgagttttatcttctcatgccacaagtgagatgtctttagtgcatggtcgtggcagagtgcagcttgtgatctggtgtcttttctggataaatgtagcataagggtgtgaaaacatccttgacaatttctgaacctaaaggcaattgtttcccctgaaaaaacacccttgtttaaaagtggcgccaactgcaatccttgtacagagttatgctttggttattcattggcaatttggtaccaaagtttgtcatatagaaaaggtctcggttgtacaggacctagatgtttctcttaactcaaaaacgtaacggttcatgattgggaatttgtagttgggactcaaagttccactaccttttcttgctcttttctgtcttaagtttaattatttttggtctacagaacaattacaatcagtagtaaaattttcaggtggcattgaagacaaaggtgttccacccaaacattaatagcaacggaagcatatgccttgatatcttgaaggagcagtggagtcctgcattgtctatttcaaaggtgctactctcaatttgctcgctgttgacggatccaaatcctgatgatccattggttccagagattgctcacatgtacaagactgatcgggccaagtacgagtccaccgcaaggagctggacccagaaatatgctatgggctagaatggttaacaataagaaatgtgagatatgccattgtattgccttgtattctcctgtaactctttcaacatttaagaaacagcaagaatcaaattgaactctaaaaaatagaaaaactacatgtgttaatctatactaattcg

SEQ ID NO: 390054 - DNA, 648 bp, Oryza sativa
aaacagaaccgggttctgaacaaatgtatcactacttatcctttggttggctgtgtggtggaatcatagagcatgcgtccggaaagaagcttcaagaggtcctagaagaggccattgttcatcctcttcacattaacggggagctatatattggcattcctccaggtgtcgaatctcgccttgcggcactgacagtcgacatggaggagctcgagaagctgtcaggattcagagcaggaccagacgtcccacaggagctgctcagcaatgtcgcccagatggccaccggctacctgtcctcttcaacacgctcaacatccgccgcgccatcctccccgctgccaatggccactgctcggcgcgcgctctggctcgatactacgccgcgctgggggcaggcggcgccattcctccgccgcactccggtggtggctccaagccgccactcggcagccatgtccacacccccaagttccccaccatgccgtccaagaagaagaagaagggaggttcgaagaatgatgtcggcgtcgctgacaaggacgggtacacccagctccgcaccagcgacggcagcgacgaggggtcgacggtgtcagcggtggtggccgggaacggcagtggcagcggcagcagcatgttcgtcga

SEQ ID NO: 390055 - DNA, 546 bp, Oryza sativa
  unsure (1)..(546): unsure at all n locations
tcgtgccccttcttctccttcttcttcttcttcttctccctcaccatcaccaacaagagagaggaggagtggattcatcgatcgagaagtcgaggtagtacatacgttggattggattggaggaggagaatgcctcgcggtgggttctcggggtcgataagctcgcccaggatcgacgtcgccatcgacatggggaaccccttcctcaaccgcaccgtcgacggcttcctcaagatcggcgccgtcggggcgtgcaaggtcgccgccgaggacacattcgactgcctccacagaggggatgtttcaaagcacaagcttgagcatatgctgaagaaaatgtgcaaggagggtgcctattggggtactgttgctggggtgtatgtgggcatggagtacggagtggagaggattcgtggtcgccatgactggaagaatgctatgatttggaggtgctttaagtggtgctctgatctctgcctgccagcaacaaccacaaagacaagtcatcaaggacgccatcaccggggcgctgttgcaacagntgtc

SEQ ID NO: 390056 - DNA, 581 bp, Oryza sativa
ggctcgtcggcgacgcctcgcaccgtcgccgctcaccggcgctcctccgccgccgctcgccgccggaggagggatagagtgctcgtcggtgcggtttgatggaaatggcccccgcggcgcaggtggcgtcgaacccgcggacggtggaggacatcttcaaggacttctccggcgcgccgcgccgccctcgtccgcgccctcaccgtcagatgtggacgagttcttcgggctctgcgacccagagaaggagaatttgtgcctgtacggcctccccaacgggcgctgggaggtggcgctgccggcggaggaggtgccgccggagctgcccgagccggcgctcgcgatcaactttcgccagcgacgggatgcaccgccgcgactggctctcgctcgtcgccgtccactccgactcgtggctgctctccgtcgccttcttcttcggcgcgcgcctcaacggcaacgagaggaagcgcttattcagcttgatcaatgaccatccaaccgtgcttgaagcactgtctgataggaagcaatgaagggataataaaattggtgccgacaatggcagcaaatccaggcac

SEQ ID NO: 390057 - DNA, 581 bp, Oryza sativa
tgtataaactacaagcagctcacctcgcaaattaactgtcggccatggcggctgctggtgaacaagcttcaggaggcagggacaagtgccggtcgttcatgtacggcgagggagagaaggacaccgtgtggaggcttggatcccctccaaactacgacgtcgtcaacaagctcttcgaggaagagagaaccaaggaatggccagaggggtctctggaggagaaggtccagaggttgctgaagacctgggagatggagctcatccacaaggtgcgacccgaggaccagaagagcgtccactcgcagaaattctgcgcgagcaccaacgggatgagatttctgagccggaaggaggtgatggctatcggcggctacaacgcgttcctgcagacgaaactgccgccggagcaccgcatctacgacccggacaaggagacgctggagtccggcatggccacgttcttgacggcgttcccgcgtggctttgccattcgggtgcctcacgtctacagtggtccacccacggtcgtcttaagttccacacttggggacattgaggggccttcaaggacatctccccat

SEQ ID NO: 390058 - DNA, 641 bp, Oryza sativa
  unsure (1)..(641): unsure at all n locations
tngactctgacagtaccgatggaggccagcagttntnacagctcagctttctcatcgcaagaggaaagatcctgtgcaagccgtcccctggaatccatggaagccgtcatccgagatcgccaagctccgacgcccatgaagacggtgttcttcgacgacagcccacgcaacatcgccgccgggaaggccgccggattccacacggtgatcgtggggagctcggcggcggtggccggggcggacgtggcgctggagagcatccacaacatcaaggaggcggtgccggagctgtgggaggccgccggcgagcacgtccaggcccagctggcccaggccgccgtcgacctccgctccgccgccgtcgagaccaccgtgctcgcctgagctgctcagacgccgtcctccatgtcgccgtgcatgctccctttcccatggtattaattaattagtggatgatttttttttcctcaatgacactagcttactgcaaaaatcaagagagggaggaagacggtgaaaaatggcgtgaggtgtactcggtgatttgtgtgatgaatgaacctgtcatggtatgaactactgatgtgaatgaatgaatggatcaataagaattgcctcatttgtgaaaaaaaaaaaaaaaa

SEQ ID NO: 390059 - DNA, 724 bp, Oryza sativa
cgtttcgccaccgcgaatcccaccaccacccgcagatctccgcctcggcgccattgcccaccctccacgcccccgccagattcgcccagatccacagccgggtgcatccggcggcgtggctggggcgccctcgatcgggaagctttgatcttcgtaccctttttgcggtgggcgggcggcgggcggcggaggaagaggaggagatgggtgtcggcggggagaagttccagctggggacggtgggggcgctgagcctctccgtggtgtcatccgtctccattgtcatctgaacaaggcgctcatgagcttcctctgcttcaactttgccactaccttgacgagttggcatcttcttgtcacattttgctccctccatgtagcatgatggatgaagttcttcgagcacaagcctttcgactcgagaactgtcatgggatttggagtgctcaatggcatctccattggcctcctcaacttgagtcttggttttaattctgttggattttaccagatgacaaagctggctatcatcccatgcactgttattttggagactcttttcttcaggaagaagttcagccggagtatccaactgtccctttcagtgctcctctttggtgtcggtgttgcaacagtgactgatctgcaactcaatgctgtgggatccgtattgtccttgctggcaattattacaacctgcatcgcgcaaattatgacaaacact

SEQ ID NO: 390060 - DNA, 590 bp, Oryza sativa
  unsure (1)..(590): unsure at all n locations
ggaatgactggctggaccgacgcgtgcggaaatttctgcaggagctaggaactgagtatctggtcaagccacttggtgatgcagaggacgaggagcattccagtgacttcgagccagatgaaaacggtgagggtgccgaggatgaagagattgatgaggacgatgatggcgatgatgattccgcgaaggcgcaatcctcgtcgaagaggaagaggtcgggtggcgacgatgaagatgacgacgatgatgatgacgatggtgatgatgatgatgatggtagaccctcaaagcgatagttgagcagctcatctggggtcagttgtgtcctctgcagggtgctagaaagaaaataatcctcttggggagaagattgttggtaaatgcttgtagctttaggacatctgtggtttaggtttagcagctcaaaaacttgagagacagtccatcatgttagtcgttagtgcatactgctgatgtgtttgattaacagcctctttgagaccatcatctgtatgaggaaagatatgagaggcttgctttatgctttgtgtagcttctaatttcaggtctctggaatttcttggntctcn

SEQ ID NO: 390061 - DNA, 761 bp, Oryza sativa
gtctggtgcatcgagggcgccgccgtgatggagtggctcggctcgcgcggcgggtggcgcgaggtcggcccctcccccccgggcctcaaggccggcaccgcccgcgccgtctgcgtcggcggcggcgagcgcgtcgtcgtcaccggcgccatcgaggactccgacggcgggtccggccgccacgccctctgggtgttcgacgtaaagaccaagaactggaccgtggttcgcccacctccagagttcgccggattcgccttctccgtcgccgccgtccgcatctgatccgatccgatccgccattgacgacgaaccccgccaagatccaagatctcgatctggatccagctgctccgcctcaaggagatctctactacacacaaccaaatactactctactctactagaacagtagtatgtgcacaagaaaagaatcacaaggagaagagaaggagaggaagctagtggtgagtttgtgaagctcctctcctctctctatctctccccaatctgttgttgttgtgaggatgatgatgatgatgagtgtggtgtttttgtccaagaaaaccatggaggaatcaaggggatgatcttggatcccctcctcatcctccatcgttcaaccatggttatggttatgagtagcaataatccaatccattgtacatattatgaccagccgtttgaggtgcagattgcagagtccatcttctgtctcaaaaaaaaaaaaaaaaaaagggcagcagctcgcgatctagaac

SEQ ID NO: 390062 - DNA, 648 bp, Oryza sativa
aattccaagatacaaatttcggagaacagttgaacctgaaaaacaaactgctgatgagacaggaccttttggtggaataatgacagagtgtggcaccaatcaacctattgagaaagtactcgcacctgaagatgcggagtgttgcatttgcctttcggcatatgatgatggtgcagagctgcgtgaacttccttgtgggcaccatttccactgtgcctgcattgataaatggctgcatatcaacgcaacatgccccctgtgcaagttcaatatccggaaaagtggcagtagcagtggaagtgaagaagtatgattgtgtgaatatcctccggtcgagaacaccgatccatttcaacttcacacctgtctctgctaatgcaaccacaggacctgaccagtgtaaattttgtatccaaaatgtgtgattagcgtcatatatgtacttgaagtgactcaagactgctgttcatatccacatacatggttgtccaatgtgtcttttactgaccggaatacatgcttagttgccccgtgagttgtaattcttcgagtgatcctcacattttcctgttgtgttagcatggtttgtgcttatgctcctgcctggtcatgggtcagcacaaaactgttgtaatggctatcggcctg

SEQ ID NO: 390063 - DNA, 579 bp, Oryza sativa
ccacgcgtccggtaagtattgaccctcgaagagtatatgtcaagaatccggaagaggtgcaattcaaaactgtaaaggtgtccaataaaggtccattagggggagaatatgcatggtaccagtgcacagtaagtggtgggcgtgacagccgtcctataggagcatatgaactagccaaagcagttgaagaattgggtgctggagaaatacttcttaattgcattgattgtgatggccagggctgcggatttgacatagatctggtaaaaatggtgtcagatgctgtgactatccctgtcattgcaagcagtggtgctggtactgtcgaacatttttctgaggtctttgagaaaacaaatgcttctgctgcccttgctgctggcattttccatcggaaagaggttccgatttcagcagtgaaagagcatctggtagatgctggcgtggaggtcagagtgtaggatggaaatcctttgatctattgggaaaataaatcagggctttgtaacaagttggtgttctattttgggaataagatggtaattcataggccatggattggaaatgcaaattcgtaat

SEQ ID NO: 390064 - DNA, 883 bp, Oryza sativa
ccacgcgtccggcattatgccaccgatgggtgaccccactagtgagggtggagtcttccctgatatccaattttggaaacaatgtgcagatccagtccttgctcaagatcctttttcatcattgttgtcaactcttttctgtttacctgttcagtttctaatgtccactgaattcttcatccctttcgtccacctattctatgttgtttgtgttgttcaggcattgataacatgctatggagaagaaacatttgacagatcaagtttcagcaactgcctccttaatgatgtttgccagactatgtcaacaattgatattgctagagaatattttgtatccaaacacattgatccttcttgtcacccaaaagatatggtccggagattgacttatccgtatcttcggaggtgtgcgttactatgggagcttctaagatcgtcttcctcagcacctttgtatgacagttctaatatctgggaaggatcatcacatctttacttgaataatagcgcggcagactcactggcagtggagctgaatgggataagggaattggaagacctgtttcagattcagtcactggatccaattctccaagatgaatctgtacatatgcttgcgttaaaatggacacaacatttctgcgaggattacaaaacccgtaaatatagaggcgttcatttctctaccccagcagtgccatttaggctgatggagttgcctcctgtctatcaagttctcctggaaagatatgtcaagatgcaatgccctgattgcggttcagtgcctgatgaaccagcattatgtttactttgtggcaagctatgttcgcctagttggaaaccatgctgcaggactggaaagtgccttaatcatgcgtct

SEQ ID NO: 390065 - DNA, 549 bp, Oryza sativa
cccacgcgtccgcggacgcgtgggccggatcagcccaaaggagaaaaccatgttcttcgtaaatccgtccagcgccggcgcgttcgacggcaacggggagaagaagatccgaccgtacgctcgcaaggacgacttcctcctcccgggcgtggtggaggtcatcatcaagtcggtctcggcggcggccatcgcgccggcctgcacgcggacccacaacgtcccggcggtggtcttctccgtggccggatacaccgacaacttcttccacgacaacacggacgtgatgatccctctgttcctaacgacgtcgcacctcgccggcgaggtgcagttcctcatcaccaacttcaagccgtggggggggcacaaggtcacgcccgctcctgatgaagctctccaactacggggtgatcaacttcgacaaggacgacgaggtgcactgcttccggcgcggccacctcgggctgtaccgcgaccgcgacctcatcatctccccgcacccgacgcgaaacccgcgcaactactccatggtcgactacaacaggttcc

SEQ ID NO: 390066 - DNA, 652 bp, Oryza sativa
acagagtaaactgcaacaaaccacgcgacccccaaacctctctctctctcctcgcctccgccgtcgccgtcgccgtcctcgactgctcctccggtgtgatccgatcacgcgcggcctctccgcctcccgctcgcccttctccgcttcgcgtgttgtactgttctcccgcggtcccgcccgagcagaggtttgggttggccagcgagggaggttggctagggcagcgggctgatgagagaggcgtcaggcatgtccgggggagaagacgtccgcaaggtttctcgccaggacatacagctcgtccagaatcttattgaacgatgtcttcagctttatatgaaccagaaagaagtggttgagaccctatcattccaggcgaaaattgaacctagttttactgagcttgtctggcagaaactttgaggaagagaatcgtgagttctttaaagcatattatgtgagacttatgcttaagaatcaaataatggtcttcaacaagctccttgaggatcagtatcggcttatgtgtaaagagcagccttctggagtaccttctatgcctcctactactaatggctccaacatgggcacattgaatcaaaatgcatgctttttgccagacactactcccagcactgcaatgccagatagc

SEQ ID NO: 390067 - DNA, 1430 bp, Oryza sativa
  unsure (1)..(1430): unsure at all n locations
aaaagaaaagttcatctcctcctctccttatcccttcccttcaccaaaacccccccgacaccgagcccctcctcctcgacctcgccgcaaatcctccgccgctcctccgccgctagggcataaccgcccgcctctcgccggcatccgcatctcccggggaagggaagggaagggaagggaaggaaggaaggtgagggcggatatgtcggcggcgccgataccccgcgagtgggtggggctgcagcagtttccggcggctacccagaccaagctgcacgagctcctcggcaagctcaaggaggagaatgtgagcacattgacaattctggtgatggggaagggcggggttggggaagtcatccaccgtcaactccatcgttggcgagagggtcgctactgtcagcgccttccagtccgagggtctcaggccgatgatgtgttctcgcaccagggcaggcttcaccttgaacattattgacactcctgggctcattgaagggtggatacatcaatgagcaggctgttgagatcataaaaaggtgtggtcttgtgggcaagccactattgatccgtcctcctttattgtggccatcgattggatgcatacccagaatggacacgttggatgatcaagttattagagctgtcaccaattcatttggaaaggccatttggcgaagaacattggttgtattaacacatgctcagctctcaccacctgatggacttgactataacgatttctttacaaaaagatctgagtcacttttgcgatacattcgtgctggtgcaggagtcagcaaacgagaacttggggattttcccttgccaattgcattggtggagaacagtggaaggtgcaaaactaatgagaatggagagaaggttctccctgatggaactccatggattccgaacttgatgaaagagattactactgttgtctcaaacgggagcaaatccattcatgttgatcaaaagctaatagatggtccaaatcccaacaatcgctggaagatgttcataccgctcatccttatggtggagtactttttggttgtaaaaggcatccgaagggccattcatgctgacatatcaaacgggaagctagatgactgggaacagcgttacagagacttggttggaagcaaggacccggtagaccagaaaggttcatcatccggcaaccgcaaggcttgagctgaagaatgataccgcatgcatcgtgacccattcaattctctgtgcttttctttttgcgctctattccagtgatctatttgggaagctttatagagttatctgggacaatttgagcaaatttgctcttgtttttagttgctaaaaaaactgtactgaatttttttgtgctgtcgcaattttgcaaatgttgttgatcgaaacttcannnnnnnnnnnnnnnnnnnnnn

SEQ ID NO: 390068 - DNA, 1024 bp, Oryza sativa
  unsure (1)..(1024): unsure at all n locations
cgaaccggaaggcccggctagacccacgcgtccagttggcattcaagctctctctccctctccttgctagctgctcatcaacaatttgctatacttcccatggctacttacagtagctctgcacttttcatcctcttcttgcttccaacattcctgagcatggctgccagcacctactatgatatatgtcctgtggagtgtggttgccctgaccaaaatgaggttaccatgcacttgtacctgcaccagtttgttgctggagcaaatcacccaaaccgcaatgaagaatttgtgatagcctcgagctatcctaatggattcggtacaacactcgttgatgactggtatttaacagctacaaccaatcccaatgataatatcgttgcacgtgtacaaggcatgcatgtccaggctggccaaagcaatgctaacatgtggtacacttcccacaacattgtgttccaggatgacaggtttaagggatccacacttcaggtgatggggattattgctgcaagcagtggtgagtggtctgttattggtggaactggagaattttcaatggcccatggcagtataaagttcacaacggacccaagctctaccagcgaggatgctgttcgagaacttaatattcgtgcaatctatactgcagataatccacaagctgctcgtggtacagcatcggtcgcaaatgctactcgtctgccatgaaaagaattgatggaaataatattgtggcgtctcaccactactgcagcgtcaagatatggtgttatcaatgttctttcctaccgcctttctctgtctgatcagttcaaggataatgtgtggccttctctggtggtattatatatcatcagtcctgaatagatgatcaattattttccagtttgctgttgtgtgtatgtggttttttattccttccatatgttatggggaagggtttgtccgcggaataatgaatgaaccaacgaattttatcttgtataaaaaaaaaataaatatattatgnnnnnnnnnn

SEQ ID NO: 390069 - DNA, 958 bp, Oryza sativa
  unsure (1)..(958): unsure at all n locations
ccacgcgtccgatctgaacatggattgggtagacagtgtaaagaatgtttttgaatactttacagaaagaaccccggggtctcattttgaacaccgtgagacatcatttgtatggaattacaagtatgctgatgttgagtttggacggctccaagcaagagatatgctgcagcacttgtggacaggtccaatctcaaatgcagcagtcgatgttgttcaaggaagccgatcagttgaagttcggtctgtcggagttacaaagggtgctgcaattgatcgtattctaggagagatagttcatagcaaaagcatgattactccaattgattatgttctatgcattgngcacttcctaggaaaggatgaggacatctatgtctttttcgatcccgagtacccttctgaatcaaaagtaaaaccagatagcagcggctcggtatctcttgacaggaggccaaatggacgacccatcaaacggcaggagcaattccagaaactcgcagtcaaggacacccaaggcacaggctgctccggagaggtcatcgtcatcatcttcatcaagccagggcaccccaaacagccaccatgactggcgcgaagggtcctcggtccttgacctcaagggcgagaattatttctcctgcgctgttggaaggaagcggtccaacgcccgctacctgcttaactcgtcagaggaaggtcgtctccttcctcaaaggagatggcagatgcaacggcggctcacaatgggttccagtccacaactgcggattacatgttcttggataggcagtagatgttctaatccccggtcttcccccagagaagaagtttaaccctgaaagtattcattccttacatggccctgcatgatgtacaattgtgtacaaaatttaagctcgtgataaaactgcgagagggcagcaaatgagaaagccccaaaatcgtttaaaaccaa

SEQ ID NO: 390070 - DNA, 779 bp, Oryza sativa
  unsure (1)..(779): unsure at all n locations
agatggaaactaaccctaatctcgatctcgacggcgagggcggcgccggcgccggcgcctcgtcgggccgttctttgctgccgaaaggaagtggtaggttccgccgctcgtcggcccgttgttcactgccgaaagggagtgataggttccgccgctcactatcgccggtgaattcgcggtcgctcctanaaggacgggatgtgcgggacgctgttttccccaacaaactcttcgataaagccttcggccagcctcttccagcgcccgtaacgccgtctctggtaccatcgcccgcttacatcgtgcgccccaacctgccgaccccgtccgagccacacggattgaatttcaatgccccacttgttggcgatgggaanatgcaaatggatgtggagggtgccccacttgttggcgatgggaanatgcatatggttgtggagagtaccccacttgttggcgatggcaagatgcatatggttgtggaggaggaaatgacaacagctctggctgttcatcagccttcaagtcagagaagtcagaggatcatagtgattgagatgatggcagatgttggctcaccttcctctcctggctccccctactcccctagttccccttcttctcatcgaaacgctccctcggtccgcttctctctcnaaggggggcccgtaccaattcccctatatgattcttattacaattcctggccgtcntttacactcttgactgggaaaacctgcgttaccaattaatcncttgcanaaatccccttcccagtt

SEQ ID NO: 390071 - DNA, 641 bp, Oryza sativa
  unsure (1)..(641): unsure at all n locations
ccacgcgtccgcggacgcgtgggataaacaccaccattggtcgccatggagaaaagagggagagggtgagagaaagcgagcagcagagcatatcttattgagcagccaagaaagcaaggtattggaaggaattgaggaggagaggaagtgatggaacagcatgagctttcttcttcctcttcctcttctgaaccctcttctccttcgttttcttcttcgtcttcgtcatcgtcctcgtcctcgctgctgaggcagtgcaggatttgccatgaggaggaggatgagtggtgcgctgcaattgagtccccctgtggatgctctggctctctcaagtatgctcacaggggatgtgtgcagaggtggtgtgatgaggaggggagcacactctgggagatttgccttccagaattttgagtcagattacaccatccctcccaagaaagtgcaggttgttgaaacggcagtcactgtcagagacgaggagatgctccctgaggaactctctcaggaggatcaggaagcagtatgcaggatccgagncgcaaacggngtaatggagactncttcctcaatggtgccgtcattgacgataacgttcaccattatgctctggtgtggcactcattgcagttgtgacaatt

SEQ ID NO: 390072 - DNA, 1804 bp, Oryza sativa
  unsure (1)..(1804): unsure at all n locations
ttgtccatcccactcccacgcgcacacagcaaagcaaaccaaagcaaagcttcgtttccgctgccccccacaggccactggacgaggaagagcacgcagcttcgcctctaccggcggcgcatggcatgggcatccccaagaatgagagcttgggcctccactacaagagagagaggcagacccaccaccatcaacaacatcaggaggagtagatagatgggcaactgcgggacgcgagaggagaatgccgtcgtcgcggcgcacgcccaagttcagcagctccatttgttacaacatcctgtcaagaatgctgttgcagagaggaagcatacccgcatctcatcagatatgagtgatccttcaacacctaggaaaattgaagatgccaagaacatctccatatacaacgatgtgattgatttcacattgtttgaactcgagaccatcacaaagagcttccgtgctgactacgttcttggtgaaggagggtttgggactgtttacaagggctacatagatgagaatgtcagggttggtctgaagtcactacctgttgcagtcaaggtgctcaacaaagatggacatcaaggacacagagaatggcttactgaggttaggttccttgggcagctaagacatccaaatttagtcaagttgattgggtattgctgcgaagatgaccacaggctgcttgtgtacgagttcatgtttcgaggaagtctagaaaaccacttattccgaaggacagctactccactatcctgggctactaggatgtcggttgcattaggggctgccaaagggttagcttgcctccacaatgctgaaaggccaattatctacagggatttcaagacatcaaatattctgctggactcagattatactgctaaactctctgactttggtctggcaaaagctggcccagaaggcgatcaaacccatgtatcaacacgggtgatgggaacatatggttatgctgcccctgaatacgtgatgactggtcacttgactgctagaagtgatgtctacagctttggtgttgtccttcttgaactcttgactgggcgtaagtccatcgacaagtcacggcccagtagggagcacagcttggttgactgggccctcctgaaactgaacgacaagaggaggcttctccaaatcattgacccaaaactggagggacagtattcagttagagctgcccacaaagcctgcagcctagcatactactgcttgagccaaaacccaaaggcgaggcctcttatgagcgacgtcgttgagactcttgaaccattgcagggcagtggtggaagtgatggagctgttcaatctgttcttggcagtggccttccgagctacagagtaaaccgcagactaacgacgaacagcgtccactgtagggcgattccgaaccccaagtgctcccctgctgtcccagcatgcagggtgagatgagagtgtgctgtttcagttgctcctggaataggttcagttgtacattgcaagtctaaaccgtggatggtgcgtgagtgtgcacacctgcgctgtgtgcttttgggttttttcttctttttttttttggctttctccccagttttcaacctgtaaatttgctctgcatggtggtgcttgtaaggccctctaattttcacagtggtcttatgtgttgttgactgtgtttgctctgccaaaaccggcaaggtttaaccccagaaatgaaaggctgaactaagagtggttggatggttgctatgctattatttnnnnnnnnnnnnnnnnnnnnnnnnnnnnnnnnnnnnnn

SEQ ID NO: 390073 - DNA, 499 bp, Oryza sativa
ccccccttccgacgccttggactccaccgcggtggcggccgctctagaactagtggatcccccgggctgcagggaggcggcacgcgccagctctccctctccacctctctttcgtcgccggccgccaaggggagggacatcgccaaccgttgtcgagccctcttcatctctaactcatactcgttccattctcatctcaccatgacgaacaactttggttttgatcccattccatttcatcttctacagcagcgggaacgccgccatgtcatggtcgctctagagcgcgctctgtgcaccgccgcagcgacatcatcgccgttcccgcttatctggaccaagccgggccaagctgtcgcgccagcgtcttcgcctcgacctcctctccatttcccctcaaggatctccaaaggatcgtgctaccagtggttgaaaattgttccaccgtcttcttccaccttccggtcaccgtccccgttggccagatccaccccctccc

SEQ ID NO: 390074 - DNA, 527 bp, Oryza sativa
ctgctagacatgtatgaaataatgtgtgaacttcaagcagatattgacaccatctttgttggagaatcatgctctcaaatgcgtgagtctgcattgagtgggacaaaatgcttagcacaaactgcacagaagactttcagtgactttgaagaagctgttgaaaaggacgcaacaaagaatattcatattgatgggacagtgcatcctttgacgagctacgtgattaactatgtcaaatttttatttgactaccagtcaactctaaaacagctcttccaggagttcaaaagggaagatggaacaggttctgagttggccactgtaaccatgagtatcatgcaggctttacagaataatctggatgcaaaagcaaaacaatacaaggatccagctttgatgcacatatttttgatgaataacattcattatatcgtgaaatctgtccgcagatcagaagccaaagatttattgggggatgactggattcaaaggcatcgaagaattgtacaacaaaatgcaaatcatta

SEQ ID NO: 390075 - DNA, 485 bp, Oryza sativa
ccacgcgtccgcggacgcgtgggtcaaaactcaagtcgctaccccacgggtgctcatcctccgtcaccaacattaactgcacaacggttgttaagggagcagcaggacgatgagtatctagcatctctcgaagctgaccgagaaaaagaattgaaggcagagcaggaggctgagctccgcagattagaagctgctgctgaaagagaagctgctattgcaaagcaaaaacaggaggaggaagaaaagcgaagaaaacaactcgaggaagaggaattggagtccaagcttgcagccaaacaagcatcattgccaaaggagccattaccagatgatgtaggggccgtcactgttgtagttcgcatgcctgatggtcgtcgtcagggaaggcgctttatgaaatccgacaaccttcaggtaacattcttttagttgccagaatacctaatgaaactcactggtattccctcaataaatttttggaattc

SEQ ID NO: 390076 - DNA, 1139 bp, Oryza sativa
tcactcactaccctgcacctcgatcaattgaacgcgagcaaggaaagagagagagcgagaaagagagcggcaatggcgacgtcgcacgcggacgtggagaagggggcgaggaggaaggaggtggggaaggtgccgtcgccgctgtacccgcagcacgagggggagagggagtgggtgccgtggttcgtcccgtcgttcctcgtcgccaacatcgtcgtcttcgtcctcaccatgtacgccaacaactgccccctccacaccccgcctcgcagcggcaagtgcatcgcccgcttcctcggccgcttctccttccagcctctccacgagaacccgctcctcggcccctcctccgccacgctacagaagatgggagcacttgtgtgggacaaggtcgtgcacgagcaccagggctatcgcctcatcacctccatctggctgcatgccggtgttctgcacctggtcgccaacatgctcagcctcatcttcatcggcctgcgccttgagcagcagttcggatacgtacgaattggagcgatctacctcctgtctgggcctgggcggcagcgtcctgtcctctctgttcatcagaaaccacatctcggttggtgcttcaggtgctctctttgggactcctcggagccatgctctcggaagcttctcaccaactggacccatttacaccaacaaggtcgcggccgtgatcaccctcctgttcgtgagcgcggggaacctggcgctcggcatcctcccacacgtgaataacttcgcgcacatcggcgggttcctgacgggtttcctgctcggattcgtgctgctgatgcggccgcatttcggctggatggagcgctacagcctcccctccggcagcccgtgcagctccaagaagtacctcgtctaccagtggatcctgcttgccatcgccactgccctcgtcattgtcggattcgcggttggtatgaccatgctcttccgcggggagaacgccaacgacagctgccactggtgtcactacctcagctgtgtaccaacctccagatggacctgctcgaactgagaaatacaaggaggccatgaacaaattttctctgtactttttttctttttgcgtaatcctgtatgatgctgcaaacacatattct

SEQ ID NO: 390077 - DNA, 729 bp, Oryza sativa
  unsure (1)..(729): unsure at all n locations
ccacgcgtccgcccacgcgtccgcccacgcgtccgcaaaaccctactccctcgtcctcctcgtcgacggcggcggcgatgctcccgcagagccagagcagctcgctgcagcggctcaaccacgtcgagcagatgatagtccgggcggtgaatctggccgggacggtcatggaggagctggggaacgccactgggccccgcaccgagggcgtcgctggccactgccgcgagttcatgctcgccatgaaggaaattcaaacgacattgcgtgaggaaatcaaaagtgcttgcgaatatcgcccatttgagaagtgtgactacagtgcaaggattgctaatgagatttgttgcaaaaaggtggaatatgtacttgagaagctggatgctatgcaaaagaacattgaggaatgttctactactagttaattgataactagttatctacctacctactggtttacagtggcacaagtgtgactgagcggtttacaaaggaacatgagtgtcggtgtagccagcttgcaantgcacaaggcatcattgaactatgaaatgtaatttacttcggtttacagtgctttggtttaggtggttgcacagtgataaactgcaagtaaccacttcagtcttgcagaaggtttacagggcagaatctgaaatgaatgcttgctagtactcgtatgaaatgaaaggaatggttgcacnnnnnnnnnnnnnnnnnnnnnnnnnn

SEQ ID NO: 390078 - DNA, 835 bp, Oryza sativa
tttctttgtcgccgacgacctcgccaccgaccccgccgccggatcgcgaggaagagacggggggagccccggtggcaggagcggcgggaggggatggcgatgcagacggggttcgccacctccaaggtcctcatcctcgtcggcgcagggttgacgagctcgatcgtgctgcggaatggccggctatctgacgtgttggcggagcttcaggagcttatgaaaggtgtaaaccaaggagaaggttcgagtgcctatgacatcgcccttcttcaatctcagattcgaaatttagcacaagaagttagagatttgactatatcaaggcctattaccatattgagtggcaactccgactctggaggcagtttatcctcctacatactgcctgcagctgcagttggagcaatgggttactgctatatgtggtggaagggattgtccttatcggatgtcatgtttgttaccaaacgcaacatgaccaaagctgttgagagtatgtcgaagcaattggatcaagtgtcttcagctttagctgcaacaaaaaggcatctaagtcagcgcctggaaaatttagatgggaaaatggatgagcaagtggaggtctccaaaattattagaaacgaggtgaatgatgtcaaagatgatctgtctcaaattggatttgatattgcagcaatccaacagatggttgctggattggaagggaagatcgagttgcttgataataaacaggatgcaactaatgctggtgtatggtacctctgccaaatagctggaggtctaaaagatggaataaatgccaagttttttcaggaagctaatgaaaaactcaagc

SEQ ID NO: 390079 - DNA, 516 bp, Oryza sativa
ccacgcgtccgcggacgcgtgggcggacgcgtgggcggacgcgtgggcggacgcgtgggcggacgcgtccgcgcgcgcgcacgagatcgatctccagcaaggtcttgcacaactgcggcaagatgggcctcactttcacgaagcttttcagccgcctcttctccaagaaggagatgaggatcctcatggtcggtctcgacgcagctggtaaaaccacaattctctacaagctcaagcttggagagattgtcaccaccattccaacaatagggtttaatgtggagactgttgaatacaagaacattagcttcactgtctgggatgtcgggggtcaagacaagatcagacctttgtggaggcactatttccagaacactcaaggtctcatctttgttggtgatagcaacgacagagatcgtgtggttgaggcaagggatgaactccacaggatggctaatgaggatagttgaggaatgcgggttgctggttttgtaacaagcaagacttctaatgcat

SEQ ID NO: 390080 - DNA, 1383 bp, Oryza sativa
  unsure (1)..(1383): unsure at all n locations
tgtaaacatgcaggaagccaaagccccngcagatgctgctgccgatggtgctgaaaatggcgcaccaaattctgaggaaaaatcagtccctatggaaactgatgccaaggttgagccatcaaagaagaaagtaaagaaaactaatgttccagttgctgagttggtttatggtgccttggggactacagagttgcagaaggctgtggaaaaagagtatgaaatggctcttcaggacagggtgatggaagagacaaaagataagaagaatgccgtggagtcttatgtttatgacatgcgaaacaagctgtatgacaagtacaatgattttgtgactgctgaagacaaggaagcattcattgctaagcttcaagaggttgaggattggttgtacgaagatggtgaggatgagaccaaaggagtgtatgttgctaagcttgaagaacttaaaaaggtggggggtcccattgaggcaaggtacaaggaatggatggacagaggcccttccatcgaccaacttgcttactgtatcaacagtttcagagatgctgccttgtccaaagatccgaagtttgatcacattgagatggaggagaaacagaaggtgattaaccagtgttccgaagcagaagtctggctgagagagaaaatacagcagcaagatgctctgccgaagcatgctaaccctgtcctactctcttctgatttaaagaaaaaggccgaaacggttgacaggttctgcaaaccgataatgatgaagccgaaaccagctcctaagccacagacgcccccacaaacgccaccgaccgagaccccggctggcggagcccaaacaccagagcagcaacctcagggagctgaagcggctggcgaggccagcgagggcggcgccagcgaagtctaccggcgagcaaatggagacggacaaaccggagggaactgaagctgcctaggctgcagctgcggaaacgtttttcagtttcctgcaagttgctgctgctcggtctgcattcgttatcagattccgacaccgaagttcagtagaggttcgctagggatggatttgtgattcaccatacttcgtgaggatcatctgcgtgaacgtacgtttaggtttatatcctactgtaccaatgtgttgttaaaatcggctttccctttttaatttttctgccaaggggttttctttcaattcgagatataagggcacgtttcagatttggtgtcctacggggtgggtgttatagcgggacttacaatggaactcaaatttttaagtccgatgtatcaactgattcttgttccatgggatttgcacgctcttctggacttacttttgcatgtgttaatgtgctggcctgggtttaatggcctgctagtgtgcaa

SEQ ID NO: 390081 - DNA, 714 bp, Oryza sativa
  unsure (1)..(714): unsure at all n locations
accatgnccaactccttagcggaaaggttttccccctcacaaaagaattttgccttatccaatgagtgactttcatcccggaattcttgggaaccctatgttggtctgtggcnagnctttctcacggccctcctttccattccatgatggatgatgctctgacaactggangcatcaggagtacagagggggaaaagagacgtttagcaaaggcttcccttgcctacaactgtgagagcaaaaattgccctcacttcaggaaaatgtttccagagtacgtcgagaaataccaaccaacagaaacagatggagcaaaccgtagcggaaccagaaactcaagagaaccctgccccagctccatctcctgcggtccaacaacaggctgcagtagtagccaataaggcgaaacctgcggcggaggccgcaggcgagcagaagcagaagaagcgagtgcccttctggatgatgctggttatgttttctgtttttggtgcggtgatggccttgcccctgatgcaactctgacaaataaaataaaaagaggctataaaagtgtgataccggggggtaatttttgtatagttttcccaaggtttgcgtaactcgattcttctgtggactctcttcactttggtgatggtaaaatctgtagaaccatatcctctctttacagaatctacagaacagctttgtttgaaaaaaaaaaaaaaaaaa

SEQ ID NO: 390082 - DNA, 379 bp, Oryza sativa
  unsure (1)..(379): unsure at all n locations
gacntggctgtgacgttgggcggcaagaccggcaacaaaggtaacaagggcgggncacaccacaagcagaacggaggnacacgcggcaaacggaggaaccgcaagaaggcggccgggccaccgccgcagccgcagccatgcacccccaccggcgccgtcttcccttactaccttggccactccatggaggaaggatcccacctcctgctccgtgatgtgatccacgcgcgcgtgcaccgaggaagccatgcaagcatctaagcttccgcaggtgcgcacgcgcagctcgtgcttgatccatcaccaccagtgatgacgaccaacgggccccgcgcgggggacacccaaagaattgcacggcgggagcaccgatcgagat

SEQ ID NO: 390083 - DNA, 667 bp, Oryza sativa
tcgtggagatctgtctcctggccaacagcctgtggcttccctggtattgtctctgttgtcctcactgcgttaaattccatgctgtggtcaaggaatagtacaggagctcttcccatctcactcttcttcacacttctgtccttgtggttctgcatctctgtgccacttaccctcctcggtggtttctttggcacaagggctgagccaatagaattcccagttcgaaccaatcaaataccaagagaaatccctgcaaaaaattactcttggctccttgtgcttggtgctgggactctgccttttggaacactattcattgagttgttctttattctttcaagtattgggctcggaaggttctactatgtgtttgggttcctccttggtgtcctcctcttgctggttgtggtctgtgctgaggtatctgttggtcttacctacatgcatctttgtggcggaagattgccgttggtggtggaaagctttctttgccttctggagcagtagcgccttatgtgttcctgtactctatcaaactaacttggtgtttgatctcagaagcctgaagtggcccagtttctgctaccgctctacatggatatgccttttcgtgctctcttgcaattatgctggctactgggggactgggtggttcctgacatcattc

SEQ ID NO: 390084 - DNA, 732 bp, Oryza sativa
gtaattcttaggaagtttgggtggggagtcgcagctacaatcacccctgcagtgttgcttctcactggagttggattcttctcactgattttattcggtgagccattgactcctcttatggccacacttggaatgacacctttgcttgctgcggtctatgttggggcaatgcagaacattttcagtaagagtgcgaagtacagtttgtttgacccttgtaaggaaatggcatacattcctttggacgaggacatgaaggtcaaaggtaaggcagcaattgatgtggtctgcaacccattggggaagtctggaggcgccttgatccagcagttcatgatcttatcatttggatctctcgcaaattctacaccctacctgggaggaattctattggtaattgttcttgcctggttgggtgctgtaaggtcccttgactcacagttctccccactggcaaagctagagcttgtgaaggagaaaatgcttaaagctaagactgtctaaacatctgttcaagttgtttttgcaggaaatggttctttccattaatctttagttcaatctgacctttcttcttggttccatcttcaacaggtttatagtcccttcttaatctatttttttaatatttctttttactttttttccttctttattctttcttatttcttattcctctactttttttctttatatcttttactaattcctctatctttttctcattttctt

SEQ ID NO: 390085 - DNA, 705 bp, Oryza sativa
ccacgcgtccgcccacgcgtccgcggacgcgtgggcaacattgatgaatgatgtcatgcaaacatcaaccgtaaatcgtgagtatttgtctttggtgaggagggcattcaaccttcattcgttggttaaggaggcaatcagtgttgtaagatgcctaactggctgcaaggggattgattttgagtttgaagtggataattctttgcccgaaagggtcgtcggtgatgagaagagggttttccacatcgtcctgcacatggtaggtactctaatacagaggtgtaatgcaggctgtctatccttgtatgtgaatacttacaatgaccgggaagagaggcacaatcaggattggatgctgcgaagagcaaacttctctggcagctatgtgtgtgttaagtttgagattaggattagagagtccagaggtaatcttttgagttcgtcatccagtcggagacttcaagggcccaactctaccagttctgagatggggcttagcttcaacatgtgcaagaaaattgtgcagatgatgaatggtaatatttggtcagtctctgattcaaaaggccttggagaaactatcatgcttgcccttcagttccagctgcagcatgtgactccggtctctggagcatcctcggacttgttccgatcagcgccaattcccaattttaatggactccaagtcattcttgtggacagtga

SEQ ID NO: 390086 - DNA, 431 bp, Oryza sativa
gtctcgcgtctcgtgtctccgtctcccgccgaggcaggcagcaaccatgatatccccgcgccccgcgctgtcctcctccagcttcctcgcgttccgtcccgcggcggcgtcgcccacgacgaacccctcgccgccgccctccccgcgcctccacgccgcgccgccgccgctctcggcctccttctccccgtcgacctccgtcgtcgcgccggaccacgtggccgccgccgccgccgcctcgttctacgacgtcctcggcctccacgcgggggccagcgcgcgggagatcaaggacgcgtaccgtcgcctcgcacgcgccgttcacccggacgcctgcccgcaccccgccgtcgcgttctccgacgacttcatccgcgttcacgccggctactccacccttttcgaccccgaccagcgcgccgactacgacc

SEQ ID NO: 390087 - DNA, 651 bp, Oryza sativa
ccacgcgtccggattagcctcgtcagctacaagtgatcgatcgatcgatgtcgtggtggatgcggcaaagaggagtgagaagccaacccaagatgatgatggcggtgagaggttgctgctgccgggaggtggtcgtggcgcgagccgtgtgattgcctgctcctcctccgatcctgtgtgtgcatgcgtctccgtgcacggcgaggatgtgcgccggctgccgtgtcgccgccgccgccggagtctcgtcgtgagagaagcaaaagatcgaacacgttgtgtgcgtgtgtgcgcgcgcctagctgaagctcagtttctttggttggagttgaagccggccggctagctagctggccatgtggagcgtggcgtcgctcgtccggcaggggctgcgatggcggcggcggcggcggaggaggacggcgcgggtggtggacgagagcgcgctcgcggcggcggatggtggcgacgccgccgcgcctgcaggtggcggcggcgacgcggcgccggtggcggtggtgccgatggcgagcgtgggcgccgcgcttgccagggcgctgctggcgctggcgtgcaccatccacttcgacggcgaggacggcggcgccggcgcgacggaggaggcgtgggcggccagcgggtggcgaaaca

SEQ ID NO: 390088 - DNA, 566 bp, Oryza sativa
gaactgccacctcatcggccgctactggtcctacaaggcctccggcaactgcggcggctgcagctacgccggcacctactccgagaagaagtgccaggccaactgcggcgacgcctcccagagatggtaccatgtcccaagatcatggctgaatcctagcgggaacctggtggtgctgctggaagagttcggcggcgacttgtccggggtcacgttgatgacgaggacgacatgaacaggaggaagaattgaagtggataatttagcagggggaattgcagaattggggatttgggagcgaaggaaaggggcgggcgtatagcaattatctatacataccgcgtagatacggatacggctgggtatacgtacaatacgtatacgtatatgaactggtagagtactgttatttattgatggctgccgcgctggccgaccgtacgccggagcggctgcaggaactgcggctctggtcacggctgccggcggccggtgtacggtcgccgtcgattatttattattttactagttatttattctgagccgtggatgatggctttgagatc

SEQ ID NO: 390089 - DNA, 650 bp, Oryza sativa
ggtcgacccacgcgtccgcacgaaacgaagctggaagcaagcaagcaggaaggggaggagaatccaatccaatcatgtgggcgtcgattaatcggccgccgaccccgaatcgggaggaggatccgcagaaggagctttccctcagagaaatcatcaacgtcaagttggtagagagtggggagaaggagaagctgatggagctcctccgggagcggctcgtcgagtgcggctggagggacgagatgaaagctctctgcagggcctatgcaaggaagaaaggaagaaataatgttacagtagatgatcttattcatgtcattactccaaaaggaagagcatcagtgcctgattctgtgaaggcagagctcctgcaacgcatccaatcctttctcatgtcttcttcctcacttcggtagtccatttgtcgtaatcactggagccgcaggtatgaaggttcgaagctgatcatgtggggaggagctatgcaggaatacaatgcatcctgtaatatcaacacccaaacgatcgagtgatatttatagtgttgtcgacaatgtttctcttgtcaggcaggcagttgggcctgttctcagtctgtacacctctttaccctgcttagatgtgaaccttgaaaaatgtattttgaatgg

SEQ ID NO: 390090 - DNA, 1036 bp, Oryza sativa
ccacgcgtccgcagacaatgagaagtctcagttctcgtgatcttgggccgagtgctgcaagagcatcaggtgttgttggctcccctctaagctcatcatggtcaaagtggggatcaccttcagggacacctgactggggtgttaatggtgaagaattgggcaagcttcgccggtcatcatcgtttgagctgagatctggtggtgatgatccagatctctcttgggtacacacactggttaaggaatctccaccagagaagcaagtcactactgctgaatccataaactctgttggaccttcaccacttgatgcctcccagtgtaagcaacggtgaaggtcctagtctgaatgccccgctggatgggcatgaccaagctgctgttattggagcattgcttgaacagatgcagcttgatcagcatattggtagtctagcaacataagcgctgaatgagcctggaaagtccaaggggttattacccttagttaatgaatttggagtaatttttccccggtccattaagatgggtcagcaagcaaaaggatggatagctgatggtggtgattcagagattggtttcctttactttattgaggtaaatcatatacattattgaggttccagtaggttgaaagattgaagtaccttggattggggtcgtttcaagaccgacccaggtagaatcgcaccccggcagcttcaattcatcggtcaaaaatatttccctgttttgttaattaaccccgttaaaaaagaagactcgtttggtgtttcggaattcttttctttaccttagcggtgtttattttgtttattatgatattgatacttgatgtactgatgggtataaggttggttaccaggcatgctatagtggtatatcaagtcccaaagtattctttttctccctttcaccatttgtcgaggatcatactatggccttgttttggtcagtcttgaggcctgtataatccttggatttgtaataatgtaatattgtcattgaacttacattgctattgttttgcaatcgc

SEQ ID NO: 390091 - DNA, 436 bp, Oryza sativa
tcgttcaggagatcacccggaggactatattatctttcttaccttgaccgcgatatgctcctggggcgatcggttggtggtggaggagtttttattttcacaagagcacagcctcttttgtgatgatttcagaattaccaggagtataccatttgaaggcggcaattgaacccatgcaagaggtatatatagttagaaagttagcaacactttacaagtccctttttcatatgaaatctgattattgtcttatcatctcttcttcttttttttttgggaaaaaaaaagaacttgcatgccaaaacaatcgtcagttttagttcagttagttagcaccttctcactttatatcttgtgcattagcaaacatgtatacaacactgaatgtattttatctcatcagttatttgtatcaatgccacataactccagcact

SEQ ID NO: 390092 - DNA, 672 bp, Oryza sativa
acccacgcgtccgcccacgcgtccggaacagatcacgagctaaatggcgatccaatgtgacaaagattcctattagaattgaggatattgaaaaggttcctgccatatcagaggagataaaagttatgttaaggtccaacccaaaggttgtcttagactcagaagcaccagctccttattgttatctttcaagatgggaaagttcatatggagagctcaccattggatgcaacctcacgaaaatgccaaaggatgagtggctgtctacaacacaaggcattcttctggaggctgctaagattatcaagttacaatggcgttgaactgggaagcaccacgcagtgctgctgattacgggtgcttttggaagttctaagtaggtgaattacgttagtcacactcaacagaagtacataggttggtggctttggaacacttctagtgcgaaggcaagagccgtcctttagtctttttggtatcttcagatttcagaccctcgactccattgctttctgttaaccgcgttttttttagctaaggtcaatttccaactctctttaactttcccttcgcttgatatatcatccgctaatagcctaacagagagaagcactgccaatgagccccggtaaacattttggtccgcatgctgataatgtgagcgggtagttt

SEQ ID NO: 390093 - DNA, 607 bp, Oryza sativa
tcaactgagctggttaatcccaagtgcaaggcttgcgggagcacgccttgtgtccgcgacacggatcacttggtcttggagctccctctgctgagggagaaacttgagaagtaccgcgacgagacttcgttgactggatcatggagccaaaacgctattcatgcaacaaatgcttgggtgaaggaagggttgaagcctcgctgcattaccagggatctgaactggggtgtgcctgtcccacatgagaagtacaaagacaaggtgttctatgtctggtttgatgcaccaatcgggtacatctccattacggcgtgctacacgcctgagtgggagaaatggtggaagaatccagaaaatgttgaattgtatcagttcatgggtaaagacaatgtcccattccatacggtcatgttcccctccacactacttggaactggagaaaattggactctgatgaagacgattagtgtgacagagtatctcaattatgaatcaggaaagttctccaaaacaaagggcatttgagtgtttgggaatgatgcaaaatccacaaatattcccttctgagtgtggcgatactacttgcttaccaatcgttccgaggcat

SEQ ID NO: 390094 - DNA, 725 bp, Oryza sativa
  unsure (1)..(725): unsure at all n locations
ccagatgatccgagtccaggtagctgatgagcaaagcgngatcactcgactgcaataactgtaagcnctccgtgcaccgattcctgagaagctgcccaagatgtccttttaagctgtgcttaagttgctgtcagaagatacgtgacgggaatatctcagccgccacccctgaagacaaatttaaccaacggttgcttcagcaagagtcagcccatgaggatggcagcattagttgcccttccatcgagttaggtggttgtggcgactccttgctaaacctggtgtatgtgcccccatctgaccaatctgaagaagtcagttcaggagacgagctagatggtccgggcaatcattctggagttaaagatgctgttgctgagagtaatggaggccctgacagattatccgttggccagcaggagaccgtttcctcataactacaactgccgatgttgctgatgtccctttcatctttgaggtgagtgtgagagtgtcataactgtggagacgctgagagtaatgagcatgngaatgttcattctaagggctggaaaggtgaggggtgtgctccggattcgttagacgggtagattgcctgatttagcgtgattatcggcccatatcggccattgattttaggtctgtgacctgtgganattctccgagtaattttttccgtacctgttaaatccttggtntggacatggtgtaacaaaaaataaaaa

SEQ ID NO: 390095 - DNA, 485 bp, Oryza sativa
  unsure (1)..(485): unsure at all n locations
aatggaaagagagtctcgccacctcataatgcactcagtgtttcacctacgcgaaaaggtggccggaagctgatactgaaatccatcccctcatttccatcactcattggagacgcaagcagcggttcatcaatgaacagttccgagagcgcattcaacactgcatcgcctcttgctttaggtccatcctaaaagctggctgctgattatgagcgtccggagtacaacttgtagtccgagaaaagtgcctcacatctgaagcacggcatcaggtactggatgagggtagtttaagttagaatattaagatcttgtagcatgtatttgtaacatatgttagtggcaaataatctgtatgtaagatagtatgttgtgatgatgataatgttgtcttgattgaattctatcaacactgtataaaatcacctctgtggaggtttttcaacttccaannnnnnnnnnnnnnnnnnnnnnnnnnnnnnnnn

SEQ ID NO: 390096 - DNA, 729 bp, Oryza sativa
ttccgggtcgggcgagcgtccgcccacgcgtccgcccacgcgtccgcccacgcgtccggcgaggcgaggcgaagcaaacatggcggcggctgcggtgtacggcgccggcggcgcgatgaagggcgggaagctcggcatggaggaggcgcgggagctgcagctcaaccgcatccgcatcaccctctcctccaagaacgtcaagaacctcgagaaggtttgcgctgatctggtgaagggcgccaaggacaagcagctgcgcgtcaagggccccgtcaggatccccaccaaggtgctccacatcaccacccgcaagtcgccgtgcggtgaaggaacaaacacatgggatcgtttcgagttccgcatccacaagcgggtgatcgatctcatcagctccccagatgttgtgaagcagatcacctccatcaccatcgagcctggtgtcgaggtcgaggtgacgatcgctgatgtgtaatgctgccaaactagcactaccttagacctacctgtcttgtttctctgctgcttagaatctcggttccgattgccatgcgtgtaacggacatccaactggtttagtgtatctgggtcttttatatgtgcgcggatgctatggatctttctcatgtaagaggtgtgtaactcgccagttttgcttcaaccacatgaaatttggtattggattcaaaaaaaaaaaaaaaatccaaaaaaaaggggggccgcaccgggtgg

SEQ ID NO: 390097 - DNA, 729 bp, Oryza sativa
ccacgcgtccgcgccacccgcgccgccatccccgagcaccaccaaccccaccccccgagcgagcggagcggagaacgcgaggcgaggcgaagcaaacatggcggcggctgcggtgtacggcgccggcggcgcgatgaagggcgggaagctcggcatggaggaggcgcgggagctgcagctcaaccgcatccgcatcaccctctcctccaagaacgtcaagaacctcgagaaggtttgcgctgatctggtgaagggcgccaaggacaagcagctgcgcgtcaagggccccgtcaggatccccaccaaggtgctccacatcaccacccgcaagtcgccgtgcggtgaaggaacaaacacatgggatcgtttcgagttccgcatccacaagcgggtgatcgatctcatcagctccccagatgttgtgaagcagatcacctccatcaccatcgagcctggtgtcgaggtcgaggtgacgatcgctgatgtgtaatgctgccaaactagcactaccttagacctacctgtcttgtttctctgctgcttagaatctcggttccgattgccatgcgtgtaacggacatccaactggtttagtgtatctgggtcttttatatgtgcgcggatgctatggatctttctcatgtaagaggtgtgtaactcgccagttttgcttcaaccacatgaaatttggtattggattcaatttttgtttaaaaaaaaaaaaaaaaa

SEQ ID NO: 390098 - DNA, 404 bp, Oryza sativa
gccacgcgtgcgcccacgcgtccgcccacgcgtccgcccacgcgtccgtttctgttcagtttggttagcataggaggattctacatcccagctcatctctctctgtacgggcaacccggagtggaaagatgagctgggatgtacggattctgttttctgttcagtttggttagcataggaggattctacagagaaaaaaaaaaaagggagaatttgaaccatgccacacaaattttacaaaatttgtgatatgccaccctgacccacatgttattgactcatgtgggtcttatatgtcattgagatacgggtggtatatctcaaatttataaatatagggtggcatggttccaacaaacccaaaaaaaaaaatgaagtgatactaaactctggatttgttttag

SEQ ID NO: 390099 - DNA, 608 bp, Oryza sativa
cgatttcgatgaggaagacgaggacgaagaggaagaggcggatgggctcgacaagtgcgcgatcgacgacgaggacgacgacggccttctcggcatcgggcgcggcgaggacgaggcgtgcgagtcgctccgcctgcttccaatgagcaagactaaggagagcggcggcggccatgaagcggcttccggcgtcacctcgccggaggcgccgcccgcgcctcaacagacgcgcgacgcgaatccggtgctcagctcggtggagaatctcacccagtggaaggacgccaaggcccgcgccgccaccgccaccgccgcgccgaatgcttcggacaaggagaacagaacgacggcgaacttgctccccgagccggcgatcccagccaagaagagagagtggcaggtggtctgctccgactacagccccagcacgccaagcaagcaagaagtctcggtggacgcgagcctctcgacatggctgggctcttcggggacgccggagagcaactccgtccggtccttctcgccgatcagccgagaagaccggccgatccttggggccctgaccgtggaggacatcaagatatcctctgccaactcgtctccgagga

SEQ ID NO: 390100 - DNA, 778 bp, Oryza sativa
atctgctgtgacacgtaactacagtgagaaatgtataaacaacattatggattttgtctccggatcagctagtcaaaacttctctcttctgcaagagttctaccagacaacactgaaagcacttgaagaggcaaagaatgagagattatggtttaagacaaacctgaagctttgcaaaatttggtttgacatgggggagtatggccggatgagcaagatactgaaggagctgcataaatcttgtcaaagagaagatggttctgatgatcagaagaaaggcacacaacttttggaagtctatgctattgagatccaaatgtacactgaaacaaagaacaacaaaaaattgaaggaactatatacaaaagctctttccatcaaatcagcgatacctcatccaagaatcatgggtataattcgtgaatgtggtggaaagatgcacatggctgagaggcaatgggcagatgctgcaactgatttctttgaagcattcaaaaactatgatgaagctggcaatccgcggagaattcaatgcctgaagtaatcaaatcatctgcatttcttttccattttaatttcgtatattgataaatttagaacttcctcatccttttttattgtactgcatattagatatcttgttcttgcaaatatgttgatggaatctgaagtgaatccctttgatgggcaagaggctaagccgtacaaaaatgatcctgagatcctcgccatgacaaacttgattgcagcatatcagaagaatgacatcatggaattt

SEQ ID NO: 390101 - DNA, 502 bp, Oryza sativa
atcatatagaaaggcacacaacttttggaagtctatggtattgagatccaaatgtacactgaaacaaagaacaacaaaaaattgaaggaactatatacaaaagctctttccatcaaatcagcgatacctcatccaagaatcatgggtataattcgtgaatgtggtggaaagacgcccatggctcggaggcaatgggctcatgctgctactgatctctttgaaccattccaaaactatgatgaagctggcaatccgcggagaattcaatgcctgaaacatcttggtcttgcaaatatgttgatggaatctgaagtgaatccctttgatgggcaagaggctaagccgtacaaaaatgatccggacatcctcgccatgacagacttgattgcagcatatcagaagaatgacatcatggaatttgaaaagattctaaagagcaacagaagaaacaatatggacgatcctttcattcgtaattatattgaggacctattgaagaaca

SEQ ID NO: 390102 - DNA, 598 bp, Oryza sativa
gcgccacgcgtccgcccacgcgtccgagaaaaacaggactgatggtggtagtttatcagcagataagtggaatggctatgtaaataaggatgaccgtgcacttctgaaggtgataaagtatgcctcccctacttctgctggagctgagtgcgtagatcctgactgcagttgggttgaacattggattcatcgtgcagggcctcgtaaggagatatactatgagcctgcagaagtaaaagctgctattgttacctgtggaggcctctgccctggtttaaatgatgtcattagacagatagtatttacattggagatctatggggttaagaacattgttggaattcagtttggttatcgtggattttttgagaaaggcttaaaagaaatgcctctttcacgtaaagtgggggaaaacataaatctttctgggggaaagtttcctaggtgggtctcgtggaggagctaaaactagtgagatcgtcgatagtatacaagccagaagaattgatatgctttttgtaattggtggaaacgtagccatgcaggagctaatgctatccatgaggagtgtcgtaagagaaaaactgaagtgtcagtt

SEQ ID NO: 390103 - DNA, 1258 bp, Oryza sativa
agaaaacccaagtaagtcgtcgccgccgccgccgccgccgcaatcgtgggtgatgggtcgtgctcgtcggagcgccggcggggcctccactgctgcctggccttcctcttcaagttcctcgccttcctccaggccttcgccgctgtctccgccctactctacgccgcatggatcctctcccgttgggcgcgccaccaccatctccacctccaagacctactccccgacctctggttcgtctgcgccctcatggctgcgggcctcttctactgcctgcttctcctcgccggatgcgttgctgccgagatcaacagcccctgcttcctctgcttctacaccatcttggctgtcgttatgatgctcctcgaagctgctctcgccgctgatttattctttaacaaacactggatccaggatttgccatatgaccgcactggagaactcgataatctactttccttcatccaaactaatctcgacctctgcaagtgggctgctcttgctattgttgctacacaggcactttcacttctcctggcaaccatcttacgatccatgctttctaccccgagtgccgactatgacagtgatgaagattttgtggtcataaggaggccacttctggttgcccaaggtgctcccgcttatcttcctaccaccgccgatactagaggtttccatccagacctatggagctcaagaatgagacacaagtatggattgaactcaagcaactacacctacaacacactggatccaaatgcaccaccacctcagtaagcagcgtgtgactgatgatgatgttagagatgatgaagaagcatgcctttgtcccaaacacctagtatatacaaacaccatttcttctaatattgtactatcattgtttgcatggttagtaatttttcattttatgccctctggattgtacatagttgcatatttcattgcattttagtactttcatcagttgatatctgcacatttgtgtttatgtgggtggtacatgttggagctctgcatctgtacaagtgtatttgtgcatgagggtgcaacattgtttaatagttgggagtatctcttctttctacaagataagcttgtcagtggtcggtgtaaagggggatcatatatgcgagattcaggcctggtactccagctcgtagctttgaatttgcacatctagtgattgatacatatatagcttgggggctgatttgccatcaaattctattgaatttatcaactcttttttttc

SEQ ID NO: 390104 - DNA, 434 bp, Oryza sativa
cccgggtcgacccacgcgtccgcggacggcgacgtcgccggcctgcgctacctccagtgcgtcgtgaaggaggcgctccgcgtgcacccgccgggcccgctcctgtcgtgggcgcgcctcgccgtgcgcgacgcgcacgtcggcggccacgtggtccccgcgggcaccacggccatggtcaacatgtgggccatcgcgcacgacccggagctctggccggagcccgacgagttccggccggagcggttcgcggaggaggacgtcagcgtgctcggcggcgacctccgcctcgcgccgttcggcgcggggcggcgcgcctgcccgggcaagacgctcgcgctcgccaccgtccacctctggctcgcgcagctgctgcaccgcttcgagtgggcaccggtcggcggcggcgtccacttgttggagcgcctgaacat

SEQ ID NO: 390105 - DNA, 427 bp, Oryza sativa
ggcgggcgtccggaaaaatggtgcagcttctaaaatagtgttcacaaatggctctcaagatccatggcgccatgccgcgaaacagaaatcggcgagatatatgccatcatacataatcaaatgtagaaattgcggacatggcactgatctgagaggatgcccccaactccctttcaggattgaaggtgacccttcaaattgctcatccccggcagccgtgagcacagtgaggaagcagatcgccagccacatcagcttgtggctatcacaatgccaagaaccaacaagggcatggtgatgatgactcgggagtcggggctacaataaacacagttacacagaccaatctacggtatccattgatctactctagtacaattaaggtggtgtttgaatgtcctgaagatgaaggttaagtttttcacgc

SEQ ID NO: 390106 - DNA, 371 bp, Oryza sativa
ccacgcgtccggctgtttgtccaaagcttgcaatctgccgtgcggtttcaggatagaggacacattgcccttgagtctgcacatgcatcattccacttcgtatgtccaggcacttgcttgcatgatgtctagacctgctctttggagacgtcaacccatccttacagccaagacggaggtcctcgactaactcatgcttcattccatggagtccccctgtccttatcactcatccactagagacgggtaagctggccgtctgctaaccttgcttgaggcatcgagaaccctcattgactactggaggggagatgagcttttacggttgactgacattcaggttgttcatcagaatggttcgccatgcgtag

SEQ ID NO: 390107 - DNA, 848 bp, Oryza sativa
ccacgcgtccggtttgaggaggcagagcactattgcacaaggctcttggatatacaccggtccggaaagggagactgcaaaaagtattttgcaagggctaaaaagagcacaatcggtacttccgttgatggatatcgaccattttgcaatgtaaatttgacttgcagataagttatttagttggaaactaaggtgttaagtgagatgtacaagagaaaactaccccttgcgtattcttttctccatttttgcatgcatcgaggaaagctacacattggtttcaagagaactgctataatacagaacagtcatcatgaacaaaggggattggttatcactcacaccgcaccaggcaaggaaaagaaatctatctaaggccacacactgacccacctgatgaaactggtactttgcgtatctccagtaccagtagagcagccacttccgagcttcataatgtaatccttattgtttgtatccttgccagaaaactccatattgctggagatgttgaccttgtgtgcatgatgatctcttccagttgctgaagcttggtaattagtaacactaatcgccggcatggggcaaaaatgagcgtcatcgggatgatgaagatcgctagctcaagtatcggcattgctgcttgctttctgctaggttctgtttctatggcttttcttcactagattgctttggtctgtgttgcactcaaagttccatggagttgcttgcatatataagcttcttggaagacttgccttgtctggattccagttctcatattcttgcttgttaaaataattgttgatgctttcctttccaataattccagttttgtcaatttttat

SEQ ID NO: 390108 - DNA, 605 bp, Oryza sativa
gcccacgcgtccgcggacgcgtgggcggacgcgtgggaaataagtgctgcaatatcaccagatcagaacaaacaggcattcaaggaagtggtcatcataaggcatcctcgtattggagaatatgcatttggtttcattacatcatcagtctctctccagagttatactggtcaagaggaactgtactgcgtgtatgtcccaaccaaccatctttatattggtgatatcttcatggtaaattcgaaggatgttataaggccaaatctttctgtccgtgaaggcatcgaaattgttgtatctggtggcatgtcgatgccccaaattctatcaactctggacccacagacaattcttggagacagaacaggagcaagcagaagctgagatctctccttgggtgcgacttggctaaaattatcagaccaagtacagtgaactagatcctgagcaacacgatgtattagtggtctgtcgagctctaggatcacaaggatctgtaaattagtagaagtaggtgactcatatattccttgttcatccgttggcagtttgtaccatggtttgcactttctaccacgttctatacaagaatgcttcgtagttgg

SEQ ID NO: 390109 - DNA, 660 bp, Oryza sativa
gcccacgcgtccgcggacgcgtgggttgagagaatgtgataacgagtactccagaaatttcatgaaaatactagggaccctaagggagagggatccttcttaccaccagctctgccgcgtcgtacgtcagggtgaacagccaagagaaggctttttgcttctatctaacttggtcgaggatcagatgtctgggactagcagttacatggactggatactccaaatccaccgccaaacgcagagctagtcacgatgaatcaagggaatcgccgttccaaatttttggcttattgtaaactgctgcagattcagccgctgccagttcctaatctctcgaaacagttggaactaattcgcaagtcagatgtccagaatgtcttccccttagcagcagcacgctggcaagcaaaagttttattgttaatattcgtccctgtgattattttcctcgtgagtgaaaatacagatgttgtatgagaataattagggcaacagtgaccattggtaaggtatacaacttggtggtcttggaaatgtgctgcacgttttttttttccatttttggttttattattggtcagatttctagtttgtgccgtgtcgggctcctggtatttttagttctccaaagttcgtcgtgtgaagactcattttgactga

SEQ ID NO: 390110 - DNA, 544 bp, Oryza sativa
ggccacgcgtccgcacctacttggtgcttattaagagcttgtatcaggctgcccggatttctgaaggggatgagatgatgacatggatgcggtctgcagggtttggtgctaagcttgatagaaaggcatattatgggttcatcaagattttatgtggcattgaaagggttgagcatgctgtcaaggtgttcaggatgatgaaaggatatggacatgcacctgggacaaagtcatatagcttgctgattgagaagctgactaggcataacttaggagatcgtgctaatgcactgtttagggaagcagtggcacgtggtgtgactgtgacgccaggagtgtataagattgataagaagtatgtgaaggcgaagaaggagaagaaggtaaagaagaggctgactttaccagagaagatgagattgaagagcaagaggctgtacaagcttacaatgagctttgttaagaagcctaagcgtcgaatggtcccgggtttgagcaggctctgggttggagcggatgatcatgggaagagagaatcagaaag

SEQ ID NO: 390111 - DNA, 543 bp, Oryza sativa
ccacgcgtccgaccagggccacctcgacacgttcttcttgctgctcgtcgtgctggccgtcttggtacttcgccgtgtacctcgtgtgcgcgagccggtacaggattggcacggtggacgtcgaccggagcgacggggaggaggaggatggcgtggacggcaagcagatggatggcaacggtgtaagcgtcaggatgaatcgcccgtctgctcgcgctatatagatgcatggtaggctgtcttggttcttgagacggagactgcagactcttttaggggatgagttgcattgtgacgagttggattagcacgacaagtctccgttgatgataggacatgcgcggggggatagtgacacgatactaaagaataagaggtcgcctacagatgcagtattgatctatcatgtacgcctgtgtttgatcgattcacatttttctggccaatgtaacaagagaacgcgactgttactgaccactcatgttctttcttttcgcagagcgactgatccatgcttttgtgcattgccgactgttgattgta

SEQ ID NO: 390112 - DNA, 698 bp, Oryza sativa
ggccacgcgtccgcccacgcgtccgcctcgagctgctcaccggcaaggcgccgacgcacgccgtcgtcaacgaggagggactcgacctgccgcgctgggtgcagtccgtcgtccgggaggagtggaccgccgaggtgttcgaccaggagctcctcaggtaccagaacgtcgaggaggagatggtgcagctcctccagctcgccatcgactgctcggcgcagcaccccgacaggcggccgtccatgtccgaggtggccgcgaggatcgacgagatccgccgctccagcctcggcgaccgtccggccaccgacagcgccggcgagggcgaggagccttcactataaccgaccagccgacattgccgtctggatcaccgtacatcgatctcagcctcagcgaacggaaattaagttggagaattgcttagttctttgcatggatcttgctcccccaggctacttttggttcatcagcaacttgtgcatgtttttttcattactttttctttcttcttcctttcttttttttcccttcttttttttgggcctttctctcacgggctttgattctattctatagcacatgtcgctgtactctttgattcttggaaaggaacacttgataatgcgttgtatctatgacgaataccatcaccagctgtatggtttgctatttaaaatacgaaatgatttcatttc

SEQ ID NO: 390113 - DNA, 571 bp, Oryza sativa
  unsure (1)..(571): unsure at all n locations
tcccgggtcgacccacgcgtccgagaaaagcttgctgatttgtgatggctgccccaactgcaacagctgtttttcttgatgagaacctgcatatccatagggggcctgctggcaagagggctgatggattgaaggccaagccactgaagccattagcagcaaagcaagggcttcaagagaagaaggccctgagggatgtatccaacattggcaagcccccggtgtctacgcggaagcccctgcaggacgtgtccaacaccgccaagccccgagggcgcaacatttctgatggcactaccttgaagaagactgctcttcgcagccatgaggccaccaagaacccagtgaagaagactgtaatcttttctgatgagaccgcaaaatgtcatgaatgggctaaggatggggtggagggcacccacttcactgggaatgattctcagaagttggaaaaggacagtcaagacaaacgtgtcaagaagaaggtggagaaaatattggcagcattgcacgactggccagacgccgtatttgatcatgtgctttttccatntgagggggnagagcgttt

SEQ ID NO: 390114 - DNA, 591 bp, Oryza sativa
tcggccacgcgtccgcctgtcgggaggctgaggacagcttgtgagtgggcgaagaggactctctcccctccacttcccagaccacccaccattgagattgactccctgtacgagggcatcgacttctactcgaacatcacctgcgccaggttcgaggagctgaccatggatctcttcaggaagtgcatgaggggataccaagatggacaaagagcagcgtgcacgatgttcatccttgttggtggctccaccaggattcccagagtgcagcagctcctccaggacttcttcaatggcaaggagctctgcaagaacatcaaccctgatgaggccgtcgcctatggcgccgctgtccaggcccccatcttggtctggagacggccagaggagtgatgacctagaaggagcaggccggtcttctccacctactccgacaaccggcctggtgtgttgatccaggtgtacgagggcgatgggagaggaccatgacaccattgagtaagtgaggagatcgagaagatggtccaggacgcggagaagtacaagtcggaggacgatgagctacatcgaagaacatgcacaaacaccatc

SEQ ID NO: 390115 - DNA, 522 bp, Oryza sativa
gccacgcgtccgcgcgtccctcgcctgtgccacggggacttcggcggcgccgtgagttgctccctcggcggcgcgccgcccatcaccctcgccgcgttcacgctgggcggtgccgacgggaagggcttctacgacatgagcctcgtgggcgggggccgacgggggagcccgcgagccgctcctccccccgccgccgcgtcgcccctcgctggccgctgacgccctcctcctcccgctggctgagtcagagaagggagagagagagagagatgaggaagggagagaagaggggaaaagagaggaagagaggaggctgatgtggcagcctgacatgtggggcccacgtgggtcccacactgactcagccgccacgtaagataaaaccgaagtcaaaaccaccgaatgacctattgtggccggttttgatagttgagggacgctagatatctggttttgcggttgggggacgattgtgtaactcgatgactagttgagggaccttcggtgtactttttcctatcg

SEQ ID NO: 390116 - DNA, 694 bp, Oryza sativa
  unsure (1)..(694): unsure at all n locations
ggccacgcgtccgccgcccaccgcgtcatcctcgccagcagatctcctgttttcagagctatgcttgagaacgagatggaagagagccggagtggcatcatcaaaatatacgatgtgtcctacgacgtccttcgtgctttcgtccattacatgtacacagcagaagctctccttgacgagcagatggcatctgatctcctggtgttggctgagaagtacgaagtgaagaacctgaaggcctactgtgagaaattcttaacatccaaagtgagcaacgacaatgccatcacgcattatgcgtttgcgcatcgccacagcgcgaagcagctgctcgagacatccctggcagcgatcatggacaacatgtcaacgctggcagatcgggaggaatacaaggagcttgttgagaaggacccaaggcttgttgtggagatatatgaagcctatctgaacagacaagtgaacactgctgctgggaaggagacagattccagtaggaggacggggtaattcaaaagaaaactgctatcagagatgtaattaatgttctaaccaagcttttgcatgttcatgctaggcaaagactggcacatcaaattgtcatcctgcggtgtaggcgcagaacagctatttctgtatatgcttgaattgatactgtgtgctcgctnctgatnnnnnnnnnnnnnnnnnnnnn

SEQ ID NO: 390117 - DNA, 902 bp, Oryza sativa
agtacttcatcatatatcatcaaggaccacatagaaaaacttattcatgtaatagattagctgatattttagacatactgtgaactctatttattcctctctctggattaatgcagaatgaagtgtcaatgcttatgattaaagctgatcctccaaatgcaaaatccgtttataatcttcacgaggaagccaaagaaaagttgatcaatgcgtcaaggaaggatgcaaggtcgctgactcaaacatacacaagcaacacttcgctagtggcgatcctcatcgcaacaattacctttgctgctgctttcaccctgcctggaggatacagcagtgatgctggaagccagggacttcctataatggcaaggaacgttgcctttaaggcattcttgatatcagataccttagcaatgtgcgcctcacttgctgttgcgttcatatgcatcatagcaagatgggaggatctcgatttcttgctttactacagatccttcaccaagaagcttatgtggttcgcgtacatggcaacaactacagcatttgcaaccggtttatacacagtattggcccctcggctgctatggttagctgttggaatttgctctgttgctgttttagtgccaattctcactaaggtgctcggggaatggcctgtcttaaagctcagaattcggttgggccaagctttcaaatcagagttccttgatatggtctgatattatcgatatatcttgtaaatgatagcatattatatcgttattgttcaaatatatgtgtcacgtgttgtttgatcaataatagcatacattgttaaatctttaacttcatgtatataatctaaataatgtactctgaacattattcatgtggagcttatgtaatgacttggtatcttttttttc

SEQ ID NO: 390118 - DNA, 645 bp, Oryza sativa
  unsure (1)..(645): unsure at all n locations
ggcgggcgtccgcccacgcgtccgggaagatttgaccgtttgatcttatgtgattttcctggatggcatgagcgttgggaagttctgaaaggtcactctagagaggtttcactggcaagtgatgccagtctggaagaggttgcttctttgactgaaggatttacaggtgcagatcttgcagctattctaagagatgctaagctggcagcagtgcataaagttctggaggacagaaataatggtatctcagacacacagccatgtatcagcaaagaactcctaatatctactgctagggaggctagaccttcgacatcagcagaacaaaaaatgcagtatgacatggacttcggtcaatttgtatcgtctaggaagtctgtttcaacgaaggcgagggaatctaaaggaaaaaaggtcacgctggcttgagtctctctgcattggacaagtacaattacgttatgttcattggcgcagaacaagaatggcgagcgccttttttctgctcggcaaatctcagttntgacttaccaactccacccctcttctttgagaaagggaaagaaactcattttgtagattgtagtgcaggcagcgaggggctgtgatgatgtatagcattgtgccaaattttgatacgaatgg

SEQ ID NO: 390119 - DNA, 767 bp, Oryza sativa
ggccacgcgtccgcccacgcgtccggcaagagtcaaaagagcatgaacttggatccaacttggaaactacagagaacacaactatctcgttggacatgaaaacaccacttagtcacttcccacctttccgctttggagttgagtttgaagatgtgcacaggctcgcagatagtcaggtgaagcattcgactgaagtattttatgcaggctctctttggaaggtaagtgtccaggcattcaacgacgaggatcctcatggacgtcgcacccttggactctttctgcaccgacgcaaggctgagcctttagacccattgaggaaggccaacatgtatgtagaccaccgggaaaaggtcactgctcggtatcagcttatctgtccatcgaagagagaggtcatgattttcggaagcctaaagcaggctggcacactcctacccaaagctccaaaagggtggggttggcgcactgccatattgttcgacgaacttggcgatcttctccagggtggatccctgagaattgctgcagtagtccagcttgtctaagccaaattgcccttgtatatctagaaacaatagtagtgttagcttattgcaaatggaaaaaagaaggcactaaatggcacttgcaaagtatggtaatgtcactgtaatgcaatggttctattgtatttattcccaaacgtgacgccgtcatgcttgtgtgtgtaataggaactaatatatagccaagtcatgcattcgatatcaaaaaaaaaaaaaaaa

SEQ ID NO: 390120 - DNA, 639 bp, Oryza sativa
ccacgcgtccgcccacgcgtccggttggagctattggctatctggagaaatttaagtttgggaattattccaggagtgctcttttacggcgaattaatgatgcatgtatgctcttggggactaacagattatcccttaatatctcagttatgtcaagaggatctatcattgggccagtgctgttcaaagttggagaagatgtgatgattgatgcaagcttaagggctgtacagattccacacgacattcacttggtggaccatattaagttgaaaaaaccagtcagctttgttcttgttgttgaaaaactatcaatatttaacatgcttgtcaatcttaactttcatgtcacacacaattgcataatcatcactggatgtggaaaacctgatatggcaacaagaggtgcagtttttaaacttaattattgcttgccagtcaaagtttatatccttgctgatcttgacttggatgggctccagatatacttataaacttggcagcaaagtaagggcttttgagaactttgtgttggcatctagagatcttatatggctgggtgctagaccagaagattctctacttttacaaggaacccaatgggatttaccagagtgcagcagaaatctcttactgatc

SEQ ID NO: 390121 - DNA, 981 bp, Oryza sativa
ccacgcgtccggtttatatatatagagagccaggctgtatgcatctttgcaaagccatccattaattcatccattcgatcattgggtacaacacaagcatagaagcttgtacgattaagttgatcagctttagctatcaccacctttgcttgtaacatcaaaagcatggaggatttagttagtggctcatctgtgatgaggagtgccataattagctgcagtagtactagtgaagatcagcaagctgctgctgctgctcaagctcagccggaggagagcacctggaccgactactttgtggatttcatgatgtccgaggaggagaagaagagtcaagaagatcatggtgcttcttcatactgctcccatggcggagatggcgtctatggcgattgcagtgatcagaaggagctggaggaggaggaaggagaggaagattctatgatctccgacgccgcgtcttgcgctcccgcggctgcggcgttgcctgataggtacaaggagttgaagaagctcaagaagaaggtcttcaaggccctggatcatgatgattccctggaggataccgcaagctctccagtaaatagccctaaggtcagtgctttgacacagctggaattgagccctaaaaggaggtgcaataccagggacctaaccaaggaagttgggattggagatgatcgtggaagagaggggatggactatgcagatgcaatggtagagggggggaggtttgttgatcaaagtcagaagagtgtaactccatgtggagagctaaaggataaggggctttggttgtttcctttgtccatgttgctgcactaccatggatgaaaatttgagaacttcaatgtagagcacggtgtagggtttatgccttacatgaatgtgtgtgggataaatgaccaaaaaatatagtgtgctgagattactgtggatatattttttgggtgaaaatatatgtgaatatatattaccgct

SEQ ID NO: 390122 - DNA, 693 bp, Oryza sativa
cacgacccacgcgtccgggagaacctgcagagtgctctgaggcgtaggcaaggcgctagctcaagaagcatggcgcacgagattgactatatagcgcgctgatatgtcgacacgccaaactgcatcatacttgctatgtcttctggcaatcaagatatagcaacatctgatgctattaagcttgctcgagatgttgcgccaactggtgaaaggacatttggtgtgttgactaagcttgatttgatggacaagggaacaaatgcacttgatgttctcgaaggaagatcgtacagactgcagcatccatgggtcgggattgttaatcgttcacaagcagatatcaataagaatattgatatgattattgccaggcgaaaagaacaggagttctttgcttctagtcctgaatattctcatttatcaagcaggatgggttcagaatatcttgccaaacttctttcacagcacttagaggctgtgatcagggcacgtattccaagcattacatctctgatcaacaaaactattgatgaacttgaatctgagatggatcacattggtagacctattgcctctgatgctggggctcaactatacctcgggtgggagctttgccgtgcatttgagaaaatatttagagaacatcttgatggaggacggcctggaggggatcgaatttatggtgtctttgat

SEQ ID NO: 390123 - DNA, 1116 bp, Oryza sativa
  unsure (1)..(1116): unsure at all n locations
gnaccagtaaaaaaatntcgttttaatnggggatngggggnaanatttaaaaagaanagtnngaccnggtaacnccagttgaattaaccntcattaaaggaacaaaagtggngttcccccccgggggggccgntttagaatantgaatcccccggcggcaggaattgggcaacggctggatcctggaacgcgtctggaagctgctcgccgacgtcgaggacctgcacctgctgatggacccggacgacttcctgcggctcaagagccagctcgcaatacgggcggcaccgggctccgacgcgtcctcctgcttccgctccagggcgctgctgcacgtcgctaacgccacgagggacctcaagaagcgtgtgccatgtgtgcttggcgtcgaggtggaccccaacggcgggccgagggtgcaggaggcagccatgaggctgttccacagccggcggcgcggcgagggcgaggaggccggcaaggtggagctgctgcaggcgttccaggccgtggaggcggcggtgaggaggttcttcttcgcgtaccggcagctcgtggcggcggtgatgggcaccgcggagtcgtcgaccaaccgcgcgctgttctcgccggcggaggagatggaccccctggcgcagatgttcctcgagccgccctacttccccagcctcgacgccgccaagacgttcttggccgactactgggtacggcggatggccggtgacggtgactctgcttcgtccaggcgaagctgagcggcggaaatagtggcggatggatgccgccggaccctgaattttgcagtctttcaaggttgatgatacatttaatacatttatgatttatttctgtagggtagtggtcgcgttcatctttcagttcgagtaaatgttttattgggagacattttggtttagatttgattactagatggtatcgggaaaatgatctaggatcatatatttcaattagagtactgatgatgtatataatgctctgtaaatatgtttcaatggattatgtgtccgatattgataatgtttgatgtactacgaattgtttcaaaggaaaaattatttcctnnnnnnnnnnnnnnnnnnnnnnnnnnnnnnnnnn

SEQ ID NO: 390124 - DNA, 587 bp, Oryza sativa
ccacgcgtccgcaccttctctattgatgaaaacatcacttggggagttacaataaactttgaaaagataggaggcctgaggattccgattacacagttgatgttctcacaagatgttctgtaagcaaggacaaaagtggaaagaagacaatgaagattattcctctgaaagaccgtggagaaccagttgtgatttccttgccactttctcagattgatggactaagcagcattcggatgcacataccaaaggatcttttgcctgtagaagctcgagaaaacacattgaggaaagttgatgaagttatttccaggtttgctaaagatgggatccctttattggatccagaagaggatatgaaagtacaatcaagctctttccggaaagcttccagaagaatagaagctcttgaaagtttatttgagaagcacgatgtccacaattctccacatattaaacaaaagctaaaagtggtgcatgctaagcaagaattatcaacccaaataaagggccttaaaagaacaatggcggcttccactgctttagccttcaaggatgagctcagggcccgaaaacgggttctttcg

SEQ ID NO: 390125 - DNA, 285 bp, Oryza sativa
ccacgcgtccggttcgcggtcggttggatgagttgtttggctggttttctttcgtctgtatcattgtatggctcaaaaacgtgacatgaaaaaggctcctgatggtccatctctcaagttgaaatctgaaaagttccggtgccgtgaaactgtaatcgtgcaatccgctatctatcacttgtttcattgatgattcaccctggctgtaatttcaattctaataaattgattatggtgcgcttatgtaaatgtccttgtctttaaaaagaaatgtaaatgtccttc

SEQ ID NO: 390126 - DNA, 797 bp, Oryza sativa
catgggctgcctgcttcatccaggctgcttggcggcagcaccagaggaaaaagctggcaaagagcctgagccggtgggaatcatactcatggtggccagaagaacatccaccagctgacaagcctaaacaggagggcacttcaagcagtaccaagactattgctgagagtgccattgctcaaatgcacaagttcgcctccgcttccagaaggttccgtgccgacgataccgccatccggaggctgcagaagcctgatgagcctgacttctctgcagatcatttcgattgaggctgatgtttcctgctttaaaaaaactgttgtaaaaccactactgtgcactgcattgtattcaatagccatatagtaatccatgtgtatctcaaagatgaaaccaaactggtcctttgtgtaattcaaatatacgcattttaggaccaaaaaaaaaaaaaaaaaaaaaaaaaaaaaaaaaaaaaaaaaaaaaaaaaaaaaaaaaaaaaataaaaaaaaaagggggggaaaaaaaaaaaaaaaaaaaaagaggggaaaaaaagaaaaaaaaaaaaaaaaaaaaaaaaaaaaaaaaaaaaaaaagaaaaagattttaaaaaaatatggggggggggaagttatagaaaaaaaaatttaaaaagaggggggggaaaaaaattttttttttttggggggaataaaaagaaattggggggggggggttataaaaagtggagaaaaaaaaaaaagtaaggttaaaaaaaaatatggttgggaaaaaaaaatgggggttgaggagagggggag

SEQ ID NO: 390127 - DNA, 785 bp, Oryza sativa
  unsure (1)..(785): unsure at all n locations
ccacgcgtccgtgccgattcaaggaactcatttgaaaatgcggttgccaaattgagagctagcggggagaggaagtcggcattttttggagttctgttgaaccagatggggctagcttgtgtgcagctattcaagattgatgaggctgcacagttgtttgaagaggcaagggcagttctagaacaggagtgtggtgcctctcatccagatactctcggcgtctacagtaatttggctgcaatctacgatgctatgggcagggttgaggacgccattgaaatactggaacacgtacttaaggtgagggaagagaagctcggcacagcaaacccggatgtcgaggacgagaagctaaggcttgcggagcttctgaaggaggcagggcggtcccggaacaggaagcagaaatcgctggaaaaccttttcgtgaccaactcgcagcgtgttaagaaagatgctgggaggaggtggtccaactttggcttcaggagttgaggaacacaccctcacctcacctggtgatggagggtggcctttgtaacataaagggaagaagaagaaaaaaccacatgtgtaaaggtgttgtagactaggaagaatatgatgatgattgtgtttgccgtttgagattctaaaatgccattgttgtgaattacagctcgctattatctcgagtatttttttttctcccccacagttttaactggttcttagtgttggtatttggataatgttttgatttgtgccggtggttgatagatgaattaataccaccacagttnccc

SEQ ID NO: 390128 - DNA, 1292 bp, Oryza sativa
ccacgcgtccgcggacgcgtgggtgctggtgatcacaagctacacaacacatcacacaagcaataggcatctctctcttctttctctttctcctccttgcttcattgggagtactagagattaatttcttgaaggagagaaatgacaagtgtctggaagaccaaggttctcactggactcaacaagctctttgacaaggatggaaagaaggctgctgctgctgagttcttgaaatcattcaacaaggaggagattggcaaggagattgatgacaagaagacagagctagagcccaaggttgtggaggttgttgagtcatctcctcctgagattaaggctttgttgaaggacaaaaaaacagccagcaaaatcaagaagaacggtcctgcagtcactaagttccttgaggaattggctaagattgatttccccggagccaagccggtgagcgacgcggtggccaagtccggcacgacgccgctctccccggcgatcgccttcatcctggagaaggtcgcgcctttcgttcccaaggaggagcccaagcccgagccggaggcggaggcggcggcggagaccacctcccgggaagtcgccgtggaggaggagaagaaggaggaggaggcggcccccgccgagcccgcgccgccgccgcggaggcggcggcgccgtcgacggaggtggtggaggagaagaaggaggaggagaagccagcggaggcggcggcgccggcggctgagccggagaagcagtagtgatcactccagaagcaagcaaagctaagctagcttagctaagcttagctgatggtaattaaaatcaagattaaggttaatgtgatcacactactctctctcagtctctgcacaaaaagtaagtaaaaatcaagatacacacacttggcatgcaagaacatttgttattgaattctttcaccctttgatcctttcatctctctcctatatatatatatggtcgcctcatcggttgtaaattaatttatgtggggtttcttgttttttgggggtgattaaacatgtgtaattatattcatatgtttgttggtcatgatcataaggagcttgtgtatattatccatatctttttttttcttttgtttacaaattttcggcttgaggtgtgatgaagatagacatatatatgcaccctctccaattgtaatacaaattaatggctgtggatatatgttcatatggtacagtttgttgttgttgaaaatatatataatttttaatttaattccttttctccctcttttctatacactttct

SEQ ID NO: 390129 - DNA, 658 bp, Oryza sativa
cccacgcgtccggcaagccaagaaaaaacaagaagcagaaaatcccaaagcaatctagctagctaaataacattagtttagtgcaagtgcaagaacagctagtagcttagcttagagagcaaattaagatgagctggtggcagagccagaagatcatccgcaagggaggagcaggaggaggaggcagtactgctgctccggccaccgccgccgccgccggcggcatcggcggcggcggtgccggcgaggtggcggtgcagaaggtgtaccacaacctggcacccaagccgaccttcaggaagatcgacagcatcaaagaggacatcaacaagaaggctgacaggttcatcaagatgaccagggcaaggttgttcaaccagaccaagtccttccggcagccggccggctcgccgccggcgacggcggccggccgtgatgggaaactcttctgatcgatcgatccactcgccgtatatgccgccactgcaaataaggagcttaattatttaatatctacttaattatgtgatatatagccatgttatcatgatccaggtagaactgatgatgaactttatagatggcggtgcatgtattaattatttgtcctacttaggacgacgtgatgatgattatttatggactaaataatttcatt

SEQ ID NO: 390130 - DNA, 401 bp, Oryza sativa
ccacgcgtccgcccacgcgtccgcccacgcgttcgcggccaccgatccgctcgcctactactatgtgccccagcagtaatgtatctgattaacccctttcaagccttttctaagcgaaggatgtgttgttgtttgttgttgctgttgctgttcttgttgttgttgttgccgcgtaataagatatgttgataatttatggcttcccctgagcttaaagaatttgagcttttggttctagaatctgggtaaaattgttgtaatggggaagactgtatgactgtatttgtagtgcatgtcttaacttgtcggatagtgtaatccgataattattatgcggttagctggttacctctcatgattactgtgctcatgtgctgtgcaatttatgttctttgttttgg

SEQ ID NO: 390131 - DNA, 905 bp, Oryza sativa
  unsure (1)..(905): unsure at all n locations
ccacgcgtccggccgaccactcacgactcgatatgatctaactggccttatcgccgtccctactgaccttgtaggtaatagaagtggaaggcgcttaggtgtttcactggaattaggggtgaagcttgtcaggacgtttggatcagtaatacattcaacagtatcagctggtccctcttctgttggtgtagatctgcaagcagagcaaaggcgggaccgttgcaacctatgctttattgaattggagaaggtcaaaaataagcttccatttctttccagaagaaaaggggcagtcgcaaacacggcacaggagctcagtcttgtcttccaggaagttatgtagttgactgaccacacactgtcatacatacacaactgaatgggaaatgcattcccgctgatggcaccaatgttgggcatcagttgccatggagagctgttcgttcgtgcccagtcaccgagctccaaggcacagcagcagtggataacattttgttgccactgtttgttcctcttgtacacacactaaccaacagtgctcgagatccttgtctgttgtcacttttgaagggaagctgccatgagcggtgacatctgccggcagcgttcttcgcgtttgtctcattggtttctgaagataccagtttgcccttgatagatgtggatgaccgtgagatggagcgaatgtcagcgatggtaatgccttgctggctgtagcctcttctctcgtgtcttgtgttagcgggttgcatttgatagtttattgtttggttgtgatgtctggtcgattcaatgacaagattgatgaagagtgattgagctccttgtacacctgtacatcagttttcttttgaatagtatttgagatctatactcttgatcgnnnnnnnnnnnnnnnnnnnnnn

SEQ ID NO: 390132 - DNA, 516 bp, Oryza sativa
tgctctcgagtgctgttcggacactcaaccccaaggaggctgattggttttacacgccagtttatactacttgtgacctaactccggctggactgcccttgccatttaagtcgccgagggtgatgaggagtgcgatccagtacatttcgcacaagtggcccttctggaatagaacagatggagcagaccacttctttgttgtcccgcatgattttggtgcatgttttcactatcaggaagaaaaagctattgagcgtggaattctaccgttgctgcaacgtgctacgttggtccaaacatttggacaggagaaccatgtttgcttaaaagagggttctatcactataccaccctacgctcctccacagaaaatgcaggctcacttgatcccccctgacactccacgttcaatcttcgtctacttccggggactattctatgacactggaaatgaccccgagggtggttactatgcaagaggggcgcgagcttccctatgggaaaacttcaagaaca

SEQ ID NO: 390133 - DNA, 427 bp, Oryza sativa
ccggagcccggaggggagcatggaggccggcgagagggcagatccagcggaggccggcacggaggccaccgctgccgccgacaagggcgccggcggtgtcctcggccgatgacgacgacgacgaggaggcagcagcgccgccgccggattctaggtttttcatttgttttgaaatttttttttccggatttttgtttttacgtacggatgatataagcatctgcacgcggaaatcgtgatttttgcatacccctgggtgcgtgcgggtcgctcacccgcacgcgaaaatctttctcgtagtagtggttctgatagcaaatagatatttttccttttgagttttgcccaacagatatttggattggggggtattatgtttggaagatctcaaatgaaaaggttgtcaacaaaaaaaaaaaaaaaaaaa

SEQ ID NO: 390134 - DNA, 893 bp, Oryza sativa
  unsure (1)..(893): unsure at all n locations
aggaattttaggtcgtcgctctttcaagtcgcctgaaagggttcctctccctccccctggtggaagccatgatgcttactcgtatggatcaaaaagctttagtaaaccaagtacctacccacagagtagtacatcatcatcgtcatatcctcactatgaaactgcacagagttcgagccctgctgtaccttcttctacttatgacaatcaggtttgcccaatctgccttgtgaaccccaaagacatggcgtttggctgcggacaccagacctgctgtgattgtgggcagagcctcgaatcgtgcccaatatgtcgcagtccaatctccacaagaataaagctatactagcaatggcagtttggatcatttgcgaatgggtggcatactggagaccaccttgtgtcacattgggcgatggattgtattggatgcttcaagtgcaatccatgcaaagcctttgaacggcttgcagacaagcccgttaagtactgggtttgcatcgacaagggtcgcaaggccagcaatccactgcttccaaggttgtggggcaggggatgtctcaagtattgaaacccactaggaatgatccgaactccagtgcaagaagtgggttgataaaatattctaacgaattgaagaaaagaaagaaaaggagaaatcctgatggatcgaacaggagtctgtctgattagtcgaacatttgtacatatcgcgatgttggtttcgtcaccgtggccgacataagttttagaggattcgttttccagtgccgtcttcatgcaagatttgtttgtttattcatgcgtttttgtaacagatttgcgagttttcgtatatgattgaacagtgactttttttggtgccnnnnnnnnnnnnnnnnnnnnnnnnnnnn

SEQ ID NO: 390135 - DNA, 500 bp, Oryza sativa
  unsure (1)..(500): unsure at all n locations
aacanccaagggtaaggctaanctcaagtctggccaacaattgaagcgtaacaccattggagcaaagaagggcggcgcgcctcccactggtgggggtggtggcggtgggcgtggtcgtcgtgaggctattgagcgtattactcagattgcagagtcttgtctgaatgcctcaactcctctgcgccatctatcccccaaggagcgtcttcgtgaggccaaacgtgaggagcttggactcatttccaagggaacgtccaacgttgaacttgatttatccaaggctaaagccaagtccaaaggtacccgtgagggtgatggtggccgtgtgctgatgggtccaccaggtcttgactacatcagtcttggattggttgatgaggacgcaatccctaaatacgagctgacagtcgaagatggccggcgacttgccaaacaatacagtcaggtgctaatgcgacggcaccgcgcacggcaaactgcagaatcgtctcttctaagtc

SEQ ID NO: 390136 - DNA, 598 bp, Oryza sativa
gagacaagcttagcaacaacaaccaaaagcaaggagcactaactgcagctgttggcgatcgaattaaggatcctgcagctacaagcaagaaggtgcaggtgcagggtgcggccatggcgaactaccaccaccaggagtactaccagatggcggcggcggcggcggtggcgtggccgagggagccggacagcccgcagctgagcatcatgagcggctgcagctccctcttctccatctccaccctgagggacgacgacgacggcggcggcgtccgcctcgccggcgccgcgctgcccgccacgccggtgtcgctcgccgggatcgccggcggcgccagtacccccggcggcgacgaggtggacatggaggtgcggcagcagagcggcggcagcggcgacgaccggaggaccatccggatgatgaggaaccgggagtccgcgcttcgctccagggcgcgcaagagggcgtacgttgaagagctagagaaagaggttcgccggctggtggatgacaacttgaatctcaagaagcagtgcaaagagctgaaacaggaggttgctgcactggtgatgcctacaaagagctcactgcgacgaac

SEQ ID NO: 390137 - DNA, 704 bp, Oryza sativa
cgcgtccggcgacggcggcggcggcggcgaggtgagaggaaggagaaggggatcgaggaggaggaggcaagcgcagccaccatgggagtgatggagaagctcaagatcttcgcggtgaaggagcccgtcgtcaccgcctcctgcctcatcgccggattcggtctttttcttccagcagttgtcagaccaatgttggattcttgggagacagcaaaacaagttcctccacctgcgctgaatgatgttgttgcaggcgtcaccggcaagaaaaaggagtgacttggcatcttttccacttgctaatgttgtcgcaacgatttctctttgttttgactccggatgggaagcctctcccagtccagatgattaggatcatccattcatatgtccagcacagtgtgaaaacagtactacatgtgatcggcaaaataatcgtgttgtacctgaacttactttcaacataatgaaattaatgctgcaattttcagctttgagcttgcaagcaaagcgtgtggattgattggtagccttaacctatatcgtaaaattgctggtgccgattggttctgtgaagatttacaccagcagattagttgtgggcaacattctcttgtgtgcagcactatcgtcagtgggccacgcttgcttgagcaagctggtgaagtcagtactgggcttgggaagcaaagccttggagcacaggg

SEQ ID NO: 390138 - DNA, 458 bp, Oryza sativa
ccacgcgtccggaactcttcaaatcccatggcggtgctcaaatctcttgttgcttgcaaaggcttggcgctgtgcgctccagcgattgctcagcgtcaccggaacacgccgttatctgcatcggctcatcgccggcaaatcctgatcaccggcttaacgatgaactcctcgggcatcaatagtgctttgccggtcagaggagctgcacaaatccctgcagttggttctggtcctccagcaccgtcaggaggaaatctcccagtacccagcatgccttcatgggccaaatgggtagttggggccatcattgttgctatacccatctacagaaagataagagcattggaagacaccgtggagaagacagcggaggtagcaatcgaggtggtcgacacggtggcggaggcgactgagaaggtcgccggcgagctggccgacgctttttctcgcaacgaaaa

SEQ ID NO: 390139 - DNA, 792 bp, Oryza sativa
agccattcctcctcctgtctcccctgcccgtacgccaccccacaagcgaagaagacgagaggaagaggaggccaagccgcacaacccaccaccaccaccaccaccgatctgcggagagcgagctaccaccaccgagcggcgtagttgagcgatggcggtggaggagatcaccgagggggtgaggaacctggccgtggagggggagcccgcggcggcggcggcggcggcgggaggtggtggtgagggggcgcagaggagggcggccgggagcagcagcaaccgcatccaggtgtccaacaccaagaagccactcttcttctatgtcaacctcgccaagaggtacatgcagcagcacggcgatgtcgagctctccgcgctcgggatggccattgcaacagttgtaactgttgcggagattcttaagaataacgggtttgctgttgaaaagaagattagaacatctacggtggaaataaacgatgaatcgagagttcgcccgctccaaaaggctaagattgagatagtgttagaaaagagcgagaaatttgatgagctgatggctgccgcagcggaagagagggaagctgcggaagctgaggagcaggcctgataaggactaggagcgatgacctttgttgtgtgctttgttcctgttgtttaatactgcgtgctttagagatggcatgccttcttgtttaagttgtgtttttcttttatggcagtgtgtgtaaactcagtgactgatgataatctgtttgcaattgagttgagacagcttctcaatttgtttcc

SEQ ID NO: 390140 - DNA, 548 bp, Oryza sativa
tcgtcgcgcgctgctcgtccgtcgtcgccgctgcatccgcctcctcctcgtcctccctacggccgtagggtgcggcggcggagggggcgacgatgccacgctgcggagccggaggtccctgcgtgtggatccgggccctatcccagccgcaacgccacgggaggaagccatggcggggcgtgagggtcgtcgtgctgctgctgcacgcgctgttcatcggcgccgtcttcctgctcgatccgacgctccagaggcaaatccacgaggccaagtggtacataattctatatgggttgctggttttacttaccttggtacaatacctatatacagccacttcttctccaggatatttacctgatatgttgacagctggctcaaggatgcatgcaacctttattaatacaacaactctctcaaagcaggccaattccaaaagtggaagcttaaaccctgccatgagtcgcagcacaatagatcagcaaaatccacaatccactacagctttgttactacagcagacgatggatctatatcctcctgggaca

SEQ ID NO: 390141 - DNA, 1108 bp, Oryza sativa
cggacgcgtgggcgggcgcctccgcgcgcgtgccccagatcttcctcaacgagaagctcctcggcggcctcgtcgtcctcaactccctgcgcaacagcggcgagttcgagcggcgcgtgcgtgacctcgccgggagacggtgccccgacaccgcgccgcgggtgcccgtgtacgggttcgacaacgatcccggcaaggagggcggcgacagggaggacgccatggtgggcatcgtgagggtgctccggcacaggctcccgatacaggaccggatcgtgaggctcaagctcgtcaagaactgcttctccggcgccgacatggtcgacggcatcgtgaaccatttggaatgccgcaggctgtaggctgtggagatcggaagagaactggcaaggaagcacttcatccaccatgtcttcagagagaacgacttcgaggatggcagccagaacctgtaccggttcttggagcacgaccctgccatcccaaagtactacaacttcatcaggggagccaccaacgacggcgagccgaagctggccgccgccatcgggcagaggatgaccaagatcatggttgccatcctggaggcctacgcctccgacgatcgccgccacctcgactacagccgcatcgccgccagcgaggagttcagaagatacgcgaacatggtgcaggaactccagagggtggacatgtcggcgctcccggccgaggagaggctgccgttcttcctgaacctgcacaacgcgatggccatccacgccgtcgtcagggtcggccagccgggggccatcgaccggcgggcctcctccaacttccagtacctcgtcggcgggcacccgtactcgctggcgacgatcaggaacggcatcctccggtccaaccgccggcagccgtacaccatcgccaagccgttcggctcgtccgacaagaggctcgaggtaattaagcacacgcatgcatgagagacgcctgtgatcaatcaccgattgccatggcgagaggagctgaaaatttttttcgcttgtgcagttggtgcaggggaaggtgaacccgctggtccatttcggcctctgtgacgccacgaggtcgagcccgatcgtgcgct

SEQ ID NO: 390142 - DNA, 451 bp, Oryza sativa
ccacgcgtccgcccacgcgtccgcccacgcgtccgcccacgcgcccgcccgcgcggccgggcaaagcaccgacgcacgcgccccttctcttccctctccgtggcggcatggcggcgtgccccctcctcccgctgctccagctctagccctccctccacaacatcctggacatggatcctctacctttggctcgccggagcaatggggccaccagactgccagcgatgagtccgggggcatccagatccagcgccacctcacccatggcagctgctccggtgcgacgatggccaggggccgcgctgccctcctcatccctccactggttagtggagaagttgggtgaagaaggacccgggcaagacttacatgctagctgcctctccatggcggagaacttggagcttctaactggtagctcggatttgatttctagtgtagctagtgacta

SEQ ID NO: 390143 - DNA, 526 bp, Oryza sativa
ctttcacacatcccttttccctttctccgcgtcggcgcgtccaaatcctcccgctcctcctccccttgaactcctcgccggagcaacggatccaccggctctgacgccgacaaacgcgggtcagctagatccagcgccacctgctccatactcccccgaatattccacttacgagccctgccgccacgtctggaggtcatgttccccacttcggtgctgccgccgtacttgcggctctcccccctcttcctgctgctccagctctagccctccctccgcaacatcctctcctttgccctactcgccggagcaatggggacaccagactgccggcgatgagtccggggcagccagatccagcgccacctcacccatggcagttgctccggcgcgacgatggccaggggccgcgctgccctcctcaggttaatgcagacgttaggtgaagaaggaccccgggcaagacttacaggcaagctacccctccatggtggtggaggcttgttcaagagtcattgaatgtttg

SEQ ID NO: 390144 - DNA, 536 bp, Oryza sativa
  unsure (1)..(536): unsure at all n locations
antttgctgaggcacttgagntcattccttacacattagccagagaatncagggctcaagcctatttctattgtgactgagcttcggaatcgtcatgccaagggtgagaagaatgcaggcatcaatgtgaggaagggtccagattacaaacatccctggaggagaacgttgtgcaacctttgctggtgagcacaagcgccatcacactagcttgcgagtgtgttagaatgatactgaagattgatgatatagtcactgtgaggtaaggttatgtggcggttgaccatgtaggcctgccctacttaggtctacgtgggttttagaattttatttggtagcgtgcgctttcagtctctatgttcttagcgtgtggctttgatgtctgtcgaagagatttatattatgtattttgttacctggatgggacggtcaagtgtagccatctgtttgcacttgagacggccggcaacgccttgccatattgttttacacttacagtttgctgcagatttcttcgcataaaaaaaaaaaaaaaa

SEQ ID NO: 390145 - DNA, 910 bp, Oryza sativa
  unsure (1)..(910): unsure at all n locations
cgggcagcaaggtggtcgtggtgccgcacaagcacgacggcgtgttcatcgccaaggccaaggaggacgcgctctgcaccaagaacatggtccccggcgagtccgtctatggcgagaagcgcatctccgtccagaatgaggatggaaccaaggttgaatacagggtgtggaatcccttccgttcaaagttggctgctgctgtgcttggtggtgttgacaacatctggattgctcctggtacccgtgtgctgtatctcggtggtgcctcaggaacaaccgtgtctcatgtgtctgatattgttggaccgaccggtttggtctatgctgttgagttctcgcacaggagtggtagggatcttgtcaacatggccaaaaagaggaccaatgtaattcccatcattgaagatgctaggcacccggcgaggtaccggatgttggttggcatggttgatgttatcttctctgatgttgcccagccagatcaggctaggatcttagccctcaatgcatcctacttcctgaagaatggtggacattttgtcatttcaatcaaggcgaattgtatcgactccaccatgccagctgaggctgtgtttgctagtgaagttgagaagctgaaggcagatcagttcaagccctctgagcaggtgacgctggagcctttcgagcgtgaccatgcctgcgtcgttggtggttacaggatgcccaagaagcaaaagggtacatcttaagaagaataaaacttgtggttgtgagtgactggtgctaaaatgtagtgctgcacaaaacttttggtctaattgtttttcacttgcaccctggtttgtaaggctgaaatttttggacaaatgatgctaggagagaagtaaaaagtcactcaggttttgcnnnnnnnnnnnnnnnnnnnnnn

SEQ ID NO: 390146 - DNA, 315 bp, Oryza sativa
tccggggtcgacccacgcgtccgcccacgcgttcggccgccgcgccggcgccggcagcggcggcgtcggtagcggagacgagcgacgacccgattcaagaggagtcaccggcaccggctcccagcgggaagcctggatcggaggcggcggccaagccggaggtcgaggtgcagctgttccggcgtgggcgggggccggtggccgtgttccggtcgccgctgggcgggtacacgcaggaccagctggaggtgggggacattctggagcagcacggcctcaagtccgtcttcgtcttccaccccgtcttccggaccc

SEQ ID NO: 390147 - DNA, 595 bp, Oryza sativa
gccacgcgtccgcccacgcgtccgctccgacctcccgaatcctcccaactccgccgccgccgccgcgaagcgcagccgcgacatgggcgtgtacaccttcgtgtgccggagctccggcgacgagtggacggccaagcagctcaagggcgagctggaggcctccgccgccaccccctacgagctgcagcgccgcctcgtcgccgccgcgtccgccgccgactcggccgccggagtccagtcctccttctccatggtctcgcccagctccgccgtcttccaggtgatcattggtgccgttggtggtggtgccgcgattggtggaggtgctgctgcggtgccgcctccggtggagctgctgccgaggcccccaaggccgaggagaagaaggaagaagagaaggaggaaagcgaggacgacctcggattctccctcttcgattagatatcacttcgttgtatcccacaaatttgtcatggagttcttcagtagttttgttgttctatgcatatgaaccagaggcttgtgaacctgtgaaatcttcttaagagaaattgtgttctggccttggaaaaaaaaaagataaaaataaaaaaag

SEQ ID NO: 390148 - DNA, 526 bp, Oryza sativa
  unsure (1)..(526): unsure at all n locations
aagggcgagctcgaggcctccgccgccaccccctacgagctgcagcgccgcctcgtcgccgccgcgtccgccgccgactcggccgccggggtccagtcctccttcgccatggtctcccccagctccgccgtcttccaggtgatcatcggtgctgttggtggtggtgctgccattggaggtgctgctgctggcggtgccgctgctggtggagctgccgccgaggcccccaaagccgaggagaagaaggaagaggagaaggaagaaagtgaagacgaccttggattctccctctttgattagattttgctttcatatatccagcaaatttgtcatggtcctcttgcagtagttttggtgtttgatgctcatgctcttgcagtagttttggtgtttgatgctcatgctcttgcagtagttttggtgtttgatgctcatgaaccagaaggccttgtgaacctgctaagtatgataagataatttgtggtcatgaatgttggctnnnnnnnnnnnnnnnnnnnnnnnnnnn

SEQ ID NO: 390149 - DNA, 564 bp, Oryza sativa
ccacgcgtccgcggacgcgtgggcggacgcgtgggcggacgcgtgggttgcggacaaaaggttaccgtccacaagaaggacgtcggctggcccgcacggtgcttgatcatagtaggaaagaatgttttgtcattcggataaggcagagggatttggcggagaggtgctgaaactcccatagcagtgaaatgggaggacagaatcattgagattagagagggttcatggtcatacattgcaaatgcaagctccgtcggttatgctcctgagaaggtggtgggaacagcaaccccagaaaaagatcaacaggacagcaaggtggtttggcgcttttcaactggagatgtactgacggtaaagttgggagatgacttaaactttcatattcgaaatgaaagctcaggagaagaggcaaggcttcttgtgggaggagattgaactacagaataaacaaggaaagcacattaaatgaccgcaatgatgaggaggaataccttaccctagttcgtacatcacctgatcatctaggtgacagagcaactatgctcctcaactggaaactac

SEQ ID NO: 390150 - DNA, 725 bp, Oryza sativa
ccacgcgtccgaaaaaaaacagagagagaaagatcaagagcatataatctatatatacacacaggcacgtcgcgagtaaatttcacaaaactacatagactacgtggatccgatactccgatcccgacccggccatgagaaggcaaggaggcaactgcgaggtcaactcctccatcgccctcctccaggagaggttcaggaacctgcagaaggtgagggagatgggggaggggagggagcagctgctgcagaccccccctgtccgccggcgacggcgacggcgatagccggtgcaactaccactggtgctgctgcgtcatcgtccggcggcgagcagccgaggtggttctcgcacccggagctggtccggccgtcgtcgaggccggtggcagcacagcgagccaccgccgacgacgatgctgccgccgttcgtcagccgccggcggtgagcgttggcagggcggcagccatggttttgcagagctcggggtgtaggagcgatgtggaggtggacacctcgcttcacttgtgaagaagtgaaaattaagtagatagctagtagtagctagatgcttatttagctcggccgaattaatcatttttcccccctttgatccttctagttcttgtttttctcttgatcgatcacatcttgtatgcgctcgtggatgctgtcgaatttgaattaatttggttctagttcatgttgattagatgtttagatg

SEQ ID NO: 390151 - DNA, 554 bp, Oryza sativa
cccacgcgtccgattgatccagcttctcatccgcagcttcacgtcttcctaaagcaggttgtagggttagatttggttgatgatgagagtaaacctgaaaggcgtccaacaaagcatatgcctacacctgaacaatggaccaatgtcttcaacccagcattttcatattatgcatattactgctatgctaacttatacacactcaataagttgcgtgaatcaaaagggatgaccacaatcaaattccgtccacatgctggcgaggctggagacatcgatcacttggcagcaacatttcttctttgtcacaatatatcgcatggaaatcaacttaagggaaatctcctgtggcttcaatatccattactaatctttggcccagaattgggtctggcaatgttccccattaaagccaacaacctcctggttttctttgaattaaccacccgggaaatccctcttccccaattgtttttttcccaaccaaggcctgaaatgtttccccttgttccaccgggatggatcccatttgcccaattccccctgaaaaaaaa

SEQ ID NO: 390152 - DNA, 350 bp, Oryza sativa
ccacgcgtccgaccgaatctgaaagattcagtggacactgtaaaagcaaatccagggcctattagcggggggcgagctccgatttacggagctgctggcaagatgccggacagaggcatggtcagggagctgctggtggagttcatggacgcgtcttgctggacatataatatatcccctgttcttgttattgtggcattgctgattactgttgtactagtattatcatcatgttcatgtactcaccatagaaccaaaacatagccatagaataaaatgcttatttgatccaataataataaaatatagctgcatgcagttcagttcaaaaaaaaataaaaaataagaat

SEQ ID NO: 390153 - DNA, 490 bp, Oryza sativa
ccacgcgtccggcgggggtggcgtcgatgctgctgggggcgtcggtggcgctgatgctgtgcgggtcggtgaccttcatgctggggttcttcctcatgccctgggtcagtcggcctcgcctgcgtcttcctcctcgtcgggttcgtcaccaacctgtccgtgatctggagggccatcctctggcccgcctcgtgctcctcctcgcccaaggtggcctccacatggtatatattttccaagcctccattcatgtcctacatgtgaagttgaatgagaagtaggttctcatggaggtgtatacaagcagaagagtttgggcggcattacgttgttgccatcctatcttttccttcccggacaacatttttaccatgtaacgccgcaacaagcttagatggttttatatattataattaggatggcaagctttaacagaaaactttgtacatatggaaaaagaacggtttggttttattatttattacatcta

SEQ ID NO: 390154 - DNA, 430 bp, Oryza sativa
gtttattttatcggcatccaactagcttggaaggccatgcagcccacgatttgagcaatacacaagttttccatgcaacagagtcaagaaatcatgacaatgaccaccgctatatgagcaatcttcctgtgtcaggcattcctgatcattctgtagctccatttggtataggattgccgagatatgacagcagcagccaacagagaacaaggccatatgcacatcaccgtcccctagttcacaggcccacacctcgcaacggaagcaatatggttacaccattagggtctgtgccagctggtatggctgagactagaggccatggtcatggtgcgaggggacacatggatcaaccagtcaatgcactcattgcagagcagcccattcccccctacatctagaagggttaggcctagggctttaacaatta

SEQ ID NO: 390155 - DNA, 734 bp, Oryza sativa
ccacgcgtccgcggacgcgtgggcgccaagtccaacaaaaagaagagaaagaggcgtcatcaactttagtagaatctccagttccaattttccatggcgaccttggcgcgcgtctccctcccctctgtcctcctcacgctgcggcatggcgcaaccacccagggcttcgcggcggcgaggccggcggcggtagtggcaaagaggttgctcggatccgtcagatgcggcggcgccgccgaggccttgggcgcggacatggcggtgccgcggtcggtgccggtgcgcgtcgcccacgagctgcagcaggccggacaccgctatctcgacgtcagaaccgagggtgagtttgcaggtgggcatccagttggagctgtaaacatcccatatatgtacaaaaccggctcaggactgacaaaaaacacacattttcttgagaaagtgtcgactacctttgggaaggaggatgagatcatcgttggatgccaaagtggcaagagatccctcatggcagcatctgaactctgctctgctggttttactgctgtcaccgacatcgccggtggattttctgcctggaaggagaatgaactcccaaccaacaagtgacgttgggcctgaaagattttctgcgttttctgaaacctaataatcttgcaatgacttcacgctccacggctggacgcctgtacactatgtggtcttctcaaatgtgaggcatagaagaatacttgaat

SEQ ID NO: 390156 - DNA, 463 bp, Oryza sativa
ccacgcgtccgggccatggagaacgtccgcggcgcgctggtgtcggcggagctgggccacatcaaggtgacgacgtcggtgtcgcaggcgctcctcgccgtgtacagcccgccgtccgccgcggagttcaccggcgagtcgcaggcgttcatggcgcccgtcctgagcttcctcgcccgcaccggcgcgccgctgctcgccaacatctacccctacttctcctacacctacagccagggcagcgtcgacgtctcctacgcgctcttcaccgccgccggcaccgtcgtccaggacggcgcctacgggtaccagaacctgttcgacaccaccgtcgacgcgttctacgccgccatggccaagcacggcggctccggcgtctccctcgtcgtctccgagacaggctggccctccgcccgcggcatgtccgcctcgccggccaacgcccggatctacaaccagaacc

SEQ ID NO: 390157 - DNA, 925 bp, Oryza sativa
cggacgtgactgcgaacgcgtgggctcacatcggcgagttcgcaacctcctccctccaggctccacttcccagacgaatcggcggcagcggcggcggcggcggtgatggagtgcgttatcggggtcgtcggccgcgacttcgcggtggtggccgccgacacatcggcggtgcagagcatcctggtccacaagaccgacgaggacaaggtgatggtgctcgacagccacaagctgatgggcgcgtccggagagcccggcgaccgggtgcagttcaccgagttcatccagaagaatctccacctgtatcagttccgcaacaacatcccgctcagcaccgccgccaccgccaatttcacccgcggcgagctcgccaccgccctgcggaagaatccgtactatgtcaacgtgttgcttgctggatatgattcggatgttggtgcctctttgtattacattgactacatcgcaacattccataagatcgaaaagggtgcctttgggtatggctcctacttctgtctctcgctgatggacaagttatatcgtccagacatgtcaagtcgaggaagctgttgatcttgttgacaagtgcattaaagaaattcggctcaggttggtcgttgctcctcaaaacttcataatcaagattgttgataaagagggtgctagggagtatgccaggcgtgcatacaccgacagtccaccggaagctgcaacatcagaagctgcaactgtagcagcctgagttgtatctgccatatgggtgtgaaccttaggtttccgagtacaattgctatgtaatcacaagtacttggatctgagaactttgttgcaaatttacttcctcttttatttgtgttatttatctgtttaactgtttcatgttcgtgaatgctgtgcaactggattttatagacatctttct

SEQ ID NO: 390158 - DNA, 459 bp, Oryza sativa
gtcaggcgggactacccgctgagtttaagcatataaataagcggaggagaagaaacttacgaggattcccctagtaacggcgtcataagtatgtgttttgttgggtctctctggatatggtgcagtggacgaatctggaggtggagttgtgcaagcagagctgttcggtagtccggataggagggctcaaattgtccgacgaaggtggacctctatggattttccaacaaggatgctgctgtggccgccggatccagtgacaattgactcccccgcagtagaggtgcttgaactggttcactaaacccaaaggcttttgtagcaatgggatgccaggtgcctgtggttactttgagcagctatgggggtgatggtgggtatggcagttcaccaggagcccaggaagataatatttggtcaatatgtaagatatttggacttgtctggaactttcaagtt

SEQ ID NO: 390159 - DNA, 692 bp, Oryza sativa
cgcgtccgcccacgcgtccggatgggcaaggctgacccatttgtagtcctgtacctgaagaagggagaaaccaaaaagaagacaagggttgtaactgagacactgaatccaatatggaatcagacgtttgattttgttgttgaagatgccttgcatgatttactcatggtggaagtatggggatcatgatacgtttggaaaggattacatagggagatgcttcttgacacttacgagagtaatactcgaaggcgagtttcaggatgagtttgttttgcaaggtgctaaatccggaaagctgaacttgcacttcaagtggacgccgcagccaatttatcgtgatcgtgatcgggaccagtgaaatctgtgtagatacatcacgtcaagcagctgataaatatttcttcccctacggtgcctgtacattagtttttctgtacagttaattcacttatcttgtagcaacaaggtgtaatggaataaaagaatggtggtttcatgttccgacggaaatgcgatgtgctatgaatggagggttgcagaaagatggatggtaacacggggagatgggttacccaagtatggaaacattaagttcatcatgcaagcagatactttatgcatcttctactggtaaaactaaacgtgtttgtctttaaaatgcaacttgtaatataattccttgtactaac

SEQ ID NO: 390160 - DNA, 623 bp, Oryza sativa
ccacgcgtccgtgctttgttaataacaagttgttcttatgcacatttcattaatttcttgttgagatagcagacccatcaaaagtgaccagcaaaacaagtttatcatctgtcccttccacgtttaagagcaattcaagtcgctcgactttgactctgccatctatgaaggacagaagtgagcttcctactcctcggacggaaggtgaaattttgtcatcttcaaatttgaaggccttctcgttcaatgatctaaggaatgcgacaaagaacttccgaccggacagtcttcttggtgaaggaggatttggacatgtctacaaaggttggattgatgaacacacgcttgctccttcaaaaccaggaagtggtatggttgttgccgtcaagaagcttaaaccagaaggtttccaaggacacaaggaatggctgacagaggttaactaccttggccaacttcaccacaaaaatcttgttaagctgattggctattgctctgatggcgacaaccgacttctggtgtatgagttcatgccaaagggaagtttggagaatcatctgttcagaagaggtgctgatcctttgtcatgggcaataaggctcaaggtagctataggtgctgct

SEQ ID NO: 390161 - DNA, 812 bp, Oryza sativa
  unsure (1)..(812): unsure at all n locations
ccacgcgtccgtctagttcttgatctgaatgaaacactcgtttactctgattggctgcgtgaaagaggatggaggacttttaagaggccaggagttgatgcttttatagaacacatggggaaattttatgaagttgttgtgtattctgatcagatgcctatgtatgttgatcctgtgcttgaaaggctggacacaaagggtttcatcacaggcaggttgtcaagacctgcaactaagtatcaagatggtaaacattatcgggatttgtcaaagttgaatagaaatcctgcacaagttatttacatcagcagccacgctcttgaatcttgcttacagcccagaaaattgtgttcaaatcaaaccttggaaacttgaaactgatgacacccagctgctggatctgatcccatttctagagtatgttgcccatggtgagaccttctgatattaggactgtgcttgcttcctatcaaggtcgtgatgttgctgcagagtttatcgagcgttcaaaggaacnccagaggcgtatgcaagagcaaaaacaacatgggcgtatatggagacaataatggacctaatctgcaggaaggatgaagctccaattgattcatctatcctagttttttgcctttattttttttttcggaaggacgtatttagcctgttccaagcacctcaagtcaagttgttgactgcgatgaaaaattgaaatgataacatgtagtattgtcagattaggttgcaaacatttagctaaatatcaacgttcaaaccaccnnnnnnnnnnnnnnnnnnnnnnnnnnnnnnnnnnn

SEQ ID NO: 390162 - DNA, 459 bp, Oryza sativa
ttgccccatgactccggcatctgctctcatgccgccgccgccgccgtcgtgcaagctcggaagagaaagcggcgccgccggcggtgccgttcatcggaacttgacctggagagctgtgctgaaactgctgcgagaagatcaacgatggaagaagacaaggagggcatgttaggagaggcctcttgatcctcatggcatggcttcaagctgcccatcaaactgcccgcgccgctcgccgctgccgacgccggtagccgtgcctgttctactgccgctccagatcatctgctgcaccagggagctctggaattctcctctattcatcactgcttggggcagagaggagtgtttttaaggttatgttgaaacaaagatgatgagttcttgcttgcttcaagctaagctagctgtgggaaaggaatgtgtgttttgctagcttagctttggcctctctttgca

SEQ ID NO: 390163 - DNA, 624 bp, Oryza sativa
ccacgcgtccgcaaggttttcagtgcctcacctgatcaggctaggaatgagatgcgccaagcctgctttgattacttgagccttggaggtgtcttttcaaatgggcctattgctcttctgtctggtctgaatcctcgaccattgagtttagtggcacatttctttgctgtcgctatctatggtgtcggtcgcctaatgcttcccctcccttcacctaaacgcatgtggatcggcgtaagactgatttccagtgcatgtggtataattttccccatcatcggggctgggggtgtgaggcatatgttcttccccgccactgtccctgcctattatcgtgctcctcgtccaatggagtaaggggggaaaatgaaaggagaagcgaagagaaaatccctgccactgtcctgatcggcggatgtttttcgtggatggcaattttcctgtgtaattggtagtagtcgttaggccgtgaggttgtgtgtgctgttgctctaatggaacgaggggacctgtttacaccgtcacattccctgcacacttgccacttttgttgttccgtcagggatgcatgttgacttgcttatttttaagctgcatatccttcatgaattttatatgattgcg

SEQ ID NO: 390164 - DNA, 451 bp, Oryza sativa
  unsure (1)..(451): unsure at all n locations
accagatcagcncctggtcagcccatgggtnaagggtgggatgacaancgaggcattgaaggaccaaagtatggaaatcagtgatgagatatgcttcagagaatggtagcggttttatgcctaagtataatcctgttttgttgcccctatagtttggtgcttgtgtagaataaattaaatcatggtatccaatgatttggaaatttggagtgtcaccatgaatttggattgacaaataatgctctgtacaagtttcaaacactttctggttgaagacaaagcagtgtggtggtaacaacttaacatgtaaatcaaaagctcttgtgtttagcattttctcgtttatgaaaaaaaaagaaaataaagggaacaaaaaaaaaaataaaaaatcccgtcgtgaaaaatttaaattttataaaaaattaatggggggggcccttttaagggatcc

SEQ ID NO: 390165 - DNA, 552 bp, Oryza sativa
  unsure (1)..(552): unsure at all n locations
nggacgtgtngagaacaccatgaagtgggtgttctggatgacggggaactacaagtcccacccggacgacggctacgaccccaacgccatccccgtcgtggacaacatcagctaccaggacgtggtggccacgggggtgtacaaggaggccgccaggtgggagggcaccggcgtcacgccggcgccgtgccagccgctgcagggggcgcacgatggcgcctgcccgttccccacggacacgctgcccatcgaccagctcgtcatgcagcagtgcgcctactccgtcccggcctccatctagctgatctggctgcagcctgcagcgctgtagctgtagctgtgaccgtcgttactactacaacactagcctctgcgtgcggtcttctgaaacaaaaacaataacccagagtgacctttctgactgtgctgcttcacagcgctcgctctgcgtcatgtcagtgctgcctctccttgctctgcaattatgtaacttaaacttcagttcgtgaaatacaaatgagaaattagtcgtcaaaaaaaaaaaaaaaaaaa

SEQ ID NO: 390166 - DNA, 633 bp, Oryza sativa
ccacgcgtccgaccatgaagtgggtgttctggatgacggggaactacaagtcccacccggacgacggctacgaccccaacgccatccccgtcgtggacaacatcagctaccaggacgtggtggccacgggggtgtacaaggaggccgccaggctggagggcatccagggcgcccccttccgcggcatctgcatcgccaacgtcaccgccacgctctccaagtcgcgcaagtacccgtggacctgcaccgacatcgagggggtgtccaccggcgtcacgccggcgccgtgccagccgctgcagggggcgcacgatggcgcctgcccgttccccacggacacgctgcccatcgaccagctcgtcatgcagcagtgcgcctactccgtcccggcctccatctagctgatctggctgcagcctgcagcgctgtagctgtagctgtgaccgtcgttactactacaacactagcctctgcgtgcggtcttctgaaacaaaaacaataacccagagtgacctttctgactgtgctgcttcacagcgctcgctctgcgtcatgtcagtgctgcctctccttgctctgcaattatgtaacttaaacttcagttcgtgaaatacaaatgagaaattagtcgtc

SEQ ID NO: 390167 - DNA, 740 bp, Oryza sativa
ccacgcgtccggcaggcagatcgggtggcatgaccaaggatgatttctcttacaaggagtctgaggcgaagcttcttcagtctcttagattctgcatctcgaagctcctgaagctagaaggatcagggtggctgttcaagcaaaatggtggcagcgacgaagatctgattgatcaagttgctgcggtagagaagctattgcaacaaggaaccagtgacaaccaactgctgcttggtgatactcagcaaccaccatgtgataaggcagacatccagtacatgcgcgtactgcctaactgcggagacgactgcatctggcgcgcctccctcgttgtcagcttcggtgtctggtgcatccgccgggtgctagacctgtctctggtggaaagcaggccagaactttggggcaagtatacctatgttctcaaccgtcttcagggcatcctggatcctgcattcaccaagcctcggagtgctctcagcgcgtgtgcgtgccttcacagagatatccgggtgctcaacagcctgcgccacagtagcctggtagcaacaaactccattccaaggcaaatccgaggttccttcaccaccgcatctgtggtcctggagatgatcaaggatgtggagaccgcagtctcagggcgcaagggcaggagtggcaccgcagctggggatgtcgccttccccaaggggaaggagaacctggcctccgtgctgaagcgatacaagcggaggctctcg

SEQ ID NO: 390168 - DNA, 1197 bp, Oryza sativa
cacgcagccaccgcgcaaaacccacgcgaccccttcctcctccgcctcgacccgatccgatctgagccagagccagccatggcggcgactagggtttggctctccgccctcctcctcgccttcctcctcgccgccgcccccgtcgtccaagttgccagagctcagtccatggaagaagctgctacagctgaagttgttgatggggctgatctaggaatcgtcagtgatgatacacaagtttccagcgatgggcctctaagtccggctcctggtgtggagacagtatgtgtttttcccaaaaacgctggcaaaattgtgctagcaggtgaagaaactgaactactggttggcctgcaaaacgagggtgaatcaactttgaatgttgttgctatccattcaactctccatcttccttttgaccataagatgtatggacaaaaccttactgttcagaacttcttcaatgcatcagttcctgtctctgtacaagcaacctttccgtatacattcgccgtgagcaagttcttgcagcctggagcatatgatctagttggttacatagtgtatgagattgatcagaacccataccagaatgtcttttacaatggcactgtagaggttgttgaggctggaggtttactcagcgttgagtctgtgttccttattacccttggagttgcccttcttgggctcttcggattgtgggcatatggtcaagtacaacagctctcaaagaaaacaaagaaggcccccaaggtggaactgggaactggaactactgatgccaacatggatgagtggctggagggcactgcatttgcacagggaagcaaatccaagaagaagaaatagattggaggcccttgaactctagttaatcattttcaggatctagaatgagacagttgagggtagcccttcacaagtaacttttgcagacgatagatgagaaaatggaggtgttttaaaccgtagtttcgtggctgctgcacatgtttgttgacaccaaatttcgaccttgttgtgtacttttacatgaaagttttttcttgaaaaacacagttttgttcaaggtatatgctatggatgtgatctctgatcttatttgatctgtgacatgccgaataacataagttcgatctgagagatgctgaatcacataaatttttattagttgcaaaaaaaaaaaaaaaaaaa

SEQ ID NO: 390169 - DNA, 854 bp, Oryza sativa
  unsure (1)..(854): unsure at all n locations
tcggttgcatttgcatgcggccatggcgatgaaggcgccggcgtcggccaactcctacctcctcctcgccccgctcgcgctgctcctcctcgccgccgtcgtcttcctgctcccttctctcaacggcgcccgcgtcggctccgatggcggcctcggcgtcctctgcgcccgccgcagcgctggcgccgaggactacaccgtcgcggcgccggctgcgccgaaggaggaggagcggcccgagctccgcctgctcgtgggcgtcctgacgacgccgaagcggtacgagcgccgcgacatcgtgcgcctggcgtacgcgctgcagccggcggtgccccccggcgtcgcgcaggtggacgtccgcttcgtgttctgccgcgtggccgacccggtggacgcgcagtggtggtgctggaggccgcgcggcacggcgacatcctggtgctcaactgcacggagaacatgaacgacggcaagacgcacgagtacctctcctccgtgccgcggatgttcgcgtcgtcgccctacgactacgtgatgaagaccgacgacgacacgtacctccgcgtggccgcgcttggtcgacgagctccggcacaagccccgcgacgacgtctacctcggctacggcttcgccgtcggcgacgacccgatgcagttcatgcacgggatgggctacgtcgtgtcctgggacgtcgcgacgtgggtgtcgaccaacgaggacatcctgcggtacaacgacacgcacggccccgaggacctnctcgtcgggaaatggctcaacatcggccgccggggcaagaaccggtacagcctcaggccgcggatgtacgacctcaactgggacatggacaact

SEQ ID NO: 390170 - DNA, 734 bp, Oryza sativa
  unsure (1)..(734): unsure at all n locations
tttcgcgcgttcgtgcctggttataagtcgagtacggctatagctcgagtaacgcgcgggccgcgatcgtgcgaggggcacttgcatttccccgcgagatttttacgatgaagaccgcatcgtcgtcgtcgtcgtcgtcgcacgggttcccggccaccgcctcgctctgcaccccgtatctcctgctggtgccgctcggcctcctcgccgtggtgctcgtcgtccccagcctcggctcctcccacgtccgctccgacggcctcggcgtcctctgccacgccggcccatccaccgccgacggctacctcgtcacgccgggtggagatgcagcttccgctgctgctgctgctgctgagacgaaggccgtcgtgcggccgcgagctccgtctgctggtgggggtgctgacgacgccgaagcggtacgagcgtcgcaacatcgtgcgcctggcgtacgcgctgcagccggcggtgccccccggcgtcgcgcaggtggacgtccgcttcgtgttcngccgcgtggccgacccggtggacgcgcantggtggtgctggaggccgcgcggcacggcgacatcctggtgctcaactgcacggagaacatgaacgacggcaagacgcacgagtacctctcctccgtgccgcggatgttcgcgtcgtcgcctacgactacgtgatgaagancgacgacgacacgtaccttcgcgttggncgcgcttggtcgacgaacttcggca

SEQ ID NO: 390171 - DNA, 689 bp, Oryza sativa
  unsure (1)..(689): unsure at all n locations
gacgcgtacggcctctccgcaaacccgcgggccgccgccgccgccaccgccgccgccgattcatcgagtgacgganagaggtgttcggagtgaggaggacagagagagagagagagagagaggggatctcttcttcttcctcgcggccggcgccggccatgtcgtcgattgggacgtcgaagggggtcctggagatcgccaaggtcggggtgtacgtctccgtccccgtcgcgctcacctacctcgtcgccaccgactccaagaccctcaagaagctcatgggcctccgtgaattacgtggtatatcctcccgaaggtccacgtccaccacctcctgaagaacttcgtgaaagggctcgcaagatagctcgaaagaggcaacaacaacaataaatacatggaccatgatcacttcggactcccgctatttgtgacgaaaccgtgagtccaagaggaagctcagaaaagtgaagaccagctgactgtttttatcaatatgtgactgtatgatcttggtgctggaagatttgaaataaacccaacttatgtaaaatctgtaagaaacacagtagtagcttcatcaataacttcgttctgttcccctggtgattcatgaaatttagagaccggtttcttctgatggttcatgaaatttcagctgctctggcctgtacactaccagatcttct

SEQ ID NO: 390172 - DNA, 586 bp, Oryza sativa
  unsure (1)..(586): unsure at all n locations
ccctggccnccctccaggtctanncctagtggatccccantcgtatcacgaggcccttaaagatgtcgaggaggcccttaaggtggatccgaattttngttcatctctttcntgcatctcctctacgagatatgcccattcttcaaatttggttatatgtcagctaatggcgccatcgctgaagctattaagggagagaactttgttcacataattgactgtccaaattgcacaagggagtcaatggatgacattaatacaggcccttgcagcgaggcctggaggaccaccatttctacgaatcactggtatagatgactcgaattctgcttacgccagaggtggtggactggatgtagttggtatgagattgtataaagttgctcagtcttttggtctgccctttgagttcaatgctgttccagctgctagccatgaggtttatcttgagcatcttgatataagagttggtgaagttattgttgtgaattttgcctatcagctgcatcacactccagatgaaagtgtaagcacagaaaaccatcgggataggattttaagaatggtcaagagcctctcccctagg

SEQ ID NO: 390173 - DNA, 562 bp, Oryza sativa
  unsure (1)..(562): unsure at all n locations
ccacgcgtccgcccacgcgtccgcccacgcccccgcaagagcacaattgttactggcatatgggcagcgggtctggccttcttcatggatgtgtcacaactggcaggaatggtcagtgggggcacactccttgcattcactatagttgctgtgtccatcttgatcctcagatatgctcctccagatgaggtacccctgccatcttctctggaagcgtcattccgtttgagccaagaatatgatgaggaaaaggttaggggtcctcctgtagatgcgaatcatgaacagttgtcatctgtggtagaatcaataaatgacacccttatcgagaagaagcaagacacaagtgtggaggagtcaatgcgttcggaaagcagctgtttgcagcatatccatctgtatgtgttaggggttgtggtcctcacaanttcagcttctttcacattcttgccattccttttgcgatgcttcttctgtgtttttggtgggcctaantcctcctagccggtctcggggtcctctggctatatcggnccaagatgangggaggcactccatttgg

SEQ ID NO: 390174 - DNA, 554 bp, Oryza sativa
gccacgcgtccgctttatcttatcaccaaaaacacgatcctcaaaaaatacgatggaaggtttaaagatgtatttcaggagaactatgaaacaaaatggagagccaagtttgatgatgcaggaatatggtacgaacatcggctgattgatgatatggtggcctatgcccttaagagtgaaggtggctatgtttgggcttgcaagaactatgatggagatgtgcagagcgatctaattgctcaaggttttggatcgctaggtctaatgacatcagttctggcgtgccctgatggtagaaccattgaagctgaagctgctcatggtacagtcacacgccattacagagttcaccaaaaaggaggcgaaactagtacaaatagcattgcttcaatatttgcttggacaaccggactaggacatagggcaaagctcgatgacaataaaagactgttagattttgtacaaaaacttgaagctgcttgtgtgggaatagtggaatctggaaagatgacaaaggatctagctcttctgtacatgggccaaatgttagccga

SEQ ID NO: 390175 - DNA, 539 bp, Oryza sativa
ccacgcgtccggaagaatatggaagcaacatctccaacctcagctagcagcagtagagagctttcctgctctaccagttccacctacaagttctgctgcctctcaagggaagacattctccggttccttattggatgcctcggtgcccttgcgcccattccactgtctccaatctcttcccttggagccatcaatccacattactgtcatgttgatgcatctgtcccagccatggaagcaattcagaaggtccctccagatccaagtgccgtagctgtaggcgagactacaccagatggaactcgcaagatattaggagatatctctgcctacaagctgtggaaatgtgactatgttgcggctgcatgggcactgataaacctatcggcggggcagtttgtcattggtgccgacgataacgaatcaacaccgatctcagccatcccagtgcctcccatcagcttatcactagtggaagagatcggacctgggcgctcacccagggcaaagaagttcagcagcaggagcatcggattcct

SEQ ID NO: 390176 - DNA, 610 bp, Oryza sativa
  unsure (1)..(610): unsure at all n locations
ccacgcgtncgcccacgcgttcggccgcgcttctcctcaacgccgacaccaaggcctacgtcctccgccaggccaacgccacctccgacgacgagttcttcgccgacttcatcgtctccttcgtcaacatgagcaagatcggcgtgctcacccactcccacggcgagatcaggcacaagtgctctgctgtcaacccgccgtcgccgccgtcctccgccgccgcctccatgctcgccacctcgctcgccggctcgcttctcttcctcctcgcgggggtcctcgtgctgctcttctgatcgatccatcgatcgatctcacacattttacatgcatgcgtgcgtgcaaattggacaaactgttgtactgattgttcgtacgtcgtttcgtcgtcatttctggatttgttttacaaaaaccaatgatttttccttgattttcttttaatttgtcatgtgtgcagggttataacccttgtttgtttacttaatttccaaagggacaaatttgtatcttgggagatgaaatctccgattgttgtaactgtggccggacggacgtcaatcaagggccaaatgaatcgtgatttgttgtgaatactcgattggtctcc

SEQ ID NO: 390177 - DNA, 499 bp, Oryza sativa
cttgggatgcttctgtcacaaggactatggagggttttttttctttgttggagctggccggcgagagctgggtttttcgtgtcgagcttctagggcaaagtaagctcaatcgagctacttattgctgttctgagttttgtgcaggtacatgtatattcatgtacacagcatagggggattggtatacatgccgcagaggtatagcgcataaaaagttttataaactgtaggtccaatgtctggcccagcagcaaaattgtgtaaatcgccacctgtggttagaactgttgttgggtccagattcagaggtcgatatgatagtgtttactgtttaggatggatgtcagtcattcttactgttgtaggctgcaaaactgttgcatgtactgccgaaaaattcttatgtggcaagtcatccagagaaagaaaaaaacattgccattgtgtactcaacattgtcatgcattctctcgggctctgttcaacatagttttgagtt

SEQ ID NO: 390178 - DNA, 485 bp, Oryza sativa
gaccgatttcccaaaaaaaaaaaacaaaaaggaaatcagcctgaacgccggcggcgctcccgccgcgctcgagctctgctcctccgatggtgaccagatggagcgagaagggccccggcctcaagatcctgtggatctggaccctgggaaccgctggaattatgattaccaatgtcgtccggacgcgcgtcaatgatatgcagaagatcctccaggaggaagacgaagcagcagcagccgccgcccccatggcctccggcgagcgtgtcctgaaagacgatgagtagaacagaacgtctctacttatcaaaattccctgaaccccgctgttgtgccaagctgagttaggtattgtttatctggttcgtcttagtggattttactggtaaacagctacttgctttagccgaagtatggattacttgattcaaatactgggtcgttaccatctcattaggactttttaggtcttataaagtaatttc

SEQ ID NO: 390179 - DNA, 1038 bp, Oryza sativa
  unsure (1)..(1038): unsure at all n locations
ccacgcgtccggngctggcaagggaaagatccatctacagattttagaggtggaggcttcatctccttggagaacttagtgtacttctccaagaacttcccaaaatcttttcaggaacttcttcggaagcagaatggtgaccgtgcaatttgggagtatccatttgctgtggctggtgtaaatataacattcatgctcatccagatgcttgatcttcaatcagttaaaccaaggtcgttcatcgtagcagtttttctaaagctactttctgaaaatgatcaggcttttgacattctctactgcataaccttcaagttgatggatcagcaatggcttgacatgcatgccacttacatggacttcaagacggtcatgaagtccacacgacgtcagctagaaagggagctcttgcttgaagatattcagcggattgaggacatgccatcatacaagcttttggcccgctagctagtaactgaaccataacatggctacgtgctgcaaggcttgagttgcataagggttgcaactagtgcccacaaacagtgtgaattccaaaacgcagatgcacttgtttcctctcaagtttaggtactctgttaacctgtctccaaattacaagatagaggtctcttggccatagcacgccacgtagggtaactgaagtgtccgatcagctgccagggcagagtgtttgtaggttgggtgttttgttgcagtttggttgatgcccgtcataccacgaaatgaagtgcttctaggttttcctttttcctttataaacaagaggctcttgtgaaagctaatctgagtgtcttctgtagtgtaccatatttgcataattgatagtgttcagttctccgagtgtgcagaaatcatgctagctgtttctgctagctccgcaatgatgcaaatctgttgtttccttagttgtcctggggcatgaagtttgttcctatatagtgcagaccatttttgtggtacagcacgcctttcttgattgaatggattctgagtgctcatttgctgcttgctaac

SEQ ID NO: 390180 - DNA, 581 bp, Oryza sativa
tatcttcaccagactgattaaccggaacactacaatccccacgaagaaaagtcaggtgttctccactgctgctgacaaccagacacaagtgggcattcgtgtcttgcaaggtgagcgtgagatggcgacagacaacaagcttcttggtgaggttgatcttgttggcattccaccagcgccaagaggtatgccacagatcgaggtcacatttgacatcgatgccaatggaattgtgacggtctctgcaaaagacaagtctaccgggaaggagcagcaaatcaccatccgatcctccggtggcctctcagaagctgagattcagaagatggtccaggaggctgagcttcactctcagaaggatcaggagcggaaagccctcattgacatcagaaacaacgctgacactaccatttacagcgttgagaaaagtctgggagagtacagggacatgattcctgcagaggttgccactgagattgagacagcaatcgccgatctccgctctgtgatgacctcatatgacatcgagaagatcaaggcccatatcgaaacggccaacaaggctgttttaaatattgggc

SEQ ID NO: 390181 - DNA, 635 bp, Oryza sativa
ccccgccttctcccgagatttcgtcaccgccgtcgtcaagatgggcaacatcagcccgctcaccggctccaacggcgaggtccgctccaactgccggaagcccaactaagctcccgccgcctctgtgattcctgcccggtcgatcgatcgatcgacctttgagatccgtgcggagatcgatcgatcggacggtctggatggatggctagtcaactgccagctaggactaggggatggaggaggtggggcccagggatcagtgagacgtgtggctttttttggcgtgggaaggaagcgatcgagaatccaagggaccgaaataattaggtggagtggcgctgtcaaaaggggaggatcaagagggaggtggggcccacgctgcagtgacacaaagggctgcatgcattgcctttttttttttgttattttggtttggggttaattatcgcattcttttcctgtatcataatattggtggtgatcgatcgatcgatgcatttggtaataatttgagctgtaattttttttttctggatatgaactaccccatgatgatgattcagaagatgactcattagcttgcaaggcatagtgtgtatttcaaagctggatattctacaaatgattatacttgg

SEQ ID NO: 390182 - DNA, 524 bp, Oryza sativa
  unsure (1)..(524): unsure at all n locations
aattaaccctcacnaaagggaacaaaagctggagcnccaccgcggtggcggccncccnttttttttttttttttttttttttttttttttttttttttttttttttttacagcgcacaaatcgcgcttaaggcgaatctttgcataaacgaagttaacatgttgagttacaatgtaaagaaaaactcgttccaacactgggctcgtccattgatgtggaactgacatcaacacgacctgggtatacatccttccaggcacaacaataagtttgcagatccgagcacaacgccattcttatttcggatgaaaattacggtcggaagaaacaaaacaaccaagagcagcagcaagcgttgcctcactttgtccaccagtgaaggaaatccttgcgcctgttgatcttcttttggagctggaggacaccatacagtaaagcttcagcagttggagggcatccagggacgtaaatgtccacaggttcaatacggtcgcgatccacgcacggcagagtaagagtaatgg

SEQ ID NO: 390183 - DNA, 490 bp, Oryza sativa
cgcctcaggtaccggttcgcagattcggcccacgcgtacgcgtacgcgtgggcggacgcgtgggcggacgcgtgggtgtgatcaaagaagagaatgtgcatgaaacagttgatggtaacactcaagctgtgaagataaaatctaatgaagagaaagaactttttgattcacaggttcaggaacgtggtctcaatgtggtttcacccaaagcaacttctgaggccgacgaataatttgtggagataacaaagccagaattcagcacagatgaagaacatagtccaaaggcggatgaatcaaataagccagacgagaatacttgtgatgagaaaacaaaggctgaagaggaaactaataatatcactgatgaagcaacagtgaaaatagaagaacgaggagcagaacagagggtatcacataaaaaacataacattttgtctggtgttggatcaaaggtgaagcatcaactagcaaaagtgaagaaagccat

SEQ ID NO: 390184 - DNA, 956 bp, Oryza sativa
ttgatcttgagggtgaggcagcggaaaacactgagggacaagattcacaatgcaggagggtcacttccattctcagaacgctcacacaatgcagttaaaccgcttgctaagcatgttcctagagctttaaatgatcatgaagagaagttctcttgtatattttatggaaatgactcgttttatgttttgtcctggcgactccagatcctatatgaaagaatactgtcagctaagactaactcctcctcagctgaaaagaaatggaaagcttctaaggataccaacttgccagaccaatattcaaaggttatgagtgcactggataacttgcttgatgggtcttctgacaacaccaaatttgaagatgactgccgttcaatcatcgggactcagtcatatgttctttttactctagataagctgatatacaaagttgtaaagcagcttcaagcgatagcttctgacgaaatggataacaagctgctccaactttacatatacgaaaaatccaggtcacctgggagattctttgatctagtttatcatgaaaatgcgcgtgtacttctccatgatgagagcatatatcgatttgaacggcgttcaaatcctacaagattatcaattcagctaatggagtatgggcatgaaaaacctgaagttactgcagtgtcaattgatccaaatttttcgtcttatctatataatgagtatctgtcaagtatttctaatactaaattgtatgacgatatcttccttgggaggaataaacggaagcgtgggggaaacgatgactctcaagcttctttgaaggccattgatgctttcatggttactaatggtcttgaatgcaagatatcctgcaaatcctcaaaggtttcctatgtccttgatactgaagatttcttatttcatataagaaagaggagagtttcatctagtggaaccatacctgaaaa

SEQ ID NO: 390185 - DNA, 632 bp, Oryza sativa
gggtatgaaccggccaatgggcatgggaatgggaatgaaccaacaaatgggtatgggaatggggatgaaccaacaggccatgggaatggggatgaaccaacaggccatgggaatggggatgaaccaacaaccaatgggaatgaacatgggcatggggatgaaccagggtatgggaatgaacatgcggcctcctatgggaatgggtccaggtagtggatataatccaatgggtaccggatacggagggcagcaaccatatggtgggtacaggtgagattatactgtacaatgcgatactcagtgaggggttgagaaacagtttaggaggcgtttggattttggtcacctggattttctttatgtatggtttcttttgttttgggtgggggggggttataatttttcatcactattcttttcctatccatgttggatattgtatctactaaatatatgacatgtgaacgggggcaatgctacaactactgtgttgtgttggatgcaaagccttaatactataatcatcaatgtagctgtataattctctataggatgtttttttttcagtaaacattgtgattgtttcagcgttcttgctggcttgacaataaaaaggctgtaccattttgttc

SEQ ID NO: 390186 - DNA, 776 bp, Oryza sativa
  unsure (1)..(776): unsure at all n locations
gtctccagcgagttcgaggcttcgagagcgagagagcaacgaatcgggagaggaggagctcgctcgaatcggatcgaaccctacgagcgcgggcggaggcggactcatcgccggagtagcggcggcgcgcggcgccatggacgagagggagttccggcggatgctcgagctcttccccgtcgtccgatctcgcgactactgcgctgaatcaggggcatcaagcaaaggcagcacacagcaatcacgggctcaggaggcaacaaggggcaacaaaaatgagtcatctgatcaattcatgaaaaaattgaagatggttgctgagaaaaaggttggagcaacaaaggcagagttgttctgcaagacatttgaagaagcccataagaaacttgtttacaaagagctgaacctagatgctgctcaaagatttctgaatgcctatgagaaacgatcatgaattatagccagatattgttcaaagatctgcagacgccaaactgagggattttattgaggcgcggcgtcctggcgctgttgataattctgattgctggttcttgtatgattctgctaattgtgatagacgataatatcaatagacatgagctagccgcattatttcagattattacatcctcccgaacagacgacagttccaatcaactgatcggtttttttgtgattggatttatgtcagctttcatgagaatgaaaatgcctgaaactgttctagaaaaaaaaaaaaaaannnnnnnnnnnnnnnnnnnnnnnnnnnnnnn

SEQ ID NO: 390187 - DNA, 667 bp, Oryza sativa
  unsure (1)..(667): unsure at all n locations
ccacgcgtccgccctctcttcctcctcctccttcgccgccgacatcgccgggctgccggtgaccaaggactacgtcgccgacgtgctcgagagaggattcctcctcaacctcgtcggaaaccggctgttctacgccggcgtgccgcttctcctgtggatcttcggcccggtcttggcttgcctctgctccgtcgtcatgatcccgatactgcacagcatcgacgtggtttacgtcgatgggagcagcaagggcgaggccaacgccagagtggagatggtgtacgagagcgatgagagcgtcatgcaagtttgaccaatttcggacacgagtcggactctataacctgcctaccctcacggagaatatgtggtggtgctctcgtctcgtccttcaaactcgatcttgaagaaaaatgcgggcaattcttgatccaacagtgactgcacctgtgttgtgtgtgtcatgtttgtggcttggattgttttgagtattcttattcaagacatgtttagcatggcacggccgggagagtacttggtgctgtaacagagactcactgatcggtcaactgttaacgcacagcaatgtactggttacaactgctgtaatctgtcagaataagatgttctcccccattgattcactnnnnnnnnnnnnnnnnnnnnn

SEQ ID NO: 390188 - DNA, 407 bp, Oryza sativa
  unsure (1)..(407): unsure at all n locations
ggagtcttggcttacacccttttaggagttgactacaacgaatccagtggtgattgtgcttttctcatccttgatccacactanactggtgctgatgatctcaagaagatcgtgaatngtggatggtgtgggtggaagaaatccatcgacagcaaaggccgtagcttcttcctgaaagacaagttctacaaccttctgctaccccaaaggcctaatatggtgtaaaaactgcatcgctatgacacctctatggatcaaagagagtggtttgtacatcgctatgaagagagcttcttgatcagtgtaaaaacttgctaagcaaactatttttcgctgtcggagcctggtttgtacatcttatcttggcatggagaaactagagctacagttgccggcaaaaaaaaaan

SEQ ID NO: 390189 - DNA, 638 bp, Oryza sativa
ccacgcgtccgcttgcatgccatcctcgactgtggttgcgtgttgagaggccaatcagaaatacaatagagccaggagtctatccaaatcttgagtctgctgtttctgcagctaggcctggggatactattctaattgctgctggtggcacacatgttgcacgtaatatccaaataaagaagcctctctgcattattggcgggggtgagcttcctgacgacacagtgttaacatgtccccgtggctctgacagggcgttggagttccattccacctgcaagattgcaaatctcactattagagcaaagctggggtgttgtttgctttaatcgaagtggtagattaacttttggggagggcttgcttccagtgcgagcaaaatcctttggatattttgcccttccttttaattagaacagcgttggagtttaattggttctaataactcaggggccaaggccttggtgtacctgttgttcgaccccgctttgaggggggtgcgaaggccgtcaggcctattggaccactgggcctgaaccttgtgcgggctatttattttcgcagttttgtttttttttggttcgaagtaggagaaaggtaggaatcaatgtaaacctgtaaggccatggccatgtttc

SEQ ID NO: 390190 - DNA, 728 bp, Oryza sativa
ccacgcgtccggacgcagagcatggacatcaacggcaaggacgtcaaggcccagatctgggacaccggcggccaggagcgcttacgcgccgtcaccttcgcctactaccgcggcgccttctgcgcccttctcgtatacgacatgtgccgccgctccaccttcgacaacgtcggtcgctggctccaagaactcaacacacattcggacacgactgtagccaagatgttggtgggcaacaagtgtgatctggataatatccgcgaagcgccggtcgaggaaggcaaagcacttgctgaagctgaagggctgttcttcatggagacctctgctctggactcgacaaacgcgtggacagctttcgagatcgtaatcaaggagatctacaccaacgtgagcaggaagatcttgaattcggactcctacaaggcggagtatccctcaatagggtaagcattgagggtgattcgaaggatgatcagaaacagtcaaaccggtttggatgttgctaggggttttagtacattattattattggattcactgtgatatgaaggttttttgttcattaatattattattattatctgtaaacttgtaatccaaattgttttttggtttggttactctggtacacactgtgacactgagatacaaagtgagagaagaatagttgctggtaatgaatagttgagaggactgctttgtgctgttacctgaaaaaaaaaaaa

SEQ ID NO: 390191 - DNA, 587 bp, Oryza sativa
  unsure (1)..(587): unsure at all n locations
cggacggtggacnggcacgcgtgggtcaagtccatctcaagatgatgaaaagctttcttgctctcttcctcctcctactcacctttgcctcccatggcacatggtgtgctgctgctgctgacagaagccacaggattactacagctcatctgaggcctcatctccatgtagaagaattgcatggcaagaagctcatggagattcaggtccccaggaagcttggccatgaggtgaaggttcccaagagaatggccatagctcacaagggtggcagcacgggcggcggctcgacaggcggcaccacaggcggcgccacaaatgtcaacagtggaccggccgacacgcggccggggaaaaacgcggcggcgttgccagcttccggcgacgacgacgtccatcctggcactggcctttctccttcgccattgctgtctcagctttcagcttctgaagctgtgtgagtggtggtgttcttgcaagaaaggtattagtatgtgtgttagtggtgtggtaatctctgaatgactgaatttgtgtatccagtttatcagtagtgcacactgaaattgtttcatcttcctgtatct

SEQ ID NO: 390192 - DNA, 465 bp, Oryza sativa
  unsure (1)..(465): unsure at all n locations
cgcggacgcaaccaatacgccattccaccggagcagccgggagcgcggaggccatggcgatgtgggtgttcgggtacgggtccctggtctggaaccccggcttcgcgcacgacgcccgcctcgtcggcttcgtcagggactaccgccgcgtcttctaccaggggagcacggaccacaggggcacgccggagttccccgggaggaccgtcacgctcgagcaccagcccggcgccacatgctggggtgttgcttacaaaatttcaacggaacaagataagcagacagctctggagcatctggaagtaagagagaagcaatatgatgagaagatttaccttgatttgtatatgggactcctcaccaaaaacaccagccgtcaaaaatgtgatgggtatacttagccacaacaaacaagcagagcaacccaaaactaccttggtcctgnaccgctggaagaaatggcca

SEQ ID NO: 390193 - DNA, 925 bp, Oryza sativa
cgccattccaccggagcagccgggagcgcggaggccatggcgatgtgggtgttcgggtacgggtccctggtctggaaccccggcttcgcgcacgacgcccgcctcgtcggcttcgtcagggactaccgccgcgtcttctaccaggggagcacggaccacaggggcacgccggagttccccgggaggaccgtcacgctcgagcaccagcccggcgccacatgcgtaacgcttctctctcatatgttctttgttgatgtgctacgcgacttgctaatcgttaatccttgtgttgaattgagcatggattacattatgctttaagatgcttctttgttgttgttgttgttgttgatatctttatttcggtacatctgtgaaactgaggtactactggtcagccatgctaataaggagtaagtatgagtttgtgtatcagtgatcggatgaaaacaatgatcatcagataatcagatgtgtacttgtaatcctgtatcctaacttcctaaggtatttaagaatgggctataaggggagacctttctgcagtaatggtaaaagagtggcactgagactctcttgcagtccaaattaaaatggtcattgagataccgagatcgatctgaactctgaagggtggtacaaatggtaaaaaaggagcttggtttgtgatatgcaaaatgggactaatgatctcatagctatttggcatgttctcttccatctttttatgctgttctgcaggccaagtaaccctgttctcagtgcatacattgaatttgtaaatgaatctctttgctttatgatgtagtggcgctgttgcttacaaaatttcaacggaacaagataagcagacagctctggagcatttggagtaagagagaagcattatgatgagaagatttaccttgatttggatatggacttc

SEQ ID NO: 390194 - DNA, 802 bp, Oryza sativa
cacgcgtccgatggatcctaattttgctggccttatacaaggaaatatggatcaaaagactgttacagagagaaatgtccatgaatctgatgatcagcaaggaacttctggcagtcatcccaggcagtgcaaattatcaaggtttggatctgtgcgagtgacacacgtggcatccttgaacaaaaacgatgaagattctttggacttcagtttcctcctgaattctctatctgaccaacatgatgcaagcatgaacacaaatgagatagcagcctcggtgacattccattgtccaaccgcttctacaaatgaaattactggatcagtggtgatgaggcaagcatctttcagaatagatcatccagcttgtgaaaatgatgcttcagttgctgaattccaccaagagcaacaggtggttaccgcacaatttgatccatcttttttagctgtactcgctgatgcccccatgtactcaacgcacaacagcttcaaagagagtgaatgccacgaggcgctacaaaagctgtctgaagactgatttccctaagaacaatgaacattcattttgatgcatatttaggtcaagtactgttttgagtctcattttcttaatatgccagcttggtattagtgattgcttctatttaatttgtaatgtgctcatattcttgtactatttactggatcattattatttagttacaagaactttggctctgtgcatgctagatgcagaggccggggatgtaattcatcttccttattaaaaacaataaatattgtgtctaaattcaaaaacaaa

SEQ ID NO: 390195 - DNA, 506 bp, Oryza sativa
  unsure (1)..(506): unsure at all n locations
caaacgcttaagacatgactgcaataaatctgactgttgaaattagtgttctctgcaatgagatcccgcgagttttatccgaaaaggtcagacactgggatggtgtgtcattcatcagttcatcctaagctcggaagggtatctctgtagcatgttaacttcagtagttttaggggatcggcatctgagagaatttcaaaacttcatacctggttgccagcataagttctgcaggtgttgaaaagttgttgatcagagtagcaatttaaggtctgatgtttctggggaacagtaggagagaaaaaaatgacaaaaaaaagagagagtaggttgtaaatacatgaaaagttttcatcagaaattagtgttgtaacattgtacactgtgattacatcctgtgcaatactcccataattcagatctgtgttgtaatacactacatacatcctacaattttctggtgataatagagatctaattctcacctaacanaaaaaaaaaataat

SEQ ID NO: 390196 - DNA, 454 bp, Oryza sativa
gcggcccacgcgtccgaaatattatctaacctggactttttcactgctaatgctacttacaactgagtagtgcgaagtagtgtgcttaaaagcagcaagaacagaagtagcataagaagcagaaagagctcaaagaagaagaggtgatcatgagctactaccggggtacctcgccggcgtgggggctgggccgccgcggcggcggtggtgggccgtctccggtggcgccactcctcatcggggtggccctggtctgggtcaactacaacgagaccctgacggagtggtacgacaaggcggcgaacctgccggggacggtggccgacaatgccgtcaccctggtcgccgccggcgggctcctgctgctcgccgccgtgctcctcatccgccggagcgaggtggtggtcgtgccggtggcgatcgtgctatccgtgatgctgctgcagaacatcat

SEQ ID NO: 390197 - DNA, 520 bp, Oryza sativa
aatagtgagaaagctggttgaaatgatgtgcagtgtttttgttgcttcttggactggagtgatcaaggatcatgggcctcgcccaagcacacggcctcatcaggtatttgttgcaaaccatacatcgatgatagatttcattattctggagcagatgacagcatttgctgtcattatgcaaaagcatcctggatgggttggatttattcagaagactatcttggaaagtgttggttgcatctgggttaatcgcaatgatctcaaggatcgtgaagtggttgcaaaaaagttgcgagatcatgttcaacatccagacagcaatcctctcctgattttccctgaaggaacttgcgtttacaaccagtacactgtcatgttcaagaagggtgcttttgagcttggctgtgcttgtttgcccaatagctatcaaatacaataaaatattttgtgatgccttctggaaatagtagaagcaatcgtttaccatgcacttggtaagcttatgacatcatgggcaggt

SEQ ID NO: 390198 - DNA, 728 bp, Oryza sativa
  unsure (1)..(728): unsure at all n locations
ccacgcgtccgcggacgcgtgggcgcaagcggcggacgacgacgagccgacgacgacgacggcgagcggcggcggcggcggcggagggagaagcggagctacccgtaccgcggcatccggcagcggccgtgggggaggtgggcgtcggagatccgcgaccccgtcaagggcatccgcgtctggctcggcaccttcgacaccgccgagggcgccgcgcgcgcctacgacgacgaggttcgccgcatctacggcggcaacgccaagaccaacttccccccatcgccgcccacgccgccgccgccggagaagccagcggcggagaggagcccctcgacgacgccgacgacgaccacggaggactccggcgactcgcgcatactcatcgagtgctgctccgacgacctgatggacagcctcctcgccgccttcgacatgaccaccggcgacatgcgcttctggagctaacgaacaacagagcagattcaggacaacataaacggcacgtctttgcaaccttgacatgcgactcgcctaataatcttgtcaaacaagggccgccagcttaattagctttttccaaaggtggggaacaattttgggggatgcaattaggacgcacagagatgaccccaacttgtcaatgggaattgaactntgatgacctttgtaatgataatcnagncaccacattgtggggttnagtaaagttttggttaataaaaananna

SEQ ID NO: 390199 - DNA, 476 bp, Oryza sativa
catatgggtaaaagactcctgctccttcgcttcgcttctgttcgtctctccgccgtgcgccgtccgtcgtccgccatggaggttgctggccctcctccgttgaccagcgcttcccctagcccctgccgctcaacaccaactgtggccggatctagttgtttggcggctcgcgagaaagaagttttggtggtctagatctggtcagttcatcctccctttcgagctgatctctcaccaccgagccttttccccacatcccttctcgtcgttcggtttgaggtggtcagatctaccggcggcaaagctgctggatgccctcacttcgtgtggctgcgagatcatcggggtttgaactgccagactcgcttggtctcgtggaggtacgagaagcgagcaagacgagggatgcaaatgggcgacgacctggggtgtggagcggtgaccccagctatcggatgcagcagtttgcacgcgcg

SEQ ID NO: 390200 - DNA, 590 bp, Oryza sativa
  unsure (1)..(590): unsure at all n locations
agtaggtcacagcattcgtaggcagcataatttgtactatttactgtttgttttgttccatgcaagtncggttagtcagacaatttggcaatttaccccatgcaagtggtggtggtgggcatggcatagatgtttttgggaaaatcttttttgcatgttttagtcttggaagtaaactgttcttattttacagtcttttttgctgttcatataagtataaaaatagaggttgaggcttttgcggcatatgttccttgtccaactaaacaatcttatcctgcacagactgatcctcttggctcggcgtggggattcttttctttaagcaatttaacattattgtcctaacaatatacacaatattggtttttctttcagtatcaaataattcttttacttttgaaaacacatttgcaatgtgttggaaacacaattatatcttgcacttccttttggaaatttaatcatttgaaaactgattcgcatttcatggctgtaatcttctcttgcgaacatcgctctttctttgatggttctctgttgagaagaagagcaaccaagtaaattttcgaaatgtttttttggtcttt

SEQ ID NO: 390201 - DNA, 656 bp, Oryza sativa
ttaaagttgaaaaatcgctgcagagtctaaattgtcaaaatttgttgaggatataatagtgcctccaagaatgattgacataattgtcgatggagaggttaatgacgaatacatgaaaacacttgagactctaagcagaaaaatcaagttcattgaagttgatgcaatggttaaatcgtccaaggctctaaaggatgttcaacctgaggttgagagacttaggcagaaagcagtctcaaagatttttgaatttgtcatccaaaagttctatgccccgagaaaaccgaaaacaaatattcagattctacagcagagtgttcttcttaaatacaagtacacgatagtttttcttaaggaacatgctaaggagatatatgcggaagttcgtgcagcttatattgataccatgaacaaggtgctgagtgcacatttccgtgcgtatattcaagcattagagaaactacaactggacatagcaacctctaccgacttacttggagttgaaactagaagtacaggattccttttctccatgggaaaagaatctctgaagacccgttcttctgtctttgctttgggtgaaaggataaacatattaaagggaaatgatcagcctgccttgatacctacatagctgaagccaagtctcaaaaata

SEQ ID NO: 390202 - DNA, 909 bp, Oryza sativa
  unsure (1)..(909): unsure at all n locations
gcggcgcgacgcgtccgcggacggtgggcggacgcgtgggctctctctctctctttctttcgtcgttggatccaaagctcctcctcctcctcgcctcgcgctcctcgtcccttctctcgtcccatctctcatctcatctcttggtagttgccagttgggacttgggagagagaggagcaggaggcaggagcaagaggagggcaagatcgatcaagatcaacatgtccaacaacaaggtgctgaccctggaggaggtctccaagcacaacaccaaggacgattgctggctcatcatcggcggcaaggtgtacaatgtgaccaagtttttggaggatcaccctggaggtgatgatgtcttgttgtcttcgactggccaaggatgctaccgacgacttcgaagatgtggggcacagcaccactgctcgggcgatgatggatgagtattatgtcggcgacattgacgcaaccacgatacccaccaaggtgaagtacacgcccccgaagcaaccacactacaaccaggataagacaccagagttcatcatcaagatcctccagtttttggttcccttggcgatattgggattggctgttgctgtaaggatctacaccaagtcagagtctgcttagtattgttgtcagtctttcaaaaggtcaagaacttaataagttagtgaggatccgaggattgcgtattttgtaccagcatggtctgtcatgtttgttatggttctaagactaatactggtaaaatgtgactaaatcaaatggatatttgatcatattttccatggtactgatgaatgttccagaatggctgctctaatttgntgtcnnnnnnnnnnnnnnnnnnnnnnnnnnnnnnnnnnnnnnnnnnnnnnnnnnnnnnnnnnnnnnnnnnnnnnnnnn

SEQ ID NO: 390203 - DNA, 676 bp, Oryza sativa
  unsure (1)..(676): unsure at all n locations
ctcactatagggcgaattgggtaccgggccccccctcgaggtcgacccacgcgtccggccatccgcggcacgcttccactccgtcgaccaatacctcaacatcaagctcgagaacactcgggttgtcgaccaggacaagtacccgcacatgctatccgtgcgaaactgcttcatcaggggatcggtggtgcggtacgtgctgcttccccaggatggcgtcgacattgacatcctccatgatgccaccaggagggaggctcgcggaggctgatgatccacaccgtattttcgcccttggaggagccctaaatctgatgtatgggggacatgtatggagtatggtgtgacagacagcaatattgacagggagttaaaaaagtctgtagcaattcctcctgatacttgcagtgacaaaactatccaaagattgcatttggcgatgccatatgctgcttccctttcttgtgtactccaatcaatgtttgttagatcaacggtgcccattggttagttgagatgttttttcaggccatgttcctgagaacaggctgcacatttgcatgttccagttcagcagattgttgttgnccggtcaatgatcaatgactagaaattattaggcagnnnnnnnnnnnnnnnnnnnnnnnnnnnnnnnnnnnnnnnnnnnnnnnnnnnn

SEQ ID NO: 390204 - DNA, 441 bp, Oryza sativa
gcggccgacgcgtccgcccacgcgtccgctctccgctccttgcgcctgcgccgatctccatctcgctaccaggggagggggagaggcgctcgccgccgtcgtcctgctgcttcttgattcttcggagctaaggcggggagggttctgcggccagtatgctgttcttctcctacttcaaggagctcgtggggaaggaggtgacggtggagctcaagaacgacctggccatccgcggcacgcttccactccgtcgaccaatacctcaacatcaagctcgagaacactcgggttgtcgaccaggacaagtacccgcacatgctatccgtgcgaaactgcttcatcaggggatcggtggtgcggtacgtgctgcttccccaggatggcgtcgacattgacatcctccatgatgccaccaggagggaggctcgcggaggctgatga

SEQ ID NO: 390205 - DNA, 832 bp, Oryza sativa
tgttcggagagagagagagagagagaggagagcggcggcgatggcgtcgtcgtcgtcgtcggcgtcgagcaggttctcgccggcgctgcaggcgtcggatctcaacgacttcatcgccccctcgcaggactgcatcatctccctcaacaagggcccctccgcccgccgccttccgatcaaacaaaaggaaattgcagtgagcacaaatcctccagaggaagcagtcaagatttcactgaaggactgtttggcttgcagtggttgcataacatcagcagaaacagttatgcttgagaagcaaagcttgggtgacttcattactcgcatcaactctgacaaagctgtcatagtatcggtctctccacagtcaagagcatcgctagctgcattctttggtctttctcaatcacaggttttcagaaaactcactgcgctgttcaagtcgatgggcgtaaaggcagtttacgacacaaggtccaggcgagatctgtccctaattgaagcatgcagtgaatttggtactcgttatcatcaaaaccagttatctaggggcaaagaagctggaaaaaatcttcccatgctttcatctgcatgcccaggttggatatgctatgcagaaaagactctcgggtcatttatcttgccttacatctcagctgtgaagagcccccaacaggccattggtgctgctatcaagcatcatatgggtggaaaacttggtctgaagccacatgatgtttatcatgtgactgggatgccctgttatgataaaaaactagaagctggtagggatgattttgttttctcagtggaagattaagatgtgtacaga

SEQ ID NO: 390206 - DNA, 469 bp, Oryza sativa
gcgggccacgcgtccgtctacaaatggattctgaaatgaaggccttacagacaaggaaagtttgggaccccgggagaaacaatcccctgagggtcagagatctcaatgagcggttgatgatgacggagcgagcattcaccgatcgagaaggactatctgggaggccatggtacaaacacctgatttatgcaccatcactgcatgatgattacggagcgcaggtgtatccaggtgttgatgatgccattcagatggcagagaggacgaatacgtccgaatcctggcgatctgtgcagcatgagatttacaggattgctagggtcatcaaccaggcctcgctagtcctaagtggagggttaacataaacaactggtggggaagcggtggaaatggaactatgctttctcactcggcggactggtaatcgttgactgcgataaatgaaatgttcatgtcacttatttggaac

SEQ ID NO: 390207 - DNA, 1009 bp, Oryza sativa
  unsure (1)..(1009): unsure at all n locations
taaatatttttcggcttattcgttgctcatagaacacatcaccgcgacaaaaaataagcctctcttgttgtcacctccacacgtccatttgtcaccgctgatgagctttcgtgtgcgccagctgcacaaagaaagaccggtccataagagcggctgcctggttctgaatttctagtcgccacagcggagaggagccgatacttccatggccatgaagaagcttgtgctgaagctggacctgcacgatgacaaggataagcagaaggcgatcaaagccgtctccaccctccacgggatcgacatgatctccatggacatgaagggccaaaagctgacggtggtcggcgacgtcgacccggtggacgtcgtcggcaagctccggaagggctggccgtcggcgagcctcctctccgtggggccggcgaaggaggagaagaaggaggagaagaagccggaagagaagaaggacgacaagaagccagagcaacccaagctcgtcttctacccgccgccgccggcgtggcacgcccacgccgcgccgccgtcgtacagctacccgccgccgcagtacgtcgtccacagcgccgaggaggaccccaactcgtgcgtcatctgctgatcatggcgtcgttagcttgtacattttgcagttcgtctagctgatcaacctactcaccggtggtcactgatcgggacccggacgtggcggtggttgggtgtcgcacgcttgcactcctcccctatcatttggctggttctctggctcagctcggtgacggtgatgatgcgtttggttttgtgtgtatatggttgctgcgcttgcttgttgctacttgctagtactagacaaacaggtgagacagggaagctaagctagctatgtgcagatagttttgtgccatttctttttttttggtgatgagatgagacatgggattaaagagaaatcgtactgttataaaagaagcgtataattcgatctcatcgtnnngnatnnnnnnnnnnnnnn

SEQ ID NO: 390208 - DNA, 699 bp, Oryza sativa
  unsure (1)..(699): unsure at all n locations
gcgggcgacgggtccgttctggattacaagatgaattanttcccccttcacacatgaggtgtactatatnaaggggctgttgagcataagagggggggtanatttgttgattttcccaatggcatgcatatggatacctggaattctggaggagaccggtactggaggacaatccaactgtttctggaccaatatgctccagaagtacagagttgtaataccagctgcaaaagtgaaattgctaatgatgatgaagctgaagagtgaccagaacatctggagcggccttcttttttttttcttccaggctccagttttctggtgtgatgcgatttaaatcctgatgaactgaagctcactgcaaacaattaattcaggcaattattctccattcaacctgaagaaggcaaagttgtgaatacccttgaggttgctctccatcctagcactacatttgtctctggagctatatatagatttctgagaagacctagcctttgaactgatgattccccctcccccccttgatttaatctgtgatgttgctttgttgaagttttttacaatatactgtagcgcattaccatgtcataatctggcctcggtgtataacagtgtaatgcataggtttttaggctctggttcagcaatttggttttgtgttttttattattggtgttatagatctggttgcctgct

SEQ ID NO: 390209 - DNA, 869 bp, Oryza sativa
  unsure (1)..(869): unsure at all n locations
caacgccgcctctttggagcgacctcctgtcgacgccgcgtcggcctcgcccccatccccatagccataccaggcctcaatcttcctctccaatctccttgtggctagttcggacagcagcagcagcgtgggtggtgccgctgcgattccggaggagggggcggtagttcggaggcggcgcgatgaggttggagaagtgctggttctgctcgtccaccgtctaccccggccacggcatccagttcgtccggaacgacgccaagatctttcgcttttgccggtcaaaatgtcataaaaatttcaagatgaagaggaatcctcgtaaggttaaatggacaaaagcgtacaggtgcttgcatggggaaggacatgacacaggcttcacctttgagtttgagaggaaaaggaacaggccagagcgttatgaccggaatgtcactgcgcaaactcttaaggttatctctcttatttacaaaggttaggccatgaacggcagaagaaacatattacagagaggcaaaaacagggtaagacaaagcaacgggagagggatgctaaggagttggaacaggatattcaaatgcttccaaagaaggttaccctatcaacacaaaaaacaaaagtcgtggttaaagtttcccagcagcagacagaagagaatcttatggaagagtaatgaaatgggaatcaagttttgcatgttgttatgtaggactgtgtttcatcaaatcgttactatgaacggtgtatttgactgggtaccagcaaagttttgcaccgaccgtctggtttgtgacttccagctatcttatagtatcaatagtattgatggctttgtgaactgttnnnnnnnnnnnnnnnnnnnnnnn

SEQ ID NO: 390210 - DNA, 490 bp, Oryza sativa
  unsure (1)..(490): unsure at all n locations
ctcgctctcgtccccgccgcggcgccgccctgctctccccctaggtgccgctgcgatttcggagggcggggtccggcggcaaggaaggaggcggggcgcgatgaggttggagaagtgctggttctgctcctccaccatctaccccggccacggcatccagttcgtccgcaacgacgccaagatcttccgcttttgccggtcaaaatgccataaaaattttaagatgaagaggaatcctcgtaaggttaaatggacaaaagcatacagatgcttgcatgggaaggacatgacgcaggactccacctttgagtttgagaggaagaggaacagaccagagcgctatgaccggaatgtcactgcacaaactcttaaggctatccctcttattacaaagattagacatgaacgccataaaaaacatattacagagagggcaaaaacagggtaagacaaagcaaaagggagagagatnctaaggagtttggacagg

SEQ ID NO: 390211 - DNA, 662 bp, Oryza sativa
  unsure (1)..(662): unsure at all n locations
gcgggccacgcgtccgcagcttccaagtgtacatgctggtgaagtacangctgccattnnaaatccgccagggggtnaaccggggggggggggcctcttctcccgcctctactctaacctcgcccgccaggaccggtacgtcatgcacctcggcggcggctacgggcccttcgccttcttcaaagggtgcttcgacgacataaacttggagaggctgaggcaaaggatggggaagagcaggaaccctcaagacgatgaaatgttcaacttcgacccaaagaccatcgattgggaggactacttctacaggatccatatacccggtgtgctcaagtacatcctcaagtaaaacacacatggatgatgatggattatatcatcatgtataacagctggatgaagaagacttaagtattgtactctggctctgctcctccctgttacaaatgccagcaatctacctaagtatgctgatactagcttgtatgggaatatgcatgcttgctcaaagaattaatctttaatatatgtcaactactagactaagtaatgcttgtatcggagaagaatcaccatatcttaatcaataataatacactgtgtgcttgtgcttgtgtcatgtactaccnnnnnnnnnnnnnnnnnnnnnnnnnnnnnnnnnn

SEQ ID NO: 390212 - DNA, 777 bp, Oryza sativa
ccacgcgtccgtggtgctctccggcgcccacaccatcggcgtctgccactgcgactgcttcaccagccgcctctacaacttcaccggcgtcggcgacgccgacccggcgatcagcgccgcctacgcgttcctcctccgcgccgtgtgcccctccaacccccccccgttcttccccaacaccacggtggacatggacgtgatcaccccggcggcgctcgacaacaagtactacgtcggggtcgccaacaacctgggcctcttcacgtcggaccacgcgctgctcaccaacgccacgctcagggcgtcggtggacgagttcgtcaagagcgagacgcggtggaagagcaagttcgtgaaggccatggtgaagatgggcggcatcgaggtgaagaccgggacgacgcagggcgaggtcaggctcaactgcagggtcgtcaacaagaggagcgccaacgctgagctcgagctcgagctcgccgccgccatggatgatggggatgaagtggcagcgagctaattaattaaggtggtagtagctgatctgatgtcgcgtgttcttcagaggtttcagcaataagtttgtgatcggtgttgttacttgttagatgtatgctgctgctgtttttaacgagaataagagttgctggtgatgaagtttttttcttcttgttgttttttaatttgttttctgttttggcttgtgtttgggtgagtgctttggtgtgaacctgtcatgaaatcaaggaagaaatttggcgaaaaaaaaaaaaaaaaaaa

SEQ ID NO: 390213 - DNA, 504 bp, Oryza sativa
  unsure (1)..(504): unsure at all n locations
gcgggcgacgcgtccncattgttctcattggtggatccaccatgttccctggctcgcgacccattacgggggggtcaccggcgtggccaagcagcatgaagatcaaggttgtcgctccgccagagaggaagtacagtgtctggattggaggatcaatccttgcatctctgagcaccttccagcagatgtggatctcaagggctgagtatgaagaatctggcccagctatcgtccacaggaagtgcttctagatgtggcctagctgtatctttcatgagaaccccttgtctattagcattagctggctgtttcatggacaaaaaaattgttgggtctgatggcttgtctatgggtgtatctactctgattagctccggtttttgtgtatgccaatataattattccgtaagtacgtggggagtcaagaacattatgtgtgtagtttgatttcataaattgatttgagattcttgaacttttctagtaccgtatttacaagattnn

SEQ ID NO: 390214 - DNA, 857 bp, Oryza sativa
  unsure (1)..(857): unsure at all n locations
gcgggccactcgtccntaaaccctgagaagtccatcccatcatctattctaaagggagctaangggcgtgcgtgtgataacagggggcggggggggtncatttcttacatacaaaggtggcactggccttgtagttgcccgaagatcagatggatcatgggctggcccatcagcaattgcatctgttggcctgggatggggagttcagtttggtggcgaactgacagattttataattggacttcatgatcgtaaggctgtcaaggcattcagcagtcgcatgcatctttctcttggggcaggattaagtgcagcagcatgaccaattggcagggcctttgaagcagatgttagggccagtgaaaaaggttctgggctctgctacacttacagctgtagcaaaggtgcctttgttggggtctcattggaaggaaatgtcgtgacaaccagatcagagaccaatctacgcttctatggcgatgcttacttgaccacaactgatatcctgtttgggaaggtggagaaacccagagccgcccagcccctgtactcagctctagatgatctattctctaaaatggtttactagttctacgtgttcatgccaaaaaaaaaaaggaaaaaaagaaaaggaaaagctctccattactcattgatgtacacaatatgtatataaagaaaaaggtaggaaaatgtacagcttttaagtcctgttcggatgggtcgatttgggttaaaatcccttgcacgacttataggttcaaatgtgaaaaaggtcccaaagtattttataattcaagtacccaaatctgaacagaccaattggattgtgttccactgataanaaaaaaaaaaaa

SEQ ID NO: 390215 - DNA, 604 bp, Oryza sativa
agcagatgttgccaccaaagatgagatccaggcaagaattgcacagctgaagagagagctttctcagacagactcagcatatgactctgagaagttggctgagagaatcgcaaagctttctggcggagttgcggttataaaggtaggagctgcaaccgagacagagcttgaggatcgcaagcttcgtatcgaggatgccaagaatgcaacatttgctgctattgaggaaggtatagtacctggaggtggtgcggcctatgttcacctgtcaaaatttgtaccagccatcaaggagaagttggatgaccctgaagagcgccttggtgctgatatcatttcaaaaggctctagtgggcaccggggaggcactaatagcacacaaatgctggagttgaagggggaagtgattgtagaaaagatcaagggagagtgaatgggaggttggctacaattgcgatggctgacagacacgagaacttggtacaggctggtgtgattgtccctgcaaaggtgataagatgtgcgttcgaaaacctaggcctcgtgctgatgcactacaccgagtatcgtgtgagacgaagagagctcgcgtcggccagagatt

SEQ ID NO: 390216 - DNA, 647 bp, Oryza sativa
  unsure (1)..(647): unsure at all n locations
agctgctcacgaagaagaaggcgcgcggccatgtccacgagtccgccgacaatggcacgctctgggacgaggatttctccgacgcgctcgtcaagctcagcaagctgccattgccgcccaaggccaagggcgagatccgccgccattgccgccgcgtcaacacccaccactactgattcttcatcctcatcatcccaacatcaagccttccatcttgagctctcatctgcatcctcattttcaataattctttgtttcattattcgcatggttggttcatcatcgtcgtttaattttgtgtatcttgttcttttttttgatttgttggtgctcgtcgatctcgtgttgaattggtttaattttgtgttgaattctacgcgcatgtgtatgtgagaacaccagtacagcgagaattcatggtgtatagtagcttttgtgttgttgcattctctgtctattggtgtcaaaaagaaagaaagttaattagttgttgttttttttttttggtatggtttggattggatttgtattcatccatccaaaactttctccattttcatgtaataaggagggattacagaaagatcgatatatggcactggccacttcaattatgttccaaaaaaaaaaaggaaaaannnnnnnnn

SEQ ID NO: 390217 - DNA, 944 bp, Oryza sativa
ccccaccacagcaagcgcaacggaatacgaggcagacgcgcactgatggaggagaagcgcacgcagccaccgcgagatctcctcacctccatctccatctccatctccatctccggcggcgagatccccaccgaatcggatcggatcggatcatgggggggaaggagctgagcgaggagcaggtggcgtcgatgcgggaggcgttctccctcttcgacaccgacggcgacggccggatcgcgccgtcggagctcggcgtcctgatgcgctccctcggcgggaaccccacccaggcgcagctccgcgacatcgccgcgcaggagaagctcaccgcgcccttcgacttcccgcgcttcctcgacctcatgcgcgcccacctccgccccgagcccttcgaccgcccgctccgcgacgccttccgcgtcctcgacaaggacgcctccggcaccgtctccgtcgccgatctccgccacgtcctcacctccatcggcgagaagctcgagccccacgagttcgacgagtggatccgcgaggtcgacgtcgcccccgacggcaccatccgctacgacgacttcatccgccgcatcgtcgccaaataatttgtcatttctggttttctcccctctctccctctctctccccctctcaggatccacagtttgacacataataactctctcttgcttgtcgtttccttacctatcatgtgatctctcctgatttgtgctttgcttgctctctattttgtgttttcattccggtgtgatttggacaacctagggtttggataatggtgtgattaatcgattgatggatggatctgattaatgatgctttgcgtttcgctctgttcaatactgcaatgtaaattgtggatctatctatcattcaaaatatgtggatctggcttattatcggaaaagaaatgacgtgatttgtggctt

SEQ ID NO: 390218 - DNA, 581 bp, Oryza sativa
gcgggcgacgcgtccgaatgtaccaagcaggaatttgaaaggcttcaaaatgagaagggtctttgtaggatttgctacgagggggagatatgcatggtcttacttccttgccggcacagaacattatgcaagacttgttctgataagtgcaagaaatgtccaatctgccgtgtgcccattgaagaacgcatgcccgtatatgatgtttaaacttcgctaactcagatgaacgttacaaatttgtacatgttggttgtgcaatgtcgcgccatgtagtctcaatcacaactttaagctgattgaggtttgcacaagttcagaaaggtttaccgaatatggagaaaatataaagcatatcatgtctaaccaaaagcatgaaaaggtagttgatgatcattttgccggttacaattatgtactgtaagtatgtcatcggtggttttaactttttttttttttggtgatcgatagatgctccagttagattgtgtagcatcttctcaagtttatgcattgtctgaatgtaaataagaatattgtcttgtttgagtgttgtagtgctctttggttgagaagagtag

SEQ ID NO: 390219 - DNA, 760 bp, Oryza sativa
  unsure (1)..(760): unsure at all n locations
tttnttttttttantatagtatataggagtatgtttgtttggtcgatctcgtcaaacacgaaaccctacgaaagacgcatctttccacaccgaaacccagtagaaaatttgggctgttgtatgctacactgtttacaattttcctctcttgaaaatacacatgttgagggtagtagaaagccttgattttgtgacttcactcaaaaagaacatttgatacaacatacatttcctaaattcctgataccaaactcaaaattaaaaaaaccggtcacctaagttataacctctcgatggcaatgtgctcctgcagttctggtgttgtacatgtatttcgtaatattttgcaactgttgaatatactccagttattttcgcaaaaacagttgctgccttttgttgggtagctccaccaggcaaaatatccaatgaagttccattatagttttgttggctatgcaggtctctgtgctgcaaagtgacctctaccgtctgtcccggagatattatgccgactgctggagagacctttagccatgcaggaaaagcagagaaatgtgtgctgggacaaatttggtgcttgtccaatgatctcaaaacaagcgatgacttctgttctggttttgcaatttcacaacagatggattccgatcttgcaagatgatgttagaattatttatatttaccccacgggaatgcttcaagttcctgaagcaaatgcaccactttattatttgagctcattagctccacatatttc

SEQ ID NO: 390220 - DNA, 603 bp, Oryza sativa
  unsure (1)..(603): unsure at all n locations
attttcccagtcacgacgttntaaaacgacggccngtgagcgcgcgtaatacgactcactatagggcgaattgggtaccgggccccccctcgaggccctcctcttcgctctcgcaagccaagtcgcaatccccccaaaccctcgccgccgccgccgccgccgcctccatgccgttcaccccggggccctactccggcgtcagaccctcgccctcgtggctagggcgtccgcgctcggcgtcggcgtcgtctacggcgccgtcaagctctccatcctcaaggcgacaaaacctaacaaaaaggaggcggcaaatgcgcatcactgaggacaggaacgcgtggcggtaactccaacggaaggatgtcataaattctcattgtaccccctcgtctatacgtgcacctggtttatgatttgtggacctcttttctgaaacccagctgctgggagatacaattaatcttagttttgcttgctaataatttctcgatcaaatgacttgaaacgaagaagggaaaaagatgatcccattttgttttgaactcggtgttagaatttanggccactggaagctatnttgcagttgaaggtgaatttaggcct

SEQ ID NO: 390221 - DNA, 412 bp, Oryza sativa
gcggccgacgcgtccgcccacgcggccggccatgacaaataactgatgatgtcgacgacaactcaatctgcacaatggctcatattttgtagtgactgactacaaacggtaggttgggtatctcatcttatctgtgcttactaagttaccactactactagatgcactctactctgcattgtgttaggttatctcatgcctagatcactactttgtactaccactaagaaacctggatgtaaattatgtacgctaccattgagactgtactgcattatgtaattctgttcagaaacaatgaaaaaaacacccaaaaaaataaactatcatgtaatccttcggcaccttgatggaccactttatcgtaaaaaataataaataattataaaatcttaataaaataaaaattaat

SEQ ID NO: 390222 - DNA, 816 bp, Oryza sativa
  unsure (1)..(816): unsure at all n locations
ccacgcgtccgcgagaacgcgctgctggagttcgtgcgggtggtggaggcgaatgagcatgtggtgggcggcacgctgcaccacctcacgctcgaggccctcgaggcggggaggaagaaagtgtacgaagccaaggtctgggtcaagacccgtggcctcgatttccacggagctccaggagttccgcaaccactggggatgcaaccaccttcaccaacgccgacctcggcgccaagaaaggtggacatgagcctgggtggcgtgatgttccagtacatgatcctgtagtcaaagatgctgcagaccatgctgtgaaatcaatccagcagaggtcaaactccctgtttccatatgaacttctcgagatcgttcgtgcaaaggcagaggttgttgaagattcgcaaagtttgacattctgatgaaacttaagaggggaaacaaggaggagaagttccaaagccgaggtccacaagaaccttgaaggggcatttgtactgaaccagatgcaacaagagcatgatgaatcgagcagccagtgaaccttgccacattaagctgtagttatgtagtttgtgttcaataagaaaacagtgaacatgcacccttccgtttctatcgggacataggctggaacttgttcctaacatcgatgaaaagaagacactacactatccttttgttcctgttgctcttagtgtgataatacgatactggtcgtgtaacttctcaagggaaccgtgggtctatgccatacagcttgtgaatgtgaaatcctatgttgatacttctcaagtcnnnnnnnnnnnnnnnnnnnnn

SEQ ID NO: 390223 - DNA, 494 bp, Oryza sativa
  unsure (1)..(494): unsure at all n locations
acccttttactgctccccccatcgaatcgaatcgaatcgaatcgaatcccctcacgattccaccaatcctccgccgccggaggaggaggccagggaatcgccgccgccaatgtcgctgccggtggcgaagctgtgggacgctggcgctgcggacgctgtccaagcccatcgccagccgcctcaagaaccaggccgccgtccaccccaagttccgcaacttcatcatctgcatcgcgcagattaaccatcgtgttactacaaggatacaaaggcgcatttatgggcatgcaacagatgtggaaatcacacctttaaatgaggaggaagctgtacaagctgctacggatctcattggggaaggctttatttttttcgggttgctgtttgctggcttttaatttttgagggtgcaaaggaaatgccagggcagaggcttagggaaggcaggaagctcgtaaacagggancttttagggaatttnaaccaacggggaa

SEQ ID NO: 390224 - DNA, 1087 bp, Oryza sativa
  unsure (1)..(1087): unsure at all n locations
gccagaaatggatgggtttgaagccactagaaggattagagtgatggaaagagatctaaatgagcgaactcctatattggcgatgacggcagatgttatacaggcaacacacgaggagtgcctgaaaagcgaaatggatggctatgtctccaagccatttgaaggggagcagctgtacagcgaagtagcgcggtttttccaaaatcatgaccaagttgaataggaaggtttatatggaatgtaaattggtggaggatgttgccacgcaccgatcacatgccatggcacagaattttgtccaagatgctgtgttcccaagagaatgaagcacaaaaggtgtcgagatggaaccgcccatgttctgatctgtagtacaccatctgacctgggggcaaaattaactgcgcaattacatgagaaccagatacatgtgcagcaaaggtactcaaacaatttcttgaagtcaaggcgtgtgaaaatggcagctgcatattcactaactgcagaagaagcagaagtcgttctcgtagatgccctctgcctttgtaatataaacgtagggagagaaaatttttcctgtcttcttttttttttcctcgggaattttacggtgtacatattaggtgttggtgatatgtgcaggcaattccttggtatatttggatgtgttttttttttctgcaaggtttgtggaagctgtaaatgacacaattcaaaggtgaagcctttggtttcttccattgacatttttgacaagaatattgatgccgtcggctctcggctgttcttttgcnnnnnnnnnnnnnnnnnnnnnnnnnnnnnnnnnnnnnnnnnnnnnnnnnnnnnnnnnnnnnnnnnnnnnnnnnnnnnnnnnnnnnnnnnnnnnnnnnnnnnnnnnnnnnnnnnnnnnnnnnnnnnnnnnnnnnnnnnnnnnnnnnnnnnnnnnnnnnnnnnnnnnnnnnnnnnnnnnnnnnnnnnnnnnnnnnnnnnnnnnnnnnnnnnnnnnnnnnnnnnnnnnnnnnnnnnnnnnnnnnnnnnnnnnnnnnnnnnnnnnnnnnnnnnnnnnnnnnnnnnnnnnnnnnnnnnn

SEQ ID NO: 390225 - DNA, 535 bp, Oryza sativa
ccacgcgtccgaagcaatcaatactggaatgcgagatttaatcggttacagacatatttggagagctgtgatcggtcaactcaggagggttatatgcgaatgcttaggtccctctcggcggctgatcgaagcatgcatgcaattgatctggagaaaagggcaattcacttattagtggaggaagggaaagacctgcaacggatgaaggctttgaatgttctgggaaaagtttcgccaaacggtccttcaaaacaggcccctttgtagcgacaggaccaagaacgagatggatggtgtaattcgaagagctgaaatgttcaggggtcaggtccatcgcagcaaagactatggtctactcatgtagctccatttttccttgggcctcctttgccatgtaactcattttccttcatttctttctgcttttacctctcggcgacttaccaacctcatgtgctgtgagattgctgtaatgttatgtaattaacttgtatggataaacctgccatgcttaatggccaagcgtgcccatttc

SEQ ID NO: 390226 - DNA, 801 bp, Oryza sativa
tgcttatgggcgcttgttttgtctaatcctgatttgcctgagaggtttgaaatagatgctcctctcacaaaatacaacagagagactttctacatctctgatccagttattggatacactgactacccatttcttccatcagatgtctaaatgtgcctttcagtactcgaattctcttccgcctctcatcaaagcagctcagcagccaccatttgtgttgttacttggtaggattgaagaaatatggccattgatctgaaagctgtttttcatgtgtgtgggcaaagcattgataaaataatgtgacattgtgatttcagcacggcacatgaatacaaagggagatgataggtagatcaagcagtgttgagaaattattttagtttgtatgcacaaatattgtgagcctgatataatatcagggagcttgcctgtcttactttgctctcaaatatgttctcagtcattcacatggttgtcagcgactgcaaatcttttacgtattcctgatatgtgtcactgactgagagatgggagtacagttggaataaaaagtggaagttgaatgtaaaaaaaaaaaaaaaaaaaaaaaaaaaaaaataaaaaaaaaaaaaaaaaaaaaaaaataaaagtataaacataaaaaaaataaataaataaaggggggctccctttaaaggtatcaatctttatttaatggtccgtgccatataaataaatatgtaataacgtgtagctaaattaaattatctctggactttttttttggggcggcgttttttggtgatacacattttttta

SEQ ID NO: 390227 - DNA, 793 bp, Oryza sativa
gaaatctcccgtcccgtggtctcctgacgagccgcggctgaacaggggaggaggcgccgatctccatccggcgagcagagcagagcaggggatcctgtgacacgtaccaaatacaaagagcccacaaaggcactaatctactggcctaatctatccaatccaggaggcaacccagcctggtaatatattggatcggtgcttgaggttgagggggaagcaaagcacgatcgaccaggaaccaggcaggcagccaaggtgaggaaggagaagaagctgagagcctctccctgcttagacgtccctgtgcagcggcctgggagtttcccagcctgctctcacctggctggctagatccagcggtcatccctgccacgaggaatgggcctgtggacgttgctggagggctttttgcttctcgcaaatgcattagcgatactaaatgaagaccgctttcttggccccagaggatggagcatgtctgaagtctcaggaaatggacaaaccaagtcactgaagggtcagattgtagggctcatctatgccacacagttcttgaggatgccgttgatagcgcttaatgttcttatcattgttgtgaagttggtatctggctgagactgcaggtttcagttctggggtttgatttaatttctgttacagcgtaatgtaaaagtaatcacagtaaagattgctgcagttatgttaatttgtctctaatgtatgctgttactgttctagtaaattaattctgagccgcaaactgtttctttggcacataaaaaaaaaaaaaaaa

SEQ ID NO: 390228 - DNA, 485 bp, Oryza sativa
  unsure (1)..(485): unsure at all n locations
aattcggcacgagctnggtcttcgtgatgtaccggagtacaaagctcctgattacaataacaaatccaccagtaaagccaaatctaagaagagcgagagcgagaaaaganagatgaaagcataaatctgtaaccaagatcgtcttcacctctccctccctgcggccttgaactgcatggccggcaaggttgatgatcgaaaatacagacgctctgctcgaaatggggttgatccattctctcagtgttgctcgaaatgggttcgatccagtctctcagtgctgtatcttttgtagtaataacaacggattgttaatcccctttctcatttttccctttttggtagcaatgtttcttattttttcctgagaaggtgcacccatcctgtaacagctacatgtgttttttttatagagttgagttctcccattctacttcctgggagaacgggattgatcattgatgaatactaataacttctcttaa

SEQ ID NO: 390229 - DNA, 712 bp, Oryza sativa
tccgaccgaaaaactgctagagaaagatcaacattctatgtctgatggagataatctttacccggccatcagaagacagaactatcccattaagtgttatagctgagcgcactaagctttctatcagtgatgtggaatatcttcttatgaagagcctctcggttcatcttatagaggggataattgatgaggtggacagcacagttcacgtgtcatgggtccagcctagagtacttggaattccacaggtgaaggccttgcgcgagcggctggacgcatgggtcggaaaagtgcacaccaccctgttgtccgttgaggcagagacccctgatcttgtggctgcataacttatcgacccttcctttcgctatacggccttggtcaccaaggctgcggtgcgaaaagagagatgatctggctgtggtggctgtagttttctgggtgatgaaaacatgttgccttgaacgtttccctggcaccctattgatcaggacctgtaatttcatttctctttaaatcctctggacgttgaggcctggagctatcacggaaaagatacaaacgggccaaaagtttcataccggcaagatgttatcgtagttcttttagtcaaatttagattgtaatgcagaggatattttccccttttatttttacatggatgcaggaaactctagctgattcccgttgtgttaaaaaaaaaaaaaaaaaa

SEQ ID NO: 390230 - DNA, 685 bp, Oryza sativa
gctttagccgggcgtcagaagacagaactatcccattaagtgttatagccgagcgcactaagctttctatcagtgatgtggaatatcttcttatgaagagcctctcggttcatcttatagaggggataattgatgaggtggacagcacagttcacgtgtcatgggtccagcctagagtacttggaattccacaggtgaaggcgttgcgcgagcggttggacgcctgggttggaaaagtgcataccaccctgttgtccgttgaggcagagacgcctgatcttgtagctgcataacttatccaaccttccttttgctatatggccttggtcaccaagggtgcggtgcgaaaagagagatgatctggctgtggtggctgtagttttctgggtgatgaaaacatgttgccttgaacgtttccctggcaccctattgatcaggacctgtaatttcatttctctttaaatcctctggacgttgaggcctggagcttgatgcattgatcacggaaaaagcacaagcggatcaaaagtttcataccagtagggtgtcattgtagttcttttcccagtgtgatttagattgttactcagcgggtattttcatattcttttcctcatatatgctggacatggatggaggaaaatcttactgattttcgttatgttgaaaaaaaaaaaaaaaaaaa

SEQ ID NO: 390231 - DNA, 799 bp, Oryza sativa
cgctattcggccaccaccacaccacagagagcccgagagccctactccccttctctcctcttcttcctctcccgcaagcaaagcgcacgccgcctttgccttagatctcctcgactccgccgccgccgccggcgcctccccacggtccctccctcgccatggagggtaacagtaccaacctcgatgcggcgatagagtcgctcctcaacgtggagaagcagatgaggctggccggcgatgtcgccggcacgaggaaggccgccatcgacatcgtcgagctctgctacaaggccggcgcctggaagacgctcaacgatcagatcgtggtcctctccaagaggaggggccagcttaagcaggctatcactgccatggttcagaaagcaatggagtacattgacttaacgccagacatggacacacgtattgagctaatcaagacgttgagcagtgtatctgctggaaaaatatatgtggagatagagagagcaagattgatcaaaagacttgcaaaaatcaaagaggagcagggacagattgatgaggctgctgatttaatgcaagaagttgctgttgaaacatttggctccatggcaaagacagaaaagattgcattcattctagagcaggtccggctgtgcttggatcgtcaagattatgtacgcgcacagattttatccaggaaaatcagtcctagggtatttgatgcagacccgtcaaaggaaaataaagaaaccgaaagaaggtgatcatattgttcaggaaggcccagcagagatacctttccttcttggaactg

SEQ ID NO: 390232 - DNA, 768 bp, Oryza sativa
  unsure (1)..(768): unsure at all n locations
ccacgcgtccggtttttgtacccttattttctctaatgcgttttagtacccttatcaataatggtaccctcatcaatgtatctgtgctgctactagcttctgaactagactcttacttcccccttccaggagagagcagccagagcacaaactattcctgaaaacaccatcaggtgggtcatgggcccaaagggccccgtggtttcattcccggaagaagtaggccttcccagcatcttcaactccaagccttgcaactaccctcccccgcgagagaaatgtgccggaccatcatgcacgaacgcataccggtatagggactccaagctgaatctccctctctgcagcctgaaatgctacaaagccgtcaatggcaacgcttgattgacgggacgctcgggccgtgcctatttcccggtttcgcatcactctgatctatatgttccctcaagaagcattctcgtctatatactggtggaataagataggatgatcatcagccgcggagatgcacatttttggttgagttgatagaaagatacagctgtccaataagtgcatatacatgtgtatcatgtatgcatatttacatacatatagatttgtcaacctgttttcagggcttgtgagcagatgtactgctgctgccctctgatacctgtattgcagatagtagacatatacacatatgaaggagcagaaatgtagaataagttgttgtaccaaagttccttgtgtttgttcnnnnnnnnnnnnnnnnnnnnnnnn

SEQ ID NO: 390233 - DNA, 679 bp, Oryza sativa
  unsure (1)..(679): unsure at all n locations
cgcgtccgcccacgcgtccgccaaccttctgggacggcgccgtcctcgtcgcgccgatgtgcaagatatcggagaaggtgaagccgcatccgttggtggtgacgctcctgacgcaggtggaggagatcatccccaagtggaagatcgtccccaccaaggacgtcatcgactctgccttcaaagaccccatcaagcgcgaaaagatcaggaagaacaagctgatctaccaggacaagcccaggctgaagacggcgctggagctgctgcgaaccagcatcagcgtcgagcaaagcttgtcacaggtgagcatgccgttcttcatcctgcacggcgaggccgacaaggtgacggacccggaggtgagccgtgcgctgtacgagcgcgccgccagcgccgacaagaccatcaagctctacccggtgatgtggcacggcctcaccgccggcgagccggaccacaacgtccacctcgtcttctccgacatcgtcgcctggctcgaccgccgcagccaccgccaggacagggcgagcattaccccgccggcggnctgcaccgacagcgccgccgccgctgcggcggacagcccagggtcgcctgagccgccgcggcaaggcgccgccggcggtttcctctgcggcctaaccggccgagcaaatccccagcattgtaggatgtaaaa

SEQ ID NO: 390234 - DNA, 725 bp, Oryza sativa
ttctagttccaagaaaattccagttatggaatgggaagtctcgaaagttttggaggagcttgaactcactatggaccaattcattgacttgtgcatcctatctggatgtgactattgtgatagcattaaaggtattggaggtcaaacagctctgaaacttattcgtcaacatgggtccatagaaagcattctggaaaacataaataaagacagatatcagattcctgaggactggccttatcaagaagctcgacgcttgttcaaggaacccaatgttacattggatattcctgagctgaaatggaatgctcccgatgaggaaggtcttgtagagtttctggtgaaagaaaatggtttcaaccaagatagagtgacaaaggccatagagaagattaaatttgccaagaacaaatcttcccaaggaaggctcgaatccttcttcaagccagttgttagcacatcagcgcctctgaaaagaaaggacacttcagaaaaaccaaccaaagcagtcgctaacaagaaaacaaagggagccggcggaaagaagaaataagttcgattgtgccattcatcaacaagacctcctgcacgtgtcatttcaattttaactcccatgtttgcaacgtcatcctccatcatgatgttttctatgttcctagtaaaccacaagtccagaacttcgtctaatactagttcatctatgtagtacgtcccccttctctact

SEQ ID NO: 390235 - DNA, 928 bp, Oryza sativa
tcgctcccaccgtgttcttcctcctcccagatctaagatccgtggaccgaccgagctcgagctccaccacctcgtctccaatggcggtcaaggtctacgtcgtgtattactctatgtatggtcatgtcgccaaactagctgaggagatcaagaaaggtgcttcatctgtcgaaggcgtggaagttaaaatatggcaggtccctgaaaccctctcagaggaggtgctgggcaagatgggcgcgccgccgaggagcgacgcgccggtgatcgcgccgcaggagctcgcggaggccgacggcgtcctgttcgggttcccgacgaggttcggcatgatggcggcgcagatgaaggcgttcttcgacgccaccggcggcctgtggcgcgagcagagcctcgccggcaagcccgcgggcgtcttcttcagcaccggcacccagggcggcggccaggagacgacgccgctcacggcggtgacgcagctggcgcaccacggcatggtgttcgtcccggtcggctacacgttcggcgccaagatgttcgacatggcggcggtgcacggcggcagcccgtacggcgccggcacgttcgccggcgacgggtcgaggtggccgtcggaggcggagctggagcacgccttccaccagggcaagtacttcgctggcatcgccaagaagctcaagggcgcctcctccgcctgaatcatatacagaattgttacagagatcattcgcattggctgcctgtgctgatttgatccgtgttcatatgccggaattaatctttaccgattcgttacacaaagatttggttggatttggttgtgggtttgattctacgtactgtgcttgtataaacttgttaagttgattgtgcactcccatcgatattataccatcacataatctatattaaaaaaaaaaaaaaaaaa

SEQ ID NO: 390236 - DNA, 643 bp, Oryza sativa
  unsure (1)..(643): unsure at all n locations
gcccacgnntccgcccacgcctccgaaagcgtaaagccatctactagtaccaagtagaggaaatagctcaaggctttggaacgcaagaacatcaccatgaagagcagcactctcttggtgatcctggctgtccaggccgctcttatcatgggaatctttgctgctgttgcaaaagaaaatgccgtgggtgagagcaaggcgatcgacatcaacccggggcagctcaagtgctgcagcaactgcaacttctccttctcggggctctacacctgcgacgacatcgtcaagaaatgcgaccctgtctgcaagaaatgcgccgtcgtcaagacctaccctgtgaggatgttcaagtgcaccgacaccttcctcggcatgtgcggccctccctgcaagcactgatcgatcgatcgatcgatgatgacctgaataatgcatgaacgcgagccattgctgtcatatatctgtgatctgtgtgatatacagtgtgcattatatatcatatctcgatgctagtatactgtatactcgaacaataagccgttgtctgagtgaaggaccaaataaaaataatgaagctagaaggtgtctgcatgttacttgggagacttgtgtttcccctggacttgagagggncatgagaaca

SEQ ID NO: 390237 - DNA, 576 bp, Oryza sativa
gcgacgcgtgcgcacaaacgcctataagctgtagctgaaatcttgatctgtgtagctccatggagtcggccatgaggaggaagatggccgtggtggtgatgtcggtgttgatgatggcggcggcggcggcggcgaactacgcggcggagccggaggaggactgcgcgacgcagacgacctacttcaccaactgcctgaggcgcgggatcagggaaggctgctgcggggtggtgaagaaccactggtgcctgtgccaggtgaagcgggaggcggaggtgaaatgcatccccgggcgccgctgcgacgtgcccaaggccctcaagatcgccgacatggacctcccctgcatgagaaacctcaggtgcagcaagcacgcctgatataaccaaatctgctacgctatatccaacttaattagatgcctactgcctccaagttatgttactctgtttgttactgcatcctatgttttttttctagatgattttgttgaagcaatcaatcccaacctgatgtatactgctcatggtcctatatattattattatggtcggctccggatctcatattcacgat

SEQ ID NO: 390238 - DNA, 697 bp, Oryza sativa
attcctgggtcgacccacgcgtccgacaaccctctgtgcagcaacgtaaatttgctcagttggacgaggagaagcgtctgcatatgggtaaatcagaatatgagaagctactgaaggttccatcggatggaaaggcggctgccagtgaaaacgcaagtgatgatgaaaagaacagaaggcctatcagttctcttgtagaaaatgcacttggggtggccgacaaaagcaaatttaagaagaaaagaccaaagggaccaaacccactctcctgtaagaaaaagaaaccaaagccccaattgtcagctgctcaaaatcaggggcccaaagctgatggggaggcaaagcgaaagagagttaggaagcggaagagaagccacaaagatagcaagcaaacggaaacaatgagctaagaaagatgagctgcaaagttaagaaactctcgctgcatatccagaggcagagctaggtggcacaatgttttgaagatagaaatcatactgatctcatggtgtgccactcattgagtcggctgcgttctttgaattgtaatgcttgattgttcacagatatttatgatagatccgtataggatgtatctggatgtcttcttgtagcagttgatgcaacactgtctatcaaatggaattcatggtgctactgctaatctgatagaatcccctattgggttcaaaacaaa

SEQ ID NO: 390239 - DNA, 748 bp, Oryza sativa
ccacgcgtccgatttacggcaataagtaagcgtgtagctttcataaagtctcatatgctgtcagtggggcatccaacagagaagaacacagatcctgattctagcatatctgaccccttgctcaaacatgtccccgaaatcacgcagcctgtaacaaatgggctaagcacagactgcaaccagcatcaaacggacctcgttgctaatacagagcaggacttttcagctgtatcagttgttacctctgaagaaaagattgtactatctagcaacgataatgttatcagtacaaagtctgttgctggatcaggctttgcagcacaaggggatgtgaacatcaatggatcactggacactgaacaagaacaatcatccttgacagggcaggaggaaccagaatcactgaagcagaactgtgatatcaaagacaagctgaaagaaccgctaccaacctgcagttcgcgccagtttttccctcctggaagaattattcacatggttgcaatggcctcacctgacccaaatcctggtgagggatccagcagcaatgagatcattagcatttatgaaacgccaagagatttgtatgggaaaataaggctagctccaaacatgataaaggagcattacatgcctagttacataagcacaatggaatcattattggaacagctgctcaaagacgataatgtagatacaataacaaatgatttgtaaattatgtaaaaactcaataaattattaatcc

SEQ ID NO: 390240 - DNA, 613 bp, Oryza sativa
gcgaggctcgcctaaaaaaaaaaggaaagaaaaaagaaaaccgtgcggcgccgctcgtccgcccgccgctagcgccgacgtcacctctctcggccactggtgctccggtgcgagctgctctgcgcggcgccgccacctgaatcggatcggaggggaggagatctcggccgagcagaagcggcggcggcggtgctcgcggaggagggagtagcagcagcagcagcatcgcaaagagggggaggaacagccatggatcccgacgcggtgaagtcgacgctctccaacctggccttcggcaacgtcatggccgccgccgcccgcgactaccagaaggaaattgtagctaaagagaaagcccaagcagcaagtgcaagccatggatgaagttgatcttgacgaattattggatgacccagagcttgagaagttgcatgcggagagaattgctgctctcaagaaagaggtcgagaagcgtgaagtgctaaaaaggcaaggtcatggtgaatatagggagataactgaaggggacttcctaggagaggtcactggcagtgaaaaagtcatctgccatttctaccaccgtgaattttaccgttgcaagatcatggataag

SEQ ID NO: 390241 - DNA, 634 bp, Oryza sativa
  unsure (1)..(634): unsure at all n locations
ccacgcgtccgcccacgcgtccgtcctcctcctcctctagggtttatccatcggcgactacgcggcggcggcggcggcggcgacggcgagatggtgcagcgcctgacgtaccgcaaaaggcacagctatgccacgaagtctaatcagacgcgggtcgtcaagactccaggtggcaagctcgtgtaccagtacaccaagaagagggcgagcgggcccaagtgccccgtgaccgggaagaagatccagggaattccccatctcaggcctgctgagtacaagagatccaggttgtctaggaaccgcagaactgtgaaccgtccctatggtggagtgctctctggaactgcagttagggaaaggatcattcgtgctttcttggttgaagagcagaagattgtgaagaaagtcttgaaaatacagaaaaccaaggacaagtcagcctcaaagtagacaactcttggaagtggaagcaaggcgatgtgctataaacaaggaaaacatttttgttgatggtgatgatcaatggtctagcctcttctagctgaatgttttagtataactgtctgagtttggagtacttgaaatccgtctaccattgtgatgcactngatgncaaatgttgctgagacatatt

SEQ ID NO: 390242 - DNA, 719 bp, Oryza sativa
  unsure (1)..(719): unsure at all n locations
cncccacccacccacccagcctcgtttctagggtttatcgcggcggcggcggtggcgagatggtgcagcggctcacctaccggaagcgtcacagctacgcgactaagtcgaaccagaccagggtcgtcaagaccccaggtgggaggcttgtgtaccagtacacgaagaagagggcgagcgggccgaagtgccccgtcaccgggaagaagatccaggggattccccacttgaggcctgctgagtacaagaggtccaggttgtctaggaaccgcaggactgtgaaccgtccatatggtggagtgctctctggaactgcagttagggaaaggatcatccgtgctttcttggtcgaggagcagaagattgtcaagaaggtcctgaaaatacagaaaaccaaggacaagaccgcaaagtagagctcctttgtaagggttgcacaatgctgttttgtacacagtgaagagtatttttgatggtggtttatgttggatgatgtttagcatgtgagagacctaccttttgagtttagggttttcaaatcctctcatcttataattgtcggagtattgggacatctgatccccttgttccttaattatgaaatttctgtatgaactattgggtactagtcgaattcacctacatgttagccatctttttatttgacttaattcactcccttaaatgatttgtggttgttttactcaaaaaaaacaatn

SEQ ID NO: 390243 - DNA, 605 bp, Oryza sativa
  unsure (1)..(605): unsure at all n locations
ccacgcgtccgcccacgcgtccgttccaagaaaagaagaagagaagaatctgaaaaactttaagccgctatgggtctgcaggaggattttgagcagtacgccgagaaggcgaagaccttgccggagagcactagcaacgagaacaagcttatcctctatggactctacaagcaggccaccgttggagatgtcaatactgctcgtcctggcatattcgcccagagggacagggcgaaatgggatgcatggaaagctgttgaaggcaaatcgaaggaggaagcaatgagcgactacatcaccaaggtgaagcagctcctggaggaggctgctgctgcagctctttaagaagttatgaactctatgctacatggcttctgtcagctgaacaactctatgctaatctggttgctgacaacttaccattctatcaattcgggatgtgaactatgtacctctttgtgtactgttgcataatttatccatctatttatgaagactattagtcctatgaatcatattatcttgtaatctttcatctctctggctgtgtactgcacaatagaaaaataatggccgtcaagccagttacatgcccccntttcaag

SEQ ID NO: 390244 - DNA, 1085 bp, Oryza sativa
  unsure (1)..(1085): unsure at all n locations
gcgacccactcaccatcccaaggcggcgcgacgacccatctcgccgccgcgaattctctctccggcgaattccaactcgaaccctgcctccgccgactccgctcacgagacctaaaccctccttccctctcctctcgtgtcgttcccaccaccatgctgggcgtcgcgaggaggcgcctcggatccggatgcgcgctggggcaactcatgcaggcgctccgaccggccgccgccgccgccgcggcgaggacctactccgccgccgccaaggagatgactgtgcgtgaagcatcgaattctgcccttgatgaggagatgtctgctgacccttctgttttcttgatgggagaagaggttggagaataccaaggggcatataagatatcgaagggtttgttagacaaatatggccctgatagggttcttgacacaccaatcacagaggctggttttactggaattggtgttggtgctgcctatcaaggtcttcgccctgtggttgagttcatgacatttaacttctctatgcaggcaattgatcacatcataaattcagctgccaagtcgaactacatgtcagctggtcagataaacgttcctattgtttttagagggccaaacggtgctgctgctggtgttggtgctcagcactctcagtgttatgcggcttggtatgcgcatgtaccaggattgaaggtcctaactccttattctgcagaagatgctcggggcttgctaaaagcagcaatcagggatccagaccctgttgttttcttggaaaatgaactgctctatggtgaatcattccctgtttctgcggaagttcttgattctagcttctgtcttccgattgggaaggctaagatagagcaagaaggaaaagatgttacaattaccgcattctccaagatggtcggatatgctcttcaggctgcagagatactttccaaggagggaatcagtgctgaggtgatcaatcttcggtcaattaggccattggatagagctactatcaatgcatcagttaggaaaaccaacagattggtaacccttgaagaaggatntccacaacatggggttggcgc

SEQ ID NO: 390245 - DNA, 575 bp, Oryza sativa
  unsure (1)..(575): unsure at all n locations
ccacgcgtccggccatgcggccagtcacagaccctgttgctaacctctttgatcggatgctgtgtgcgaaggtctagaccttctgaactggccctcccagtctcagatcctgcaaaggcatcgagaagaagggagcgtggcgaaagggttcttgaggaaaggttggctgcagaccatgcagcagactcggaagccccagctctgggccattccacagcagaagattaatatagctcgtccactgtcaacacaccatactgcgataggaagccacggccacctgcctatgtgctttgtaacaccgaaaatttgtgttctggagaatgcaattcagtttacaatggaccaatgatacgatattttactctcttttcttattatttattggttaaattctgttgtagttgattacagtgaaaaaagaaagaaaaggatgacatccccatccagatgtaatgtagaaagaattgagactttgtgaggattgctgttgagaatattttccaagtgaactgtgactttgagtcaataatagggttcatatcagcgagggacgcccnnnnnnnnnnnnnnnn

SEQ ID NO: 390246 - DNA, 500 bp, Oryza sativa
tgcccaaatccaccaaccgtcctccggtctgtcctgttcttcgctcgatcctccaatttcctctcccaaatcatctcgagtagtaatcagtgtattttgttgcttatttcgatcgatctcatcccaacctgttcgatcgtcgcctccgccgagttttgctgctcgatcggatcggtcaaagcagcacaccggcccggcaagccatggagctgacgctgctggtgttcgtcctcgtcgcggccttctccttcgtgatcggcacggccgtcaccacggcgccggcgccgccatggccagcggcggccttcgccgcctacctcttctgggtcgtcgcctccgccgccgtcgccctgttcgtccgccgccccgccgcgtgaacacacacaccctcaccaactccggccggccaaactcaactcggatcgagatccagtcagggattctaacccttcacttactacctactgcttcgtccaaaaaaaaagataaaaaactttaat

SEQ ID NO: 390247 - DNA, 702 bp, Oryza sativa
tcaagatcatgatctacaaggtttaccccgatggcaccacggctctgccggagtgggagagggaggccagcatcaggcaattctacggtgtcatcttcccgtcgctgctccagctgccgagtgggataactgaattggacgacaggaagcagaggaggctgtgccttcagaagttcaggaaggtggaggagagggtctcggaggtggatttggagagggagctcgagtgcggcatctgcctcgaggtgaatgccaagattgtgctgcccgattgcgcgcactcgctgtgcatgagatgcttcgaggattggaacaccaaatcaaagtcgtgccccttctgccgcgcctgcctcaagaaggtgaatccgagcagcctgtggttgtacaccgacgaccgcgatgttgtggatatggatacgttgactagggagaacattaggcgcctgttcatgttcataagtaagcttccacttgtagtgctccatgtggttgaccttgacatttacgagtaccgtatcaagtgaaactgtactcttttgttcataccggtgggtctctgtacatatcaaattcatcggtgctgatctgtgatagctcaacctgaggctgcaaattagcagagttgtttgtagctcaacgagttgataatatttttgtgaaaagaagatgctgaagtgtactccaaaaaaaaaaaaaaaattg

SEQ ID NO: 390248 - DNA, 932 bp, Oryza sativa
gacagatcatgggagcccattaattatctcgcacaatggtgctagtggagactacccagactgtacggatttggcttatcagaaagcggttgatgatggcgccgatgtcattgattgttccattcagatgaccagtgatggagttcctgtatgcatgagttcaattaatctgtttgagaccacgaatgttcagagaacccctttcagcaatcgtgcttctatctttaaagatattcagcctactccaggaatcttcacattcaatctcacttgggctgatattagcagtagcgatttgaggacccaagatatcttccccagagagtatatattatcttgtaaggaacccagtgcacaaaaatgcgggaaatttcttcaggttatctgactttctaacatttgctaaggataaagatttgtctggcatcatgatcatcataaagaatgctgtatttatggcaaattcattaggatttgatgttgttgattctgtaaccaaagccttaagtgatgctggctataataatcaaactaccaaagccaaggaggttatgatccagtcagaagatagtgctgttcttgtcaacctgaagcagctggaaaccaaatacaagcttgtctacactctcccatcaactatcggggatgcttctgcttcctcactggtagatgtgaagaaatttgctgatgctgtcattgttgacagggaatctattttccccgagagccagggctttatcatgaaggaaacaaatcttgtgaaagatctccgttctgctgggctagctatctatgcacaggtgttccggaatgagtttgtatcaccaccttgggatttcttttcagatgtaacagtggaaatcaatagctatgtccagtcagttaatattgatggcatcataactgattttccgaaaacagtcagaagatac

SEQ ID NO: 390249 - DNA, 1017 bp, Oryza sativa
aatatagaagttcaataatgctacaagataatatatgagttctctttatcctttgctatgcaagatgcagttgctggtggtgcacctatatttgtgggtagatgataatattaattttggatatcttggatctattgcttggaagctttaactttttaacttacattattgcttatacttttccaatgacaatcatttctttgctacactgtttcccattcaaaacacatggacagttgtggctttttaggtgagggattgtgctacatgatgtctacataatatattcatagtctcaggatatgcatgtttatttgtgttaggaattgttgcattgcccctaatattctgttttgaaagtggatacttaaatattttttaactgtgtttctaattaccattcacattttgacggccatatgcaggatgttctatggacctggtggaccttatgcgctattcgctggcaaagatgccagcagagcactcgctaagatgtccttcgagccccaggatttgaccggtgacatctctggtcttggcccatttgaactcgacgcattgcaggactgggagtacaagtttatgggcaagtacgtgaaggtcggtaccgtcaagaagaccgtccctgttgaagatggtgccccaagcacttcaccagaaacaactgaaaccgccgctgccgctgagccagagaaggcgccagcaaccgaagagaagccgagggaggtaagctcggaggaagtaaaagaaaaggaggatgctgttgcccctgctgcccctgatgaaggccccaaagaaagttagacccccccagtaatccccattgcagcaaataatttgtgtaattggatgtgcaatctgcactagcacataggacctggaagctggaggtgctagtgcttattattattagttgttactgggagtattagacatgagatcacctggggtttattccccttttgttaagtctctgttaataactatatgggtgaataatatagctcccttttt

SEQ ID NO: 390250 - DNA, 698 bp, Oryza sativa
cggacgcgtgggcgagacctcgaagctgtgaaaagaccagaatacccctcatccccaaaagccccaaacccgaggaggcgagaggaggaggaggaggagctcgtcggcggcgagcgatggcggcggcggtggcggagctgtgggagacgctgaagcaggcgatcgtggcgtacacggggctgtcgccggcggcgttcttcaccgccgtggcggcggcggcggcgctgtaccacgtcgtgtcggggatcttcgcggggccgcccccgccgccgccgcggccgagggacgagcccgaggcggagccgctcccgccgcccgtgcagctcggggaggtctccgaggaggagctccgccagtacgacgggtccgatcccaagaagcccctcctcatggccatcaagggccagatctatgacgtcacgcagagcaggatgttctatggacctggcggaccttatgcgctattcgctggcaaagatgccagcagagcactcgctaagatgtccttcgagccccaggatttgaccggtgacatctctggtcttggcccatttgaactcgacgcattgcaggactgggagtacaagtttatgggcaagtacgtgaaggtcggtaccgtcaagaagaccgtccctgttgaagatggtgccccaagcacttcaccagaaacaactgaaaccgccgctgccgctgagcca

SEQ ID NO: 390251 - DNA, 1241 bp, Oryza sativa
ccacgcgtccgcggacgcgtggggttccgttggccagtaatgcatcaatagttagctcagatgtatcacagactgaatggactagcttacaagatgatgttgcttcagaaaatttagagaagtttgatattgcaccaacagtagttccggtcaatgaacctgaagcaacttcttcatctaagcctcccataattactcttgagaaagcactctcgtttgagatccgaaattcccactttgatcagcccagccctacatcagttcttgatgcatcatttgaggatgctagtgagaagtcacccaattcatccgagcacgcaattatcgctaaacaagaacctctatcaagatctcttcctattggatcaatcgcgcggactttatcatgggatgattcttcacaagaggctacattgtgttcagccaaaggagatagccacgaacaagatcaacacgaatttgtcgaaaagattctatcttctgttgggttcgacaacgaaaagaccagcgatattttcgtgcggtggcattcgcatgatttccctctaggcaccgccgtgcttgaccagttcttgggaacccaaggtggaggatcccaagtgcagggagagccggtcaaacccagaggctcctccatcgattccgtcaatgctgccctactagacatcggcccaaagcaagctttggggagcttacccttgcactgacccacaagttaacaatgcacggagagttgccacaggcgaggtgctggttgttgatgaggtatggaggttagtgaaaggctggctctcggacgatgatggcgagaaacatatggtcaatgcggaggacaatgcggggttagtggctgattgggttgtcggcaaggagattcaaggcaggtcatggcccgaagcactgcggttggaggtggatgaaatcagcacggagatatgtggggaggtcctggacgagttggttggggaggcattttcagaactagttgggtgtcattgaagctgaattttattttccctgcctgtggtgtccacctattgcttttatttccaatctggtggagaccaaggctcatgtgcactcccctgaggctcttactcttgtgtatattgccctcattactgctctgtatgctcaagatgttcccactccctctctgttaaatgtcactgccattcatacattctacagcaataacgtttatgaatcgatacagctgcattccaaaaaaaaaaaaaaaa

SEQ ID NO: 390252 - DNA, 465 bp, Oryza sativa
ggtgttcgtccggtggccgaacgcaacgccgggggcaacccggccggcgaggcacctggtcgggttcagcagtcagcatgtcagggcggggaagaaggcaaggttgacgatggagatcaacccgtgcgagcacctgagccgggcgagggaggacggcacgaaggtgatcgaccgaggatcgcatttcctcaaggtcggggaggaagacgacgagtgggagatcagcttcgacgcatgaacgacatgagaagccgattaaatccgggaatggattagtgctgcaattgattctttccgatgatttattataagttgttgttgcgtaactaaaattaattaatttatcttgtaattcggatgggtttgcctctaattaaagaaaggaggcatttgtttagaaattaatttaaggtgtaataatcagctatgaaaggataatttattggtggaaattagaaggggtaa

SEQ ID NO: 390253 - DNA, 471 bp, Oryza sativa
  unsure (1)..(471): unsure at all n locations
gagccgagcagccggcgngcganancnaacgccttcaaccgaacggacggcggcggtggcggcggcggcgtggacagcgacaacatggacgaggacgacgaggatgactacgacgacgatgacgacgacgacgacgacgacgtcggcggcaacaagatgcagtacgagatccagttccagcatcagcaccaccaccagcagccgccgcagcaccgccaccagcagagcgtccgtcagaccgaacgccgccgcctccgcggtcgccggcggcaacccgcccggcaccgccgcccccgccacggcggcggccgcaacgacgaccaccggatctttcttggcaatggtccagtgatccatccatccatccggtgactctctctccttcctacacatgcatacctccatgcgcgtcaatggcttcttcttcttcttcctcctccatctcttgtaccatttgtatctacctacctg

SEQ ID NO: 390254 - DNA, 676 bp, Oryza sativa
ccacgcgtccgcccacgcgtccgaactggaattgcctactgcttccgtcactgttggggacgacctctatatccttgaccatgttgaggtcggaaacgtcccctgcttccatgggctcatttacgaggatagattaaatgaggactggtgctgctgcgctctcccgccgccgccgccactgctgtcccacaagtctgacttccaagtcgactcctatgcggtggttggtgacacggacatctggatatccacgcacgatagtggcatctattgcttcaacacagtgagccatgtgtggagcacagtggccaccggctggaccctgccatttgttggtctcgccgagtattgccaggagcacggcctttggtttggcctctcacacactagagacaggaggagcttggtcctctccgctttggaccttgatagcagccatctgccagtgcttctcagccttcctctggagttcacgccacccgatgccctcaagcttgtcagctcataccttgtgaacctaggctctgccaagttctgcatcgccaggttattccagactgatgaggaccagcgtgatggcgaggagctgtttgcagtgttgaccgccgtcgaggtggaacgctgcgatgacgacgatgctggtgccaatggtggagggctccgcatgctgaaacac

SEQ ID NO: 390255 - DNA, 615 bp, Oryza sativa
  unsure (1)..(615): unsure at all n locations
gcgggcccggattccggggtcgagcgcacgcgtcacgcgtccgcccacgcgtccgcccacgcgtccgggtttcacgctggggttctgacccgaactcgctgggttcctactcgtgcgacctggtcgggaagccggccgacgtgtcggcgcggttcgccgcaccggtggagaaacctctacttcgcccggcgaggcggccagcgccgaaccactcggggtccgtccacggcgcctactcgtcggggatcgccgccgccgaatgagtgccggaagcgcatcctgatgcagaagggcatccctgacctcgtccaggtcaaggcctacgaggagatggccggagtcattgctccccttcagatttgcaggacctgaaaaaactgaacctgctccaccctgccattgtcatggaatctggattgattcaattgccatgcctatgccctggaatcttgatgattcaatcactcatacaagttcaagttcatgtaggggattaactgcatgaatcaaaattattaattaataattatgtaattgtcatgttattattgaataaataaatcgagatcatgcttgagatcttnnnnnnnnnnnnnnnnnnnnnnnnnnnnnnnn

SEQ ID NO: 390256 - DNA, 468 bp, Oryza sativa
ccacgcgtccgggtaccagtagcaaattgaatgatagggcagaggtgtctaggaaggacaaagctaggggttcagagctggaggatggaaatgatttgttcccatcatggcattgaagagcctaatgaagaatcaatgcaaggcattgtaatggaacaagaagaattaagtgattcagaggaagatagccagcatgtcgaatttgaacgtgaggaaatggatgattctgatgaggaccaagttcaaggtgtcgaccccttgctggctcaaaataaggaggtttcaacatcagttggttgtggggagtatgaaggcagtaataatcagagccagaaccaacaaaggttagtacaggtgggtggtaaacagggtgcagcaacgcggaaaccacagaggctttctaatgccagaccagcaagagaaaagctgaagggggataatgcgaaacgtccaggatctagaacaacc

SEQ ID NO: 390257 - DNA, 646 bp, Oryza sativa
aaatgttgagaaggcttttgtcaagactgctggagcaatatacaagaaaattcaagatggtgtctttgatttatctaatgaggctaatggaatcaaacttggttacacggtcccgggccaatccggaggtgctggttcctcgtcttctcaagggggtggctgctgcagtagctaatggaacgatatactcgggtgtctatcgtgtgtcacactgccacttacccttggaatcatcttcttgatgctgactgaaacgtagttgctccagtgttaacatgccaaaagactcggttcatttatgtctgctgtgcataaacagtagtctctagatttttttttacagcttcatgccacttggcatctaggaattcttattgtctgcatgtgtaattacaatagcaatgcatggtttgaatatttggtcctttgaaagagccgacaaagtagcaataacattcaagagcataaggcacttgttcacgaacaccaagatcatcggtatgcgcggcactggcctaacaggtgatgcatggtgctcactattcctacctaggattgaggcagatgtatcacgtttcaaatgggactacttgatgtccaggggcggtgctgcctactggagatggtacaatgcacagggttaccc

SEQ ID NO: 390258 - DNA, 725 bp, Oryza sativa
ttttcacggacaagcaagtgaccccacaggtcagccatgatggccaagttctggaattcgctcctcctcgaagactgaaaacagaggagatcccaaacatcgtcgacgactttcgtattgctgccagaaatgccatcgaggccggtttcgacggggttgagatccacggcgccaatggttacctgatcgaccagttcatgaaggacagcgtcaacgaccggaccgacgcgtacggcggcggcatagagaaccggtgccgcttcgccgcggaggtgatcacggcggtggccggcgagatcggcgcgcaccgcctgggggtgcgcctctccccgttcgccgactacatggactgccacgactccgacccggaggtcctcgcgctgcgcgtgatcggcctcatgaacaacctcggcgtcctctactgccacatgatcgagccgagaatgtgcgtcggcgccggcgaggacggcagcaagccggtgatcgcgcacggccgcctgcttccgttcaggaaggcgttccggggcacgttcatggtgaacggtgggtacgaccgggacgaaggcgacaaggcggtcgccgacggctacgccgacctggtggcgtacgggcggctgttcctggccaaccctgacctgccggagaggttcaggaggaaggcaggtctgaacaagtatgacaggaacacgtgctatacctttgatcctgggtgggctacacggact

SEQ ID NO: 390259 - DNA, 434 bp, Oryza sativa
ccacgcgtccgggaggatgaagaaatggaaaaggctcattctgttgctgtttctgctggcgatacagaggccggggatggagtaatccggcggtatgtctctttctcctgtgttgatgatgaaatttttgaacttgatggagggaattcgcagccaatctcccatggcccttcctctcctgatagcttgttgcaggacgctgcaaaagtcatcaaagctaggattgcgcagtaccccgggtcactcaatttcaatgtcatggctctttcaaagcagtgatgaaatcatatcctggtagaaaggttttattattcacaccactcttttccagtctgcaataatcttgttcatgatgtccaaatgtactcagcaattgacgagacagaacagtgtttgcatctactatctgacaatctcaaaaaaaaaaaaaaaaa

SEQ ID NO: 390260 - DNA, 1496 bp, Oryza sativa
  unsure (1)..(1496): unsure at all n locations
cttgatgctgaggtttttgttggtatggtccaggatgacggaggaggcgacgagcggggacgcatcgccgccgaacgtgaagacgatgagcctcatcgcgcggcaggcgttcgagatcgacgagtacgtcaggatctccgacatcctccacaagaggtgagcgatggacgtgcctagcttgcctctcttaacgaagccacccacacgcacgctgcgtttgtgatctgctcgtttgttggctgatcgattgattcgggggcgggaaatcttacaggttcgcgaggttcgacaggcggcagtggcgtgaggcgtacaaggccctcctcctcctcgagcacctcctgacgcacggcccccgtagcgtcgcgttggagttccagagggatcgggaggtcatcgagcagatggtctccttccagcacatcgacgagaaagggtccgtttcaattcttcgtcccgactcgatcatatcttctcctgatgttctctcgcccttctttctcatcaccgatggtttcttcttgaatccgagttgcagtttcaactgggggatgacggtgaagagcaagtcggagcgcgtgctgaggctgctggagcggggccccttcctggaggatgagcgtgagcgtggcgcgcaagatagcgcacgaagatcaagggattcgggcagcttcaacctcagcagcgcgcatgcgtcggggtcggcgccggcagccctccgcgcggcggcgatggagcaccagtgctacggccggagcaactcgcggtacgagggcaggtggaggagggaggcctgcgtggacgacggcgacaaggagaacctgctggtggtgtcgatggccgaggcgaaggccgaggcggcggcggaggagccgcaaccactcccaccacccgttctacggcttcgggcagcagcggccggaggcgatgctgctcctgagccagtagtgatcgtttgggtggatggttcttcgtcgatcgcatcgttcgttggtttgtgatgcgtgagaaaaaatcctgtaaagtcagtggcttgctggcatcctctttgtgatgacccttttgtaatcgtcgtccttaatttcagttctgatttctgaaactctaacaaatgcntgantccctgaagctcataaacacacgnagaaaggaaattttgagaagttggaagcttcaagctggcaattncaggcaaatacacctgacatgaatccggacaggtacaaggatcgtgaaaagacatgcgaatggatgaaccgatgcagtgaaattctctctgctatactccagagtccagaatgtgatatgctgaactgatcagaancagacctaggcctggtttaggtcgtgtttgggaaaagtttgggaagaagttgatagtttggaaaaaaaaagttaggagttatatgtgcgtaggaaagttttggatgtgatgtgatgtaatggaaagttgggatttggngggnnnnnnnnnnnnnnnnnnnnnnnnnnnnnnn

SEQ ID NO: 390261 - DNA, 777 bp, Oryza sativa
gcgacgcgtccgcggacgcgtgggcggacgcgtgggcgcggcggcggcggcggacgcgccccggcgcctgcgccggcgacggggggggcgatccggccgtctgccgtccccgccgcccagcaggggccctacaccctcgagatgctccccaaccccgccggcctctacggcggctacggcgccggcgccggcggcgccgcgttcccgcgcaccaaggacgagcggcgggacgacctgttcgtcgagtcgctcctctgctagtcgagcccgagccgagccgagctgagctgggccccacatccccctgctcgccacgtggcgtattttcgcctcgccgtatacgtacggccgtatagcgtacgtatacacgctcgcacgccctgcccaacacggcaataccacacataccatactctcgtacacacgtagtagcatacatatacagtatagtaggtggttagtggtagctagctagggagtgagatccaatttgttgattcgttgcaggccactgccacgtgggccacaccggaaacagtacacgcgtatacaccacacttgggatacgcgtacgtacgcacatgtacacgtagttttgtgcctttgtaactgctgagagacaggtcaaataagactgatgaatttttcatttcttaaaattccactcgtgtgaattactagtagtataaatatctatacatgatgtttttacaatctgtaccgaactgagaaagaggaaaaaaaagagagagatttttttttaaaaaaaaaaaaaaa

SEQ ID NO: 390262 - DNA, 473 bp, Oryza sativa
  unsure (1)..(473): unsure at all n locations
acggacatcatcaagagccgggtcaacaacaaagatgtcgcaggagtacgggaaccacctgctcgggggaatgctggaggcgtgggcgccggagcacggggagagccagccacaacttagtatggacgagatcatcgccgagtgcaagacattcttctttgcagggcacgacaccacctcacaccttctcacatggaccatgttcctattgagcacacatccggagtggcaggagaagctcagggaggaggtggcaacggagtttgacggcaaggtgcccaccggtgacatgctcaacaagctgaagctagtcaacatgttcctcctcgagaccctgaggttgtatggccctgttgcattcatacagaggagggtcaacgccgagctagactncgggggcaatcacggtccctnagggcactgtcctatcgattccgattngaacaatccaccgngataaggaagttttgggc

SEQ ID NO: 390263 - DNA, 909 bp, Oryza sativa
  unsure (1)..(909): unsure at all n locations
ggcgacgcgtgcgcccactcgtccggcaggacaggttcctccccatcgccaacatcanccggatcatgaanaaanggggtcccgggcaactggaggagcggcgaggacgccaangagaccatgcaggagtgcgtctccgagttcatctccttcatcaccagcgaggcgagcgataaatgccagagggagaagcgcaagaccatcaacggcgacgacttgctgtgggcgatggccacgctgggcttcgaggactacatcgagcccctcaaggtctacctgcagaagtgctggcagatggagggtgatagtaaattaactgcaaaggctggtgatggctctgtgaaaaaggatgtacttggttctcatggaggaagcagttcaagtgcccaagggatgggccaacaagcagcatacaatcaaggaatgggttatatgcaacctcagtaccataatggggatgtctcaaactgaagataggaccttttcatgcaactgttgctaggtggattttatttggtgctgcagtcgttagctaatatatatacctacacctcatggtgagcagtgaaggaagtaacttgctaccacctctaggtcccatgtttgtcaaccaggaactgatgctgcttggaagcgtcgagccaaggctgcttctcagatgtaaattactccccgtgaggatagtttcggttcgtggtctagctctgttgttgtatgtatattcaggataatttaacaattggtctttggctgtcattcggttccatataatctgtattgggaggcataaatattcatgttgtatttcgtcctgaactagcgtgttgtactattgagaaatagatgctctctgtaatggtagcaattttactctgattcccattcnnnnnnnnnnnnnnnnnnnnnnnn

SEQ ID NO: 390264 - DNA, 780 bp, Oryza sativa
agcaccctggtgtcaccgtaacgctgaaccggttcaggccgagtcgcgcgcagcccgcgaggaggaccccccaacaaggacgacggtggaggcgttcaagtcgaaggccgcccggccgaaggacgggtcggtgcggttcgacgagcggcccgcgcagagcaaggcggaggggatgaaggcgatcggctcgctgtccatgttcagcgtgttcgtggtggggaggatgcccccgacggcgccgctggtggagaagcccgacgagctgggccccgtggggagctacctggcgtcgccggagttcaggacgtcggcgtcggtgctggtcgtcaagaggtacgacccggcggcgaacccggcgagcaagaggtacgaccccaaggcgaggccacccgccgcgacggaggaggacgccctcgacgagctcaccggcgccgccgttgtcccggtggcgcattcaccgatgaaccacgacattgtatgactttaatttgctcgtcgccggccagaattattatactaccagtattattatactaccagtagtagttcatgtttgatgattcacagaaaatggtagcgatatatgtttgttgtgtgtgtggagtgttatactgatgaagtgtatataataacatcagtcgtttttcttgtacgcagtgtgcagccttcgtcgaattaatcatgctgctagctgctttttgcgttatccctgttcctttttgacttgtttttcaaagtattgctgtcaaacttttataaatttgattgctaatacgactg

SEQ ID NO: 390265 - DNA, 456 bp, Oryza sativa
ggcacgaggttgcaaacatcaaatgatccaaggtttcaattacttatgcagcagaacgtgccttcccatcaaaatgttggatttgcagaaccggttctagatgcattcaaccctatgaatgataattatcttgcatcccgacttgtacctcagaacgcaggggtctctatcctcttacacacagatgtcactccaacaacctagaagctcacatcttacaaatggtcattgggagggctggggtgatttgagacaagggaataatgtttccatgcctgacatgtcaaggatgttatatccaactgaagcaaacaacttccacatgctgggttcaaatgatctggataacagagcttttggactgtgattatctttgggagaggcgacttgacctatcacccagctaacttgcacatttctcagttcttgaaattgattggttgcacaggctcaact

SEQ ID NO: 390266 - DNA, 1032 bp, Oryza sativa
  unsure (1)..(1032): unsure at all n locations
ggccgcgcgtggggcctcgcctcgcctcgtctagttgagcagccgcgacgagcacggcggcgacgacgacctccgccgcgacgatggccgcgcgcctcctcctcctcgtacttttcgccgtcgtggcagcgcgcgtaggcgcagcggcggcctatcagcccggatctgctgaggggcacacgatcgcgggccgcatcaagatcgatgctgcaagtgcaattgcaaagggctttggtcttccagccaagacatcaaacacaaaagtgatacttaacggtggtcagagggttacatttgccaggccagatggctactttgcattccacaatgtgccagctggtactcatttaattgaggtctcctcattgggctacttattttcaccagttcgggtagacatcagtgccaggaatcctgggcacattcaagcagcattgactgaaaacagaagagttctaaatgagcttgtgttggaacctctcagagaagagcaatactacgagaaaagggagcctttctccattatgtcacttttgaagagccctatgggtatgatgcttggttttatggtcataatggtcttcgttatgcccaaaatgatggagaacatagatcccgaggagataaagcaagctcaagaacaaatgaggaactcccctgttccatccttctctggcctattagcaagagcaaacagctagacatactacacggggatactgcatggtttaagttaagtttatgatgggatgaagagcagtactgaacaccacacttgaatagaatctttccctagcacaaggtggaaactctttctccatttttattgtactttaagatgtaataggtttgtgggggtagaaccttctgaatctaactgaagtagcgatgcattattgaattattatagcccagactgagttaagtgtgttgaattttggatgttcgtatatttcacgccttgttgaatcaactatagctatactcatacttgatgttgaaaannnnnnnnnnnnnnnnnnnnnnnnnnnn

SEQ ID NO: 390267 - DNA, 525 bp, Oryza sativa
ccacgcgtccgggatgagagatgctcaaagttgaagatatacccaatactgcagaaggtctttcttgaaaggattttgaggaaaccagaaattgaagcatttgcagaggagctgagaccgcatcaaaaagctctgttaccagataagtctactgtgcttgaccgggcaatgattgagcataacctccttagtgccagtaaactttacactaatatcagctttgatgagcttggagcattattgggcattgaccctaggaaggctgaaaagatagcatcgcgaatgatttatgaagataggatgcgaggttcaattgatcaggttgaagctgtgatacattttgaggatgacactgaagagctgcagcagtgggaccaacagattgccggactgtgccaagcgctgaacgacatttctggacagcatgtcaagcaagggaatggctattcctgtgtgagctcttcaagtgcttcgatggtactcgtgagaactgtggtcaccgcgtcaggcctcacggacattttg

SEQ ID NO: 390268 - DNA, 562 bp, Oryza sativa
ttcatgagtgtgtgcagcaagtatggagtttctgggtacccaacaattcaatggttccccaaaggatccctggagcccaaaaagtatgaaggacaacgcagtgcagaggcccttgctgaatttgttaacactgaaggaggcactaatgtaaagctggcaaccattccttcaagtgttgtagtgcttggcccagacaactttgactcaatccgtcttgatgaaaacaaagacattcttgtggagttctatgcgccatggtgtggccactgcaagcatcttgctccgatatatgagaagctggcttctgtttataagttggacgatggagttgtaattgctaaccttgatgctgacaaacacaaagacttggccgaaaaatatggagtttctggctatcctacattgaagttcttcccaaagggaaacaaagctggtgaagattacgatggcggcagggaggtggatgactttgtcaagttcattaatgagaagtgtggtaccagccgtgaaactaagggccaatttacttcaaaagcgtggctcataacaagttttgatgccc

SEQ ID NO: 390269 - DNA, 663 bp, Oryza sativa
gcctgcatgcgcagttcccggatcgaccgacgcgtccggacaatggccccttccaaggtcagcgctcgcccaccccgagcagaagccgccgccgccgcccgaaaccctcgccgccgtcgcttctcctcggggcgcagccatggtggccgcaaagaagacgaagaagtccacggacaacatcaacaacaagctgcagctcgtgatgaagagcggcaagtacacgctcggctacaagaccgtcctcaggaccctcaggaactccaaggcgaagctagtgatcatttctaacaactgcccacctcttcggaagtcagaaattgagtactacgctatgttggccaaggtcaccgtccaccatttccacggaaataatgtcgatctggggacagcctgtggtaaatacttccgtgtttgctgcctcagcattattgatcctggtgactcggatatcatcaagaccacgggtgagcagtaaggatgagcggttccgctggcgcttcagatgctgtcacactgagctgttctagacattgtagttgttgctggacttgatttggtctctctcgtgtatcgaacagcttttaccagtcaaccaaagtttcgtgggaacattgttcttggattggaaaattttgttcctggccaaaaaaaaaaaaaaaaaaa

SEQ ID NO: 390270 - DNA, 549 bp, Oryza sativa
gttctagatcgcgagcggccgctgatctcagaactacgtccgaaaaacctcgcaaaaccctcggccctcacccgccgccgccgccgtcgcctccaccggtaaacggcagcatgagtcggcaccctgaagtgaagtgggctcagaggattgacaaggtttacataactgtacaattagctgatgctaaggatgctaaggtcaatctggaaccagaaggtgtattctctttctctgctacagctggaactgatgggaacttatacgaatcaaagctagagttgaacgacaaagtaaatgttgaggagagcaaaataagtgtaggtgttaggtccatattctgtattgtagaaaaagctgaggccaaatggtggaagaagcttgttcgagatgatcaaaaggcaccacactttgtgaaagttgactgggacaaatgggttgatgaagatgatgatggtgctgatgtcaacgtggatggaatggacttttcgaattttggtggcatgggtggaatgggtggaatgggcggaatgggtgatatgatgggtggca

SEQ ID NO: 390271 - DNA, 574 bp, Oryza sativa
cgcacgcgtccgcggacgcgtgggagcaaattgccgctccattccagccatcaagaacaaacagctttgactccgggtcatgtgatcagctcatacagaatttcatttctcagttttctagcaacgaaggagttgcggtgccactgtccccacgcaagtgggtcaagatcagggcagcgctgaagctggcatctgtgggtaggctctccagagcctcgagaaaggcttcgcatcgccccccagcaaggccaaggcttgtcccaatagtatgagcctggtgaaaacaggttgtaaaaaatttagatcaaagatcgatcttggggttgatgcagaagttctagagacatctggtcaactgaaactaatgattttgtcaaaaagttaggtgtatgtgatctgtacatagtagagcctgcttgtacttcatttagtgttagtatttcccagcagaggattctgacctctttgttatctctgaatttagaaccatgtaaacaaaaagaccatgtaatgtattccttttttgcacctaatgatccttgagagaaatttccttttaagaaaaaaaaaacaa

SEQ ID NO: 390272 - DNA, 468 bp, Oryza sativa
cacgcgtccgcccgtccgctcactcacacgatagcaagaagctagcttggttgctcacattgagctcaacaatggaggccaagggagtggtggtgatcacccttgtggtcacacttgcggcggttgcgagggcggcccgcccagaagaaaccaggccgggcttggcccgccgcgggtcagcatcctcaccgacgactcacctgcacttctacttccacgacaaggtgagcaagccatcaccgacggcagtgcgggtggtggacccggtggacccgtcatcgcggtccttctttgggatgatcaacgtcatggacgatccgctgacggaggggcccgagcccgagtccaagcccatgggccgggcccaggggctgtacatgggctcagaccaggccaagctgggcttcctccaggcaatgaacctggtgttcaccgacggcacctacaacggcagcgtggtcaccgtgc

SEQ ID NO: 390273 - DNA, 506 bp, Oryza sativa
gacgcgtccggatacccagcaactctatcccccaggcttacctccgaacccagcaaccattgcagcaacttggtctgatgcagcagcagcttcagccagcgcaagcctggcagcagaccaatgcttggtggccggcgcagggcggcgccgccgccgccgctgcgccggcgagcatggtgcagcagtcgcagtatggtgtgatacccaacagtaataacagcgcgcaaagctatggttctgggagtgtgggtggaatggcatggagaccgagatagaacctgttctcccttgaaatttatgctggttttacaacctgcgagcgtccgttgtagggtggcttctctctttctctcttttagttcagcgattcaatgtaagcatgagtcagtcgtgtacacccgtacaggggatgtaatctggataaactagagatagttgtgggttgtattcataatcgtaggaaaagaaattttaaatcttcgtttcgaacaaaaaaaaaaaaaaaa

SEQ ID NO: 390274 - DNA, 457 bp, Oryza sativa
gacgcgtccgaatttgcaaagtgggaaaaaatggcacggaatgcacgtcaagggctttgggcatatgataaccttaagaagccatgggaatgaagaaagaacaagaggaaggcatcgcgacatcacaattcagatgtacgttgatggactctggtcacttggatgatgatcttatctgaaatgacataatttggaattggatctatggttactggacagttagccccagttgagtatgtataaaagtatgatgtactttgtatatagtaagattattaatctcgatctgtattatttataaactaatatttgagtgaagaatgtgtagatgaattatgatatgataccgcttttcaattaaagcggtgaaagggtctagtactttttaactagcttgccttgtttacgcaacatgtagctacataaatactacgggttaattcgttaggattgcagc

SEQ ID NO: 390275 - DNA, 622 bp, Oryza sativa
  unsure (1)..(622): unsure at all n locations
aaccaaacggcggcaatgagctcttgccatcacctttcttcctccatttccaccgcaagaggtggcacaaggaaggcgaccatggccaagttcgtcagagctccagtgcacagctgcagctgcagcaccgctcacctctcccaaactgcagcacctgccaagatggtatttgaagaccaggtgagaggagtggtatgttacagagatgataaggggaatatgatctgcgaagggtacgatgaagggcctaggcttggcatgcggctgccggagaaggcctgcttcccatggcctatgggggttcaagtcaccgatttcatcgagctgtcgacgcttcgagttttcgaagacgtcgattctctgcagcccatgaaagatcagaaggggaagctctgaaataaggtttctgaaattcagacatacaaggcctaagaattgctacatgaataagctgaaactctatccattttcatatatactcattatcatttcttgctgataaatgagttttaagtattgttcgtctcaattattaactggatccttctggattccttcagcacaatgctagaacatcgaatttctgggattgtttcaaattgggggaaatancttattcatt

SEQ ID NO: 390276 - DNA, 726 bp, Oryza sativa
  unsure (1)..(726): unsure at all n locations
cgtccggggaagccgatcaagtgctcatggggcaacaaacctaccccacctggtacatcctccaagccatgggcaccggcacttccttcatatcaacccgtaccaatggcaggtgtgccacaaggtttctcggcagctgatatcgtagcatatcagaggcaacttaccttaagccaggtcgcagctgggcagattgctggccagcatggccttgcaggtcaggtatccgcagggcttcttgctgctggctcccaggccctctacgacgggtacccgaaccagtcaatccagcgcaacacgcttatgtactacaactaggtgcttaaggaggaggaaggcatttgtagtgttcggcttgttcggcgcaagcctggccttcctctttcggttcctattttctggtttctgtactatttgagtgagtgctcctcttccggttcactgcttgtcgcggaattgtgttattatcttcttattattgttgtactattgaccattttcttttctaatttggtcgaagtagttctcgccttaacagagtaacagatgtatttgatggaatgtgaatttgcgattgatcaatgtaactctcctgatgcccatctgagtattgattattcaccttgggcaaagagggctagtctnnnnnnnnnnnnnnnnnnnnnnnnnnnnnnnnnnnnnnnnnnnnnnnnnnnnnnnnnnnnnnnnnnnnnnnnnnnnnnnnnn

SEQ ID NO: 390277 - DNA, 643 bp, Oryza sativa
gacggatggacccacgcgtgccatcacgcatacgaggagctcgattagcagaggtcaactcagatgctgcatttgatgcttaataggagaccacaggtctataccctgaaaatggagggaatttgcactgttttactgcaaggacagcttgtgctgtgcttgacgtgatgggacccccgtacaaccgcgcggatggaagggattgctcatattacgacgaatccccagacttgagttcatctggtggagatgcacggtactcgtggctcaaagaaaatcatagtacgttcgagatgaaaggtgtacagatgccacaaaggtttatcgtttagaaatgacatacagcatcattttgtggcaacacctgcaaccatttccgccgaagaatggtcctcctctagcttgctgtagatacctgtaactgcaaagacaggcagatggtacaaggggagatgtggccactaagctcagactagcaaactcttgagtgacacagacgttacatttgtttggcttcttaatttggtcagggttgaacaatctcttggatttcagatactctgtcctcatatgtatctgtctgcaggcaaatggatgggatcaggacagtgttgtttggcctgacatttttgttctgaactgt

SEQ ID NO: 390278 - DNA, 647 bp, Oryza sativa
  unsure (1)..(647): unsure at all n locations
tgcgaaaacggtgcgcgcgtctcggagcagctgagcggcgaaggcgcggcggcggcggcggcggcgtcgacctcactgtcgctgatgaacacgcacgagacctcctcggacagagtggcggcaattgatctgaattccaccgaggaagatgacacggtgggcgcgtcagggaggccgtttttcccggtggttctgatggagcagcagcagcaggcttcccatggacatggtcaccaccaccactgcacgccgctcgacctggagctcggcatgtccgtctcgtcgacgccgtccatcggcacatgacccggccatgccatgcacaccgtcgtcgttaggagatgctccagtttcgtcggtgcaaggtctgcaggatatagtacacgctgtaaaactgtggctgatatatctgcagtctgatctgtctgccaagtggagtaaagggctggagtattttggcaaatgtttgtagtaattgtaaagctggtgcaagtggagagatcaacgagtagtaccaactgtggatacagtaatgtccgtactactttttaattaattaggttgtgtaatcagagacaccgattctctactgctcatgtcatgtgcgccttgtgttaaaaaaaaaaaaaaaaannnnnnnnnnnnnn

SEQ ID NO: 390279 - DNA, 522 bp, Oryza sativa
ccacgcgtccggcatcaaatcaatacacaactacaaatagcacattgatcaaatagagacaagaagctagagaaagaagaatggcatccatgaagctctccctcgccgtcgtcttcctcctctctgcggtggtggtgatgagcgccatgggcggcgcggaggaggcgaggtgctcggtggtgtgcatccagggaggctacatcacctgcgacaactacccgtaccagaagctggacggctgcgcctgcgagtgcgcgcccaaggacggccagaactgcgtcctccacctcgagcacggcccgccctccaactgcccgcctcaggcctaactaagcctagttaacttaagtaaccggggagatgtgatcagatcgatgatgatccatttccagaattaattctctactactggtgatgtgtgtgttactatgtaattcttgtgttcgtgttcgtgagatgggataaatttggttgttgaataatggaataaatggatatattgtgtgtcgctgttgtatacaa

SEQ ID NO: 390280 - DNA, 1023 bp, Oryza sativa
  unsure (1)..(1023): unsure at all n locations
ccacgcgtccgcggacgcgtgggcgagctgagctgggcgccgccaagcgccaacctgagaaggattcatctgtagggacccgaatctcatgcgtcgtggccatggggtcggctggcagcacgccgaggccagaggtctcgtttaggcatagaggggtggagtactgcaagaaggtcggcgtgagcttgaagtgccgggagccgcggggacctagcagagcattttggaccaatgcgattgggccaagttacaagttgagcttctcggttgaaccatggcttctggatttcagcacgtattgtgtggcgccatactctgctggagccacagagcatcagttgtcacttgatgaggcagtacaggataagcagatggacaactccacagtcgggcctgatggaaaaccacgtgctcctggaccgctgaagctggtctcaggttcttgctatctgcctcaccctgctaaggaggcaactggcggtgaagatggccattttatttgcgtcgatgaacaggcaattggcgtggcagatggtgttggtggctgggcagatcatggtgttgatgctggactatatgctaaggagctaatgagtagctcaatgagtgccatcaaggatgaaccacaagggaccattgatccatcaagggttttagagaaggcttatacatgcaccaaagctaggggatcgtcaactgcatgcatcgtcgctcttaaagagcagggtatccatgctgtaaaccttggagatagtggcttcatcatagtcagagatggtcgaactgttctcagatcacctgtacaacagcatgattttaatttcacttatcagctagagagtgggggtggcagtgatcttcctagttctgctcagacattccactttccagttgctcctggcgacgttattattgctggcacagatgggcttttcgacaatttgtacagcaatgagatcagtgctatagttgttgaggctctcaggactgggctagaacctgaagccacagcaaagaaaattn

SEQ ID NO: 390281 - DNA, 553 bp, Oryza sativa
  unsure (1)..(553): unsure at all n locations
gcgaagtttcagatcnnnnnngtannggttttangantatgcacagacnnnngtgttttggattttgcaagttcagctttggctgccannaacattggccgagtgcctccgctggaagatgttgtcatttattcagagggttgtgctacgtataacctcccagttgaagtagccaggagtatgcaaggaaccttggctcatcctcaggatctaatgcaccacatgggactttacatggcaaaaagcaggggtgcaaaggttgttgacagaatcattatttaagattagaggtgtaaaactaacacaagactgtaatagtgacctggatcgattatcgagttgggtttttattgctgggacgatgatcctagtgttctctttacttcttccttttatctcttcaatgtacaacaatctgacatatatttctttacttcttccttttatctcttcaatgtacaacaatctgatatatatttgcggttggacagaatactgatcaacaacaacaccacataagaaaaccagcaaggagccccaacaaaaaagaaag

SEQ ID NO: 390282 - DNA, 841 bp, Oryza sativa
  unsure (1)..(841): unsure at all n locations
ggccacgcgtgcgcccacccgtccggcttgttattaagatgtatccccaaggaagaatggctcatcattttcatnaggtgaaaggtnntnactatttatctgtgagaggacctaagggtcgcttcaaataccaacctgggcaagtaagagcatttggaatgttagctggaggatcaggcattaccccaatgttccaagtcacaagaggcaattcttgaaaacccaagtgaccaatccgaaagtgcacttaatctatgccaatgtcacatatgatgacattcttctaaaggaagaattggatagtatggttgaaacctatcccgatcgcttcaagatatactatgtattaaatcagcctccagaaatctggaatgggtggtgttgggtttgtgtcaatggaaatgatccaaacccatggcccggcacctgctgctgacattcagatattgagatgcggacctcctcccatgaacaaagccatggctgaacacctggagaatcttggctacacgaaggaaatgcagttccaattctaagcctccacagtggaacaataccgaaataacagcgatggacaacattttcgttcaccttcagtagaaattgtctgaccctagtgccatttaatcaagatataggcgaactttaaacccgataaaagtagaatgtcaggtcagcatattttgagtgaaagcaaaaaacaacacctacttgagttggggtcagaagttcctgtagcccatcatttttgtgccaatgctgttcaattccagacagacagaatgaaactaattatttttttttcaatcagaattttggacacaaaaaaaaaaaaaaaaaa

SEQ ID NO: 390283 - DNA, 415 bp, Oryza sativa
caccgaggcagcagaagaaaggaaagaatcaagaaagcttcatcgtcttcatggggaggtcaccgtgctgcgagaaggcacacaccaacaagggagcatggaccaaggaggaagatgaccggctcattgcctacatcaaggcgcacggcgaaggttgctggcgatcgcttgcccaaggccgccgctcttcctccgctgtggcaagagctgccgcctccggtggatcaacttacctccggcctgacctcaagcgcggcaactttcaccgaggaggaggatgagctgatcatcaagcttcacagccttttaggcaacaaatggtctcttgatagcccgggaggtttgccagggaaggacgggacaacgagatcaaggacttacttgggacacggcacattcaaggaggaagtttctt

SEQ ID NO: 390284 - DNA, 768 bp, Oryza sativa
ttaatttttcttgtgactgatggatctgttgaggatgaacggtatatttgccgcactgtgaaagaacagctcgcaactagaggatctaagtcccccaggatttctacttttggactaggctcttattgcaaccactatttcctgaggatgttggcatccattggcaaggggcattatgatgctgcatttgatacaggatcaagggaggggcggatggttcagtgggtgcagaaagcttcaagcacaatagtgataaatatttccattgatgccactaagtacattcgagaatttgaaggggattctgaatatattcaagatatttctgcaaaatgcccactatgtgtgtctgggagataccaaggcaagcttccagagacacttactgccaagggttacttggctgacatgagcgaaatatcgattgaattgagggtccaacatgtaaaggatatttctcttgacaaagtggtagcaaagcagcagatggatcttctcacagcaaaagcatggttttatgaaaacaatcaactagagatgaaggggggaaaattaagtatacaaaacagcattccttcggagtacacacgcactatcctacttcaaaacttcgtggaaaaaatagaacaggtatttgtcaccgaaggtggtgttttgtacatgtttttcagctatggcaacagggaaagcagaagccaaagaaaaacagcacccagaatgagcaatcagcgacgtcgctcaacggactgacgctcgggttcgtgacac

SEQ ID NO: 390285 - DNA, 587 bp, Oryza sativa
  unsure (1)..(587): unsure at all n locations
agaaggtattgttctcatcggagaaattggaggtactgctgaggaggatgctgcagccttcattcaggagagcaaaacacaaaagcgctggggttgcattcatagctggactcactgctccacctgggcgtcgcatgggtcatgctggagcaattgtgtcagggggcaagggtacggcacaagacaaaatcaaggctctcagagaggctggggttactgttgttgagtcaccagcgaagattggttcaactatgttcgaaattttcaagcaacgcggaatgttagaatagggagagcaaatggtacagtagagaaacattggaaaactttttggtgctcgtgggcaacagcgagcaattcctttgtagagccgcattgctggccgcggaactactcaaatcttccttttaccctagcctttcctcttgcttatcttcggtgtgaagatggcctacctgaggctcacttgtctcttttcaataagacaggattctcgagttatcgacatgatattttgtttggaaatggcgcagaaacctaagatgtttctagttttttttttcnnnnnnnnnnnnnnnnnnnnnnnn

SEQ ID NO: 390286 - DNA, 552 bp, Oryza sativa
ccacgcgtccggcagaacattaagcctttcccctcctccactccattcacagcttccagatggctcagcagaaggtggtgctgagggttccaaccatgaccgacgacaagattaagcagaaagccattgaagccgttgcagacatctacggtatcgattccatagctgcagatttgaaggacaataagatgaccatcatcggtgaaatggacacagtggcaattgcaaagaagttaaagaagattgggaagattgacattgtgtctgttggacctgcaaaaggtgccgcgagggaagaaaagaaagaggagaagaaagaagagaagaaggaagagaagaaggaggagaagaaagaggaaaagaaagaagagaagaaatgataaaattatgaaatatataacaccattgcatagtgtctctcccatctgcaagtgaaacagccaataccttggacttttgatcgatgttttatgtgaaattactctgtaccataatactgtaaagaacatattggtacacgtaagtaatattgcccccagttcaaaaaaacca

SEQ ID NO: 390287 - DNA, 926 bp, Oryza sativa
  unsure (1)..(926): unsure at all n locations
aacacgttcatgccgttcgggaacgggacccactcgtgcccgggcaacgagctcgccaagctggagatgctcgccctcttccaccacctcgcaaccaagtacaggtggtccacgtccaagtccgagagcggcgtccagttcggccccttcgcgctgccgctcaacggcctccccatgagcttcacccgcaagaacaccgagcaggagtgaaaaccgaacagggagacaaaaagaagaagaagaatactagcatcagctaagctggggaaagctggcaaaaccaacatcaacggcgggcagcggcgccacgcagcgcgcgcgagtccattttcgcggcggtcaccgtccggggggacacctgttggcgccgcagtgggagcgggagaccgaacggtggattccgtattagcacggatcatcagagtccttgtacagattcttcagctaggaccacggttggcaatcgagaggaggagcagaggagttgatgaaaaaaaccaaacactacgtagacatctgagctagggagcgccacaaagaagtggcccttaattgtaaaaccaaccattttttatccttttttgcttagttttttttttggccaacaactataggagaagagtagagaagagaagagaaattggggagaaaatacagggaggatgaagaggccctgattgggatgtaagctaggttgcccgcctgaaagcaggctggcatgcagatgcagctataggtcgaataatcgaggcgagcgatgatggacggatggatcgattcatcgatcgccagagtcaaaagggaagaacgtcgtgatcccccgcgggctaagccaggccacgggagagcgactcctctgtaccgtttcgtccaactcaagagaaaatgaccttcttgagaaaagtattgaattnnnnnnnnnnnnn

SEQ ID NO: 390288 - DNA, 919 bp, Oryza sativa
ttgctcttggagctttagttcatctcatagaggttggtggtcaccaattcagtgacagcgactgggaaacacttctaaagagcattagagatgcatcatacacaacccaacctctcgaactcctcaattcagtaggatttcagaaaccaaacaatcagcaatcactttcaagagaagcagagaccaacggtcttggtagtagttaccatgatagcagggaaggaggagcttcaataagtcatattgatgaacaggatggtcatcaggaaacaaatgcacagactagcctagacaattcagaaggtttgccatctccatcagggagagcacaacctgcagtttccccacggggtcagacctttggacaaagaattatggggaatatgatggacaatcttttggtcaggagtcttacttccaaatcaaaaggtcgtacagacgatattgtgccaccctcacctgtgaaggcacctgatgctgacggggctgacaaaactgacgatgaagagaatcctatgatggagactggtaggagtaaatgtatcactcaattactgctacttggggccattgacagcatacagaagaggtactggagcaggctaaaaaccacacaccagactgcgggggatggatattttgctgtcactcctacaatttgcttcttcctataactcaacttcaaatcttcgaaccaggatgcaccatatacccccagaaaggcctccactgaatcttcttcgccaggaactagctggaactgctatctatttggagattcttcagaaatcaactgtggaacatgatgggaatgacccaagtgaggatacaaatgggcacgccatagaatctgatgaacatgaaaagctcaagagcctcgcagaagggaagcttgtttcgttttgtgggcagattttga

SEQ ID NO: 390289 - DNA, 349 bp, Oryza sativa
cgcgtccgcgacgactcccgtctactacgccgccgtcggcgccgatctccatcctgctagcagaggtggcgccggcgtcctcctccggtccccgccgcaccatcgctcaccggcaatgtatattccagtgaaacggaacaagactacctacttcatacaatgtgacccaacacagaccacttttagcattaaacaaaagttgcattcattagttcatcagcctcccggtaatcaacagctgatcttcgtggccacaactgaagttggtttggatgactcaaacacattagcagatcagaaggttgaaactgatgctgttgttgcattaacactgagaaaagatgacaat

SEQ ID NO: 390290 - DNA, 812 bp, Oryza sativa
gaattaagcccctctatatctggagttagggagcacatttttactagcagaaatggtgaacatggagtagtgccatattatgtcaagagttatcttaatctaacagaggataccccgtcaactataaatctttctcccttcgcacctctctaaaatatatattttatcaggaagaatgtttgtagaactatattgatttgggtaatatttattcgtcgaatgtccaaccatttgcttgtccacaatgaatggttgatcgtattcaagatgacaaagccatatttatgcttcatagtttgagactcactatatggtgagagaaatttatgtatgcctacaagagtgccttgtatgatttttgaaagatcaccaaaatggattttcctcaaaagattcttctgtacttcaaatgctacgtgtacaaagttcgcatataatgaactagaaaaaaaatgcaggtggctatgtctagctattactatagaccactgcctaacaacatccttatcgtacttatccgcaattttcattgagcctatgcccaatcaaccgtgctttttataaacataggaagtattactgttgctttcttgccctatacatctcttgcataccacccttgagaggttctgagaatatttgcaaaaaaatattgattaaccttgccattagcaggaaaaaacaaagcaatctgaacgcaacacagattcaacaggatgatccaatgacaacagtgaacactatgggttaaggtatccaaacatagcatatgctttcatcacctactggcaacatcagtcaccttttacacc

SEQ ID NO: 390291 - DNA, 771 bp, Oryza sativa
tgccggaccggtacggacgggccgggccgccccactctttcctctgtacatcaggttaagtatggatcgcagggagtttttctcatgacttttggtcagactcgggtaggcatgcctgcttttgctgcgctcttcagggaccaagtcccgagaacaatccgtgtgacccatcagaatgacattgtcccacacttgccaccatatttttgctaccttggcgaatggacatatcaccacttctcgagagaggtttggcttcatgagaccatagtaggaaatgtagttactaggaatgagaccatctgtgatggatcaggcgaggacccaacatgcagcagatcggtctacggcagaagtgttgcagatcatcttgaatactacggtgtctcactacacgctgattcaaggggaacctgccaatttgtgattggctcaaccaacacggcttatggtaccattcttgaagttgatagaaccatcatcatgacaagatatccgcaagagtggcacgccgtggaatctatttaaccctttgcccgagggtaaattgtatataattattttccttttgtgcatatagctcatgtaatgtaggtgtactgggttctccaggagctctcctgaggataaggagaggtttcatttttaatatgtgcccccctttactcaagtgagaattgtacatggaagctccatatgaacattgtagacacgcctttattgatgtacatagcaatatcaatggaataaataatagaaggatttgatggt

SEQ ID NO: 390292 - DNA, 700 bp, Oryza sativa
gcgtccgagggttttgagatgatagagataattgtagatgtggagaactgcttacaggcttttgttggagtcgcccctgatccacaatccatactcattgcttttagaggcacacaagaacacagtgtctcgaattggattgaagatctcttctggaagcagcttgatgtaggttatccaggcatgccagatgcaatggttcatcatgggttttatactgcatattataatacaacagtgcggcatgagatcttggaatctgttcggtgggcaaggaagacatatggaaggctacctataaatgttgtaggtcactcgatgggaggggctttagcatcgttctgtgcccttgacctctctgttaagtatggatcgcaggaagttcaactcatgacttttggacagcctcgggtaggcaatccttcttttgctgcgtacttcagtgaccaagtcccgagaacaatccgtgtgacccatcagaatgacattgtcccacacttgccaccatatttttgctaccttggcgaatggacatatcaccacttctcgagagaggtttggcttcatgagaccatagtaggaaatgtagttactaggaatgagaccatctgtgatggatcaggcgaggacccaacatgcagcatatcggtctacggcagaagtggtgcagatcatcttgaatactacgtgtctcactaca

SEQ ID NO: 390293 - DNA, 887 bp, Oryza sativa
gagattgggagggctgttaatgggctgcggaagcacaactcgcagcaaattcgtcaccttgtgcgcactctcattgaaggttggaaaattttggttgatgagtgggtcagcaccactaatgttgcccttacagacaactccccgggctcttcaaaaacatctgttgtcgatgatgctgatgatgaagggcttccttctccacctctggatgaaggggcgttctttgcaacccagactactgctattcaactctctgagttctttgatgaaatggatgaagatggaaacttgagacataacaatgatgggagccttggaaataagagagaaaattatggcaggaggcctacaagccatccagctttgacaaagcaagagcctccccgtaacatgggagctgttgaaaaagttcaatccaggaggccggaattggcaaggcaagagccatcaatgaggcaggctaacccacaaacccctcaaaattcaagtttgcaagtcaaacagcaggccatgcttcacaagcaatctaagcccttgagttctgattctggacctgggagaccattaagggcagctcctcaggagaagccctttgttgagatgaaatctagactggctcgagagcaggttgctgttgaaagaaaacctgcagcgagccatgtggataaatcgaggcttcctgcacaaccttcagcaggagtcaagctagagtcggcaaagccaaagatctatgatggtttggaaagcaatagtaggctggaagcagcaaagaggaggctccaggagcgctaccaggaagctgaaaatgcaaaaggcagcgcaccatacaagtaatggagctgggcgacataccaaagcctaagcatcaaaatagacaacctatgatg

SEQ ID NO: 390294 - DNA, 557 bp, Oryza sativa
  unsure (1)..(557): unsure at all n locations
ccacgcgtccgcggacgcgtggggccggaaaaaccaaacttcctcctccagctacgtacttagtatactacaccacagctgaaatggctgcatcagtgatgatcaccaggtggcacccggtgctcgcgctggccgtcctcctcgccgccgccgccgcctcgccacccaagacgacggtctccggctaccgtcccgatcaccatgacgacgaccaccaccaccaccgccaccaccacggcggccacgacgccgccttgtcggtcaccaccgatcaccgccaccaccatcatggcggtgaagccgcctcgtcggtgatcaccaatcacgaccacggccatcaccatggcggtggcggccacggcggtgacggcgccgccgcctcgtcggtaaccgatcaccacgaccacgggcacggtcacaatggcggggncacgggggcgcccgcgcgtgttggatccaccaacgacgacacgtcgttccgctgtgccccggcggggccaccaccacggtcacggtggcggcggggcatatgggcccggtggagactacatatgcct

SEQ ID NO: 390295 - DNA, 700 bp, Oryza sativa
gggaccgcacgcgtccggaacttcaccgacctcctctcctccttccagagcaagggcctcgacctcgccgacctcagggtgtggtcaggggcgcacacgatcggcatcgcgcactgcaactcgttcagcaagcggctgtacaacttcaccgggaaaggcggccccggcgacgcggacccgtcgctggacgcggagtacgcggcgaacctgcggcggagcaagtgcgcggcgccgtcggacaacacgacgatcgtggagatggacccgggcagcttcctcaccttcgacctgggctactaccgcggcctcctcaggcgccgcggtctcttccagtccgacgccgccctcgtcaccgacgccgccgcggaggccaacatcgccagcgtggtgtccagcccgccggaggtgttcttccaggtgttcgcgaggtccatggcgaagctgggcatggtcggcgtcaagaccggctccgagggcgagatcaggaagcactgcgccctcgtcaacgacatccactactagtattatcactagctcatcgatcttcagctcctcggtgcttgataaaatttcagtagaaatatatatacatgtaacttaattcgatcgtcatcctgtttattctctctctctctctctatgtaattttgtttccaaattgtaactgtgttattttggagcaactgtaactattcactgt

SEQ ID NO: 390296 - DNA, 1026 bp, Oryza sativa
ccacgcgtccgaaaatattggcgctgattgaggcagggaacatagaaccatcagaattgattgcagatatggaaagccagatatcaaaagcaaaggaagaagcattgagtagaaaagaaatattagacaaagttgaaagatggatgtctgcttgtgaagaagaaagctggcttgaagattataaccgggatgacaacagatataactcaagccgaggtgcccacctgaatctcaaacgtgctgaaaaggctcggattcttgtcaacaagattccagcacttgttgaaactctggtggcaaagaccagggcatggcgaggagagccgtggtctgtcctttatgtatgatggtgtacctcttctagctatgttggatgaatatgtcatgctaaggcaggaaaggggagaagataagaaaagaatgagggaacaaaagcgctacatcgagcaacaactgaacaccgaccatgaagggccatttggttcacgtgtgagccctaacagaccagtcagtgcaaagaaggtacctggtgcaaaatcaaatggcagtgctaatggcactcctccgaataggagactttcggtcagcggtcaccagaacggaaggtctggaggaaaggatggcaagagggactctgccaagacagcttcccccgggaatgtagcagctgctaaggaagatgcatcctcacacatttctggcaccgatccggttccgagcacaccatgatctttaaccttatggtatattagataaagagaggccaggttctgatgtttccattgatttgtggctatataatgtattgtgtttgtagcgaggagtaattatataacgtccatccttcaggcaggatcttttgcttctgtggagtaagtggagttcaacttttgattagttccctcagctgtactatttccccttctcatcagactctgtagtatagcctttgctggtatgtattactattcgttaacctgtttgctacatgtacaagttcttggaatgcctttcccctgccctaat

SEQ ID NO: 390297 - DNA, 665 bp, Oryza sativa
  unsure (1)..(665): unsure at all n locations
aactgagttttgcatcgtttgccaatggacgaaaccctagccgacgaatccgccgccgggcggatgggcagccgcggcggagcagcgcaggaatcgcagcaagagacgctcgaggaggtgctctcgaggcataggaaagagaaatccaaactccaggataaggaaacaagcctcaagaaagcagccgctaaaggcagcaaagctgaggcagaaggccaagaagaagcaggtagaggaggagatttcacgcctctcagctgagttagaggcgaaacatgccgcagagctcgctacttttgggtacaaatcctcaggcagctcagaaaaggggaacatggacaccttagtaaaggctatagctggtgtttctgtgaccagcaacgcggattccggaacctagcaagggtgcacggcgtcgagagaagaaggcaaaggaagaggccgctagagagcagcggattcaagaagagcaaaacaatcttgtcagtgaccgcatgatagaaaatgaaaagcttgagaagaagcttgagcccatgggactgaccattcaggagataaagccagatggccactgcctgtaccgtgctgttgagaaccagctgtcactctattccagagaaaccacacaatacaattaccaggagctgcggcaatgactgccaatn

SEQ ID NO: 390298 - DNA, 1076 bp, Oryza sativa
ggaaaattcaaaatctaccgtcactgtacctccaccatctgttgttgatcgtgttatgaaagatcttttcaatgatgaggttgggaactcgaattatgtggaagcagaaaataagtatggccgcgctatgaaaggagcaccttcagattcactctttgcccaattctgtttgcatgctctgtggttcggcaactgcatatacgagcaatagcagtcctgtggattgactttgttcgtgaaattcgttggtgctgggaggaatcagagcgattgccgaggatgaagagcacttctagtatcgacctctgtacttgtctgatacaccaaaagttgcatatgcttgcaatatgcattgagagaaagaaatcattgagtcgcgagaagggtactgatcatgcacatgaagatggtatttcaaatagcgtggcacaaaataagactcgtaaaggatcagcaggtgtcgtcccctcaatgatgcttctgaatacatttcaagaaatgcatgcaccatatactcaggatgcacttttggatgactgaagatatgcatgaagaaaggctccatggctgctgaagcttttggcaatgctgttggattatctggtccaattgggaacgagatgtattatcttctgaatatgtctgctttttaaaagctggcaaatccagatgctgtttttgaagattttattcggtggcactctcctggtgactgggtgagtgaggacggagcagagggttcttcgggttggccacccaaaggaaggctttctcagcgtatgtctgaacatgggaatatgtggcgtaaaatctggaatgacgctcctgctttacctgtctctgaacagaaatttctgcttgatcctattcgagagggagaaaaggtaattcattaccttgaaactttaagaccacagcagctccttgagcaaatggtctgcactgtgttcaaatcgtcagcagacatactgaacagaaccacatatggtggctttaaattaatgaagactaaaatggatcagctatatgctacgttggcttcaacattgaagtctctccaaggtaaatctgacatc

SEQ ID NO: 390299 - DNA, 427 bp, Oryza sativa
cgcgcgtccggttcgtgttattttgtccggagctgctccacttgctactcatgttgaagaatacctgagggtggggacttgtgcacatgtctgacaaggatatggtctcacggagacttgtgctggatctttcgtctccctaccaaatcagatgtgcatgatagggactggtggtcctccagtgccaaatattgatgtctgcctggaatcagtgcctgaaatgaattatgatgcacttgcaactagaccgcgtggcgaaatctgcatcaggggagaaacagtattctcaggatactacaagcgtgaagaccttacaaaggatgttttgattgatggatggttccatactggagacattggtgagtggcaacctgatggaagtatgaaaatcatagatcgcaaaaagaatatcttcaagctttcacaa

SEQ ID NO: 390300 - DNA, 1282 bp, Oryza sativa
gaccggccggaattcccgttctactccatgcgccggcctcggaggcttcgcactcgccttcggcctttaacgctcagtttcccaaagcctcttgttgattccgcgaacaagcccatgattctgcatcagattgaggcctggggagatgttggagtaacagaagttgttttagccatcaactaccgcccggaggtaatgctcaatttcctgaaggactttcaggataagcttggcatcacaatcacgtgttcccaagagactgagcccttgggaactgctggccctcttgctctaccaagggacaagcttgtggatggatctggtgagccattctttgtcctcaacagggacgtcatcagtgaatacccttttgctgagctcataaaatttcacaagaaccatggtggtgaggcaacaattatggtcaccaaggtggacgaaccatcaaaatatggtgttgtggttatggaggaggccactggaatggtggaaaaatttgttgagaaaccaaaaatatttgtaggcaacaagatcaatgcaggaatttacttgttgaacccgtctgtcctggaccgcatcgagctaaagccaacttcaattgagaaagaggtctttcctcgaatctcagctgatgcaaagctctttgctatggtccttccaggtttttggatggatgttggccaaccaagggattacattacaggcttgcgcctttatctggattcacttaggaagagatcagccaacaggttagccactggagcacacattgttgggaatgtgctagttcacgagagtgcgaagattggcgaaggctgtctgattggtcctgatgttgctattggtcctggatgcgtcgtggaggatggtgtgaggctttcccgttgcacggtgatgcgtggccgtgcgtattaagaagcatgcttgcatatcaaacagcattattggatggcactcaactgttggacaatgggcacggatagaaaatatgactatcctaggagaggacgtacatgtaggtgatgaggtctataccaacggcggtgttattctcccgcacaaagagatcaaatcaagcatcctgaaacctgagattgtcatgtgaaataatcctttttatgttatggtatactcaagttcttttaatgcagtatagatactttataattgtgatccttccaagatgttgacatagcatgtatgttactcacattctgataactgcttctcaatgagaattcagtgagccatatttgattgtaaaaaaaaaaaaaaacaaaaa

SEQ ID NO: 390301 - DNA, 494 bp, Oryza sativa
tcgctctcaagcagcttagctcctgcctccttctctgatcattcttgcaaaccaatcgagtcttgaacgaggtcaatgggcaaggaggtggacgtgtccactctcgaggccggcggcgcccgggactacatcgacccgccgccggcgccgctcgtcgacgtcgacgagctgggcaagtggtcgctgtaccgcgcgctgatcgccgagttcgtcgccacgctgctcttcctctacgtcacggtggccacggtgatcgggtacaagcaccagacggacgccgccgtgaacggcgccgacgcggcgtgcggcggcgtgggcgtcctcggcatcgcgtgggcgttcggcggcatgatcttcatcctcgtctactgcaccgccggcgtctccggcgggcacatcaacccggcggcgacgctcggcctcttcctggcgcggaaggtgtccctggtgcgcgccctcctgtacatggcggagcagagcctctgatccatatg

SEQ ID NO: 390302 - DNA, 360 bp, Oryza sativa
catggccacaactataaagaaaaggtttaggcagatcctgagtctgccttaattcgtccaatcaggtggagcccagaagcttgtttcggcagggcacctgtgtttgcgtactgcccctagggtggaatccaaacttcgagacacgatcggtgtaaattttcattgaaccctgtttagattttagaataaattgatccggcatttgcagttaacctgtatgcttttcgcaactcctggtgctgcttgatgcatcagtggcgcactgctgtaaaaagaataagcaaagtaaacccccccaatccaatgcatgctgtgtcagaatgcgcttgtttaaaaaaacaaaaaaaaaaaaaaaccaaa

SEQ ID NO: 390303 - DNA, 792 bp, Oryza sativa
  unsure (1)..(792): unsure at all n locations
caannncnnnttcnaacatacancaccacncanntngacttggactggccccnccnnnggggntgcccactgtgnctgggatgactggttcaacaaggtgaaaactgacggatgttgcagaatcacgaatgcagaatggctcaaactcttggttggttgcacagcgtgaacgacagtgctaagggatctgttgtcaatagaggatctgacagaaaacgatccagtgatgatgctgcagttggttttcaaggaaagaggcagccaagttttctcaggaagtgaatccagctctggaaaattgcccacaaggaacatccttctgtcattgcaagcatcaaatgttgttgctgtgccatatcaagtcccgtctcaggtttcagctcctcccagtattaccaatgcatcaaatttcactccagtatgtacagtgcagttgaggccacctacaaacaatggactagctgttacaatgggcagtacctctcaggtagcttttggttatccagctggtccagctaccaacacttgaaacaagctcttcatggggcttttggtgctccacctcagggctatgtcctcttttactgcaaaagncaaagttgaacgagcaggaatcagtcaagctgacgatggcaagaaaactcaagaggctggtgcttcctcttctgctcttgtggaggatgacaaagaagtctgataggggattacctctcatgggttctgctataaggncaggcattgcaccaaatgtcaaattcggaggatctggatcggatcctgaccttccctggg

SEQ ID NO: 390304 - DNA, 706 bp, Oryza sativa
gccgacgcgtccgccaacggcgaggcctccggtggcggcggccgaccggtggaggtggaggacacgctccccggcgggctcggcagcttcgtcgacggcgtctgctcgcaaggcggcggcggcggcggaggggagccgctgctgcggaggatcagggcggcgtcctgcgagaccgccccgcggctgcgcgaggcgtcgaggaactcggcgcgggacctgctcgagtggaccagaaggggcagcggcctccgcgccatcctcgtcatctcggttggaacgatcacacttattgcattgactggccttctaatcttcatgttcttcctgctggttgcaaccaccaatgctgttgttgtttccgtcctgatgtcgctggcagctgctggaggattcctggctatgttctttgcttgcttggttgcagtgtatattggagtagtatcagttgctgtttttgtcatttccgccacagtcatctcagcaattgtcggcgtcatgattgctactggttggcttggattcttttggatgatttggtttgctgcaaggaagagcatggacctcacgaagcactcgatcggcgtgacaaattcggctatccagtcatactctgcttctcgccatgcaaagcagaagcctatcgactgaggcgatctgtggatcggttgtgagctatgtggcttgcatatcgtctacgagttatgtg

SEQ ID NO: 390305 - DNA, 693 bp, Oryza sativa
  unsure (1)..(693): unsure at all n locations
gccgcgcgcgtccgggcaaatgggccagagaaaggcccaagtctcgtgctttaagataactaacagggttgcctgcaaagcaggtctaaaagcgcatggggctgttgtattgaaagctgagagcacggccgacaaagttgagtgggtaaataagatacgggctgtaattcaaagcaaagggggatcattcaagggtccaaatactgatggtggttccatgagacaaagcaattccgatggtgctctggatactatggcacggagacctgctgatcctgaagaagaacttagatggatgtcccatgaagttcgtgggtatgttgaggctgttttgaatagtctggcagcaaatgtcccaaaggctattgtgttgtgccaagtggagaaggcaaaggaagatatgctaaaccagctatatagttcaataagtgggcaaagcaatgcaaaaattgaagagcttctgcaagaggaccataatgctaaacgtagaagggaaaaataccaaaaacaatcatctctcttgtcaaagcttacccgtcaacttagtgtccatgacaacagggctgcttcttatgccaatgatatctctgaagctgagagccccggacacccaaccgnccaggtgaggattggaggtctgccttcgattccgcatccaacgggcccagctcaggcagcgatcaggtcaaaagg

SEQ ID NO: 390306 - DNA, 879 bp, Oryza sativa
  unsure (1)..(879): unsure at all n locations
ctctctccgtccagtctcccacccccgacctctcgtgtccgctgcgaagaaaaggttgagcacacacctcacctcacctcctcccccgatccccctcgcctccttcccctttcccccctcacctctctgctcttctccgccgcaccaatccgccccctcgcgattcgaccagatcggcgcgagggcatatcatggcatcgaagcggatcctcaaggaactaaaggacctgcagaaagatcctccaacatcatgcagtgcaggtcctgctggtgaggatatgttccattggcaggcgaccattatgggtcctccagatagtccctatgctggtggagttttcttagtgaatattcatttccccccggactaccccttcaagcctccaaaggtatcttttaagacaaaggtcttccatccaaacatcaatagcaatggaagcatatgccttgacattcttaaggagcaatggagccctgctttgacaatttctaaggtgttgctttcgatctgctcgctgctcactgaccccaacccggacgaccctcttgtccctgagattgcccacatgtacaagacggatcgtccaaagtatgagacgacagcccgcagctggacccagaagtatgccatgggatgatgaaacccacaagccctgaattcaaacctgctgcttaaatgcagacagtcgtggtaattgtcccaagaaactgtttatgggccattatttcctccgatttgttgctgccagtcgtgtgtgtcagatccatgtagcatcgtgtctcgtagccccaacatcaacatatgatcattgcccgtcgataatgagataacatatgcttgccgtgattaaaaaaaaaaaaaaaaannnnnnnnnnnnn

SEQ ID NO: 390307 - DNA, 538 bp, Oryza sativa
gatggccatgggggtccagatgcagcagcctacatgaaaaggcatgctataaggctgttctttgaggattctgagttcccacaggcattagaagaagatgaatcattttatgaatcagttgagaaatctatccacaatgcccgcttgagcgcagaccttgctctcgctgacgatttggctatcagccgatcatcaggagcaacagctcttgctgctttgatatttggaaggcagctgttggtcgcgaatgctggggactgccgcgcggtcctgtgtcggaaaggtgtagctgtggagatgtctcgtgatcacaggccaacatatgatgcagagcatgaaaggattaccgagtgtgggggatacattgaggatggctacctcaatggagtactatctgtgaccagggcattgggggattgggacatgaaaatgcctcaaggctcgcggtcgcctctcatcgccgagccagagttccagcaaaccacactcaccgaagacgacgagttcctcatcataggctgcgatgggatatgggacg

SEQ ID NO: 390308 - DNA, 508 bp, Oryza sativa
cacgcgtccgatcgcaagaggattaatataatcccgatcgagtagatcgagctgtccggccgtgcgaatcttggggagagccatggcgccggtggccggctccggcgacgagtggagtgagacggccatgctcgtcatcgatatgcagaaggatttcgtggatccggcgacaagcagcgccgcgctattggccggtgaggccattctacccactgtcaccgcagcagtcgccgtcgcgaggcagcgtggtatcttcatcgtctgggtggtcagagagcatgacccttctgggagagacgttgaactttttcgcaggcacttctattctagtggcgagggcctaggggtggaaggctccaaaggtgctgagctcgctgatgggcttactatcaaagatggggattacaagttggtgaagactaggttcagtgctttctttgcaacgcaccttgattctgtcctcaagacctctggaataaagaacttggttattgttggggttcaaaca

SEQ ID NO: 390309 - DNA, 769 bp, Oryza sativa
gcccacgcgtccgcccacgcgtccgggtgattatatgtctgtgaagggacctaagggtcgtttcagataccaaggtgggcaagtgagagcttttggaatgctagctggtggatcaggcatcactcccatgttccaagttgcaagggcaattcttgagaaccctaatgatatcacacaagttcatttagtctatgcaaatgtcacgcatgacgacattcttctgaaggaagaactggacaacatggccaaaacctaccctgatcgctttaagatctactatgtcttgaatcagcctcctgaagtctggaacggtggcgttgggtttgtgtcacaggacatgattaaagctcatttgccagcacctgccgaggacattcaaatcttgaggtgtggtcctcctccgatgaacaaggcaatggctgcgcaccttgatgagctcgggtacaccaaggagatgcagttccagttctaagctctcctaatggcggagtaccagaataatggaccccatggcctacgctgtcttacgctctcttgtgtcatggagacgtcgtctgacctcttttgttagttgatagcaatacatgattagtcgtgacccaacaattcatgtatcactccatttttatgggcaaatgttatctgcaattgggcagaagccctgtgactgccatctggtttacaaactgaacattggatgctgcaccgcggggaaactattcaatccctcgaggggatgttctctcgtttgctcaaaaaaaaaaaaaaa

SEQ ID NO: 390310 - DNA, 423 bp, Oryza sativa
  unsure (1)..(423): unsure at all n locations
cacgcgtccgcggacgcgtgggcgacgccctcgacgacgcgctcccaatcaagcaagcattgtttcttcgatcgagtggtcaattagctagctgtgatctctcgcgctaatggtggatgggtgcaggagggggctgtccaacttcttctccggcaagtcgaggtcgttcgccaacctgcaggacgtggccgccgccggcgcaaccacggcgagcctcgccatgccggagaacccattcaacaagcgccgccgcatcctccgctgctcctccatccgccgcgtctcctccacctccctcaccgcgctcccgcccttcctgccgccgcaccaccatccaccgncgnccgacgacgggggcggggcganaaatgtgcttgaggacaacgacgaggaggaggaggaggaggatgaaatgatgaaaag

SEQ ID NO: 390311 - DNA, 621 bp, Oryza sativa
ggccgcggcggtggaggcggcctccgaggtcctcgcacactatctgacatccgatctaacgatcagaattctctccctgcttgtggatcctgctgcggttaacctgtacatctgtcattgtgactgctgaactatgaacgactctaagatccttttgatgtcattttttaggagcaagtctgaattctgaaaattttagaacgtatataatcttcgctggttaagcaggatataagaacacttgttacatgttacatcttctgcttagaaagatcatctatgcattgtgacattgtcaaaacacgagtgtaatacccagcacatattatgcaacttgtttctgacgtgatctccacgttgccttcatctgttcacttgtgaaaaaaaaaaaaaaaataaaaaaaaaataaaaaaataaaaaaaaaaaaaaaaaaaataaaaaaaaaaaaaaatataatgtaaaaattagtattttttaataataaaaataataaaattggggggggcctttttaaaggggccaagtttttttcccccttctttcaattttatattttttttttgggggcccctaaaaataaatcccgggggcgggggttaaaaccttgggggaggggggaa

SEQ ID NO: 390312 - DNA, 705 bp, Oryza sativa
cgaacacgtccccaaggtaagccggcggcggacggcgatgacgacgagcctgaggaagaaccgcaagaagcgcggccacgtgtccgccggccacggccgcatcgggaagcaccggaagcacccgggaggccggggcaacgcggaggaatgcaccaccaccgcatcctcttcgacaagtaccacccgggctacttcggcaaggtcggcatgcgctacttccacaggctccgcaacaagttctactccccggcggtgaacgtggagcggctctggtcgatggtgcccgccgagcaggcggcggaggccgcgggcgccggcaaggcgcccctgctggacgtgacgcagttcgggctacttcaaggtgctcgggaagggtctgctgccggagaagcccatcgtcgtcaaggccaagctcatctccaaggtcgccgagaagaagatcaaggccgccggcggcgccgtcgtgctcaccgcctagggtttggtcctggccctgccttttgttctgcttcttggtttttgagatctattaatctgaagtagtagtcgtttcttgtctcaagctatttgcgttaagaagacttgattagtttgttttctactgtacttcttgcatgttaagacagtacgttatgagaatttttgcactaagcgatgccagttcatgtcagatgcttcagatatatcaaaaaaaaaaaaaaaaaa

SEQ ID NO: 390313 - DNA, 600 bp, Oryza sativa
ccacgcgtccgcccacgcgtccgcggacgcgtgggcgccggcccccgcctccgccgccgcgccgctcgcaactccgccgctgccatgacaacgcgcttcaagaagaaccggaagaagcgcggccacgtgtcggccgggcacgggcgcatcgggaagcaccgcaagcaccccggaggccgcggtaacgccggagggatgcaccaccaccggatcctgttcgacaagtaccacccgggctacttcggcaaggtcggcatgcgctacttccacaagctcagcaacaggttccactgccccgccgtcaacgtcgagcgcctctggtccatggtgcccaccgacaaggccgccgaggccggcgccggcaaggcccccgtcatcgacgtcacccaggtcggctacaccaaggtgctcggcaaggggatgctccccccagagaggcccatcgtcgtcaaggccaagctcatctccaaggtcgccgagaagaagatcaaggccgccggcggcgccgtcctcctcaccgcctaggttataccattgtatttgggatcaacactagattagcatcacaaatctacaatggttcgaggaaatgtggatatt

SEQ ID NO: 390314 - DNA, 591 bp, Oryza sativa
  unsure (1)..(591): unsure at all n locations
ggggaagggcgcgggaacgncggcgggatgcaccaccaccgcatcctgttcgacaagtaccacccgggctacttcggcaaggtcgggatgcgctacttccacaggctcagcaacaggttccactgccccgccgtcaacgtcgagcgcctctggtccatggtgcccgccgaggccggcgccggcgccgcagaggcccccgtcatcgacgtcacgcagttcggctacaccaaggtgctcggcaaggggatgctccccccagagaggcccatcgtcgtcaaggccaagctcatctccaaggtccccgagaagaagatcaaggccgccggcggcgccgtccgtcctcaccgcctaggtactcgggagctagggttcttggcttcttgctatctatctaaagtgttagcttcttttttttatctcctgttgtgttggaagccaaagcaaagaaagactacttttgtgctgttgctgctgttttttgtgttatggaacaaattgatggtatggctactaagatctgtggtggctattcatgagttttgattgaattacatgatcatgtaggtttatgtcccccaaaaaaaacaaaaa

SEQ ID NO: 390315 - DNA, 261 bp, Oryza sativa
cacgcgtccgaaatgtgctacctcggagcgggtcatctaaatcaaaatttggaggtgttcgccacgtccttcgctgtaaagagtgtggtgctgctaaaacttgtgggcattgctattgaggttgcattggtaggaactcgctctcgttgcttggttgcatgctatgcgataataatgaactagtaactgctatagttcgagctagtcttcccaaaaaggaataaagacgaatgttgcacttccctgtgattgtacactgcc

SEQ ID NO: 390316 - DNA, 769 bp, Oryza sativa
ccacgcgtccggccatgtacaaggatcgcgtgaagggctcgctgaaggtgaccagagcatttggtgctgggtttttgaaacagcccaagtggaatgatgcactcctggagatgttcagaattgattacgttgggtcctccccatacatatcatgcaatccatccctttttcatcataggctcagcacaggggatagattcttgatattatcttcagatggactttaccagtatttcaccaacgaggaggcagttgctcaggtcgtaatgttcatcgcaacaacccctgaaggcgaccctgcccaacatcttgtggaggaagttcttttccgtgctgccaacaaagcaggaatggactttcatgaactgatcgagataccacatggtgatcgtcggcgataccatgacgatgtatctgtcatcgtcatctctttggagggcaggatttggagatcctgcgtgtaaatagaaacaatagtaggctagtgaaacaaaacgtatagagggggttcttcccatgccttccttgagctgagaggtgttcttgcggctactctactcctcttcccccagttgctactgtacaatatcaaccaagcactgtggggggttggattcggcttgggctctcggcacatccagctgaatcgccatgaatcgcccgcagggctggccgcgtggtataatatgttgatgtaaatgaggatttgttcaattattaataatttataaaatcgaccaattggtcaactttctttgacattctctcc

SEQ ID NO: 390317 - DNA, 630 bp, Oryza sativa
  unsure (1)..(630): unsure at all n locations
gnacgngtggtccncgtgtgaatttgtcagctgttagttgtcacacctactcatcagccaaccanttcgncatcaatagcaaaccaagcggattgatcatctcatctcatctcatcgaccgagcattctagcgagcgagcggccaagccagcaagatcgactcctcactctctcaccgatctagcagcagcagtggtagtagctagcagcgtcagtgtagcaaggggttgcgagaatggcctcgccgtcagcgccggggccgaagctgcagaaggcgatggtggcggtggacgagagcgagttcagccaccacgcgctggagtgggcgctgcgcaacctcgcgccgaccatcgcgccgccgctgctcgtgctcaccgtgcagccgctcctccccctcggctacgtctccgccgcctccttcggctcccctctgggcacccccgttgtagccccggagctgatcaaggcgatgcaggagcagcagcagcagctctcgcaggcgctcctcgacaaggccaagcagatctgcgcgcagatgggggtggctgtagagacaatgatcaaagtaggggatcctaaggagatgatatgtcaagcagctnagggatcaaaggttntttacttatcgtt

SEQ ID NO: 390318 - DNA, 707 bp, Oryza sativa
  unsure (1)..(707): unsure at all n locations
ccacgcgtccgcggacgcgtgggcgaggctccgcgtggtgcaccgcgacctcaaggccagcaacatcctcctcgaccgcgacatgaaccccaagatctccgacttcggcatggccaggatcttcggcggcgaccagaaccaggtcaacaccaaccgcgtcgtcggcacactgggctacatgtcaccggagtacgcgatggaggggctcttctcggtgaggtcggacgtgtacagcttcggcatcctcatcctggagatcatcacgggccagaagaacagcagcttccaccacatggagggctccctcaacatcgtcggctacgcgtggcagctgtggaacggggacagagggcaggagctgatcgacccggcgatccgggggacgtgccccgcgaaggaggcgctgcggtgcgtgcacatggcgctgctgtgcgtgcaggaccacgcgcacgaccgcccggacatcccctacgtggtgctcacgctcggcagcgactcctncgtgctgcccacgccgcgcccgccgacgttcacgctgcagtgcacgtcgtcgtcgtcggggcgggacatgtactacagggacaaggaggagtcctactncgncaacgaccttaccgtcaccatgctccaaggcaggtaggagtgcgtataccactaagtacgtcttaaaatatagcaatttagaactagattggatatattctagt

SEQ ID NO: 390319 - DNA, 640 bp, Oryza sativa
  unsure (1)..(640): unsure at all n locations
ttnggggattcctgatttaccagctcatttttacatatagttcaaacttagagagagaaagaaagttgatcatccatggagagggttgcatcgagctgtctcagccttctggcacaaaggaggggttactcggtggcggcggccgtggcgaagggagccggccggagggcggacgagaagaaggtggcggcggcggtggccaagcgcacgatggcgaaggccgccgaggagaagacggcgtgggtgccggacccggtgaccgggtactaccggccggccggcggcgcaaaggaggtggacgcggcggagctgcgcgccaagctgctctccaactccaagaggatggctgccaactgagacagatcgtcgacgtatcggtcggtcgaggctagctatgtactctgctttgagatgcgcgctacctagttgatcgctgtcgctggcctccttttgagagcttgtgaggcctaatttgagttgcttcgttgaggacgactgcttctttgggttcgtcttctcggtgttctctaatatgaaatgagctacctttgttcagatggtatgaagattgataataatactaatagaggattataagaacaaaaaaaaaaaaaaaaaaaaaaagggcgggccgccaacc

SEQ ID NO: 390320 - DNA, 560 bp, Oryza sativa
cggacgcgtgggcggacgcgtgggcacgtgcgcgcgaacggagctcgtttcttctccccccctacctctgccccacgttggctcgcgtccgcggcccatctccaccgtccgatcccgagccgatggcggcggagcccccggcggacggccgcgatcccccggcggacgatggcgccgccggcgacggcgcggtggagtccgcggcggcggaggcgctcctgagcgcggcgtcggagcagctgacgctcgtgtaccagggggaggtctacgtcttcgaccccgtcccgccccaaaaggttcaggctgttctattggtacttggagggtctgacatgcctcctggtttagtaagcatggctgtacctaccacattcgatgaaaagagtacaactgtggctgccagaagagttgcttccttaatgaggtttcgtgagaagaggaaggaaagatgttttgataagaaaataagatacagtgttcgtaaggaggttgctcaaaagatgaaacgacgtaaaggccattttgctggaagggcagacttttgtgatggttcatgttct

SEQ ID NO: 390321 - DNA, 1241 bp, Oryza sativa
  unsure (1)..(1241): unsure at all n locations
ggctgctgaacctcaccaacagtaagctgtgcccatggttctcgaagaagaacactttgcatttaggtagcattctctggagcctgtcagcttcagatttgcttggaagtaatctgtcagcacagctgaatgcaaacataccaaagtacgttttcgatcatcataacagaaatgtagttatcgagatccaacagaagcaaaatactcatgttgggatagcttgactgaaactatgtccaagaacggtgaaattgaaaaggtagaaaaccagagataaatgggttgcttaaggtagcaagaaacctgactagcagtagcacttcagctgaaactgattctagaccggcaattagcattatggaagcagcctgttggatcagcttcattttccatcctaggagtgtcctccggtagttttatttagtatgttctacagtgaaattatagaatttgaaagccacattaattaaatataagcagaaaattaaatcatttctactgctcgtccccctttctcctggcttgataaaatgggacatagtagcgggacgcacaaaaaagaacggtacataccgaatgcttcaggaatgatgatatattacttggttaatctgtttagtgcttctaaaggatgtcttccacttttcatgctactcaatgccatgtcaacttcattgtctgccctcatgatcaggaagaacagaagaagcggatgcagagttattaaacaggaaatgtgacaccttatggcaaagtacagaaattaaatgatgaaaactggaaagcagtcctgtagttatcagttcagaagagatgtaattgcatcccgtgccacgatcccgacaacgggctggaaaccgacaggagctgttttatgtctgatttctcaaatgatgttgcttttccagggaaaaaaggaaaataaagttaggtatcacaaattttattcatgcaacagccagatttatttggagatatacctggattaaccagtaccaacaccaaatcgatgcaaggattacgagcagctactgcaagtgctatgcatcctccaaaagaagtccccaaaaggtagatgggcttattaggtgaagtggcatgctctgctctcacaacatcctctaccatttcaacaagttctgaaaatgaaaaacagctaaaaccatgcaatctgagaacttcacattatctgttattcgctctaaataatgaaataagtttnnnnnnnnnnnnnnnnnnnn

SEQ ID NO: 390322 - DNA, 866 bp, Oryza sativa
  unsure (1)..(866): unsure at all n locations
cncgcttcaacggaaaaaaaaaggggtcgcgtctcctcgtctcgtcgcctcttcctccttccaattcatctcgtcctctctctcgtaactcgtaaagagatctcgtctcgcctcgggaatccaaccattgccggcgaagtagagatcgggagggcggcgccatgaacaggggcggcggcgtcggcgtcggcgatgagagcggaagcgactacgagagcggcggcggcatgcggaagccgctgctgatgcacacggggagctggtacaggatggggtcgcggcaggggagcctcaccggcgcggggacctcgtccatggccatcctacgcgagtcccacgtctccgccttcctctgcacgctcatcgtcgcgctcggccccatccagttcggattcacgggggggcttctcctccccgacgcaggacgccatcatccgagacctcgacctcaccctctccgagttctccggtggtcgggatcgctgtccaacgtcggcgccatggttggcggcgattgccagtggtcagatggccgagtacattgggcgcaaagggtcattgatgattggtgcaggtccaaacatcattgggtggcttgccatctcctttgcaaaagactcatcgtttctttatatgggacgattgctcgaggggtttggtgttggtgtcatctcttatacggtgccagtttacatagcagaaatatcacctcaaaacatgagaggtgctcttggctcagtgaatcagttatctgtaaccgttggtatattggtggcatatttgctctgcatgtttgttcctcgaaggcttcctggctgaaatatgaatcttgccttgcactgttcttaataccctggcctatttct

SEQ ID NO: 390323 - DNA, 501 bp, Oryza sativa
  unsure (1)..(501): unsure at all n locations
cctgtggccttnggcagagaaaaatcagggatttcccnaagcgaacagcatncaacatttccattttaatggcccccccgcgcctccgagcagatcgattttttacaagcaatttcaatgaggaaacatgcccccaagaaggggatgcaatgggtcaaaacaacagaaggcccacgagatgtgatcaaccggcactaccctgaaatcactgccaagtggatgaagtcctctagtgctttctctgtgtgggatgcagactactagtgcaaaaattaaaggccccctgccatattatttggcaagttctatgaaatattatttgtttacagaattatggtgtttgttcagtgtaaatatagttaaatatgtcagtgtaatatatgtaataggattcatcgcacgacacaagttgtatgctcatttgtttacaatttattgcacattattatttgttcattgtaattaaatatggctgggaaaataagtannnnnnnnnnnnnn

SEQ ID NO: 390324 - DNA, 460 bp, Oryza sativa
cacaaatcgtcgccgcatcccctcaactccggcgatccccttggcggcggcggcggcttccccaatcaccccactccacctgaactacaggatggcgtccgccggcccggggctcgaatcgctcgtcgaccagatcatatccgtcatcacaaacgatggccgcaacattgtggggacactcagaggattcgatcaagccaccaacatcatcctcgatgagtcccatgagagggtctattctaccagggagggagtgcaacagcttgttcttgggttgtacatcataaggggcgacaacatcagcgtggtgggggaggtggatgaagaactggatgcgaggctggatctatcgaatctgagagcgcacccgctgaagcccgtgatccactaatggaaacgaatgaatgatgtactactactagtagtaagctaaacctaaatgtagtgttgtccagagttg

SEQ ID NO: 390325 - DNA, 1021 bp, Oryza sativa
agacaagaattgactctgttgatgggcagattattggtctttttggagtttttgatggtcatggtggtgctaaagtagctgagtatgttaaacagaatctcttcagtcatcttctaaggcatccaaagttcatcagtgacaccaaagtggcaatagatgatgcttataaaagtaccgacagtgaattcttagaatctgacagcagtcaaaaccagtgtggatcaactgcatcaaccgctgtccttgttggtgaccgtctctttgttgcaaacgttggagactctagggctatcatatgcagggggggaaatgctatagctgtttcaaaagatcacaagcctgatcagacagatgagcgacaacgtatcgaagatgctggaggttttgtaatgtgggcaggaacatggcgtgttggtggtgtgcttgctgtttctcgcgcttttggtgacaaactcttaaagcagtatgtagttgtggatcctgagattcgggaggaagttattgatcactctctcgagttcctcattcttgcaagtgatgggctgtgggatgtagtaaccaatgaggaggctgtcgacatgaccagatcgattcatgacccagaagaagctgcaaagaagctcttgcaagaggcctacaagagggagagcagtgacaacataacttgtgttgtcgtgcgcttcttgcatgggcaagggagtagtggatatgcttaaaaaacaactggtaaaagttacccaatgtagttgtgtaccaccatgtatacatgttttaattcaaatctcacggggttaaatggagagaaactcggagtaggatacgtgtattttgatggctgaagtaagctgaagggtgagtatgccttaggttaacaataagtttgctggtgaccgatcaccatagttcgttgcttttgaccctggatttgatggtcgtgttgtattgctacgggagactggatcgtttccctaggttcaatgtacgtggatattactcctccatttatttgtttgtatcctcc

SEQ ID NO: 390326 - DNA, 650 bp, Oryza sativa
  unsure (1)..(650): unsure at all n locations
ccacgcgtccgccaagctcaccgtcaacttcgtcctcccctacaagtccgagatcgccaacaaggagggtgacatggtaattgtaccagcaacaactggtcagatgggtgttttgccaggccccgcgtccgcaatcgcagagctcaagcctggtgttctctcggtacacgagggaaacgatatcaccaagtactttgtgagcagtggctttgcatttgtccatgcaaactccatcgctgatatcgtggctgttgaggctgtccccctggaccagatcgacccagccgcggtccagcagggtctcgcggaattcaacgccaagcttggatcggcctcaactgaactggagaaggccgaagctcagattggagtggatgttcacagtgcgctcaatgcccctttggctggttgaccaatacgtttttaagttgctgtccctctctctcttttgcatcttcatttttagaatgggagctgaagtttgcaaactcatggatgatgggatggagggaatgatcttaaataaattatactccatctcaaagacagaaccctgtttcttcttttaacttgactcctgcatggatttttgtaataagtgaatatttttctccgagcctacaaagtcaaagttttttgggtccannntt

SEQ ID NO: 390327 - DNA, 534 bp, Oryza sativa
ccacgcgtccatctacgcgttagacagatatttaaatgcgaacgatctacattctacacacatatctcactcatcctgtcatccacccatcaacgtacgtacgtgtgatctgcttaattgggagttagaagaagaggccgaggtaagttgaatttgctgtacagagagtgagcgagagaatctatggcgcttatcccgtcgctggctcgccgcccgctacgcgctgctcgcgttgccgcctctcatggtggccgcgtatgtttataacgccgggggtcggggaaatggagatagaccgcgtgcaagaagcatcgacctattcaccggtggcggtccagcttccgccggccctgcagcccggaaagacagcagtgccttgtgatcgatcaactgtaagcccttcacacatgtacttcctccatctcataatgtaaatcattttagcattgcgcatatttatatatctagattttttaacatccatatgaatacggacaatgctagaatgacttatattatgaaacggagggagta

SEQ ID NO: 390328 - DNA, 1035 bp, Oryza sativa
  unsure (1)..(1035): unsure at all n locations
actcagtatagggtaagcgtgtcgacccacgcgtacgcacagattaggtggaaacattagctcgctatgtgaacgattattacataagaacatgcggagcttcagttgccatccatttggttccaagaattttttggaggacccaaacttccacctccctgctggaatccggcatattaggttatggtggtaccaaagtttgccagtgaagttgcatattcccaagtggccccaaaaaatgatagtgtccgttctgcaaagattgacaccaggtcccatttggacttgtgcagaaatgtttttggggaaggagtttaccctgatgtattcatgacaaatttatactatggaggcacaagaattgcaggttcgaaaattgtttttgcaaacggctctcaagatccatggcgccatgcttctaagcagaaatcatcaaaagaattgccgtcatacttaattgagtgcagcaattgcggacattgcagtgatctatctggatgccctcaagctccttcacatattgaaggtgactcgtctaattgttcatctccagaagctgtgaacaaagtaagaaagcagatcgtcgatcacattgatttatggttatcagaatgtcaagagcaaggacacgacaatgagccattgctgggcagtagatggagcatagctacttactgattacctgctcgagctaccaaccatatgttcaaaaggccatgagtacaagacaatgcagctgtcatttagactagtatgattcactcaaataatacggacagttggttgttccaagcattctcatggtaccaagcattatcctcaggactgcggtaacaattgctcaaacactactatggtgacgacctctgtcatttgtcaataacttacaggttgctctcaggctcccccattctgcagaagattaccatgatatgtaaaatgttactgaattatgtacaagataaactttgtttattcatgagactaagatattagataaccgggtaaaaaaaaaaaaaaacatttttaacnnnn

SEQ ID NO: 390329 - DNA, 1370 bp, Oryza sativa
  unsure (1)..(1370): unsure at all n locations
ttgtctttttgccactgatgagagagagttgcaagaatttgcaagaagcaccaagaaagtgtacccaaagaagcatcttcagctgctctcaccagtcaccactcccatccaagagatcccagcctctactacaacagcttccaacttccaagaacccatttttttcctttcctcctcctcctcctgctctggctggctctgggctggccgtgccctcctgtcagtcctagctccagctagaatccctccttgttcatccaccaccaccatccacatgattgcatttgtgcagattcctggagaattaagctgtcctctcatgccgatctgacacaccttgttgttgttgttgctgctggttgccgcacaaccgaaaggggggattatttggccctctttctctttcctttcgcaggaagatttggtgattcttcttctgagggctcctctaaggatttgggaggatggggaagaaggggaagtggtttggagctgtcaagaaggtgttcagccctgaatccaaggagaagaaggaggagagactgaggagaaaattagcagctagtaacccgaacccgccagatctaaccccttcggcttctctggaagtcaatgtttcggtgccaccccctccacctcctccacctgttcaacagattgaagaggttaaggtccctgaagttgagcaggagcaaagcaaacatgtcactgtggaggctgtacctgaggctgtccccgtacccgcacagacatcgtcattgccacctggtgtatcaagggaagagcaagctacaatcaagatccagaccgccttccgaggttacctggcaaggagggcattacgagctctgcgggggacttgtcagattgaagtcactggttgagggtaactcggttaagcgtcaagctgcaagaactctgcgttgcatgcagactctagcacgggtgcagtcgcagatacgttcaaggaggctgaaaatgtcagaggagaaccaggccctccagcgccactttctgctgaaacaggagctggagagtttgaggatgggggagcagtgggatgacagcactcagtctaaggaacaaattgaggcgagtcttataagcaggcaagaggctgcagtaagaagggagagggcgctcgcatatgcattttcacatcagtggaagagcacttcaaggtcagtcaacccaatgtttgtagaccctaacaacccacaatggggatggagctggttggaacgctggatggcagcaaagccttnggaggggcgttctgggaccgacaaggagagcaaccttgaccgtgcatcagcgaagagtgcaagtttgatcttngagagggttagatcacaaaagccttcaaccgt

SEQ ID NO: 390330 - DNA, 674 bp, Oryza sativa
cttcttaccaccaacctctccccccacgatcgccctcctccccgaaacttctggaaccgagagcagcagacgttagctcttctcctccgatggcggacaaggagcccgtcgtggaccgccccgaggacgaggaggaggcctccgccgccgccgccgccgcgggcggcgaggaggaggacacgggcgcccaggtcgcccccatcgtgcggctcgaggaggtcgccgtcaccaccggcgaggaggacgaggacgtgctcctcgacatgaaggcgaagttttaccggtttgacaaggaggggaaccagtggaaggagcgggggacgggcaccgtcaagctcctcaagcacaaggagaacggcaaggtccgcctcgtcatgcgccaggccaagacgctcaagatctgtcgcgaaccacctagttgcttcgaccacgaagatgcaggagcatgcgggcagtgacaagtcgtgcgtctggcacgcggcggacttcgccgacggcgagcttaaggaggagatgttcgcaatccggtttggctctgtcgaaaattgcaagaaatttaaggatttggttgaagagatttcggaatcacttgcaaagacagaaggtaaagaaaccgaggaagattcgcttgccgctgtccttatgaagaaactcagcatatctaaaaacaaatt

SEQ ID NO: 390331 - DNA, 981 bp, Oryza sativa
  unsure (1)..(981): unsure at all n locations
cttttgggtgtagggcaggaggacaaatcaatgttcatggcactctcaagcatctggatgctgctgctcttgtttggcacatcggcatttctcgttccctctctctgtattctaagcctcacttttggggatgcattcggagcaaggtatctcttgtatggtgcaaaatcgtttgatgtgataactagggtaaatgacatggttttaatcggattgggctatctgattggttatccgatttcatctgcatctgttggtgcactgcaaggcttgctgacaaacaatttggttgcactaaaaggttcttgcccaaattgcggtgagcaggtctttgcatttgtcaagacggataattccatcaaagctccccatagagcagaatgtcatgtctggcagctgcccactggagtaccgcactaaagttgagaaatccttgtcgggaactagaagaacatgggtttatggcagngtttatcttgtgaagcaagggcatccaaggaagcggaaatggttgaaagactaaattgccagtgctagatgctgaagaaagtttagaggatgattttaagttatgtggctattctgaacttctgattgactgaaacatatttagagatgttgctcttactgcccctgggtgcttatttgtttctctgctcaaccaatgtatcttgtaaagtggtggaggccttggaaagatggccaaacatgaacaaatgttaaattgatgatgcagtattatcaatattggcgtgccttctcccaagaaagtctatttcttaattactcttgttttctcttgaattcatttttattaatgtgcttgcttaataaactactactatgtataattgttttattttctcttttcgctctttttaaagatttttactatttctttctttttctattttttcttattcttttcattgttatcttaccttttttacctctttttttgtctcttttttatactttctc

SEQ ID NO: 390332 - DNA, 615 bp, Oryza sativa
gcgacccacgcgtccgggaatgttgagcctgtatatggatttgcttccggtgaccccttgcggtttaagagagctgtgggacacaaggatctcttctatattgatgacagggaggtagacttcaaagagattattgaggcccctctacctaaagctcctcttgatacagcagttgtagctcactggctagccattgagggagtccagcctgcaattccagagaatcctcctgtagatgctatcgtagcaccaacagagaataaaaggacagagcatgggaaagatgatgggcttcctgttgacatcaagcttcctgttaagcatgtgttatctagagaactccagatgtattttgataaaatagcagagcttacaatgagtagatctgaaacctcagtttttagagaagcattagtgagcttatcaagagactcaggccttcatccgttggttccttacttttcctacttcatcgccgatgaggttacccggagtttaggtgatcttcctgttttatttgctctcatgcgtgtagtccaaagcctcctacacaatccccacattcatattgaaccatatttgcatcagttgatgccgtcaattatcacctgcatg

SEQ ID NO: 390333 - DNA, 668 bp, Oryza sativa
ccacgcgtccggtttttcttgcaaggccggttcatttttgggccagatgtgagatctttggggctcactatagtcctcattcttgcaccggtattagtcttctgtatatttgtggctagacatctgatcaatgacttccctgatcactggggagtttcagttatggtcgtagtggtcgtcttcacaatatatgatttgacattgctgcttcttacctctggtagagatcctggtatagtaccacgtaatactcacccacctgagcctgaatcgattgatggaggcagtgatatgggaaatggacagactccacaacaactacgtttaccacgcacgaaggatgttttcgttaatggagtaattgtgaaggtcaaatactgtgatacctgcatgctgtaccggccacctcgatgctctcactgttctatatgtaataactgtgtggagcgttttgatcatcactgcccttgggttgggcaatgcattggaaggcgaaattaccgattcttttacatgcctgtattctcaaccacattgctgggcctctatgtctttggctcctgctgggtgctcattgttaaaatcagagatgctgcccattcaacgatatgtaaagcaatgttaaagacacgcgctttaaatggactgagcatatagtgctttatttg

SEQ ID NO: 390334 - DNA, 498 bp, Oryza sativa
gcgaccgacgcgtccgtttttttttttttggcttttttattttttttccatagaagagcaatcagtacaactgggatggaacaaattcagtatggattacgcatctagaaccaacaagtgaagaacaatagttcccttttccattttattcacacatgagataaattcaggttttgaatcatgcatcataatccatgaccaattaattgaccacaactaaattaagcgatgattaaaagtcaccatatacacatggacacaatcgactggagcaacaataatatgaacaccaccagcagatgggagagacaggatcatacagagccaacacatggatgattggattggatggatgacctctcttgcattctttattttgcaattcttgatcgaactgaccgagatcggatcagatcttctccaccacgatccagtcttcctccccatctgagaactccagcgcaatttgtgatccccaccatgaaggaagcccatgtc

SEQ ID NO: 390335 - DNA, 685 bp, Oryza sativa
  unsure (1)..(685): unsure at all n locations
ggcaataacatatgggtcgtttcttccctccgtccacctaccgcttgttcccctaattgatctctccccatggcaaccctcacgctgccggcgaccggagccgccgcgcaacccggccaggaagacccaagcgggatcaagaatcctggcgatggtgcgggagattcgagcggcatcgactccggatgggttgttctggggaaatctgacatagttccggcggatttggctgccgctgccgctgacgccggccaccgacagcttgggttctcgccgttaccgatgcttccaatttgggtgcagatggtgcttggaggcgtagtctacacggccgtgccgttctacaatagggccaggaaagccgaagatgaggtgacagagaatgtggaaactgcattggaggttgtggagcacgccgcggaggtgacagagaagttagctgctaatgtggccaatgctctaccagagaatggtaccctgcataagttggccgaggaggttgagtacattgctgagatagtggataaggatgcacagaaggttgaaatcatcataaagaagatggaagatgtcagcaatcggatagacgctgctgtggagcctgtcattgaagagcctcgaaaggaattcaaaccatagccaagcatcntgtggatcagaagggcccaaattattcttggtggaa

SEQ ID NO: 390336 - DNA, 532 bp, Oryza sativa
ccgcgcgtccgctcgggccgcgcgcgcaaggcggcggcggcggcggccggcggagaggcgggtgaagagccagcgagcgggagggcgagagggttttcggagcgggaggggaagatgccgctctacgactgcatgctgctggtgaagccgctggtgaccagggaggccatggcggagctcgtggggcgggtggcgcggcgggcgtaccagcggaacggcgtcgtcaccgacgtcaagtccttcggcaccatctgcctcggctacggcatcaagaagctcgacggccgccacttcaagggccaacttatgcaaatgaccatgatggttccaccctccttcacccaagaactccactacctgaacaaggaggacaggctgcttccgcttggcttggtggtgaagcacagagacgcggtgtatggtgtggagttcatcaacgaggacgaccggagggagggagatgacggactttcgctaccgcaccaaagacgaggccagcgatgtcgatgagtatgatgacgacgatgatgac

SEQ ID NO: 390337 - DNA, 1246 bp, Oryza sativa
accaccactcaccaccaacatggcgacgacgacggcggcggcgatggtggtggcaatgtcggtgctgctgctgggtggcggcgaggcggcggcgccgggaaagccggtggacgtggcgttcgagaagaactacgtgccgacgtgggcggaggaccacatccactacgtgaacggcgggcgcgaggtgcagctctacctcgacaagtccaccggcaccggcttccagacccggggctcctacctcttcggccacttcagcatgcacatcaagctcgtcgccggcgactccgccgcaaccgtcaccgccttctacctgtcgtcgcagaactcggagcacgacgagatcgacttcgagttcctggggaacaggacgggggagccgtacatcctgcagacgaacgtcttctccggcgggaagggggaccgggagcagaggatctacctctggttcgaccccaccaaggactaccactcctactccgtcctctggaacctctacatgatcgcgttcttcgtggacgacacgccgatcagggtgttcaagaacagcaaggacctgggcgtgcggtacccgttcaaccagccgatgaagctctactccagcctgtggaacgccgacgactgggccacccgcggcgggcgggagaagaccgactggtcgcgggcgccgttcgtcgcctcctaccggggcttccacgtcgatggctgcgaggcgtcggcggaggcccggtactgcgccacccagggcgcccggtggtgggaccagccggagttccgtgacctcgacgccgaccagtaccgccggctcgcctgggtccgcaagacgcacaccatctacaactactgcgacgaccgcgaacgctaccccgccatgtcgcccgagtgccaccgcgaccgcgacgcctgagatctcatcgagatctgtgatcgatgcttgctggccgtccgatggatggatggatggatggggatgagtacgtgtacggctacgattaatcatgatttgagtgcgtgcagttaattaattaatgggtaacgttttgggggtaatttgggcttgaattgattgtatgtatgcatgtatgtatcgtcgtcgtgccaggtgtgctgaattgggcgcgtgatatatgtattgccaaattattttggtggtttcgcttgtactatatatatacgcgcgctgtgatcgatttcgatcggtcagagttaattaatgaattaatttgggtttaaaaaaaaaaaaaaa

SEQ ID NO: 390338 - DNA, 1302 bp, Oryza sativa
  unsure (1)..(1302): unsure at all n locations
ttcctttctgagcatagggtcaagcgggagtgtgaagctaatgggccctttttgcgggtacggcttgtgaccgacaaggaaacaaataaacctagaggatatgcattcatcgagtatatgcacacccgggacatgaaaaatgcttacaagcaagcagatgggagaaaagtggacaataggagggtgctagttgatgtggagcgtggtagaactgttccaaattggcgtcccaggagattgggtggtggacttggatcaagcagaattggtggtgaaaatgctgaacagaagctctccactagggatcagcagcacgctggacgcccaagatcggaggagcctaggagagatgagcgtcgtgcagatagggaccgcgagaagtctcgtgaaaggccacgggaaagagatcgtgatgagagaactcgtgaacgatcccatgaccgtactcgcgagcgtgattcaaaagaagatagacaccaccatagggatcgggacaggactcgggacagggaacgaggaagggaccgggagagagatcatggtcgtgaccgtgaccgtgagcgtgatcgtcgtgatagagatagggacagggatcgtggtcgggattatgagagagaccgtgaccgtggtcatgatcgccatcgtgagagaggcagggaccgtgagagagattacgagcgtgcaagtcatgaacgggaccgtggtcacatgcctgagagagatgctgaatttgccaacggtgagccaaaacatgatcaggaatatggctataactatgagcaacacaaaagccatgatgcttatgagacggagcgctcaaagcgacatgagcatgagtactatcagatgcaacctaacaacacagaacctgaaggccctgaagagggcgaggcatatgatgaaggtgactaccagtatcaccaagctgctgatgagcacaataactgaaatttgattgctgcactgcttgaacggttgttctaggtgctcgtcattgttgccaaaagaggcagaagcatgtttacttgttgcctggcgcttgagctctgccgctttgcaaggctggatatgtaataccggtgttactgtctgttgttccttttgtggtttgggagttaagatgtttttgcacttccctgcttttgtattgtatgagacgctagaacttgttttggattcatcttttgcttcagtactctgttcagaaaggttttgtaattcgagcacatgaactacagttatttcgtatggaattccaatattgaagtatcttttgttaactnnnnnnnnnnnnnnnnnnnn

SEQ ID NO: 390339 - DNA, 442 bp, Oryza sativa
cgcacgcgtccgcggcggcgccaagaagaccccagcccgctagatatggcgacggctcgggccagcagctgggaggacgagatcatggagtctgacattgagttggaaggtgaagctgttgagccagataatgaccctcctcacaagatgggagagggcgctgttgaagtctcctatgagaagcgtgaccaggcgcagctgtgcaaaaacaaaggcgtcgatgcattttcagaaggtaaattggatgaagctattgagcatctgacagaggctattgtactgaatccgacttcagctatcgcctatgcaactagggctgttatttttgtgaagtcaaagaaaccaaatgcagctattcgtgatgcagatgcagcattaaagattaatccagattctgctaaaggatataaatcacgagggatggcaaaagctatgcttggga

SEQ ID NO: 390340 - DNA, 555 bp, Oryza sativa
ttcggaagctcttgaatatggcctagtcggtgtgaacgaggggatcatctctacagaggttgccccgtttgggggcgtcaaccaatctggccttgggaaaaaaggatcaaaatacggcatggacgagtacctggagctcaagtacatttgcatgggaaacctgaactgatccccttgagagtcccgtgcgtcttaaaaccgaagtacctggctggtgatgaatcgaagccgggggcaagagtagctgcaagaactgaagagccctggggctccttgcccctgcaggacaggttagaaccttagaataataataagaagaaataattaaaataaagtggagtaagctaagccagggagccggaataaaaagttccccaatgagttgtacatgatgtgaaccgtaaagcccggcttcatctccgagctttgtttgggactagtactccctgagaaatcatcacgctactcatatcagtagtgtccatgtccaaaggcaccacctttaattctactactaggaaataaaaaaaatggaaagcctctaatcaagccccc

SEQ ID NO: 390341 - DNA, 796 bp, Oryza sativa
cacaatttaaagaaaagccataaacttgatacttccactgattctgaagtggttgatcattctaaggctgttaacaacaacgaggatattttagtctctagggagttatccccagagactgatgatggggataataagctgccaccagagactgggaatagagctgctgatgacaaatcgaaacatgttgataacacacctgctggcaagggaaagcggggccggcctcctgcatcaaagtcgcatgagaagaagaatgttggaaaaggcaaagtatcaggtttagagtctaaaaacgctgacgcagttagtgattctggtggaagggctacaaggcgactagctaaagatgatgatatcaagtcttcattcaaaaagactggtgaaggggaatcttctaagaagaagcagaaggaaaatttgaaacagcaggaagatactccacccgatgaagacactgatgaggatctcagtttaaaggatatcgtatctcccaagtcttcggccaaaacaggtaaaaacaaaggccaggcaggtgacagtgggggctcaaaaaggaaacgtgcacaggaagctgaagagacttcccagcccaagaagaacaaaattcttaaaggaaatcttggtggctcaagaatcaaagtgtggtggcctgatgacagaaagttctataaaggggttggtgagtcatttgatgttgcttcaaaaaagcacaagggtgttattatgatggaatgttgacgcctacccctaagaataaaaatgggattcattgtgagggggagacacaatctgc

SEQ ID NO: 390342 - DNA, 1116 bp, Oryza sativa
tcgcaatggctgcaattcgattggatgaggatggtgacaacattgagaacaccctgtcccttgctctagttgacacagcaaggccagggactacagataggagcatccaatcgttcgatccacttgcctctagctcatgggaaagggttccagaggagaaaactttaattacacctgtccagtgcaaatctttatggaggcaatttaaggctgaaactgaatatactgtcacacaggccatagctgctcaggaggcaaataagaggaacaacaactggctgccacctccatgggcacttgccgcaatggctatcctcggattcaacgagttcatgacattgttaaagaatcccctttacctgggagtcatatttgttgttttccttgttggaaaagccatgtgggtacagctagacattgccaaggagttccaaaatggatttcttccagccgtcctatcactttcgacgaaattcgttcccacgataatggacatcctgaagagattagctgatgaggggcagagacctgcagccccagagaggcaaagagagatggaactccaaccaaaatccacaaggaatggttcacacagcaacgtgacatcggcagggtcatccagcataacctcttcggagagtggacccgaatattcaagcccgattgcacactgatcagttcatctatagcttttagctgaaaaccccagcagttgtagtttcaacgggtgagcctttggagaccgaagcgccttgcagtttttgtaagcttgcccttccccatctgatgtacggagattcaatggccccagccagaggttatttatgggattttgggcccagggagtttgtttgtaagaaacgctgtagaatatgttttatttcattttttttttgtaacagcttatatgatggttgtatagaagatttgcggttttatcatctcaacccaaggaggccaggggagcacagcagtgcattctacactactaaatacagttgattgcatggacccgaaaaatgtatgtccatgtcttgaaactgcagtccgattgcttttgagaatgacccgttttgcttaaacaagaatgtattgcgattttgtgagctgtttgcc

SEQ ID NO: 390343 - DNA, 549 bp, Oryza sativa
  unsure (1)..(549): unsure at all n locations
accgtccgaattcccggtgcgacccacgcgtccgaagccaaacaacatacgcggcgccaccgccgcangccggcggagggagcaaaatggaggccgccgccgccgtcgccccctccggtctccgggcgagcttcctcgacgtcctcctcagccgccgtcgtaacctccaagtggctctcacggtggagcccgggagcccggtgaagcgcccgctgtaccaggggaggccgccgatggggcggagcgaggccatggaatcgtgcccgaggaaaggggtggtgaactccaaggagaagttggttgaagaaaatttctacctgattactgagtcaggtgaacaagggcgtgtacctgtgcttcttctgaaacttaacgatacaacccctaaaagaaaaccagttattgtattcctgcacagctcatataaatgcaaggattgcctgcgtccactgcttgaggcatatgcctccagaggctacatttctgttgccatcgattctcgctatcacggtgaaagggccaacaataacagcacttacatagatgcac

SEQ ID NO: 390344 - DNA, 587 bp, Oryza sativa
ccacgcgtccggtggcaagaagactgatgacaagagctcaagtagcaagaagcttgcagtggcagcaccagctgctgtggagtctacatgattgatgcagcatttaagagctgcataaagagcataactgtgctggcaattagagttcgcttcttattgtaatcctgaaaagactgtagtctggtctagctataccctcatcaagcaagaaaagtgtctgtggaaagaagccgcgtcaacggccatttaagctgtcactgaaattttcagtttaggcgtacagtttgatttagctttgccgtgccctctgccttcaggcagatgagcggcattattggatacatcctctctgtccggcaatatcgctttgtgactcaacaagccgatggaaggatctgcgagactagatacgaagctttttgttgtgtatcattttatatggcctgcacaactgtgtgattttgtcaggtgcataacatgtggaagatccataattttatgcactatggagattcaattaccttcctgaatgtttgagcttcgacatgttattggttattgtaccttaaaagcaacctgagatcctt

SEQ ID NO: 390345 - DNA, 526 bp, Oryza sativa
ccacgcgtccgccgaaacttatcaccttgtgtccagacctccaccgtatgatactgatcctagatatgcccgtgttcaaagagagggtttggtatctaggcgtgaaaagtctataaatctaacacaagaagagtcactggctcttaggcgaaatggcagcagctctggcattgaacatttagctgctcagaagaaatggagcagcactgaacctgagggtgaatataaagtccatcgctctgaatccaccaagagtttatccgcaaaatcgtataacagcagttttgcagttgtcacttcagaagatgaagatgtctgccctacttgtctagaagaatacactccagacaatccgaagattatagctaaatgctcccatcattatcatcttagttgtatctacgaatggatggaaaggaagtgatacttgtccgattttgtgggaaggaaaatggagttttgtgaaccccatgagagatttctcgctggttgtatcagtggaaggcaaaaggtctacagtgtgata

SEQ ID NO: 390346 - DNA, 559 bp, Oryza sativa
ccatggagaccactacaagcagcaactagcttagctagctagctactggtgatcaggcacgagctagccggccatggcgaggcgtcgccatgcttgctttcttctcctgctgcctctgctggtgctgcagcttcttcttgctgggggaagcttggttgatgatcttcctgctgcaactcatcaggtgccgaggttagtagggccacagcgcaagttacagcagcttccaaacccaaggccacagccgcaaccattgccccagccaaacccaaatccacagccacaaccactcccacagccacagccacagccacaaccacaaccacaacctctgccacaaccgcagccgcaaccacagcctttaccgctaccaggcccacaaccattaccgcaacccggcccgcagccgaacccaaacccccaaccgttaccacagccaaacccaaatccccagcctttacctcagccagacccgaacgctccgccgttgcctctgccgcagcctaacccaaacaacccgcaacctttgtcgcagccagaccctaacgcgccatcacta

SEQ ID NO: 390347 - DNA, 815 bp, Oryza sativa
  unsure (1)..(815): unsure at all n locations
cctaacccgcgatccnnctccgccgccgccaccaccaccacccacccggatccccacctccctccccgatctcaccacntccgtataaaggcggctcggtttgaaaaatctttgcctccggaggangngngggggatggctgccgcggcggtggatccgatggcgctggggctggggacgagcggaggaggaggaggaggcgagtcggcggtggggggtgatggggcggcggtgngatctcgtcgagcacccctccggatcgtccccaccctccagaacattgtttcgacagtaaatctggactgcaggttggatctgaaaaaaatcgctctacaggctcgtaatgcagagtacaacccaaagcgttttgctgcagttatcatgaggataagggacccaaagacaacagccctgatatttgcttcgggaaagatggtttgcactggagcaaagagcgaagaccattcaaagcttgctgcgaggaaggtaatagccaatagtcatattgtttcatcactatttatgcttaggaacgcttgttgtttacatcatgcagggagaaattgttcactgatcctattttcggcttttgctgaattgctctataacaatttttatctgattatttgttagcgcagtatgcgcgaatcgtccaaaagcttggcttcccagcaaagttcaaggatttcaagatccagaacattgttggttcatgtgatgtcaaatttcctattcgcctggagggccttgcttattctcatggcgcattctctagttatgagccagagctcttncctgggctgatttaccggatg

SEQ ID NO: 390348 - DNA, 1100 bp, Oryza sativa
ccgggtcgacccacgcgtccgggcgagttgtgctctgcctccctctcccttcccacgccgtctcgccgcaatcgctcgctcggtcgcctcctcttccgccgcgagacacgaagagcagcagctcacaggtaggcctgcgcgtcggcggccatgggagacagccagtactccttctccctcaccaccttcagcccgtcggggaagctggtgcagatcgagcacgcgctcaccgcggtcggatccggccagacgtccctcgggatcaaagctgctaatggtgtagttatcgccactgagaagaaattgccttctattttagtcgatgaaacatctgtgcaaaagattcagtcattgactccgaacattggagttgtctacagtgggatgggtcccgatttccgtgttcttgtgagaaaaagtcggaaacaagcacagcagtattatcggttgtacaaggaaactatccctgttactcagcttgtccgagaaactgctgctgttatgcaggagttcacacagtctggtggtgtaagaccatttggagtatcattattgattgccgggtacgatgacaatggcccacagctgtatcaggttgatccctcaggatcatacttctcctggaaagcatcagctatggggaaaaatgtctccaatgcaaagacatttcttgaaaaaagatacacagaagacatggagcttgatgatgccatccatactgccattttgactctgaaagaaggatatgagggtcaaatctcagccaacaatattgaaattggagttattcgatctgaccgtgaattcaaagttctaaccccggcagagatcaaggatttcttggaagaggtggagtaaattgtctgttgacatttgatagtttactgttctaagtgacactcttgagccgtagtcatgaggcttcttgtctcttaccatttgtcacttaaacctattgtaaactgatttgcttcagtgatatgcatgagatgaagtggtggacctacttttgaatccccatcgtaaacaagatattgttgggtgaatgttgtatttggttctcttctaaggaggtatttggcgcaaaaaaaaaaaaaaaa

SEQ ID NO: 390349 - DNA, 463 bp, Oryza sativa
  unsure (1)..(463): unsure at all n locations
ggaaggtgcagccgaagaaagagaccaacctgttttggctaatcattagggcatttgttgtttcccatgtcccaagatgtgggcaaaatgagaggatgtgccaaaagacactttcatctggcactgncagccctgggatgcccctctcccccctcgcctccggtgaagctccattttgacgcgatgcatatacatatttgttttctgtgccgcacgttaggttggttggtaggcttcaggagtttatgtaggttctagcttgtaggagtagcatttggtgaactttctcagccttttcaactctaaaatctattagctgtaattgcactatttttgtagaaggggtgaggtatgtgcttctcttatatatgaaagtatgaaacagtagtatccacagacgctcctctgaatgaggattatccggcctggtggccttgcgttctggtgaaaaaaaaaaaaaaaa

SEQ ID NO: 390350 - DNA, 563 bp, Oryza sativa
cgcctccgccgcactctcctctctgtctccgccgatctgctctgccgcgacgcgccgccggcgagaagggacggcctcctctccttcccgaccccgcgcgagcatccagtttcgagtttcttctggatttctaggatggcgactctgaggaacctgaagatcaagacgtcgacctgcaagaggatcgtcaaggagctccgctcctacgagaaggaggtggagaaggaggcggccaagactgctgacatgaaggagaaaggcgccgacccctacgatctcaagcaacaggagaatgttttagccgagtcaaggatgatggtcccagactgccataagcgacttgaaactgcactggcagacttgaaagcaactctggctgaattgaaggaatcaaatgaacaaggtgctgagattggagaggctgagagtacaatcacagaagttgaagctgtcgtcaagccaacagaagattgaattcgttttttatgaaatccctgcaaacctctgttctgttggggccatagtagctcaactaggattatgatggttgctgtgaattcatg

SEQ ID NO: 390351 - DNA, 521 bp, Oryza sativa
ccacgcgtccggtttcattaatctcatttggttacctgtttgcagtgcacgagaaatcaattttgcttcctcttttgcctgcaagcctcttagcactacaagaacctcacttgtatggatggctcatgtactttggccttttctcaatgtacccacttatctgccgtgatcaccttcttctacaatatatagctgttcttggtctcttcgttcttatttactactctcctggtggaagctccaaaaaggggatgagcattccatctggagccaaggcagttctaagtctggcattgttatgctcgctcttacttcaagttctatacctgcaaatagaacctccaaagaggtaccctttcctctttgatgcattgatgatgttcatttgcttttcccaatttgtcattttaacattgtacaccaattacaagcaatggatgttgaactcccattctagatcagtaggcaagaagaaggatctatgatccaaatttcaaaattttgagagctaatgttactat

SEQ ID NO: 390352 - DNA, 411 bp, Oryza sativa
  unsure (1)..(411): unsure at all n locations
cttgttaggtgatctctcgattagctccatttgagcgaggtatatatgaggattatgttgccaatttttggtgtagcacttcagtccttattaagtggaagagattgtttgcaataaaaccgctgaaactcatgagtctctctgctaccatcttggctttcctgccttcattggttcagcaaatcagatcaccaagtaatcttggctttctctattctttgttgaacagctcaatttcgttctatctattctcataccaagtgcacgagaaatcaattttgcttcctcttttgcctgcaagcctcttagcactacaagaacctcactttgtatgggatggctcatgtactttggccttttctcaatgtacccacttatctgcccgtgatcacccttctnctacaatatata

SEQ ID NO: 390353 - DNA, 1002 bp, Oryza sativa
ccacgcgtccgcccacgcgtccgcggacgcgtgggcggccacgctcgccgccagcgtggccggcgtgtgcctgccgctcttcgcccggtccgtgccggcgctccgccccgacggcggcctcttcgccgtcgtgaaggcgttcgcgtcgggcgtcatcctcggcaccggctacatgcacgtgctcccggactcgttcaacgacctcacctcgccgtgcctgcccaggaagccatggtcggagttcccgttcgcggcgttcgtcgccgggctcgccgccgtgttcacgctcatggtggactcgctcatgctcacgttccacacgcggggcagcaagggacgggccagcagcgccgtcgcgcaccacggcgaccacgggcactgtcacgctcacgcgctggggcaagcagacgtcgctgcgctgtcgacgacggaggcggcggatcagggcagcggcgacgtcgaggccggtaacaccaccaaggcgcagcttctcaggaatcgcgtcattgtgcaggttctcgagatgggcatcgtggtgcactcagtggtgatcgggctgggcatgggggcgtcgcagaacgtgtgcacgatccggccgctggtggcggcgctgtgcttccaccagatgttcgaggggatggggctcggcggctgcatcctgcaggcggggtacggccgccggacgaggtcggcgctcgtcttcttcttctccaccacgacgccgttcggcatcgccctggggctcgccctgaccagggtgtacagcgacagcagcccgacggcgctggtcgtcgtcggcctgctcaacgcggcgtcggcggggctgctgcactacatggcgctggtggagctcctcgccgccgatttcatggggcccaagctgcagggcaacgtccgccttcagctcgccgccttcctcgccgtcctcctcggcgccggcggcatgtccgtcatggccaagtgggcgtgagctgacgatgcatcacactctgcggcatcatg

SEQ ID NO: 390354 - DNA, 1380 bp, Oryza sativa
  unsure (1)..(1380): unsure at all n locations
ccacgcgtccgggagattccagtatgaggacgaggtgaggaagaaccctctcaattatgattcatggtttgattacattaggctggaggagagtgttgggaacaatgacaggatcagggaggtgtatgagagagccattgctaatatccccccagcagatgagaagcgttactggcaacgatacatttacctatggataaattatgctttgtatgaggagcttgatgcaaaggacgtggaacggaccagggaagtttacagcgagtgtctcaaattggttccacacaagaaattcacttttgccaagatgtggctcatggcagcccagtttgagataaggcaaaggaatcttaaagctgcacggcagatactcggaaatgccattgggatgtctccaaagggcaagatattcaaaaagtacattgagattgagttgtatcttggtaattttgaccgttgtaggactctctatgagaagtatattgaatggtctccagcaaactgttatgcctggaggaagtatgctgaattagagaagaaccttagtgagactgatcgtgctcgttccatatatgagcttgctattgctcagccagcccttgatacaccagaagttttgtggaaggagtacttgcagtttgaaattgatgaaaatgaattcgataggactcgcgaactatacgagagattgcttgatagaacaaaacatttgaaggtatggataagctataccgagtttgaggcctcggctggtttggctggggaagacggtgagagtgaggagattaagaaagaagttagttatccatgaacagcagatagaacgggttcgaaggtgccgagcaatctttgaaagagcattcgaatacttcagaactagtgctccagagttaaaggaggaaagagcaatgctccttgaagaatggcttaacaaggaggtgagctttggtgaccttggtgatgtcnccttagtgcagaaaaagncgccaaggaaagtgangagaaagagaccaattcctacagaggatggctccactgttgcgtatgaagagtacattgattatattttccccgatgaggttgcgctggctccaaacctcaagatccttgaagcagcctataagtggaagaagcagaagacagatgatactgatgatgtctgagctaaactgccactgtttctgtggtcacgaatgagctaatcgttgtcaaaattagatctgaaggtcttctacaatgctgggtaaagttgtgaatgtgccctacctgatcatgtggtgtggtgctggcacttcgatcaattcagttttacatctgtatgtctgatggatagaaactgaaacaagttcatagtctttaatttaaaaaaaaaaaaaaaaa

SEQ ID NO: 390355 - DNA, 505 bp, Oryza sativa
  unsure (1)..(505): unsure at all n locations
cgacatcatctcaccgggtgcgcttcccctccccttcgtacaacgaagatttgctattcgccagggcccaaccacagttatagctcacgtagccgctacaggcttcttcgccgcctcgtctcctcctcgatctcccttcctccctagaaaatctctcggatctcgccgagagctagcggctggctggcggcggtggcgcggtggcagcaaagtgtacgctttgcagttgctgccggcgcggcgcggcaggggttgacgacgaagagggaggaggagagaggctgtgtcgggtttgtgttgtgtttgtgtgtgtagtgtgagatctggagacggccgggaggatggcgcgcggcgggagcttctcgcggctgcggctgcgcgcgggggtcgttgtcgccgccgccgccgccgccctgctcctcttcgccgtcgtcgcgccgcccgccgcggccttcaacatcggcctccaatccgccggcgacgggcggtangtacaatatataag

SEQ ID NO: 390356 - DNA, 1542 bp, Oryza sativa
  unsure (1)..(1542): unsure at all n locations
gcacgaggnaattccaaagaaagcatgaaggatcaatttcgacaaaagatcaaggaaaatttgttcctagtgaaaaggttatgcagcttcgaaacaaattgatgaagtttatggaagattacatatacccgatggagagtgagttctataaacgcgcacattcgacctcaaggtggacaattcatccagaagaagaaaaactaaaagccttagcaaagagagagggactatggaacttgtttattccgctagacagtgctgctagagcaagagagcttctgtttgaggacatgtctcatggttctcctggaagttctgaggagcttttgctaggtgcaggtctcacaaatcttgaaatatggatatctatgtgagattatgggccgttcaatttgggctccacaaatatttaactgtggtccacctgatacaggcaacatggaggtcctgttgagatatgggactaaggagcaacaaaagcagtggcttgttcctttgttggaagggaaaattcgttctggatttgcaatgacagaaccacaagttgcatcttcagatgcaacaaacatcgagtgttcaatatcaaggcaaggagatttctatgtgataaatggaacgaaatggtggaccagtggggctatggatccaaggtgccaaattcttgtattaatggggaagacagatttttctgcacctaaacataaacagcaatcgatgattttagttgatgtcaaaacacctggagtgcagataaggagaccgttgttagtatttggtttcgatgatgcacctcatgggcatgcagagattacttttgagaatgtgcgcgttccagccacaaatattctccttggggaaggccggggttttgagattgctcagggaagactaggccctggaagattacatcattgcatgagactaataggggcagcagaacgtggcatgaatttgatggtcgagagggccttaagtaggaccacttttggaaaaaagattgcgcaacatggttcctttttagcagatctggcgaagtgccgggtagaactggagcaggctagacttctggtgctggaagcagccgatcaacttgaccgacatgggaacaagaaagctcgtggtatccttgcaatggccaaggtggcagctccaaatatggccctgaaagtgcttgacatggcaatgcaagttcatggtggtgctggtctctcatcagacacagttctatcacatctatgggcaactgctaggacactgaggatcgccgacggccctgatgaagttcatcttgggacaatcgctaagctggagcttgcaaagagcaaggatgtagtctcgcgtcatcaggatgccgcccagatttcatgaataataaatactaggggagagggaaatcgttgtgtaacatgtccccgtttttattgaacgaaattggaaatgacactacgatagttgtcacttgtatagaatggttgatatgtggcgtgaaatttgtggatgttgtactgcgggtattactcccaaaaaaataaaaaacccaaa

SEQ ID NO: 390357 - DNA, 496 bp, Oryza sativa
tacaagtagaatctatacaagctatgttgactatcaattactctgtttgactgagaatgcagagaattatggccttggttctttgccttctgcaagctttctgctagcttggagagcttggtttttctgatgcagctcagttttcatagagcaaacagtagacaccctcattatctggatattgatagcaaagatgttgggggtatcatcagagtgattcttgagctcaagtttcctttttcttttatgaaatgcttgaccatcatcatgtatctggatgtagtagcagaatttccattagtgtgttttgggtgtggagctagtgaaatgctaattaacgtcagcatgtgcgctggcctgaattctgtcggctgtgcctcgtgttgatgtaaagataaatatttgctaatgtgatctgggccatctggcagtggctaccataccttttatcttttggttgagaaagaaagagcagttccagtgcagctgtgcattg

SEQ ID NO: 390358 - DNA, 575 bp, Oryza sativa
  unsure (1)..(575): unsure at all n locations
ttcaaactcgacgcgccactcgacagcgaccccgcagccgatccatcccgccgccgaagcagcagcaaccgccacggtgcgccgccgccgccggtaccgatgtcgacgagctccggcgccgactcgtccccgcccgtctcgggcctcgactacgacgacaccgccctcaccctcgccctccccggctcctcctcctcctcctcctccaccgccgaccccgaacgcaagcgcgccgcccacgccgaccacgccgacgccaagccgccttccccaaaggcgcgggctggtggggtggccgccggtgagggcgtacaggcggaacgcgctgcgggaggacgccgcgagggcgaagctggtcaaggtggccgtggacggcgcgccgtacctgcgcaaggtggacctcgcggcgcacgccggctacgcgccccttctncgcgcgctccacgggatgttcgcctcctgcctcgccgtccgcggcggcggcgggggcgacggcgaaggtacaaagctcgtcgacttggtcaccggcgcccagtacctgcccacctacgaggacaaggaccgcgactggatgc

SEQ ID NO: 390359 - DNA, 632 bp, Oryza sativa
  unsure (1)..(632): unsure at all n locations
tttttgtcgcgtgggcggacgcgtgggtggagaaaccaaaggatgatgactgttctttggaattgtcaaaacttcatacctatgatgatgttgttgagagagttgcccgtcagcttggtgtggatgatccagcgaaaattcggctaacatgccataactgctattcgcagcagcctaaaccgtaacctatcagatatcggcgagtggagcatcttttggacatgctcattcattataatcagacatcagacatattgtattatgaggtgttggatattccactgccagaattgcagggcctgaaaaccctgaaagttgcattccaccatgctacaaaggatgaggttgtgattcacagtatcaggcttccaaagaatagcaccattgcagacgtgattaatgatttgaaaacaaaggctgaactatccagtcccagtgctgaattgcgcttgttagaggtcttttaccacaagatatataagatttttccactccatgagatgatagagaatattaatgatcagtactggacactacgtgctgaggagattccagaggaggagaaaaatctcggtccaaatgatcggttaatcatgtntatcacttcatgaaagaccctttttagaatcagc

SEQ ID NO: 390360 - DNA, 613 bp, Oryza sativa
  unsure (1)..(613): unsure at all n locations
aattcggcacgagcnnnnnnnnnttcgngcangggncaacgagggatannnnnatccgtctctttgatggtgtcatcagtgagtcacgtggtttaaagaggtcggtggttgctgtaaggngggattctttcatagatttgaagttcgaagtgggcgcgtttccatccagtttcgaccagcattatgtttccttcaaggagaaaatccatggctatgatactcaagaaataaagactgattttgcgttaatctcagtaaaggtgacttggtcagctttgctttctggactagagtgatacctctgtttctgtaacagaatgggccaagagtggctaaaaacctgaggcttactaaacctaggtgcgccaaacttggatagtaaagtattgtaataaatctgtcattgtaattaagccctccgtccctgaaaaaaagtacttttagtaatgcatctgaataagtgtctgttgagatgcatagtcggtcgatctcgccgtccctgaaaaactgaccaagaacttttagacatgcataattagtttcgtctctgtattatcccttcagcactaggggttgtattaattatatggccgaatcttcaaggcaacaaaaa

SEQ ID NO: 390361 - DNA, 795 bp, Oryza sativa
ccacgcgtccgataggacacaggatgtaaataaagcagttattattgcgaatccacgcacttctgaatttgaggtggttcgaaccagtctgatgtgatgtttattgaaaactttggaagcataacatagaccctcccaggacccataaagatatttgaagttggtgatgtagtgacattggatgggtcacgtgatgttggtgcttctaataatcgtcgactcgccagctttgtactgtaataagccagtctgggtttgaggaaattatgggtttggtagatagaatcgtgaatgttgtgagagctccccacattcaaatttggccagaattactatgttcctacaaatgaacctgaattctttcccaaaagacaatgccaaaattgttatgagtgatggaaagccagattggctacttaggaattgtgcatgccgaggtcctaaggaaattcggcattcccagacccctgcactttcgttgagattgacgttgaggctttgttatagtaccacctgctgtcagtcaggatgtgcttgctttgttcatttagcatgcgtggagtatctaacagatcaagcatttgagtttgaacaccgcatgtaattgtagaattcataattgcatattttttttgttcgggaagaaatagaaaatggcgatgcccttttttgccaaacaggccgtggggtcatgtttaccttgttcccattgtgtaattttacatcattgctggcacaggttttttatttataaaatggatatctaaaatgattttgtgaaaaaaaaaaaaaaaa

SEQ ID NO: 390362 - DNA, 493 bp, Oryza sativa
  unsure (1)..(493): unsure at all n locations
ctgacgcgtgggcgctaatccatcaacctatagcttaacgatcactgccattgcaatggcgcggtgcactttgctcgttctcctcgtggcggcggcggtggcggtcgtcccgctcgccgccggccagccgtgggctacctgcggcgacggcacgtacgagcaggggagcgcctacgagaacaacctcctgaacctggccctcaccctccgcgacggcgcctcctcccaggagatcctcttctccacgggctccaacggcgccgccccgaacaccgtctacggcctcctcctctgccgcggcgacatctcccgcgccgcctgctacgactgcggcaccagcgtgtggagggacgccgggagcgcgtgccgccgcgcagggacgtcgccctcgtctcaacgagtgctacgcccgcctctccgcaaggacgacttcctcgccgacagggtggggccggngcagctgacgaccctcatgagcagcaccaacatcagc

SEQ ID NO: 390363 - DNA, 406 bp, Oryza sativa
  unsure (1)..(406): unsure at all n locations
ccacgcgtccgcccacgcgtccggctaatcaagctagctaagctaagctaagttagtatagtgtgatacctcttgtgaaggtagagagatcaatggcggcgacattgcgttggggcggcggcgggctcgcggtggcggcgtttgcggcggtggtcgcgttgtccggcctcctcggcgtcgcggcgaactacggcggcggcggcgggttcttgttcccgcagttctatcagcacacgtgcccgcagatggaggcggtggtgggcggcatcgtggcgagggcgcacgccgaggacccgcgcatggcggcgtcgctgctgcggatgcacttccacgactgcttcgtgcaggggtgcgacgcgtcggtgctgctcgacgccgaaggcanctggcggttcncacggagaag

SEQ ID NO: 390364 - DNA, 1202 bp, Oryza sativa
  unsure (1)..(1202): unsure at all n locations
ccctggcaagaagcaganaagaggatgatgggaggaagaaggacaagaaaaagagagagaaaagaaaagcctgacaagtgggcccaaaacgtcttataacatgaaacggagggagtaacctttagtattttctagatttaatccaaatcctattatttagaagcccatatctcctaaaccatatatccgattccaatgacacttgacctaaattcatctaaattcaaactctacattttgatatcagacttgctattttaagatttatttgaatttccttaattaccatttgaatttatatttgattcaaacttatatttgaattcttactttaaacttatatttgattatcgcatatcttctttcattccaaaatacccattagcccctaaagagccgccggttggaactttacgcctttcatggggatgtttgcccggtctactggcccttaccatcagactgttggtttgtaaaccccagccaaggtccaatgtgctgctccttagcaccccacgcctctatgcgtactgtggttggagctttactattccctcgacctccacagcacgccgcacagttagctctcgggctatgtgtgatcccaagccgctccgtcaccacccacggttgtcggagtaacacttccgcctcgctaaacctgcatgagcctcctacttctctagtcgatatgttgtctgttgacaccggctagagaagtgttaacgatccaaatttggtagttttagtatcggagatggagataaaaccgaagcggaatctaaggatggatcgttccgggaacagagcaagaatcagctgaagtccgaatcggctgcaaccagaatcgacagagttcgagtcggacaaggttagccgattaaaccgattccgacaatgtaactcgatacacgttgtcgggttgagttaatgtgcttcatgtggattgccatgcacggattaagtcctgagaaggcaattgtatctatcaattaggatattttatgtaatttccttagagataagtttgggcaaaagtctgccgcaacgccttatggtatcttagagtttgttagagattagagtcgtgtccgacatggacatattttgtaatctcgggtataaatagaccccgagccccatgtaatcaatctaacacacacgttcaatacaatctcggcgcaccgtcacccttttacatt

SEQ ID NO: 390365 - DNA, 556 bp, Oryza sativa
ccacgcgtccgaagccaatgggatctgtgaatgtgaaagtggatggactgggattgactgctcaacagcggtttgtgatgagcaatgtagtttgcgacggaggagtctgtgataatggtaaatgtgaattccgctgttcagattatgcaggctacacttgtcagaaaggttctgcaatattgcccagcttgtcaatgtgccatgatgtactggttagggatgctgacgggcagcattgtgcaccaagtgaactcagtattctacaacagcttgaagcagtggttcttgtgccaaattacaataggttgatgccaagtgggcggaccttccttaacttctttaacaatgccaactgtgcagcagctgcaaaagcggttagcctgctggatctcgattcaaaggtgcgacgaagatggggataaccgacttcgggtatgctactctgcatgtgagttgtacaatacagcatgtgggggcgggtcttgattgctcggaccagaccctgtttagcaagagggaagaagaggaaaagggtgttccgtgcacaagatatggc

SEQ ID NO: 390366 - DNA, 975 bp, Oryza sativa
ccacgcgtccggaacttttgtggagatcaggtacgctttctggctcgatcatttgctgtacctggcaaccatcttggacaaagcagtaatggttagcgttggccatatggtccggttgcaattatcacaccgttcaatttcccattggagattccattactgcaactaatgggagcactgtatatgggaaataaacctgtcctcaaagttgacagcaaagttagcattgtgatggaccagatgcttaggttgcttcacgcatgtgggatgccagcagaggatgtggacttcataaattctgatggtatcacgatgaacaagctgctgttagaggcaaatccgaaaatgaccctcttcactgggagctcacggatagcagagaaattggctgctgatttgaaaggcaaaatcaaattggaagatgctggttttgactggaaaattcttggtccagatgttcaagaggttgattacattgcatgggtttgcgaccaggatgcttatgccttgcagtggtcaaagtgctctgctcagtctattctattcatgcacaagaattggtcgtctagtgggcttcttgataaaatggaaaagtctttctgaaagaaggaagcttgaagacttgaccattggcccagtccttactgttacaacatcaagcatgatagagcacatgaaaaaccttctcaaaataccaggatcaaaggtcctgtttggtggtgaacctctggagaaccattctatcccagaaatatatggtgccttcaaaccaactgctgtatttgttcctctatcggaaatccttaaaagtggcaattttgagcttgtgacaagggagatctttggtcctttccaggtggttacagagtattctgatgatgagcttgaattagtattagaagcctgtgaaaggatgaacgctcatctgacggctgcagttgttcaaacgaccctttatccctgcaggaagtactt

SEQ ID NO: 390367 - DNA, 1024 bp, Oryza sativa
  unsure (1)..(1024): unsure at all n locations
ccacgcgtccgcgccgccgccgacgtcgacaaggtcggggagcggcttcagggcgtcgggatctccgtcgccgatggctccaccagtgcaggggatgcttctgcgtccaagcaggaagaggtgaagcgcttgcctggcggtaaggtcaagaagaaggataaacaagaggttgtgattgagaagattgtccgcaacaagcgcaaatgtgttactgaggtgaagggtctggaattatctggtgtcaagctgactgatgcttcaaagaagctggggaagaagtttgctacatgagcatctgatgttaagggccccactgagaaggagcaaattgatgtgcaaggggatatatcgtatgatatcgtggagttcattacagatacttggcctgatgtacctgaagtcagccctttttttcattgaagatggaaaggaaggttacctgctgctatgaatgttttatggccaacaaggcagaataccaaatggaagttacaaatatagtagaaatataaagacanaagaagtatgcctgcaagctaaaggacatgggaccttgacatgagctcatcaaatgctactcctcctgccaaagacaaaaaaactgtttcttttcaattctggtcttaagttcatcacaactggtgttatatcgacacctggtcaccatgtgtatcaactttatcctgcaagttagtttggtattgctaagccatttgaagtggcaaatgttttgtgcgagcatcaggcttcatatttaacgacatgcaaagaagagtgcaaattagtagtgtttctgccctttctgctttcatagagaaaggttgtttcacactgcaagtttggatttgaatttgatctttcgttgagttctcgctcatcagggcttctaactgcaagttatggtttgtaattggggttgtaattgcagaattcaggatgatcataatagggtgtttttgtttgcaagaactacatatcatgcgggctgtagaataggcagagacgagtctgctgggcttctatt

SEQ ID NO: 390368 - DNA, 710 bp, Oryza sativa
  unsure (1)..(710): unsure at all n locations
ccacgcgtccggaagagttgcttcatgaggcctccaggtggtatacttgctccaggagagagcatcatagctacagtgttcaagtttgtggagcatcctgagaataatgagaagccattagatcagaagtgcaaggttaagttcaagattgtcagtctgaaggtcaaaggacctatggagtatgtcccagaactgtttgatgagcagaaaaaccaggtagcagttgagcaaattctgcgtgttgtattcttggacgctgagcgtcaaaccccacaaatggacaagctcaagcgccagcttgctgaagcagaggcagcacttgaagcacgcaagaaacctncagaggacaccggcccccgcattgttggggaaggccttgtaattgatgaatggaaggagcgaagagagagataccttgctcgtcagcagaattgaaggggttgattcagcgtagacacggcaccatgaactgtaaaccattggttgcttgaacatatcgttttatcgtcgccacacatccttctgtccatggttttttcagtttttacaaaggttctgcttggaacaagagtgaggctttgtgtaattaggatttgagcttcatgctgcacttcattcctgggtctacatgtagatagccagtcactgcttgataataatattttctatgctagatcatgtacttggggttgggacttagacctgtggat

SEQ ID NO: 390369 - DNA, 640 bp, Oryza sativa
cagatctgccaggaggaggacgactggaagcgcatcgaggaccgcatcggctgcggccaggtcgaggagctcatcgaggaggcccaggacgagctcaagctcatcgccaagatgatcgaatgggacccatggggtgttcctgatgactatgaatgcgaggttattgaagatgacacacttatcccgaaacatgttccgcagcatcggcctgttgcactccctgaggagttcttcaagacactagatgctgtcaaatctgatcctgctctgcagggttgagtctcctcctcaagtgaaaccataaagacgtgaactctccaagatcttaccatttgcaccattttgctgcgtggagtagactatagattagtttcatgtgttctttgccagcaatatttgcttggttgttccaagcagaataaagttctaccgagcactacaaagaatgtgtttaaactgagtgcttccacacagtgaaatgtgtgatatttgatactgtggacatcattttctttttctctgtattaatctatggtgacggaaagcaaacgttttactgttaacaacatgccctaccccttcgacgccacggcggcgccgggatacgtctatcaactgccacatcctggatcacgaaggg

SEQ ID NO: 390370 - DNA, 756 bp, Oryza sativa
gtccaggttcagccatggcgcccacctctcgctctcccgccgccctcttcctgctgctcgcgctcgcctgcgccgcgccgccgctcctgcgggcggggacacgcacctccacttcttcatgcacgacgtcgtctccggcagcggccagacggcggtgcaggtcatcaagggcccgacgtcggccaacggtggcgtcaaaccggcttcggagacaccaccgtcgtcgacgacgcgctcacggagacctcgtcggcgacgtccccggaggtggggcgcgcgcaggggttctacatgatgtcgtcgctgtcgagcccgacgctgatgatgtgcgtgaacctctacttcaccgccggcgagaacaacggcagcaccatcgcggtgatcggccacgacgacaccacggccacggtgagggagctgtccgtggtgggcggcacgggcaagttcaggatggccaccggctacgtggtgtggaagacggccagcatgagcgccagcaccggcgtgttcgagctcgacgtctacgtcaccacgcccaacgccacaaccatcgacgcctccgcgccggtgtcgccgttggacggcggaggcagcagcgggtcgacgtcgacggcgaagtcgggcgcggcggggcgacaggtggggtgggtgagtgcgtgcgtagtggggttggtggtggcgttggttgggcgtggttggtgaggcgtcgagtcgtcggtgtccaagagattcgttggtgccttctctttgttttcg

SEQ ID NO: 390371 - DNA, 1543 bp, Oryza sativa
ccacgcgtccggctgttcaagggcacgggtgaccgcaacgccgcgcagctcgaggaggagatcgagaacatcggcggccacctcaacgcatacacgtggcgggagcagacgacctactatgccaaagtactcgacaaggatgtgccgcgtgcacttaatattcttgcggacattctgcagcactcaaagttggaagagtcccgcattgaacgtgagcgcgatgttattctgcgagagatggaagaggttgagggacaatatgaggaagttatattcgatcatctccatgcaactgcattccagtacacttctcttggcagaccaatcttgggttctgcagaaaatgtcaagtcaattacccaagaggacctccagaagtatattgaaacacattatacggctcctagaatggttatcactgctgctggtgctgttaagcatgatgatattgtagagatggcaacaaaactgtttaatgacctaccaactgaccctacaacaacaagcatgttggtttctacccaaccagcctgctttactggttctgaggtccgcatcattgatgatgacatgccccttgcttcaatttgctgttgccttcaatggagcatcatggatagatcctgattctattgccttgatggtcatgcaatccatgcttggctcatggaacaagagtgctggaggagggaaacacatgggttcagagcttgtacaaagggtagcgatcaatgacattgctgagagtataatggcatttaatacaaattacaaggacactggcctctttggtgtctacgctgttgctaagcctgactgcttggatgatttggcttttgcaatcatgcaagagattagcaaactgtcataccgggttactgaggaagatgttatccgtgcacgtaatcagctgaaatcttccatccaactgcacctcgatggttccactgctgttgttgaggatattggccgtcagttactcatctatggtcgaagaattcctattcctgagctttttgcaagaatagatgcagttgacgcaagcacagtcaagcgagtggccaaccgtttcatttttgaccaggatatcgctattgctgcaatgggacccattcagggtcttccggactacaactggttcaggcgccggacctacatgctccgttactagactctccaaccgatgtactatgtttacattctgcaaaggcaagataattgcctcttttggcatcagtatattatggcctcgtccatgcacattgtgtgtgcgacgtggaggaaatttttttgagcaccattttccttgttttctttgtccaaaaccaacaaagctgtcaataatgataggcaaattcaactgacgtggcttacttgagttgccacccgttgtttctacgatgaatcgttacccctacttatccttttttttattgcaagattgctttctttttcttggaataatttgatgaagctgcttatgtaaagatgatagttttgctgtgtcgactattgacaactgcacgaggtgcgaattgtaccg

SEQ ID NO: 390372 - DNA, 815 bp, Oryza sativa
ccacgcgtccgcggacgcgtggggagatataatacctctactaaaaggtatatacgtacctccaaagcacagaagaaaaacttgcataatcttggcctagacaaacttacccacatactatgtcacactttgtggttgttcagttatggtgtaggtgagcgaatcagcttggcctacacaaggaaaatcatcgatgccattcactcgggtgagcttttggctagaagctacaaaaagacagatgtctttggactagacatccccacaaaagtggaaggagttccatctgaattgcttgacccaataaataccgtaagtccataatttcaacattatatatttttgcatgggatttatgctgcagcttggccaaccattttcaactatgatgtagtgggaagacaaagactcatacaagttgacccttctaaaagcgggcagatctgttcaagagaaatttcaaggtatttgcaaattacaaagaaaggtggtgttagtgatctggctgatgagattgctgctgcaggaccaaattaatttctgattttaattgaatagtagtagtatgtcttaatgtataccaaataaaagggattttttatgttcctcgaggatgtatcgcaaggtaccacttattttagtgtaaatttttgatacctcatggtacttctctagtgtaaagtaccaaaaagtatcataaattaacactaaaatatggtatctctcgttacctagtcttgtacagtaaaactgaacaaaatgcccattttgaggatggtgacatatatatattaaaagctatttcagagtgatgt

SEQ ID NO: 390373 - DNA, 583 bp, Oryza sativa
gtccgcggacgcgtgggtgagaacttgagatagtgctgctcaacagccttctatagtgcatgcatacaatggggaaatcaccagcactacgactctactatcttcttatcaccttgttggcattctacttcttgattgttccttccaatgctatacctctctcaagagtgcaaaggctgcacttgcaagagtccagtgagatgccattagtcagaggcagcacagcaaagccaaagatggaaatggagagaccagttgttgccctagaggaggacgccatgatcaatgcgaggatggctttggagacacaggactatgcaccctcaggcccaaacaaccaccacaagccaccgggttggagctgagcagctagctagctagctaggattcatatatatcacctatatcaaagtgggtgcttatatcttactcatgcagtctcatgtgcatgtgcccttcccttcatgacgattttgcaaaacctcttgattggtagtctgagtcttgtgacatagcttatgtatgagatgtggctgtgagtcagcacaggtggcaacgatcacgtgtaacaaaaggtgaatta

SEQ ID NO: 390374 - DNA, 302 bp, Oryza sativa
  unsure (1)..(302): unsure at all n locations
ccacgcgtccgcccacgcgtccggnggctagggctgcagaagcagaactcgtggtcgccggacatggagagggacgaagcgtgggagcggcggcgcgggatgaacaagggatcgtcgtcgtcgtccgcgcttgcggcgggtgaggagcgtcacggacgacgacctcgacgagctgcgcgggtgcatggatctcgggttcgggttcgaggcggccgggtgcccgctgtgcgcgccgggaggagccgcctggtggagacgctccccgcgctggacctctactacgccgttcacggcaacgccgg

SEQ ID NO: 390375 - DNA, 623 bp, Oryza sativa
ctctccccacccttccttcgccccgagacgacgagacccagcgagcgatcccgagggaagaaagagatcgagagggaagggaagggagaggatcggagagctttccgccggccatggggttctgggtgaccacgctcatcttcctcctcgccggcttcgtcgcctccctcttctcgctgctctgctgcaaccgcgggccgtcgaccaacctattccatttgaccttggttattacagcaacggtttgctgttggatgatgtgggcaatcgtctatcttgcgcagctgaagccactgatcaaccctatcctaagcggcgagtgagctgtgttacaatttgaagtctgctcatgctgtatcactatttagttgaggatttctattcattttggcacgactgaaataaagaattgttgtgagattttggaacacttcctctagacactagaggatgcccactgtgattagtgtatgcaattatattatatacacaataatcggatcaatgaccttgtccattcaaacttccaaagtttacccaagataaatttctgcttccagctctagagagccagcgtgaagaacctactcaccgccatcgaccgcgagggggcggtcagtttt

SEQ ID NO: 390376 - DNA, 859 bp, Oryza sativa
gaagaacataatcattgccactggctcagatgtgaaatcactccctggagttacaatagatgagaagaagatcgtgtcatctactggtgctcttgctctttcagaaataccaaagaagttggtggttattggagctggatacattggtttagagatgggttctgtctggaacaggctagggtctgaggtcactgtcgttgaattcgcttctgacattgtcccgtcaatggatggagagattaggaagcagttccagcgtatgtggaggaagcagaaaatgaagttcatgcttaagacaaaagttgttggggttgatacctctgggagtggtgtcaagttaactgtggagcctgcagctggtggaggagcagagtgttccttgagtgtgatattgttcttgtatctgctggcagagtaccatacacctctggtcttggattgaacgcccttggtgttgagactgacaagggtggaagaatccttgtcgacaagcgctttatgacaaatgttaagggtgtttatgcgattggagatgcgatccctggacccatgcttgcacataaagctgaagaagatggtgttgcctgtgttgaattcatcgcaggtaaagaaggtcacgtaggattatgacactgtacctgggagtggtgtacacacacccagaggtggcttctgttgggaagacggaagaacaggtcaaggcatcaggagtggcctaccaggttggaagttccccctgttggccaacagccgtgcaaaggcaattgatgatgctgaagggttggtcaaggtagtggctgataaggagaccgatagaatcctcggtgtacatataatggcccctaatgcaggtgagata

SEQ ID NO: 390377 - DNA, 442 bp, Oryza sativa
  unsure (1)..(442): unsure at all n locations
ccactcccgatatgatcgattaaatccaataggatgtgaagttcatcttgattcagctgtgggggttgaggggaggggaagctcgacagtcggctggagttaaccccattagggtgtggttgttgaggggatagagtgcagcctagggaaacatcccgtcgggcaagacccacgctgtgtcgctggcgacgtcttctcccccagatccggccaggtccggcagttaggaggaccgcatccagaagcgctggcacataacctgagacgatatggcaccacggagcggttggcacttgtaaggtcacaagagcgacttgtacgtnggaatcctcaatcttgaacaaacgattttccttccgccggtcgacatcgtaatgggtctccacctgaagccgaatgatacaaatttgngtacaaattcctgcacgggaagaacttaact

SEQ ID NO: 390378 - DNA, 660 bp, Oryza sativa
ccacgcgtccgcacaaaactaagaaacatagcaagataaccagggaaggtagcatcagcaacaggaggcaatggagggaaagaggactaccacttcgatggtgatcatgtgcctggtcatcttgagcctcactgtcgactccgccaccgcggcacagtgcggctgctgcatatcctctcgggcaaaagcatgttgttttggttgtattgctgctggtggctccgactcagtctgcaagaacacttgttgtttcccatgtattctggccgattctgttgttgctaagatggacgaaatgggagttcttgctaagatggacgaaatgggagttcttgctaagatggaaggacaagcctaaaacaacatgcttgcattgctaccagtcttaatgcctatcataagaatatgttgttttgcttcaagttatggccaagttatgttaatgttatcttcaataaattattgaccatatgggacgatctatagtggatccatctgttggtctcaactctatgtatgtcgtgcatgtgtgctctcacaagcatatttaatttctcttgctgcttttaataaggccatagcactatccaatgtgtcatccgttggtctctgaccttagcaatttattgcaacatgattattattaaaaaaaaaaaaaaa

SEQ ID NO: 390379 - DNA, 566 bp, Oryza sativa
ccacgcgtccgaatcgttgatagaatcttctcacaggtcccaagaaaattcacaagcatgacagaaggaaagatgggttatgaagattttgtttactttattttgtctgaggaagacaaatcatccgagcctagccttgaatactggtttaagtgtattgaccttgatggaaatggcattttaaccaccactgaaatgcaatttttctatgaggagcaattgcaccggatggagtgcatggcacaagaacctgtgctttttgaggacatattatgccagatgattgatatgattggaccagagaacgagtgctactttacactacgggacttaaaacggtgtaaactctcagggaatatattcaacatcctattcaatctcaacaaatttatggcatttgaaactcgtgatccattcctcattcgccaggaacgtgaaaatccaactttaaccgagtgggatcggttcgcacatagagagtatattagattgtccatggaagaagatggtgaagatgcttcaaatggaagtggggatgtgtggatgaaacgcttgaagcttcattt

SEQ ID NO: 390380 - DNA, 1010 bp, Oryza sativa
  unsure (1)..(1010): unsure at all n locations
ancaatacgatttgcagatatcaagcagaagagatatagtgtacctctaatgataggaattggtctccttgtactgcagcagttaagtggtgtgaatggcattctattttatgctgctagtatcttcaaagccgccggtcttacgaatagtaatctagcaacatttggtctgggggttgttcaggtggttgctactggagtgacaacttggttgactgacaaagctggtcgacgactcctcctcattatctctactacagggatgaccattactcttgttgttgtttctgtgtcattttttgtgaaggacaacataactaatggttctcatttatactctgtaatgagtatgctttcgctggtcgggcttgtggcatttgtgatttcattttctcttggtttgggagccataccatggatcataatgtctgagattcttcctgtaaatatcaagagccttgctggaagcgttgcaacccttgcaaactggttgacggcttggctcattacgatgacagcaagcttgatgttaagctggagcaatggaggaacatttgctatctatgctgctgtgtgtgccgggaccctcgttttcgtatgcctgtgggtgccggagactaaaggaagaacacttgaggaaattgcattttctttccggtgaaagctcaggccaacgttgtctggcgatcagcctggtgcacgtcagtcggcaacagatttggctccgtgagctatcggattaggcatcaagatttgaattcttgagttcatgtgtatctaaggcaagcgtgtattggttggcatttgtaattttgtatcatgtgttcatgtatgtgcaatagaaatatagaatggagcagtaagcaagagacaatataatggaccattgcaagttgtcacgcacgccatgtggatggatggaacaatgaagatgccaatatgtcatgccgtatgatgaattttgagcaaatatatagctgagggttgttagttctaaaaaaaaaaaaaaa

SEQ ID NO: 390381 - DNA, 954 bp, Oryza sativa
  unsure (1)..(954): unsure at all n locations
ccacgcgtggcggcgacgctgtcgtcgtctccggcggcccctcttacgccgtgccactcggccaaaaagacagcctcgctgcagccgcgggcgctgcagctggtggaggacatccgcgccaaggtgcacgccgcctgcggccccaccgtctcctgcgccgacatctccgccctcgccacccgcgacgctgtcgtcgtctccggcggcccctcttacgccgtgccactcggccaaaaagacagcctcgctccggcatcgttggacctcgtcggagatctcccgggcccgggcacctccagagtccaggatctcatcgacctttttgcaaccaggggactgcgggacgccgccgacctggtggcgctctccggcgggcacaccgtcgggaggacacgctgcgccttcttcgatgaccgcgcccgccgccaggacgacaccttctccaagaggctggcgttgaactgcaccaaggaccccaaccggctgcagaccccggacgtgatcacccccgacgccttcgacaacgcctactacatcgcgctcatccacaaccagggcgtctttcacctcccgacatggcgctcatcaaggaccggatcacggcgcccatcgtccaggcagttcgccacggacaaggccgccttcttcacgcagttcgccaagtccatggtcaaactaagcaatgtgccgaggactgacaggaacgtcggcgagatcccgccgcagctgcttcaggaccaacagccagagcctcgtcgacttcgccaccagcgatgaggaggnttcgctgcttctgcttgatcattcagctgtctgtcgttgctcgttaattagggagctaggtgcttgacgtcgctagctgatcctagtctctttagtcttcaggccttggcttttgtacgcatatgctttcgttatgtccgtgcaataataactagtaaaaaaaaaaaaaaa

SEQ ID NO: 390382 - DNA, 872 bp, Oryza sativa
agcggagtgaggagagtagtccacaactccggccggccactacgactctacgagtacgtacactgcaaattaaagctcaagatggccgcaacagcgggcaggaccgcgggcgcattggccgtcctgcagctcgcctccatcgtcgccgctgccgtcctcctctcctccccacctgcggctgctgctgagccgtctgtggacttcattgacgtggtggcgtgctcgcagtcgcaggtggactccatcgtgcgctcagccgtgcaggcggcgctccagcgtgagatcgccctcgccgccggcctcatccgtatcttcttccacgactgcttcccgcaggtctgtgacgcgtcggtttacttgagtggcgccaactcggagcaggggatgccgcccaacgccaactcgctgcagccgcgggcgctgcagctggtggaggacatccgcgccaaggtgcacgccgcatgcgggcccaccgtctcctgcaccgacatctccgcgctggccacccgcgcggccgtcgtcctctccggcgggcccacctaccccgttcccctcggccagctcgacagcctcgccccggccccgctgcgcctcgtcaaccagctcccgggcccgggcacctccagcgtccaggctctcatcgacctgttcgggagcaggggcatgggagacgccgccacctggtggcgctctccggcggccacaccgtggggaagtcaaagtgcgccttcgtgaggcccgtggacgacgccttctcccggaagatggccgccaactgcagcgccaaccccaacacgaagcaggacctggacgtcgtcacccccatctccttcgacaacggctactacatagcgctcaccaggaagcagggg

SEQ ID NO: 390383 - DNA, 484 bp, Oryza sativa
  unsure (1)..(484): unsure at all n locations
cccangcgcccgccacaagctagcacagcacagccggtaagagagtgagtgcggagagccaaattgagatgggtgcagcgagcaggagactggccgtcctggagctcgtctccatcgtcgccgtcctcctcatctcctcaccagcagcagcagcagagttgtccgtggacttccacgcggcgtcgtgcccgcagctggagtccatcgtgcgctcctccgtgcaagccgctctccagcaggagatcgccctcgccgccggcctcctccgcatcttcttccacgactgcttcccgcagggttgcgatgcgtcggtgtatctgagaggaggcagcaactcggagcagggcatgggcccaaacctcacgctgcagccgcgggcgctgcagctggtggaggacatccgcgccaaggtgcacgccgnctgcggccccaccgtctcctgcgccgacatctnncgcctcgccacccgcgacgctgtcgtcgt

SEQ ID NO: 390384 - DNA, 377 bp, Oryza sativa
ccacgcgtccgcgccatggccgccgcgctccgcatcgagcgcgtccgcctcgaccgccgcgacggcgtcgccaaggtgctcggcacgctggcctgcgtcgccggcgcctccgtcatcacgctctacaagggccctaccatcttcggtcccaagctgcagctgcaggcggtggcggaggtgccgttgagggcggcgatcgccggagaggggaagaactggacgctgggctgcgtgtacttgatcgggcactgcctgtcgtggtcgggatggctggtgctgcaggcgccggtgctgaagaagtacccggcgaggctgtcggtgacgtcatacacctgcttcttcggcgtcatccagttcctcatcatcgccggcttcat

SEQ ID NO: 390385 - DNA, 564 bp, Oryza sativa
tgcaaagtcaaattgagtcccaaatgcgctctggaacagcaaaagttgttgaatactgggaggccattctgaaacgccttcatatttacaaagcaaaggcttgcctgagggaaatccatgcttcgatcttacggaagcatctacatcgtctggagcatcctgattccattgagcaggataaggaatctgagggtgagaatcgatgctaaagagaaggatgcaacacatattgacgatgatgatgatgatgatgatgaagatgataagcgatattcgcctgaacctatagcggagcaaacagagagtcatttggatgaagaagacggatccttttctcctgagctaatgcatggcaatgaagatgaagatgcaattgatcctgaggaggacaaggcagaactggatcgaaaacgtgaagctgtagttatggagcatcaaaagaaagttcagcaggccatcgcagtgaagacaagagtacccgatgagatggagatgaaagcaatgaaagcaatgggagctatggaggaaggagatgctgtgtttggttcaggagctgaagtgaac

SEQ ID NO: 390386 - DNA, 583 bp, Oryza sativa
ctcgcccgcccgctcgcggagtacatgagcttgccggcgagtcagtactcggtgctcgacgcggagcgcatcgagcgcgtcgacgagtccaccttccgctgctacgtctaccgcttccgcttcttcgcgctcgaggtctgccccgtgctacttgttcgcgtcgacgaggagcccaacggctgctgtattagcctcctctcctgcaagctcgagggatcaccgcttgtggaggctcaaaatgacaagttttcagcttccatggtgaataacggtgttctgcaacagtagtatggagtgattcaacatctcaacagcttacatcggatactacattcgaggttacaattgatataccatttccatttcgagcattacctgttggagccattgaatcaagtggcaagcaagttcttgagcaactactccgagtcatgcttccacgatttttgaagcagcttgttaaagactaccaagcatgggctttgggtgattcttcaaggaaaccacttggcactggtgaaatatgaaaccttccagtgtcttcattaggccatatagtcttttcttggtggattaagtattg

SEQ ID NO: 390387 - DNA, 715 bp, Oryza sativa
  unsure (1)..(715): unsure at all n locations
ctnttgaaaaagtccagccaggcccaattgtnaaataggtctaatattttgcatcctgcatgaagaaagctgcagacnggcttttcanctacaagaaggtgagctaaccaactcctttgaaattaataacaaattaaaaccagagccanctgactgctaatacccttgctttggccaacaaccantgtcnantttgtcaactagtaatcaactaatcttgatcagatcctcctataaattgacgagaaacatgcantattcaaatcatcaagcagctcctggttttgcagctctagctattgcctagcaagctactagccactgctaatcttgccatggcttccaattcggttctcttcgccacggtactcgcgcatggccgtcgtgctcaccggcagcagcagctgccaagcggctcgcctcctcgccgacgcaacaccgcctgccgtgccggcggtcaccttgccaccgatgccagccattcctgccatcccggcggcgacactgccgccgattccggcggtgccaaccgtgccgaacgccgcgttgccgcccatgccggccgtgcccaaggtggcactgccgccgatgcccgcggtgccggctgtgcccaccgtccccgcggtggcgctgccgccgatgcccgcggtgcccgctgtgccgaccgcgacgttgccgccgatgcccgccgtgcccgccgtgccgaacgccgtgc

SEQ ID NO: 390388 - DNA, 418 bp, Oryza sativa
ccagttttgcagtgttctaactattgccaagctagctagccactgagatctctcagccatggcttccacttcgggtctcctcgccacggtgctcgccatggccgtcttgctcgccggcagcagcagcagctgccaagcggcgcgccatctcgccgacgcaacacctcccgctgctgtgccggtgcctaccgtgcccgctgtcaccttgccaccgatgccggccattcctgccgtcccggcggcgaccctgccgccgatgccggcggtgccaaccgtgccgaacgccgcgttgccgcccatgccggccgtgcccaaggtggcgctgccgccgatgcccgcggtgccggctgtgcctacagtcctcgcggtgcccgctgagccggcagcgagcttgccttctatgccgtccaagcccgga

SEQ ID NO: 390389 - DNA, 539 bp, Oryza sativa
gttgaactcatagatgtgtgctggttggaaatccgtggcaggatacacagcaagatgctctccccaaactcaacttatgccgcatacatggtgtttaagatagctgatgagttctatgggctggatgctccattccaggaggcatcagtcagcctgggaggtaggggatcaacaaaaattgtttgtgtccaaagctatgacagcgaagatgaggaggtgcctgagaattactggcctatgagtattggtccattgctgcgacgaagggccaggagaagagaccgtcgtctagttcttgatgaaggtgtaacggtccctcagaaaaggactgacgagtggatggagctggagatgggtgagttcatcaacgaggaaggtgaagatggagaggtgtgcttcagcctgatggagaccaagggaggcaattggaagagaggtcttattgtgcagggcattgagatcagacttaagaaatctggctgatgaacttctatgatcaaggcgcgtgtattaaataagactcattatgcgcccttttt

SEQ ID NO: 390390 - DNA, 639 bp, Oryza sativa
gccggtcccggttcgcagtttcgggctaggcgtacgtacttgctttgcagctactacaacctcctgcagcagagccccgatgtcgtccaccagttctacaacgacgccagcaccatggtccgcgtcgacgacctggctggaaccaacaccaccgacagcaccatgatggatatacactccctcattatgtccttgaatttcacccaaatcgagatcaaaacagccaactttctcaactcatggggtgatggtgtgctagttatggtatctggtcttgtacagacccaggagtacagccaccaagggaaattcatccagatgtttttccttgctccccaggaaaagggttactttgttctcaatgattatttccatttcgttgacgaagagcaagtgcaacctgcacctgttattgcccaggacaacttcgagaccaacatggcatccaactccgtcgtcgaacctgagtacattcacgaagaggaaaatcaaagtgctgtcccaataacatctgaagaaagtgatgctgttgagaactatacttactctgagccaccacagcaagtagtttctcagtcagacaattggggagatgagcctcttcctgaagaaccaatttcttcctttacaaatggaatg

SEQ ID NO: 390391 - DNA, 462 bp, Oryza sativa
ccacgcgtccgggaacaaagatgctgaccatgttgagtgggctaaagctttgaaggagctatacatgcctggtttacgggattttgttaagaaacattaccctcttggtccttcctggggtccagttggaggtgcacctgtatcccaaccaaaggctactgctccagctcctaaagcaccaggggctaaggctccccctccacctgctctaccttcggcacccctttttaccacagagaaatctcctaaatctgcacagcctaaagaaggaatgtcagctgtctttcaggagattagttcacgcaaagctgtgaccacaggattgcgaaaggttactgatgacatgaaggactaaaaaccggtctgatagaaggtggtgttgggtagcagcagcactgctgcttccgggttgctgctcctggagaagacctctcgtgcaggcttctcctcagtctgcctcaa

SEQ ID NO: 390392 - DNA, 783 bp, Oryza sativa
ccacgcgtccgcccacgcgtccggagaatttcatggagaggtttccagaaggtgatcctgcacaaagtttaattgaggagcttctctctcgtgcagcaaagaaggctggtatggatttttatgagttactagatatacctcaaggggaccgaagaaaataccatgatgatgtcactgtcatggttatttctctggaagggagaatctggaagtcgtccggaacatatgtgtgatgatcagttggaacaatgtcgatgtcaatatttatggtgacgcatcaagtgatctcagctggtcagagcctctgagcaactgcatttatgctcatcaggggagaaacacccacagatggctgacagatgatgcactccatacatttgtcaaagcgattggagttggagccagcgttggtctagatcttagcttcagcacaaaacacagtccatgaatgtgctagagagttaattctcggttggaccaagattgcagagagagatgacacatatgaggaatccctttgcaaagcagagttaagaacactttcttttgtgacccgcttagttgattggttacatactcacctgtgacaattccctcacccccctcccccctagctggctagctatgctgcatagagattgacacttctttcatttttggagaaagaacgtctttggaaggcgccgttttcatgttcatgtcaggaatgggaaggaaatgtaatatgattggatattcatggtgaagaaattgaaaatgtgtccctcatgtggtgctcaaaaa

SEQ ID NO: 390393 - DNA, 897 bp, Oryza sativa
  unsure (1)..(897): unsure at all n locations
ccacgcgtccgaggcatgttcatggtgacactgttcctagctacattcatctgccttctgtagcatcctctagctctacagcgattccccatgaggtgatcattccgagctaccaacctgctacctctgcaactacctcaacacccatgagggccagtcagccattacctgtcagagctgttgcatcttctagacatgcaaggaatgtactcatagggcatgctaacagcggaaggaacagaagggcgagaagctcatactatggtattcagcctttgatgattgatgcacagcaattgataatgatgcaacaatttgctctccgcgaatcaagagaagcacaagacccccacagggccatgagactggacattgacaatatgagttatgaggacctgctggctttgggagaatctattggtaatgtctgcacaggcttggtggacgagaaaatctcaggttgtgtgagagaagtgatctattgcagttctgatgaacagcaaaatgatcaagatgatgggaaatgtgcaatttgtctggaggaatacaaagacaacagtttgctgggaatactgaaatgcaatcacgacttccacaccgactgcgtcaagaagtggttgaaggagaagaactcatgcccaatttgcaagtcggctgctgcataggacacgcgaggacaaacaacaatatggtcctcaaatttgttagtatttagacccaattaagttgtttcattctttgtgcgcctcagccatgtaaataagtaagtttgctaacattaaattattttgtgtgttaccatagctgatatccttttatatgtattaactattaaaatgccaatttttaattcatttaatcatatgaagtggtttacatttttattctccnnnnnnn

SEQ ID NO: 390394 - DNA, 712 bp, Oryza sativa
  unsure (1)..(712): unsure at all n locations
ntttttttttttttttttgcagactcaaagaaaactctccattatattgatttgtacatgaatataaacacaactccatggttaacctgtaatcatgtactgatacaagccagtgtagatagtgaatacagaatacgtaaacagtgaaccatcgcaaataaaaaccacacacaagtattattcagtacagataaaatggcgcgcgcgctatacgcggatgctctatctgatcgctcgttcatcatggcttggcctccggctccgggaagtggaactcaggcttgggcaatggcggcagctcgaccttgggcaacgatggcagctcaggcttcgggagctccggcaccgcagggtgctcaggcaattcaggcttcggcaattccgggcacctcggggtgtggcagttcaggcaccttcggaaactccggcacggcggcgccatgcggcagctcgggctttggcagctccggcacggcgaggtgcggcggcagctcgggcttcggaagctccgggtactcctccttgggcgcggcctcctcctccaggtagcgagctgcgctgctgatggagctccatgagagcagcagcgccatgaggaagagaagcgaggaggacatggagttcttggaagccatgtcgacgatcgaaatgcagttaatttctagctcgtctcggtgtatcagtgacggtgagagagctctcgtgccgaatt

SEQ ID NO: 390395 - DNA, 396 bp, Oryza sativa
  unsure (1)..(396): unsure at all n locations
ctggcccagaagtcgatcgatcgatcgtgacggcgacggcgcgaccacgaccatggccaggacgatgacgatgagggtttcttcgctccttgtcgccgtggtcctcctcgccgcgctctcgttccaggcgtgcagcggccatggcggcatcaacgacggcgacgggcaggtcgacgccccggcaacgcctgcgtcgtcgtccggcgtgcggtccaaggggctgatcgccgtgaaggtgtngtgcctggtgatcctgctggtggttcaccttcgccggcggcgtgctccccctactttcttaccggtgggaacgaggagcttcctcctcctcgtgcacccagtctctgccgccgggtcttcctcggcaccncgctgatgcacttcctcgccgactca

SEQ ID NO: 390396 - DNA, 781 bp, Oryza sativa
  unsure (1)..(781): unsure at all n locations
taatacgactcactatagggcgaattgggtaccgggccccccctcgaggtcgactcgccgcctccacaaatccgccgccgccgacgtcgagagagaagggacagagagcgagtgcttcgccgtccccgccgccgcgatgagggccaagtggaagaagaagagaatgaggaggctcaagaggaagcgccgaaagatgaggcagagatccaagtagtcgttatcagtagtgtggatgtcttcttacatcatgttgaccggtgcatttggattgatggtgccttcggattcttgatgttccagttattggtgtaggaatgtgaaaccttttctggttttggttaattctagctgttgaaatgtctctggttatgttcctagactggagtattatgtaatgtgatgaccataattcgctttatgaaagtttatgagatttgaagtaaataaaaaaggggggaccggtacccaattccccctatantgagtcctattacaattcactggccgtcgttttacaacgtcntgactgggaaaaccctggcgttacccnacttaatcnccttgcannanatccccctttcnccanctggcgtttttncnaaaaagccgcnccgattgcccttccccnccnttgcgccccctgaatgggnaaatggcaaattgttaaccgttaatttttttgttttaaattccccctttaattttttgttttaattccnccccctttttttacccncttngggccnaaaatccggccnnaaatnccccccctttnattccc

SEQ ID NO: 390397 - DNA, 521 bp, Oryza sativa
ccacgcgtccggccgagccaacgaagaaatcgttgccaaccaaatccacccgccggggcgcctcccccctcctcgccggcggcggcgaccccgcggcggcggagagatgatgatgctgatcgactgctcgggctgccggacgccgctgcagctgccgcacggggcgccctgcatccgctgcgccatctgcggggccgtcacctacgtcgccgccgccgcgccgccaccggcccacggcgaccccgcccgcggcgccgcggggccggtggcggtggcgccccagcaccaggcgccggggtgggggctcgtctcccccgcccgcgcacgggcggaagcgcgccgtgatctgcgggatcttctacaagttctcgcgccacgagctcaagggttgcatcaacgacgccaagtgcatgcgctaccttctcacgacgagcttccacttccccgacgactccatcattatgctcaccgaatacaaactgacccttacaagatttcaacaaagcacaacataaggttgg

SEQ ID NO: 390398 - DNA, 951 bp, Oryza sativa
gatgctatcacttggatcattcaaaactggtgctattctcttggctggcctctttttctatgatattttctgggttttcttcactcctgttatggtcagtgttgcaaaatcatttgatgcaccgataaagcttctatttccaacaggagatgctgcacgcccattctctatgcttgggcttggtgacattgtgatacctggtatatttgttgcgctagcactgcggtttgatgtctcaagaggaattaagaaccgctacttcaatagtgcatttttgggttatacggtgggtttgaccgtgacgataattgtgatgaactggtttcaagccgcacagcctgccctcttgtacattgttcctggtgtgattggttttgttgctgttcactgtttatggaatggagaagtcaagccactcctggagtacaacgagtcaaaggctgaagaggaagatgctgttgaagaagatactgatagcaaacagaacaaaaaggaggagtagcactctaacagcagggcaagaaaaggcagaaatttcatgtaaggtcgtcggcagctaagtaggctggatgacctctcggataccagctcacttaagaacttagaaatgattcgcatgatagaaacccttttttgatttaagaattgtttggtctggtgattagaagagaagagagtagattcttaagaggcctgccaatatggtccagtggcttgactttacccggtaccccttttgctttagtactgacttataatggtggtacaaaggatttacctgaatttttggtctggcaaatagcggtttgtgatatctttcttgggtgaaaaaactgaaaaaaaaaaaaaaaaaaaaaaaaaaaaaaaaaaaaaagggcggacactgtgggggcgccaagattactcccaggtgccttccccgtgcaagctattctatagcgttcctttagt

SEQ ID NO: 390399 - DNA, 541 bp, Oryza sativa
ccacgcgtccgggcgcttcaaccagacgctccgcaacgtgcaaggaatgctcaaagggcggagctttcctgggaaggtcttgctgacccgaagatcagaacctctttcacctcctgaatactccccgcgctatgagaatgatcgtgatgaatacgaacagaatgaaggctcacaagaaggaaaagggcaagcatctggaaacacagctgatagtatgagtgcaaagaaatcaaatcccccatcaacaagtagcaccaattcattaccagatgcccaaggattagtttctggggctagagctacagattctgcacgaattgctaaattcacgaacgaactatctaggccagctgttatattagacaagttgcgggaactgtcttggagtgtgttccaccttatatgcgacctaatatatggagacttcttctgggatatgcaccacctaatgcagatagaagagaagtgttctgacgaggaaagacttgagtacgttaatgtgttctcaatactatgatattcctgatactgaacgctctga

SEQ ID NO: 390400 - DNA, 452 bp, Oryza sativa
  unsure (1)..(452): unsure at all n locations
cntcccatacagagtctaccagcantcaagccagncgagaagattncctacctggcaacttcttgcggctgacatgtgatgatagaagggaacatcggcaacagcagcagataggaattggcttctttaatttgttcgttcgttagaatgttgaagttgctgaccaagtatgggtgtgatagtagatggaaagaagaggaccattgctgtagtccctgctagggattgggatccagtgcagttgctagggtaactgcaacttaagcagttgcactagcaccacatgataacaaattaatggttctagcacctgtatactgtagcagaaattactgtttcacgtgttttgtagcaacaaatctggaccattggatgaaaatacaaatggatctcaatccccctgctagttatcaccaaaaaaaagaaaaaagatacaataagatatggnnnnn

SEQ ID NO: 390401 - DNA, 1086 bp, Oryza sativa
ccacgcgtccggcgccgtgctacgctggtgcagacgtttgggcagagaaccatgcgtgtctcaaggatggctccatcacagtcccgccgtatactcctgctcacaagatcagagctcatcttgttccaccagagactcctcggtcaatctttgtctacttccgtggtttgttctatgatacttcgaatgatcctgagggcggttgctatgcaaggggcgcccgtgcatcggtgtgggagaacttcaagaacaacccgatgttcgacatctctacggaccacccccaaacctactacgaggacatgcagcgtgcagtcttctgcctgtgcccgctgggctgggcgccatggagccctcgtctggtggaggccgtggtgttcggctgcatcccggtgatcatcgcagacgacatcgtcctccccttctccgacgcgatcccgtgggaggagatcgccgtgttcgtggccgaggacgatgtcccgcagctggacaccatcctgacctccataccaacggaggtgatcctccggaagcaggcgatgctcgcggagccgtcgatgaagcagaccatgctgttcccgcagcctgcggagcccggggatggcttccaccaggtgatgaacgcgctggcgaggaagctgccccatggcagggatgtgtccctcaagcccgggcagaaggtgctcaactggaccgaggggacccgggaagacctgaagcccgtggtagatagatatatacagtatatgatagtgttatggcaccattgccattcaccatggctggtgttcttgtgtaaatgacaccaccggatgagaagctgatcaatgaggatatattgatgatgatgagcgaaccacaccattgaatgtaaagctccctttccttgcttctttttaaggccatgtgcctgtatggcaatgtctgttttgaccattgttgtagtgttagcgtattacaggtcatggattatgtaatactagtcaataacccatacgttacaaccgtgcaacttgcacaggctatttgttcatatatatataaaacataaatagtaaaattttgtcaaaaaaaaaaaaaaaaaaa

SEQ ID NO: 390402 - DNA, 589 bp, Oryza sativa
ccacgcgtccgcaaagtttacaattgctgatctatttgcaagtgcgcttgcttttgtagcaactggatggtgtgttctatgtctggctgtcacatggaagcgccgtggtgaaattcgttgggctctgggactcagtccgtgagattgctcggatgtatgatgccggaatgggtgctctcatctttgtgcccattgtgttcttttcatggttccccttcgtatccaccttccagtcacgtttcctgtttaatcaagctttcagccgtggtctggagatctccctcatcttggcaggaaacaaggcaaatcaggaggcatgaaaagcctaaccacctaaccgcctggatatttttgttgtatattcttggaattgattagtggtacttgatttgaacaacacctttgtacataactgcctgccattttaggagcaaattatgtatccaaactaacagtgccatgccagtttagatgtgagtattcatctcttgtttgtagccgtaacgacctgtaatttgaacattccggtaatttggatgcgacaattcagatagcctgattgctgtatttgagcaaaaaaaaaaaaaaa

SEQ ID NO: 390403 - DNA, 476 bp, Oryza sativa
ccacgcgtccggaagaagagaacacaccgttcagttcatcctcacctcttgttctccacaattgcagataagttgcttcctctttttttgcagagaggagtggtggttttggtggtgcagatgatggctggcttgcaaagatcagcgacaacattcagaaggtccggttcgtcaggcctggtctgggacgagcggttcttgaccgaggacgcagaggcggccaaggccggcgatggcgatggcggtggcggcacggaggagccccagccggagctccggcattccaagagcgtcgggagcatcggcatgatgcgccgtgtcgctgccgacgacggcgacgacagcgagaagacgacgaagcagcagaggaagaagaagaagaagaagaagaaggacggtcagaaggaggacgacaaccgcagccagcaggtgttcaggaccaaggacatcgcccccggcgtcgaccccgccgtcgc

SEQ ID NO: 390404 - DNA, 792 bp, Oryza sativa
  unsure (1)..(792): unsure at all n locations
ccacgcgtccggcctagtgatttcaaaccctttcctattttgtggcatgaagataatagtcggcgtcagccaagagaaaggcctcaggtttctggagctctgtcaggctctgtcttaggagaggctgcacatcgcctggtgaaaaactcactgcagataaaatccggctactctgctgggctgcttgacatgccatacaggggtgccccctatggtcctggaacacgcgtccgggccgccggaccattgggatatgagagaggttttgttgaaaattcatacaatggacacatgtccagaagcgttccaaattctcatcctcagttcttcggcgacgctcaagccaacagacagaatgtgaggatactggatctaccaaactatcgagggggcgacagtgccatccattcagggatgtcgcaactaacaatccaaggtggcccaaggatgcatcaaaacaacaggatgcagaactccggattttcacctaatcagccacatcccaatcagtatgcaggattcccaccccagcgtcccatgcagaactccggttttacgccacagcgacctgcacaatattcaggatttccacaccagaggcctgtccaaataggacttcaacatcagccagcagtaaatgggattcaaccaccgttaccccccagtgcatggattggcaggccaataagtggagtcccagcaggagtaccctgccagcaggatcctaggatggccatggataggccgcccaaacaaggttactcnggatcacagcatgacaggggacagcag

SEQ ID NO: 390405 - DNA, 562 bp, Oryza sativa
  unsure (1)..(562): unsure at all n locations
ccacgcgtccggtcatgaaccctgatccttaccgtggaactttcggttctgatgctgtagcttatgccaaggaagtcgaagaacaaataaattatggtacctccggaagggttgcgggtttcattgctgaaactttccaaggcgtgggaggtgcagttgaactagctcctggatatttaaagttagcttatgacactgtccggaaggctggtggtgtttgtatagctgatgaagtccagagtggatttggtcgaactggaagtcactattggggatttcagacgcaagatgttattcctgacattgtaacaatggcaaagggaattggaaatggtctaccattgggggcagttgtaacaacacccgagattgcaaatgtgctggcgcaaaaaatccaatttaacacatttggtgggaaaccctgtttggctccgttggtgggacttgctgtgctcaaaggttcttgacaaagggagaaaacgccaggccacattgtgctgatgttgggatctcatttngtgnaatcgtctaaaagagctccagcaaaagcatgaaaatcatt

SEQ ID NO: 390406 - DNA, 802 bp, Oryza sativa
tcgatttcagtgctccagcaaagaaacttggttttggtctgattggctctggcaagcggacatctgtaccttcagtttttgctgaagaggatgacgaagataatgatgataagcgggcaagacctttagttcctattgattactcaacagaggaactgcaagctgttcaggccaattcttctactggccaaccaaatattgtagcagctgctgaatttgccaagcgcatattggtaacaaaggatgataaatctgatgttgagaaggataggagttggagatcaagtgatagaacgaaccaaagggatagagatagaaatgatcaagatgttggtcgcaccagtgatgagagaagggaaaagacacatgaccgagagaaagataagcaagataagccaaagtctgagaacaagaatattttggatgcaaaacaattaattgacatgattccgaggacaaaggaagagctttttgcctatgatattaattgggcgatatatgacaagcatgagttgcatgagagaatgaggccctggattgcaaagaagattattgaatttctgggtgaggaagaatcaactttggtggattacatcgtctcatgcaccaaagaccatgtccaggcatcaaaaatgttggagcttctacagtcaatcctggacgttgaagctgaaatgtttgtccttaagatgtggaggatgcttatatttgagatcaagaaagtcgaaacaggactatcatggagagcaaaggcatgatgttgagcgattgctgtattgcatttgattactagttcactgca

SEQ ID NO: 390407 - DNA, 534 bp, Oryza sativa
ccacgcgtccgagaaagcaaatgctgcttatgatgccttatctacgagattaggagatcagatctttctctttgacaacagccctacagacgttgatgctctttttcttggacatgcgctttttgttcttaatgtattaccggatacgtctgtgctgcgaagctgtctgcagaagtatgacaacttggtaaactttaccaagcacctcaaggtccaattactggaagctgattctgattcatcagcaacaggattgggatcaactgatccatcatcatcctctacacccaggaaaagagcgtcttctggtcggagttataagccaaaacccagagctaagaaggaacgaacagaggaggaaaagaagttcaggcgaaaagcaaagcatttccttgcgacacagctcgcttgcggttcttctattcctatcgctccatgggtggagccgattgctcagagcttgacgatgaggacggtgtagaccacgaagattaaattcctcctttgttgcaccgcacgaatcttttctgaagt

SEQ ID NO: 390408 - DNA, 543 bp, Oryza sativa
  unsure (1)..(543): unsure at all n locations
tacggaaaatctccatttgattatgaacttgatgaagctgctggtgagagcttacagtcagttacaaagagtgctcaaattaaatggcctactgaagctggcccctcgtatcctgattctctccgccagtttgtaacttggatgctgcagcctcatcctgcagttcgtccccacattgatgatatcatcatccacgttgataagctcattgcaaagtactcaatttgacctgactaaatggagcttcttccatagaaaatgttatgtaagtcaatagaacatctacttgattcattaaatgtgataaatataagttggtttcttgattttatttttgtgctaaagtgaagagagagagagagagagagagagagagagagagcgtttattggtagattgtattcaccaatttatgaacctactattgttcatgagtacaattccatgtagggctatgattttattttcggtgcccactgttacgtcngagtattaagtaatgtcattttgatggtttctccttgtnnaaaaaaaaaaaataaa

SEQ ID NO: 390409 - DNA, 1111 bp, Oryza sativa
ccctcgtgtccgcccacgcgtccgatttcttgctcgcccaactaaaaccgaaccgaagcttccccatctcgcgtgaacttcggagcaaggaagaacaaggcgccgcgccggatttagccccgcccccctctccggggtatcccccctcctctcctctgggtttgattggagtgaggtgaatcggtgaggttgtggctcggttggcgtccggatcggagggggttcgggcccttcctgattaatccctcttctgattccgtgtgggggattcaatcactggtgggcaaaggcgagatatttcgtcacttctccccctcatctaaccatgtctggtttgatgtgcctggagatcaagatgggattgtaaccacgctggttatctcgcgatcgcagagggtttcctccatcctctaaggaaggaaaggaacccttgccctttcttctccatggcttctaattcgtagtgtgaaggatctgatttttaggttagtgtaaatagtagcagtagttgaggaagcttcggcatcctaaggacctcctgtgaagatgtcgtctgctgccattgccattagcccgatggtggaagagtttgctctcctgcccatctgcttcgacggcagccggtcgccccactgtttgtccgggtcacagctgcaggattcgattatcatctttcttgctgtgcctggtgccccaccgatgccgatgagtgtgctcggctcggagtccatcgcctcggtcaagctgcgcattcagcggttcaaggggttcgtggttaacaagcagaggcttgtgcttgatgggcacgagctggcaaggaacaactgccatgtgaaggattatgggcttgccgatggaaatgttctgcaccttgttatccgcttggctgatcttcgcttgattaacatcgagactaccagtggaaagaagtttcagttccaggtggaccagagccgcaatgtcaagtatctcaagagtaagctggcagtggagggagatgaggaccttggtgaggatcacaagcttgaatgtgattggcaggagcttgaggaccaccagctgattgctgatattagcaagaaggatgatgctgctatccatttggtcattc

SEQ ID NO: 390410 - DNA, 303 bp, Oryza sativa
ctcaaagtccacagcgagagatgctcagtttcagagcataaatacactctagaatgctgaattgaccctcacccgtcccggaggaccttatgatgcagagaacaatgcagctcgttctcagggtgaagagatcgtcgggtttactacaccaattctccactgcggcgaactcgcagaggttggccgggaaggtggccgtcatcaccggcgccgccagcggcatcggcaaggcgtcggcgaaggagttcatcggcaatggcgccaaggttatactcgccgacgtccaggacgacctcggccgcg

SEQ ID NO: 390411 - DNA, 668 bp, Oryza sativa
cccccaccctcgatccagagacgcacgagccggccgttgctctcaaccgttaattgcctctctccacgactcgacgccgcgcgacaaaccagcggaggcgctcgcgcgctcgccttcttctcgccctccatttgaacaaccccttcaattaactcctcctcgatcgctagctctctctctctcgttgcctcctcgatctccttgaatcgatcagcggcaaccagcctgatcgttgtttgctagttagttaatttccgtcgccgatgccgacgacgcctcgtcgcaaggagccatgaaccgctgcaccgacgtcgagatcaggaacgcgctgcgcctcctcgcgcccaagcccaccgaggacatgtcccgcctccaccaggcctacgaccgcggctagcttagcgagtagctgctactagcgttcataatcattctgtgttccatcgctcgagttcttgaacacgaagaggagcttactagtttgtgtcagctggtagtttaatttgtgcatagttcgctgcgcgcggcgacgacgacgatgaaggaaggaagaggaggaggagggcagaggagtaacatcctgacccacacgatcgactggttcccggccaggctgctgcaccggacaacgatgctccccgtcttcgacgtcgtcggtggtgactacc

SEQ ID NO: 390412 - DNA, 491 bp, Oryza sativa
  unsure (1)..(491): unsure at all n locations
cttgccctccagcagattccattacattattattattcattaatgacacctcaaaatacatcgcttgtcgtgttaatcatattacaaaggggaaggttcgccgtcatcgtcgatgagtccaagctcgtcccgcggctcggctgtacgggcgccgcccccgtcgaggtggtccccttcggctgcgaccacactctgggcctcgtcccgcagggtgttcgacggattgcctggcttcagcgcgaggctcaggacggtcgcctccaaggacggcgaggggaaggaggagatgttcgtcaccgacaacggcaactacatcgtcgagatgttcttcgaggatggcatacgcggcgacctcaacgagatcagcgaccgcntcctacggntcaccggcgtcgtcgagcacggcatgttcctcggnatggccacctcggtggtcgtcgcaagaaggacggaacgttgcccttttcanaagaagaagtaaccgccccgaa

SEQ ID NO: 390413 - DNA, 529 bp, Oryza sativa
ccgggtcgacccacgcgtccggcggattcctgaagcggttggagcgtgaagttgctgtgaagaaaatagtgagggagtccagccaagagcataaagacttcttcgccgaagtcagcactatcagcgaagctaagcacaagaatctcgtcaagttttttggttggtgctgccggggacacagctggaacattctccgtttcatgtgcagctgtttatggagcaacaataataaggagctcttccttgtatatgaattgatgaaaaatggcaacctcaacgactacttgtacaagagcgagtcagcagcagtactttcatggcaaacaaggtataaaatagccaaggacattgggtcaggcctgttgtacctacatcacgagtgctacccatatatcatacacagagatatcaaaccaggcaacgtactcttggacgacgatttcaacgccaagctcgctgattttggtctgtcaagggtcagcgaacccgaacaatgcaacgctgaagacaactgccataggctcacaag

SEQ ID NO: 390414 - DNA, 750 bp, Oryza sativa
ggtcacgtaaagatgtgcattatgggtcttatgcgacagcagaacaggtaattgctgctggtgatatgtgtgccatctgccaggaaaagatgcatgttcctgtcctcctccgctgtaaacatattttctgtgaggactgtgtctctgaatggtttgagcgagaacggacttgccccctgtgtagagcattggtaaagcctgctgatattcggtcatttggtgatggttctacaagtcttttcttccagttgttttagacaccaaatgggaaactgctaacatataacaatggacaagcaattgcttatgaaaatccaagtgaatccttttttctgttatcatgtcatgccgtcttcccctgcactgatgtcaaagtgagaagattcgcagaggttttgtgagcgcaatatgtctgattcatctatatgttcgagaaatagtttagagaactggtctgtggtcagttgcgacgttagcatagatttgcagcaaatctttatgggcctggtcggtttctggaggaatgatcatatcctagtgcaaagccctggtgtgtgtgatccccgccacgctattggcttgcataatgtaaaaatttggaatttttgcaaaagtatatgtaccccggcgcaactggagtgaacaagttttgcttcttagcaagacgagggaaggcagtggtaaaattgtaacctgtaaagctttgatacgtcaaaatgttgaaaccatatataaaatgtactttttact

SEQ ID NO: 390415 - DNA, 833 bp, Oryza sativa
  unsure (1)..(833): unsure at all n locations
tggacggacctgtcggaggcggcgagctcgtgatctcaacgaccaggaggaaaccggcgctcgcctcgatctccgccgcctcgtcccaccatgtcgaagaggaagaccagggagcccaaggaggagaacgtcactcttggacccactgtccgtgaaggagagtatgtgttcggagttgcccacatcttcgcatccttcaatgacactttcattcatgtcactgacttgtctggaagggaaactcttgttcgcattactggtggcatgaaggtcaaagctgaccgtgatgagtcatcaccatatgcagctatgcttgcttctcaagatgttgcacagcgttgcaaggagcttggtattactgctctgcacatcaagcttcgtgccactggaggcaacaagacaaagacacctggtcctggtgctcaatctgctcttagggctcttgctcgctctggcatgaagattggtcgcattgaggatgtgaccccggttcccacggacagcacccgcagaaagggaggtaggagaggaaggaggctgtagatgtattgtcagccaacttgtcgccatggagcatctcttctttggatagtctcatagctcccaatgttcctgaagagagatttagttttgctcagtgtcctgaattgttgactgtcaagttaattcggctgctatgttttggttcaaggaaatttccagttttcatgcttaacaaacccaatatgtgtaccttcgtggttccttataatatggttggattgtcttatgctaaaaaaacatgctttctaaaaaaaaaaaaaaaaaaaaaaangggcggccgccaccgcggt

SEQ ID NO: 390416 - DNA, 775 bp, Oryza sativa
  unsure (1)..(775): unsure at all n locations
gcgacggttacctcgtcgagcaggtggggcgcatccgcggtttcgtcatccccagccaccgcgacaaggacggcacgccgttctgcccttgatgagagatgagcttcgccttcgccttcgccgcgcacatggacaccgtgatgacaccattgccatcgtcgtcttcttcatcttcttcatcttcttcttcacatatgacaccaccattgctgccgtcatcgtcttcttgaattcacatgtcttttgtgatgatcaaggataagtaggatgatgagtgcacctttgggatcatgcaccaatggaggcggtggcgcgatgcgtgtgagccgtcggatcgagaacggacggttcggatcggaccgtggagatattgttattatatatagtttcttttttttttcaaatgcagctttttctttgttgttttttttatggacggtgggtgagatggatatgcaggcgaattataattcttggctatttttcatagatatncgttgtgtttctttttaattcataattgagatatcatcttcagtgggtgactgatgagtggtgccatttgagattcctatctactgaagcaataatgctaagatagaaacttacataatttgttgagaaatgcagttgatttttagatgattaacaattaatgtggcacacccagtactggtgcttaattttgcttttaggggcttttgcttgctctggcatgaagattggtcgcattgaggatgtgacctccggtcccacggacagcacccgcagaaag

SEQ ID NO: 390417 - DNA, 417 bp, Oryza sativa
  unsure (1)..(417): unsure at all n locations
ccacgcgtccggaccgaccagacatcggcggacgccacgacgcccaagggcgtgtcctacggcgcgctcagcaacgccatccagactatcctgtcggagaagagcggcaggttgacaaacaaggagctcgttctgagagcgcgcgagttgttgtccaaccaggggtacacccagcagcctgccctttactgcagtgacaagcacaccagtgtgcccttcatatgctgagagcctggaacatcagctgcgctgcgtggattgctacatatgcgagaatcttccctttcccctgtgatgttttacattgttagggagtatggagtctatttgttttttaaatgaaagacaccatggagagtggtcgactgttaatatcaagagaagatgttacaaaatgacanaannaaaaaaaaaaag

SEQ ID NO: 390418 - DNA, 573 bp, Oryza sativa
  unsure (1)..(573): unsure at all n locations
cacgcgtccgggatgagaagaatattcctactggttctttaaaggatatattgggcttactaaggtctttatatgttatggtttgcatagacgaatctgcatcctttttgagatatggttgcctatcgcgagagaatgtagccgctgctaggaaagaagtgatgacactgtgcagtgaactcaggccccacgcacttgctattgtcagttccttcggaatcccagatgccttccttagcccactcgcttttgactggattgaggcaaatgcacggtcttctgggaatgaatgactccacgctaccatcaggtagttatggggtntnccaatggaactactacagatggacagccaaacacactatacgcaaagataggtgtacatttgcaactacttcctgtcaagataggttacaataatttctctgaagtgtatagttcgagatggtgatgttgatctggacttcatagaagtttatgttcttgtaatttgcacttcagaatgggacatacgtgaataagtggacttcagaatgggcatacgtgaataagtgggtgtagcctctacatttt

SEQ ID NO: 390419 - DNA, 844 bp, Oryza sativa
caggccatggccaaggggagcacatagtcagaacaccgcagagcaagtgtgtgtcctgcctcgcgtgaaagataagcggcgctctgctctgctcgccgaggagagagagaagagagagagagagagctagagatggcggcggcctcagcggcggcgcaggcggagggaacggtgatcgcgatccacagcctcgacgagtggaccatccagatcgaggaggccaacagcgccaagaagctggttgtgattgacttcactgcatcatggtgcggaccatgccgcatcattgctccagtttttgccgatctagcaaagaagcacacaaatgctgtttttctgaaggttgacgtcgatgaactgaagcctattgctgagcaattcagtgttgaggctatgccaacattcctgtttatgaaggagggagatgttaaagacagggttgtcggtgctatgaaggatgaactggcgagcaagcttgagctacatatggccatgtagtgttatagtggattagtactgatatcctaaataaaacgggccttcaggctctgaaaggattagtgcctctgtctgtggtggttttcatatgcttctagtatcaagcattgttcttaccgttgtctagttcatggataatgccttgcttgatccaagtttgtgctttgaatattccaacaaaataatataacctgtgttttgcatatgatggttttctttcaggtgagatatcagaatgttggatccttgagagttgtttagctttcatcatgattagtgaagaaagtgcacatcaccattgtagtaatgtggcaaaccttgttaacttgtgaaaaaaaaaaaaaaa

SEQ ID NO: 390420 - DNA, 725 bp, Oryza sativa
tcgtcaatccaaaatccccaacccaacccaacccaacccaaccgcactatcacgccactcttcgcccgcccgcccgccgccggaatcgccatcgcccgaccgccgccgcgttcgtgtccccacaggcggcttctctccctgcatcaccatgggttctgacttcaaggcaatccccttgatcgacattagtccccttgtcggaaagattgatgatccgagcatggtcaatgacgaggatttgctgcaagttgtgcaaatgttggacgatgcctgcagggaggctggattcttttatgtgaaaggccatgggattgctgactcgctaatgaagcaagttagggatgtgacacagaagttctttcagcttccttatgaggaaaaactaaagattaaaatgacacctcagaatggatatagaggataccaaagactgggcgaaaatattaccaacggtaaacctgacatgcaggaagcaattgattgctacgcgcctattgaacctggtaaatatgggagaccttgccaaaccaatggtagggatctaatttgtggcccaaatatccatcaaattttgatgtactgctggaaaactatatcagccttctaagaggatctttcaagaaagattcatgcgaggtatagcttggcgttgggggtgcgccagttgatgcttttgaagggacaaccgcaggagatcctttttgggggttgcaaggctgaatcgg

SEQ ID NO: 390421 - DNA, 481 bp, Oryza sativa
  unsure (1)..(481): unsure at all n locations
ccacgcgtccgcccacgcgtccgcggatcgccgctacgctaccacgggcgcgctcccctcctcttcgccgtcgccgcctccgccgccgcgggctcgcatcgccgcccgtccccagtagcacggtttttgttctgctcttcactggtgtggttgctactctttgctcaacaatatggtttccttcgagatgaatgacctcaagaagattgggctaggcttgacaggctttggagtattcttctcattcctgggaatcattttcttctttgacaaggggcttattgcaatgggcaatattctcttcctgtcaggtttgggtttgacaattgggctgaaatcaaccatgcaattcttcaccaagcctaagaattacaagggtaccatctcatttggtgctggctntntcctggttctcattgggtggcccttcttcggcatgcttttagaggcatatnggctttgtgtactcttcagtggattc

SEQ ID NO: 390422 - DNA, 558 bp, Oryza sativa
ttcctgactctttcaggacatcgacataactaggacatggtcaggtaagagttatgaggtattaaaggcctgagattcatggaaaaacatatcctcgggcaacatgttcattaatgtaccaatgtgcttgatagaatcccactgcaaggaaatttgtattgttctgatcaaggcacaagtccgggagaaaattgacgtatttttggatatgcaagcactgggcattcaaataagatctttttgtcatgctttctatttgctatttaactactggagtataacgtctattttcccctgagccaaaatacagatgaattgttctgcagagtgtaaaattgggcacaaaaatgctgagtaattgcaccataaatcaataaatcactacgtacttatacagattggagctgtttattttccttccactcaggcttcttgctgttggtgcaaatggacttgcaatcaaatcaaatgcccctgtatgagaaggaagaggtggcctggccagccgaggtcgcgaccgatgtgcttgcaatcagcggcaaagtggaagctagagca

SEQ ID NO: 390423 - DNA, 1507 bp, Oryza sativa
cgtacgcgtgggttcagaccttcctccactcgagtgatgctgaatcatgcagtgattctttcaagggggagtgtgatgcttcattctgtgagcaaactggaaaggcaaaacttgcctttgtcatctttaaagagggtaaacttgtctgggctgaggttttccatgaggtaccttgcaagagtgttgtggaggcagaggctttggcagtcatagctctcctcttcaagcttattgaccttaacttgttaagagggactgtttggaccgacaacaaggtctgttataatgtgctgaatggtgaatatgagataaaggttgatgatcccaacaggtcgctgtttctgtttctgaggagtttgagaggtcgctttgagtccttgaccccggtctggaaacccagagggctgctgctgatcccagatcgtctggttagtatggtcgatgaccccctgatatcaaggaatagattggtactcagtatactggaaaaaacagttccaattcttagtcagccgcagttcaggatatcatggagcagctatctgcgaacaatttttgacaaacgtgatggtggaaaacaaatttctaacacaacaaatgaaattaaggaatcagatgaatccgaggattcaatctgttgggttaaggctgatgatgaagaagctgaaattgcttcctttcttgaaattatgaaaactttttcagcccatcgcttgcttattgtggttgacaactttgaagacaaatctcctcattatcaaaagttaattaaggatctctctcaaaagttttacacgtgttggatgagtaaagaaggcagtgtcacaattgtggagtatgactctcctaacactgaagagaaagagaccaaaagattggtggttatgtttggtgggacaatggcactggatgaatatatccaccaaaaaaatctctgtacagttgttttggtgaagacatctgagattaagctgctaagagatgctggaatcgaagaaataagtgctaagacacttctgagttttcgcaacatcaaagcaaaaccagttgtgccaaagaaacctcgggaggatgaggatctagagaagggggggggagggcaggtggtgaataggatgaggagagggcaggtgtgaagataaggtggacaactcactgaacttcagtcttttgcatgattccttgcgacggcagattccttcggtcttttacatgtttgatactttgatgcatcgttgagacagttttttttgtacctgaatcatgatgttcatgtcacaaccgtacgtgatgctcaagtaatcttatctgacaatgtagcttagctaactaaaacatatgaagataaaggtggacaactccctgaacttcagtcttttgcatgattccttgcgacggcagattccttcagtcttttacatgtttgatacttgatgcatcgttgagacagttttttgtacctgaatgaatcatgatgttcatgtcccacccgtaaaaaaaaacccaa

SEQ ID NO: 390424 - DNA, 682 bp, Oryza sativa
ccacgcgtccggctgatccgatcaaaaaaatggaagctagagactttgaattggatgaagagtcatttgatacagtttgtcaggaaaacgtggaagcagcaacagaaattgaagacggaagcttgaatagggaccaagatgacataacaagcccaaaggcttcacaagaggatgctttggaggaagtaggaacagaacttccgcatgagtctttacatgaaaatagacatggtgcaaaggatgagcaaacactctccttgatagaacccgatacaggcaacgctgaaaaattgcctaacgaggctgacagtgttcaaagccctccttgcacagaacaagaagagtccattgaatcttcctatgtcgaagtgagaagcactactgagggtcaagtggagagtgaagtaatagaaacgaatgaggaggaccaggatacgaccgcaggtggacatactgacgaacagatcgaaaattgacatgatgatcagtcgaaacgatcatgctgctgaagaaatatgtgatgagcaggcacctgaaataactgaaccagttagccacacttgatcgaaagtttgcttatgaaaaggaaattcctggcagttcgacatgcatggaccaagaaagagagtatgatctcaaacaatgaagtcagcaactttgaaaaagcccttgagacacactt

SEQ ID NO: 390425 - DNA, 591 bp, Oryza sativa
cccacgcgtccgagattatattcacagaataggtcgaactggccgcgctggtgctagtggaactgcattcccctttttcacactctccaatgcaaaattctccaggaatcttgttaagatcttgagggaagctggccaggttgtgaatccagcgctagaatctatggctaaatctgccagttctatgggaggaggcaatttccggtcaagggggcgtggtgggtttggtaacagatctggctcaaatagcattcccataagaggaagaaggccatactgagggcggcaaaaagattaaaacttttactgtataccgataggtggaacatgtcacacgaatggccaaatatacttatccaacagcgtaggatatgtgttccaagtttagcttcgacttggagaatggtttgtccagtgttattttgactattgaggcaacgtcctcgtgcggtactggttattgtttactattgttgggttacttgaaagaacagtttgctccatttgttatctttttattatccgggttattgtttactattgttgggttacttgaaagattagtttgctccattttttttttttttttta

SEQ ID NO: 390426 - DNA, 1109 bp, Oryza sativa
  unsure (1)..(1109): unsure at all n locations
gcaccttaagcattggcagcctgtgttggaattggttacagattttcattgggttcatttggatagttatggatactggtatgttattggataactttcagcattgtgagttaaggctgacagatcaatcaccatcatatccacatccaacagttattgatgcccagttcagtttttcagccccttcgacttgtattagttgtagaacttgaaagtgcatccatgggcagtttttgttcttcggctctggttcaagccatgcgctgacttctatggagatcgacactgctgatatcccagctcggcctgcttgtggtcttcagggcaaaagtattatcttgattacatactcatcattntcttgttatttttgcagatgtcaaggatattaagtgtgtgataaatatttgattttccaacaactcttgaagattatattcacagaataggtcgaactggccgcgctggtgctagtggaactgcattcacctttttcacacactccaatgcaaaattctccaggaatcttgttaagatcttgagggaagctggccaggttgtgaatccagcgctagaatctatggctaaatctgccagttctatgggaggaggcnatttccngtcaagggggcgtngtgggtttggtacagatctcggctcanatagcanttcccataagagggagannnnnccnagctgagggcgggcaaaaagattaaaactcttactgtataccgatagggtttaaatgcactctcttgggaaatttcctttgagaattccctcgactgcgtgaactggacataagtgcaattttcattcattggaggtggaacatgtcacacgaatggccaaatatacttatccaacagcgtaggatatgtgttccaagtttagcttcgacttggagaatggtttgtccagtgttattttgactattgaggcaacgtcctcgtgcggtactggttattgtttactattgttgggttacttgaaaaaacagtttgctccaaaaaaaaaaaaaaaaaaaaaaaaaactcgagggggggcccggtacccaattcnccctatagtgantcttnttacaattcactggccgtcgttttaca

SEQ ID NO: 390427 - DNA, 523 bp, Oryza sativa
gagttgtgttgagagatggccacaccgcaactgctgctacgccgcgccttctcctcctccttcctctcctccccattccgccgcccgccactccaccccgcccgctccttcgttcccccccgcgccgccatggcatcctccgccgcgccgttccacatggtccagatccagcgcgacgacacgacttttgatgcctatgttgttggaaaagagaatgctcctggaattgttgttttgcaagagtggtggggggttgactatgagatcaagaatcatgctgtccacatttcccaaattggtgaaggatacagagctctcattccagatttgtatcgtggtaaggttgctcttgatgtagcggaagtcagcatctgatggaaggtctagactggccgggtgcggtcaaggatattcaggcttcagttaaatggctcaaggcaaaatggatcacccaaggttggtgttactggatattgcatgggaggcgttttgcaattgcaagtgggttcagtcccagggttat

SEQ ID NO: 390428 - DNA, 713 bp, Oryza sativa
agaaaggcttccagaagtgcatgacgtttccgccctctagcggcgaggcacaacagcagcagggttcatgctgtgatgcagataagaatcccaaggatgtgccaacctatgagcgctccgtgtcactgcccccaactttgaagatcatatctgctatgaaaggaagccgccaaaagaatgggatggcttcatcaactgaaagtcgccacgtcaaatgggcccctgacgtgtatgaccccccagtgacatctgtatgtcattcagtgaataacagctaccagcgtcggtccaaatcccggaagaaggacaagaataagcagaagcagaaacaaaagcaaaagggtaggtccaagaaaaaccaccagaatgctatccagagttcagcagtgctccaagctcctggcgaatttgataggctcaaggatgctgaaaccacaagtagtaattcagcaccagacgatctcaacaaacatgagaccgatatattggattatggcatcagcagtcaagacgccaaatgtggaagcagctttttgcgtgaatcggctgctaaaatgcatttctccactgctgaggcttcctgaaagaaaggaaaatgagtcctgcggattctcccttggtatgtaaatatgatgcatgtgtagataaaaaaaatccagtttgttgttgtgtttaacaaataataaaagagggcgaaagctagagaggatccg

SEQ ID NO: 390429 - DNA, 527 bp, Oryza sativa
  unsure (1)..(527): unsure at all n locations
agaatgctatccagagttcagcagtgctccaagctcctggcgaatttgataggctcaaggatgctgaaaccacaagtagtaattcagcaccagacgatctcaacaaacatgagaccgatatattggattatggcatcagcagtcaagacgccaaatgtggaagcagctttttgcgtgaatcggctgctaaaatgcatttctccactgctgaggcttcctgaaagaaaggaaaatgagtcctgcggattctcccttggtatgtaaatatgatggatgtgtagataaataaaatccagtttgttgttgtgtttcctgctgtgtgaggcgttaagagaacttctggcgtgctttgatttggagcagttaccatgactgttggactggtttttgtatgtattgatggacaaagctagtaagcattaatctatgagctgcagttgttttccttgatccaaaaaaaaacctatataatttactttccctcttgcnnnnnnnnnnnnnnnnnnnnnnnnnnnnnnnnnnnnnnn

SEQ ID NO: 390430 - DNA, 488 bp, Oryza sativa
aaggatggcgtgcaactatggaggatgctcattcagctttgctagatatcgataatgacacatcattctttggtgttttcgatggacatggaggaagagtggttgctaaattctgtgcaaaatatctgcacagagaagttctcagaagtgaggcctattcagcaggtgacctgggcaatgcagcccataaagctttctttagaatggatgagatgatgcgaggtcaaagaggctggcgagaactacaagcacttggagataagataaaccagattagtggcatgatagaaggcttgatctggtctccaagaggcagtgattcaaatgatcaacacgatgattgggcttttgaagaggggccacactctgactttgctgggccaacctgtgggagcacagcttgtgttgcaatagtaagaaatagccaacttgttgttgcaaatgctggtgattcccgctgtgttatctcaaggaatggtcaggcatac

SEQ ID NO: 390431 - DNA, 490 bp, Oryza sativa
ccacgcgtccgcttcttcaaggagttgcatcaatggccaagtcgttggtggtattgataacattccttacaatcctttccatcctctcccgaactggtgtgccttggtttcttaagctgatgataagtctttcatctcagacaaatgaactgtaccagttggcagctgttgcattctgcttgttgtttgcttggtgcagtgataagttgggcttgagtcttgagttgggttcgttcgcagctggagtaatgatatcaacaactgatcttgcacaacacacacttgaacaaattgaacctattcgaaacttcttcgctgctcttttccttgccagcattgggatgctaattaatgtccatttcctttggaaccatgtcgatatactccttgcagctgtgattttggtgataactgtaaagacgtttattggtgctgttgtcgttaaagggtttggctatagcaacaaaacatcttttcttggtggcatgtc

SEQ ID NO: 390432 - DNA, 549 bp, Oryza sativa
cctcgcgtgcccggaccccaccatcataaccacccaaaatcgaatcccccaaccaaaaaagaagcaacaagaagaagaagagaggagaaagtgagagtgcacacacactatagcatagcactactctcttcttctttaggagagagcacacagttccaagaaaagctctgagcttcttccatcgatctctcggccatggcacggtggctacagctgccgtgcagcctcctgctcgtcatcatgctcgtcgccgccacggccgccgccgccgacgtcgtcgtccgcgacgacgagaagtgcgccgcgtgcggcctgcccagcccctgcggcacgacgtgcacgtacgccagcccgccgccgcccgacgtgctgctcactccggtttactacccgccgccgcctcccgtctactaccccccgccgtccccgacgacggtggcctaccctgcgtcgaccacgcgcgagaccaactgcccgccgccgccgtacggaggcggaggctacaacccgacgccgagctacaacccgacgcccggctacaacccgacg

SEQ ID NO: 390433 - DNA, 898 bp, Oryza sativa
tgctattcctctgtagacatcaagtgctaatctcgtacgttttcatcccaaaatttctcctgccagggccaaggccggctgtgcagccgtttcgccgtcgtcgaccttctgcctcctcaccatagcaccagcaggatcacctctcactgatcacgttgaagatcccaccggactcacgggaattgaagtggacctagaaggctacgctgaagcttcggaaggccacgttccgtaaggcaagccacagttccaatctttgatcatattgaaacctagtagagaaccacttagttattttatgcattgagtatttataaaattattttgcgtatgaattatttttgaataaacttgttagtttagttattacccaatattacattgttattattggccagatccatggaattgctatatcacgtcctttgataacctaggtgtagatttatatacttcacaataatattctagtggataagaccacaaaatatctatactcatatacatggtttacccgttgtcacgtggtggcgtgtcgggtgatataaaatgtgttatttgatatgagtcactcgcctggagtgatatggaagattaatgccgggtgaagatggatgttgtggtgtgtgaggccctgcatattgttataattatttggtggaatgtgtatattacacttgaagtatgcacgggcctgtgctagtttcggtggctctccccggatataaggactacccccttatgccatgggaaatggtgtaatttgcgcccatccacaggaccgagtaatcagacttagcctagtacatggtcccactatatggaagactgtagggcggctctatgagcaggtttggggtggacatggggggggggcttcggccaggttaacatgatc

SEQ ID NO: 390434 - DNA, 576 bp, Oryza sativa
  unsure (1)..(576): unsure at all n locations
tatttaagcaggcaaggtagccatgctcatcctttttcccctctctttctcctttactcagaaaggaatcgagttcccaaaatttcttcaaactgccgtggtcgtcggccgatctgtcgctgcaggccaccggtcgtcgtctcctcgcgccaccagactcttccagagccgatagcgttgaagatcccaccggactcacaggaactgaagtgggcctagaaggatacgctgaagcttccgaaggccatgttccacaaggcaatcaatccttccccgaggaggtgcatgaaggggaggaattctacggtgctaacgagttcatgttctaggtcgatctgctctcaagcattgcctgtggtgtttttatcctattttgtgtttgggtcttttgtttgtagggagtgtgtttggcctgttggcccctaaaacctgtcttagttatcttttatgtaataatttctgtaaaaacttgggtatatatatcgaaagctgttctgtttatcaaannnnnnnnnnnnnnnnnnnnnnnnnnnnnnnnnnnnnnnnnnnnnnnnnnnnnnnnnnnnnnnnnnnnnn

SEQ ID NO: 390435 - DNA, 701 bp, Oryza sativa
  unsure (1)..(701): unsure at all n locations
agattttaaattaaaatatggnnnantaannaccatttatcctcatcttcatcatagtccagattttaaattaaaatatggaatatgatgaagatgaggatgaatggtgattaatattgctactattttaaaatgatgatttacaacttgtttgcaaataaaatgttttacaaagtagggaaaaactatttataataggcttgttatgaaacctccttgatgaactatattcttctttgtacgccttgcatatattctatttgtattattatggatgtggcttgctgggtacctcggtactcacctcttgcataaaatgtggttcagacgatcagttctttccctgaggaggcgcaggaaggggaagaattctatggtgctgacgagttcttgttctaggtcgatctgctctcaggcgttgcctgtggtgtttttatcctattttgtgtttgggtcttttgtttgtagggagtgtgtttggcctgtcggcccctaaaacctgtcttagttatcttttatgtaataatttctgtaaaaacttgggtatatgtatcgaaagctgttctgtatatcaatctatgcgcgatcgaaatcctagacggtcgcgggtggtttcgggatactatactcaaaccgggtatccccacaactgtagactgtattatacactaaagaaatagaaagaaaatccaattttatgt

SEQ ID NO: 390436 - DNA, 388 bp, Oryza sativa
  unsure (1)..(388): unsure at all n locations
ctatttaagcaggcaaggtagccatgctcatcctttttcccctctctttctcctttactcagaaaggaatcgagttcccaaaatttcttcaaactgccgtggtcgtcggccgatctgtcgctgcaggccaccggtcgtcgtctcctcgcgccaccagactcttccagagccggcaatcaatccttccccgaggaggtgcatgaaggggaggaattctacggtgctaacgagttcatgttctaggtcgatctgctctcaagcattgcctgtggtgtttttatcctattttgtgtttgggtcttttgtttgtagggagtntgtttggcctgttggcccctaaaacctgtcttagttatcttttatgtaataatttctgtaaaaacttggg

SEQ ID NO: 390437 - DNA, 419 bp, Oryza sativa
  unsure (1)..(419): unsure at all n locations
ngagcngngaananancanccngaggcactcaagctcatccctgccctcaaacctctccaaactgctgccaaggtcactggccaaatccaccgtcgccggcccttttttctgccacaacagcacgccatcaacttcgccgctcatcgatcgcgttgaagatcccaccggactcgcaggaactgaagtggaccaagaaggctacgttgaagcttccgaagccacgttccacgaggcgatcagttcttccctgaggaggcgcaggaaggggaagaattctatggtgctgacgagttcttgttctaggtcgatctgctctcaggcgttgcctgtggtgtttttatcctattttgtgttcgggtcttttgtttgtagggagtgtgtttggcctgtcggccctaaaacctgtcttagttatctt

SEQ ID NO: 390438 - DNA, 552 bp, Oryza sativa
ggcagcacgcactcctcctccttccccattctcccattccccatcccacaccggcggcggcggcgcgagcagcggaggagatcggcagcgacgatgtcggcgacgacggcggcggttcccttctggcgcgcggcggggatgacctacatcggctactccaacgtctgcgccgccctggtgcgccggtgcctcaaggagccccacaagtccgaggccgcctcccgcgagaaggtccacttcgccatctccaagtgggccgacggcaagcaggagaagccgactgtccgcacagatgatgaataaacatttggtgccatggtgacatagttcttcctacagatgtttcaaaaatgttcttgcctttcttgcgagccgttgtacctgaaacttgctgttatctggctggattttgtggtcaacgctgaagaataaattctttctgtgacagtggatctggttgtcatacaatgttattatcgttgctaattgcccttgctgtactcgatcaatgatgcgaactcttggtactcaaggggggcggatctactttat

SEQ ID NO: 390439 - DNA, 810 bp, Oryza sativa
tgctgtgacgtggtgcagtgaaagattctgtgaatgaggacaagttgagagataaacctgcgtatgagcacctgaatgaaccgatgaatgagcttgcggaagcatagttaccggcagatattattgatacccgtctaaaccaagctgtgactatcctagaggatcttgtcaaaccaattgatgagtcaatggactactacaagaagcaacaacttgagggaattggccattctaaatggcaccctgagagaggaaagcccaagtcctcacctgagccccagtgtatcccccttcaactccaccgggatgaagcgcgcgaaaacagggcggtgatctcggttccgaaagcattattattctccaaatctggtcatggtttctatgtctgatcacatgctgctgtgctttgctggagatgattggtgatgcatatgctgggatcatcagtgctgctggcctatgcctgtcatgatctgccttgttttatcatccttgggggtgaatgatcctctctgtgggcttgatgtttgacggtattattatttattctttgtgcatctgacttctgaatattaacattattggtttgggtaagttaacaacaaggcccggtttggccaatctagaaagaattgggatcccaagtgtcggacaataatcaggttttgtcggtgtacctgaaagaaatagtagtaatttgtcaaaggggctggtgctcttgtgtgctagtgcttagtacaagacagccaagcaatgaagcaagtatagctgaagagacaaccctccattaatgattatttgcattcatac

SEQ ID NO: 390440 - DNA, 951 bp, Oryza sativa
  unsure (1)..(951): unsure at all n locations
gagnacgagacgaaccgaagaagcattccctccctccgctcgagcccctccgttttgatccgattcgctcgcgattgatatggggagaggctacagttacagcccatcaccacctccaagaagctatcggagaagggccagcagcccaattccccgtgaccggtatggtggacgtggtagagatctcccgaccagtcttctagtcaggaatcttcgtcgggactgccggccagaggaccttcgtcggccattcggacaatttggtcgtctcaaagacatatatattccaagagattactatagcggtgaaccgcgtggatttggatttgtccagttctacgatcctgatgatgctgccgatgcaaaatactacatggacgggcaaggttattcttgggcagggaagtagctgttgtatttgcagaggagaacagaaagaagccttctgagatgagatctcgcgacagaataagtggcagcggaggtcgttcctatgaccagaggtactctaggtcaccgcgatactctcctcctccaaggggccgctcgccttaccgcagcccgagctactcaaggtctccttcgcctcggtatgcaaggcgcaggatgagggagaggtcctactcaccagttgagagcagatcaaggagcaggagcccggtcgaggaaggatacggtggtggatccacacggagagagaggtcgctctctgtcagtgaatgaggtctagagctaccggtaatcttcaacttgtagtcgctatggctttgcgaaccatatgttactgtcgtgctgtagtggtatcaataacttggcaaatgttgtgtcattacgcctttcctggaagattgcaaacatattaagttacaacgccggtgaattctgctcactttggagttgttcttgctttgtgtgttgttttcctgtggattctgtagaaacccccttgat

SEQ ID NO: 390441 - DNA, 450 bp, Oryza sativa
tttctgcttcggcagctgctgctggtgtggtgatacactcgcctagctttggccaccgctcatctctgctctgctttttctcctctgctccactgatcatccaattcttctcctcctgattggccattctgattggctggtgacatgtcgaagaaaattgtggtgaagctggacctgcatgacaacaaggacaagcagaaggccatgaaggccgtctcctcggttgtcggaatcgacgccatttcgatggacatggcgtcgcggaagatgacggtgatcggcacggcggatccggtggacgtggtgagcaagctccgcaaggcgtcgtgggcggcctacatcggagtcggtcggaccggccaaggagccggagaagaaggaggagaagaaggaggaggccaagaagacctcccgcggcggcggcggcgacggcaagaaggaaggaggtga

SEQ ID NO: 390442 - DNA, 402 bp, Oryza sativa
catctgataggctgcgcgcgacgacgtgctacctgacaccgtacacgacgcggcggcgctggtgcgcctcaaggaccgcatagagctgcaagaggaggaggccctggccctaatctaggagctcgccctcctcgacgacggttccaatcacaccgttggatattgatgaagcaccataccaaacattgttttttacaataccctgtggattgatctgatagttggcgagtcctgcgtcgtgaagcaggattaatgcttatgaattgggaagatttgtaggataggcttgcggcttatgtgatgtacaactattccttttggtctgaggagttgttcaactcttcttggttatgtgaagttagttagactttacttttgttgcatagccagatcttattttta

SEQ ID NO: 390443 - DNA, 787 bp, Oryza sativa
  unsure (1)..(787): unsure at all n locations
nctggagctccaccgcggtggcgnccgctctagaactagtggatcccccgggctgcaggaattcggcacgagcttttcatccgatgatattggaaagataaaaagaagaatatcaaacatacttgagccaggcgaaacgataatacaagctttgaaaagattgaagaatacatccagtgataagcgtggcaagatgactgaggggaccaaacgtatctttgatgagttgacagaagctgccatgaagctaatggagaacggagagtataatgtttattcagatgatcgggagacttttgaacgtgaggctgcgggttatgaacgtctggcacgtgctcgtcttggtctgccagaagctgaagaagatatgtttgcagacagtccaaaagataaaaccactgcctcgttactggatatggagcctggtccttcagctgcccatacccctacaaccaccaccacatctaaggaagatgacagtgactttgacatgtttggtgacgctgttgacaagacccatgtcaaccgtgattctgatgcaaatgctgtaggttcaggttcgaaccctcaacaagtttctcacgatgctaatgaaacctcagaaggtgagaatggaagtgtgagctcagattatgttcatgatccaacttcaggttattactatagcagtagcacgggctattactatgattctacatcctgttgttttcgctctgcatctacaggagcctggtactcgtatgacgaacaaactggctaatacaaagagatacagtctgaacaagcc

SEQ ID NO: 390444 - DNA, 401 bp, Oryza sativa
ccgcgctcgatctctcgccgccatggcccgcctcgccgtcgccgccgcactcctcctcgtcgccctctgccgcgtcgtccacggcgaggccgatcaggagaccgcccccgcctacgccaaccgtgaagcctacgtcgagcacagtggtggtgacgccgccggcacgtccgtcgccatcgtcccgtcctacctcgacgacggagaaggggctataaagcagaagagaagaagaccaaaaaggggagaggactttagatttcgtgaagcactgctgaaggctgatttctggcttttatttgcagtgtattttattggggttggaacttggattactgttcttaataatttatcacaagttgggattgcttcatgtgattgttgatacaacgatttgacttatt

SEQ ID NO: 390445 - DNA, 622 bp, Oryza sativa
gtgatttaggcgaccagaaatcagttaatactcggtttgagatggcgatgaggcgatgagatcatggccttttcggtcgaatctagcagagcggcgagcaacccccacccactttgactccgatcctccccgcccccagcgcgatagcccatccgatcccaaattccggcgagatggcggtcagcctgtggcgcgcggtgatgggcgcggccggcggcggcggctcctcgtcgtcgtccgcggccggcggcgacgcggggggcggcgtggagttctggcacggcggggagcgcacggggtggctgaacaagcagggggagtacatcaagacgtggcggcggcggtggttcgtgctcaagcaggggcggctgttctggttcaaggacgccgccgtgacgcgcggctcggtgccccgcggcgtcattctcgtcgccacctgccttaccgtcaagggcgccgaggacgtcatcaaccgccagttcgccttcgagctctccaccccgaccgacaccatgtacttcatcgccgactccgagagagagaaggaagagtggatcaattccatcggccgatccattgttcagcactcccgctccgtcaccgacgccgaggtcgtcgacta

SEQ ID NO: 390446 - DNA, 494 bp, Oryza sativa
  unsure (1)..(494): unsure at all n locations
cgtcccgattcccggtcgacccacgcgtccgcagcatctcactctccagaagctatcatggcttcatccaagactgttctttctgcaattttcactgcttctctgtgcttcactggagctctgtgctttccctgctcaccatgaggatcttcacccagttgtgcagagcccaccaaagccagttctttctccagattactataaggctacatgcccacaagctgatgagattgtggtctctgtcctaaagaaggctattgccaaggagcagaggattgctgcttctcttctcaggctcctgttccatgactgctttgttcagggatgcgacgcgtcggttttgttggatgacagtgaagaattcgtgagcgagaaaaggctattcctaacaaaaattctattagaggatttgaagttatagacgagatcaaggctgcactttnaagaagcttgtccacaaacagtctcttgngctgaaacaattgccctagctg

SEQ ID NO: 390447 - DNA, 769 bp, Oryza sativa
  unsure (1)..(769): unsure at all n locations
ttgcttcttttttttaatggcaaaaaattaccgtgcctcagattttgctaaagtgggaatcccctccacaaactgttcttttcgtgactaaacctaattccaactccgtgcacgctctctgtgctgaaatggttaggtatgttttctttctgctctgtgtgccaacatggtcaggtatgtcaaaggttttatattttatcaatcatctgagttcggcattaaaaatagcttcttttttgtttctggaacttgtcctctcctaatttacttatgttaagcagattttgttgataaataatgttgcatggaattgtatatttttcattcaatatcgttgtttcacttgtgctaatgtctgccgttctccgcagatggcttaaagagcacaataatataaacatctttgtagagccacgagttagcaaggaactagtgactgaagattcatacttcaactttatccaaacatgggataatgatgaggaaatgaagacattacggacgaaggttgatctcattgtaactcttggaggtgatggaacagttttatgggtatgtggtccaaactacatgacaatttactgaatctgaatactgtgtggttaattttgaaatttaagctataaatatgagtttggaaataactaacactctgatggtatacaaagagatgaaatgccatccaagaaatgctgatggtctaatgcatttgtcgatcaaagttgaactagtgtctacctacttgggatcaagttanacactcattcac

SEQ ID NO: 390448 - DNA, 380 bp, Oryza sativa
  unsure (1)..(380): unsure at all n locations
gagacactctaccgtgtgctcaagcactacagcaatgctaaccagcggatgccattgatctatgtgaagctttacatctatcagcttttcagagggttagcttatattcatactgttccaggagtctgccacagggatgtgaaaccacaaaatgttttggttgatcctctcactcatcaagtcaagctatgtgactttggaagtgcaaaggttctggttcctggtgaaccgaacatatcatacatttgctctcgctattatcgtgctcctgagctcatatttggtgcaaccgagtatacaacttcaattgacatatggtcagctggatgcgttcttgcagagttaattcttggtcagccatgnttcctggggagagtgct

SEQ ID NO: 390449 - DNA, 599 bp, Oryza sativa
ccacgcgtccgcggacgcgtgggctggtgtggaccatgtcgtgttattgcacctaattttatggcttgaggatgtcaaagacttatccctcaactcatgttccttgacaatagatgttgatgacctaatggatttcagctcatccatgggatatcccgcgcaacgccgacctttttcttcataaaaaacgagaagcaggtcgacaagcttgtgggcgccaacaaacctgagctcgaaaagaaggttcaggcacttgctgatggcagctgaaccttattatagcgcaacggctagaactgaaacgaatttggcatgtctgtccggccaagtttgtgtccgtgtgctcccttgcagcttctagtgtatagttttggtgtctctgttcaaaccatgtttctttttctttctgaattttgcccatgtgtctggccacacacatatgcaatctgtgaactaagaagttgtgatgtgttcagagctgtaacataagagtaatgtactagagtagttttaaaagacagtgatatggttgtattttgagctatgaagttgtgccaataaatgagtgggttttgaaagtgacaaaaaaaaaaaaaaaa

SEQ ID NO: 390450 - DNA, 1339 bp, Oryza sativa
  unsure (1)..(1339): unsure at all n locations
ccacgcgtccggcatgttctagtgacgggcggcgctggatatatcggttcgcacgctgcgcttcggctgctgaaagattccttcagagtcaccatagtggataatctttcaagaggaaatatgggggcaatcaaggttcttcagaacttgttttcagagcctgngcggttgcagttcatctatgctgatttaggcgatccaaaagctgttaatagaatatttgcagaaaatgcttttgatgctgtcatgcactttgctgctgtcgcttatgttggtgagagcacacttgagcctttgaggtactatcataacatcacctcaaacactttagttgtgctagaggctatggcagcacacaatgtgagaaccctgatctactctagcacatgtgccacctatggagaacccgagaagatgcctatcaccgaaggaactccccagtttccgatcaacccatgtgggcaggccaagaagatggcagaggacatcatcttggatttttccaaatccaagaaggcagacatggctgtgatgattctaagatacttcaacgtcattggttctgaccctgaaggaaggcttggcgaggctccaaaacctgaattacgggagcatggccgtatatctggtgcatgctttgatgctgcactggggataattcctggtttgaaggttaaaggtactgactatgaaacacctgacggtacttgtgtaagagattacatcgatgtcactgacctcgttgacgcccatgtgaaggcgctcaacaaggcggaaaggggcaaagttggcatatacaatgttggcacaggcaaaggtaggtccagtgaaaagaatttgtcgaagcttgcaagaaggcaacaggagttgacatcaaggtcgactacttccctcgtcgacccggtgactatgccgaagtgtacagcgatcccgcaaagatcaacagcgagctgaactggactgctcaacataccgatctcctggagaagcctcagggttgcctggacatggcagaagaagcaccggagcggctacggaccccctcaggccatggttttgtgaagagaatttaccctgtagcatctattggctgaaaacttaaaaacttaggtggatatattcttaggaatgttcatcatcaagggctttcaattgctcactcacagaagttatatgtaatatagcgcttatggtcattcgttcaattcttgagattcatattatgggaggattttagaagattgtaatattgttgatgtattcagtatacaataaaaatccaacaagctatcctcagaattgttatccaaaaaaaaaaaaaaaaannnnnnnnnnnnnn

SEQ ID NO: 390451 - DNA, 516 bp, Oryza sativa
ccacgcgtccgaaagaaaaaatcatccatcgccgcttgcgactccgagcggcgccaccgccgccaccgccgccgtctgccaccgccaccgccgccgtctgccaccgcgccgccgccgccgccctctgctgccgccgctctactccccggatctacacacaccatcctgcttcgctcccgttccatgcccaaaacttgcatatcacttgcgcctcaaacaagctagggtagtcgtcggggggaggggggcgcttgctgctccctccgccggcaccatctccagtcccggtgtcgtctctcgctgttggatccggagtcgcgcctccactttcttcatcctagtcgagccgagccactttgggatctaccgttgctgcctttatactgtaatattaattgaatttaccatggataaggattggatgaaaacatctagatctagtgctgaatataatatcggggttgataaatttatagaattcgccttatccaattcagcccacaacaatagaatcat

SEQ ID NO: 390452 - DNA, 430 bp, Oryza sativa
  unsure (1)..(430): unsure at all n locations
gacagctgcaaatgtggatggagaacttacccaagtttaaaattattattggcgggggtgtgacggatcggtgttgctgaacgcgacggcggcgagcgggccggcggagaaggacgcgatgccgaaccagagcctggacgggttctacgtcatcgacgccgccaaggcggcgctggagaaggagtgccccggcgtcgtctcctgcgccgacatcctggcgctggcggccagagacgctgcctccatggctgccgggaacatcaatggcgcgagcctttggcaagtcccgacggggcggctcgacggccgcgtgtcgtcggcggcggaggcgtggccaacctaccgtcttctttcgcggatttcgttaagntcaaggagcagtttcggttccaagggcctaaatgtgnaagaccttggatcctattaaggg

SEQ ID NO: 390453 - DNA, 247 bp, Oryza sativa
  unsure (1)..(247): unsure at all n locations
cgtccgggccaagcaaagcaaatcagccaaccacttgagcttctccctccactgagctccagatccactcgccctcggcaatggcgcatccgcatcggctcgtcgcggtgctcgcgctgatcctcctcgcctcgccggcggcaatgcgcgcggcggaggcggcgtgcgccggtcgagaagttcccggcggggagggcgtacgcggcgtncnagnacctgccgagcctcggngcggcgctgcactaca

SEQ ID NO: 390454 - DNA, 717 bp, Oryza sativa
  unsure (1)..(717): unsure at all n locations
cccccgtaattccnnctcaccttagggccaattgggtcccggccccccctcgagtcgacccacgcntccnatggtgatgccaatcccaacgttactattgagcattacctgcaaattgtgaaaactgagcttgttacactgagatcatcaaaggaattgaaactggttgaggagtatgaatccacagcgcacagcagcttggtgcacagcttctatgttcctgttgtgaaattccattttgaaccttctcccatgcaggtcttggtaactgaacttccaaaatccttctcccatttcatcacaaatgtttgtgctatcattggaggagttttcacggttgctggaatactggattccatcttccacaacaccttgcggctggttaagaaggtcgagcttgggaagaacatttgaacaacaagattattcttcagaagcagcctcaagcttagtggttgcactagttttagtcattattttgttataccagggtaggaattcttaatatatcaagatgtgaaagagggtagtgggttggcagaggaggagaagttggggtcatgatatatagtaatagtaggtagggacctcactgttttgctaaacgacttcgtaagaacaataagacagtggatccttgttaactataccctacgttaattcgtccagacttgtgttgtgttnnnnnnnnnnnnnnnnnnnnnnnnnnnnnnnnnn

SEQ ID NO: 390455 - DNA, 865 bp, Oryza sativa
  unsure (1)..(865): unsure at all n locations
gtcgacccacgcgtncgcccacgcgttcggccaaacgcgaggcgaaaccaccacacctcaccgtcgaatcgaatccaaggcggcggcggcggcggcggcggcggcggcgatggggatccacgagcacgtcgaggggatcaaggcgcactgggcgaagaacttctccttcctcgactacttcaagaaggtctacggccgggacaagcccctccccaagtggaccgatgccgacgtcgacgagttcatcgcctccgatcccgtctacggcccgcagctcaaggcgatgagggaatccaggaagttcgcgctcggcggggctctcgtcggcggcgcgcacctcggcggcatcgccctcaagtactccaaggccccgcacggtgtcgtcctggccaccggcttcggggcgatctgcggcgccgtcgtcggatcggaggtggcggagcactggtaccagctctacaagacggacaagcagggggccaacctaaggttcatctactggtgggaggacaaggtcgcaggaaaccagaaaagttgagtggtgtctatctggtccagcagcttggcaagagtgatgtccccccgctgggatttttagttgctcattcctagtatttccaaataaggtgtgtattggttgtgacgattacgcagatggagtatgtttccttttgctagtaccgtgagctctgtctgttcacagcctgaacaacaacttttgtgctctgaatggttcacaaactaaatgctgatctttaccggtatctgttgatctttgtccattaaagattactttgcatattgtaagtactgctttaccttgaagataataaggctacataacgtaaccaaaaaaaaaaaaaaa

SEQ ID NO: 390456 - DNA, 562 bp, Oryza sativa
  unsure (1)..(562): unsure at all n locations
ccacgcgtccgcttgttatcactagaatcctccaacttccccttctgttgcatccccatgctaaaataagaacagcctagccaaaaccctctattaggaacaacagaaagccttaaccaggagcaacactgatgggctccattggcaacggccggaatggctcggaggttggcatacagatcccagcgatggggaacaaggaagtgctggagcgacctgccataccaagatggccacggctaggcgtcgtcatggtggcaactagagctgttgccctggtgatggcagtgctctcaatggctctaatgatctctgccaagcaagcggcgtagtctcaagatcttcggcatcgagatcccgctttatgccaattggtctttctctgattccctagaatacttggttgggatgtctgcagtttcagctgcctactgtctcgctcaacttttattgactgcacacnaagccgtgaagaatgcccctgtggttcaatccaggaactatgcctggcttctgttactggtgatcagatcttcgcatatgcaatgatgagtgcctgatc

SEQ ID NO: 390457 - DNA, 958 bp, Oryza sativa
  unsure (1)..(958): unsure at all n locations
ccacgcgtccggtggattcgcataaaaaggacgcggaggctgatcgcctaagctcagccccccacccaacaagcccgcggcggcgactagggttttgaccccccggaatcccccctcctctcgccgcctccgcctccgccgccgccgccttcctccccgcgccggcgacgatctgctcctcctcccccgccggcatcgctgtttccggatctagcgcaagatgcttccgctctcgctcctcaagaccgcccaggggcatcccatgctcgtggagcttaagaacggcgagacgtacaacgggcacttggtgaactgcgacacgtggatgaacatccacctccgggaggttatttgcacctcaaaggatggtgataagttttggaggatgccagaatgttacatccgtgggaacaccatcaagtatcttcgggttcctgatgaggtgattgacaaggtccaggaagagacttcaaagagcagatcagataggaggccaccaggtgtaggccgcggaagaggaagaggtgatataggtactaagcctggaggcagaggcattgggcgtggccaggatgatggtggcagcaaaggcggtggtggccgtggaaggggaggaattggaggtaaaggtggcatcaaaggtgggggccgcggacgtgggtgagagggaaggtcacttgtgggaatgccgcttttttaaggctttgtgtcacatagattgctttaggagggtgaagaatggactggtggagtaagcattgctttgctttatcattttgtggtatgaccgaaaaatgtttcatgggttcagtagttaccagtgaagaggcagcggttggcctgtctcgaaacaatttgtttgatgtctggaccctcgactatattgaatattattgtggttattaaaaaaaaaaaaaaaannnnnnnnnnnnnnnnnnnnnnnnnnnnnnnnnnnnnn

SEQ ID NO: 390458 - DNA, 466 bp, Oryza sativa
cacccctttttcgtttcgttggaagaagaagaagaagaagaagaaggtggtttcgctggaagaagaagaaggtgaaaccctagatctgatctcggatgacggcgcgatcgttgttggccggtaggatggtggcggcggctcgccgcgccttccgcagctggcccctccacacaatcacaaccaccaccaccaccgacgccgccactgccatcgccaccaaggaacagcacaaggtggtcagtcgtcttgatgtgatggaggatataagctttccctacatgacacgcgagatggccgccgtactgcggcggagccgtgttgcggctgtcgaacacaacatttttaacatcaggcagcttgctaatccttaccatgggccggctgatggagatatcctgtatgacagggcatggattaacaatcttgctctgctttttactctctccacgttatttgggggcgttag

SEQ ID NO: 390459 - DNA, 441 bp, Oryza sativa
  unsure (1)..(441): unsure at all n locations
ccttccagatcgcaatccgaaattcagagatccaaattcgcccacaagaattcacctctgcttgttgatcggagaggaggaggtgttcgtcgagatgggcaaggtgagggcgttcttctcgcgcaagggcagggggaacagcagcggcaggtccaggtcgatgcgggaggcggcgatgaacgtggactggtcgccgaggccgtcggatctcgccgccgccgccgccgcgaagccccgcccgcccgcggcggaggacgagacggagcgggtgttcaggaagttcgacgcgaacggcgacgggcggatctcgcgggccgagctggcggcgctgttccgcagcgtgggccacgccgtcaccgacgacgaggtggcgcggatgatgcaggaggccgacttcgacggcgacggntaaaatctcgttcggcgatttcgcggccatca

SEQ ID NO: 390460 - DNA, 622 bp, Oryza sativa
cttggctggtgaggagtcgatgacgcggcgggggacggcgacctcgcgagtcgcgacccggtgcccaaagaataaaaaaaaaaaacccgcggtatacctagctccattcctcactcctcccccgcatctcacctcacctcacctcccgataaggcacgaggagactatctcctccccctcctcctcctctccccgccgacgaccccgccgagctacatctccgccgtgctgatcgcgtggagccgaggagaggagcggcggccaacgctacgaggagaggagagtgggggaggggaggggagcgagccttatcttacccgctccgccgaagcctatggactcggagcactggatctcgcgcctggccgccgccaagcggttctacgccgcgcagctcggccacgccgatcgagcggggatggaggaggtggacatggacgaggaggtgaggccggagttcgcgtgcccctactgctacgaggaccacgacgtcgtcttcctctgcgcgcacctggaggaggagcaccccttcgagccccatgcggcgccttgccctatatgttctgataagattgcaaaagatatgcttaatcatatcactgtgcaacatggggaccttgtc

SEQ ID NO: 390461 - DNA, 387 bp, Oryza sativa
ccacgcgtccgggaagggcagcgtcgcggttgcttgcttcctcccgaatcctcgcctcgatctcgctcgcgggcgggcggagggatcgtgatcgggatcgggatcgggggcgcgcgaagatgagcgtgatcgacatcctcacgcgggtggactccatctgcaagaagtacgacaagtacgacgtcgagaggctcaacggcgccaacgtcgccggcgaggaccccttcgcccgcctctacggctccatcgacgccgacatcaacgaatgcgtcgagaaagcggaggcggcgaacagggagaagaaccgcgccacggtggtcgcgctcaacgcggagatccggcgaaccaaggccaagctcgtcgaggaggacctgcccaagctgcacg

SEQ ID NO: 390462 - DNA, 457 bp, Oryza sativa
  unsure (1)..(457): unsure at all n locations
ccacgcgtccgcggacgcgtggggaatttatgagggaccgagcaaagcggcccaagagcccacctcgggagcctgagcctgaacctgtaaaggaggaagagcctgagccagatatgaatgaaatcaaggcactgccagcaccagaagactacaaggagcctgaacctgagaaggtggaggaggaagtaaagccagagcccccaccgcaaccccagggtgatttagtggatcttagagaagaaactgtgactgcagatgagcaaggtaaccggcttgctctggccctcttccaagggccacctgcagctggtggaagcaatggctcatgggaggccttcccctcaaatggtggcaatgaggtgacttctgcatggcagaatcctgcagctgagcctgggaaggcttgactgggaacttgcccttttngagacagcgngcaatctgtccaagcagaagg

SEQ ID NO: 390463 - DNA, 567 bp, Oryza sativa
ccacgcgtgcgcggacgcgtgggcggactcatggactgaccagagggtgtccgtggtcgcaactccgacaacacgctcatcaaagagaagcttggctgggctccaaccatgaggctgaaggatggtctgaggatcacatacttctggatcaaggagcagctcgagaaggagaaggccgagggcgtcgacttgtcggcctacgggtcatccaaggtagtgcagactcaggcgccggtgcagcttggctccctccgtgctgctgatggaaaggagtgagctctcaccctgggcaggaaacaggcatcatcatgatatagtgctactggtttcagaatttttcagatgccatatgatggttgccagccaccaccatctatacaatttcttgattctgttttggacttcacttcctgaaagatcaaagtttactagtctgcaattttcacttctttgtgttgtaaacgagggtaaaccgcttttatatatatacaagagggtgataatggtatagcattacaggggggaaaaccttcccaagaccaatggaattaagaatgatttcaggtt

SEQ ID NO: 390464 - DNA, 798 bp, Oryza sativa
acggtccaaatgcatcatgaatttagtatttgaaaacattgatgataagactgtggtatgagtatactcttttactttgttacagtgggatactgctggacaagaacgtttcaggacaattacaagcagctattaccggggagctcatggaataattattgtatatgatgtgacagaccaagaaagcttcaacaatgtgaagcagtggttgaatgaaattgatcgttatgcaagtgacaatgttaacaagctcctcgttgggaacaagagcgacctaactgccaacaaagttgtgtcatctgaaacagctaaggcgtttgctgatgagatgggcatccccttcatggagacaagtgccaagaacgccactaatgtggagcaggccttcatggctatggccgcatccatcaaggacaggatggctagccaaccggccgcttcaaatgcaaggccaccgaccgtgcagatccgcgggcaacctgtcaaccagaagacgtcgtgctgctcgtcctaaagataaccaagtctttccttccatgtaaaattcgacgtatgttactactgtttgctcactacaacgtatttgtgatattcatttgaacgcccttgataccatcttttctttaatcagatggttagggagctgcaaatatatatgtaaccttgctgtgttgctctttgctcacgaatcaagaggagcaagcagaaccagtgtatttgattcattttacgcttacatttttcccatttcaaaaaaaaaaaaaaagggcggcccccaaaaagggacccagcctacgg

SEQ ID NO: 390465 - DNA, 479 bp, Oryza sativa
ctccccaccccccgtctccttctccctcgtctccagatccgtgggtcgaagcagcggcggcgcccgatccacggcggtcactccctccgccatgaatcccgagtacgactaccttttcaaacttctcctcattggtgattctggtgttgggaaatcgtgcttgcttctcagatttgcggatgactcatacctggacagctatatcagcacaattggagttgattttaaaatacggacagtagagcaggatgggaagaccatcaagcttcaaatctgggatactgctggacaagaacgtttcaggacgattacaagcagctattaccggggagctcatggaataattattgtatacgatgtgacagaccaagaaagcttcaacaatgtgaagcagtcggttgaatgaaattgatcgttatgcaagtgacaatgttaacaagctcctcgttgggaccaagagcgacctaactgccacaaag

SEQ ID NO: 390466 - DNA, 431 bp, Oryza sativa
  unsure (1)..(431): unsure at all n locations
cgcccaccttcccccacgtcttcctctctctcccccgtcttcgcctcgcgctcgcgtctccctccctccctccttccgtccagatccgcgtgggctcgaagaagcggcgggcgatccacggcgagcgtcccgcggtcactcccccccgtctccgtccggcatgaatcccgagtacgactaccttttcaaacttctcctcattggtgattctggtgttgggaaatcgtgcttgcttctcagatttgcggatgattcatacctggacagctacatcagcacaattggagttgattttaaaatacggacagtagagcaggatgggaagaccatcaagcttcaaatctgggatactgctggacaagaacgtttcaggacaattacaagcagtattaccggggantcatggaataataattgatatgatgtgacag

SEQ ID NO: 390467 - DNA, 1472 bp, Oryza sativa
  unsure (1)..(1472): unsure at all n locations
ccacgcgtccggtggaggcctttgccctggtcttaacactgtcatcagagagctcgtctgtggtttggcgcacatgtataatgtcagcaaaatctatggtatgcagaatggatacaagggcttctcttcaagcaattaccttactctgacgccaaagagtgtcgatgacatccacaagaggggtgggacagttcttggcacatcacgaggtggccatgatacaaaaaagattgttgacaacattcaggatcgtggaattaatcaggtctatatcattggaggagatggaacacagaagggtgcatatgagatcttcaaggaaatccgaaaacgtgggctaaaggtttctgttgctgggattcccaagacaatagataatgacatagcgatcattgacaagtcatttggttttgatacggccgtagaagaggcccagcgtgccattgattcagctcatgtggaagcttgcagtgctgagaatggaataggcttagtaaaactgatgggccgttatagtgggttcattgcaatgtatgctactcttgcaagtcgagatgtggactgctgcttaattccagagtccccattttatatggatggtgaaggtgggttgcttcaatatgtagagagaaggctgaaagagaacaagcacatggttattgttgttgctgagggagcagggcaggatcttatagccaaaagtttatctacttctgagcagcaagatgcatcaggaaataagctactgcttgatattggtctttggctgactcacaagataaaggaccacttcaagagcaaaaagatggagatgactattaaatatatagatcctacctacatgatccgagctattccaagcaatgcatcagacaatgtctactgcacgctgctggcccacagtgctattcatggtgcaatggccggctatagcttcactgttggaaatgtcaacggcagacatgcctacatacctttctatagggtgacatccccacggaacaagggtcaagatcactgataggatgtgggcgaggctgctatcatcaaccaaccagccaagcttcctaagccagaaggacatcgacgaagccaaagagaacgataggacggccaacaagccaccacttcccaccggcctcagccatcatgtggcaaactctttcgaccagtctgcatcatcttcgtcgaacagccagatatgaactccatcatgtggcaaaccctttcgaccagtctgcgtcatcgtcctcgaacagcgagatgaatccaatctgtagttctatatagaagctgttgctattcccgttgagaaacctgggccacgctacgcagttttgatttaatatgcataatatcacctgtatgaatccacggatactctcctggattgctggtaactacaagcgtaataagaaaagcgctattgatgaagctatttctcatnnnnnnnnnnnnnnnnnnnnnnnnnn

SEQ ID NO: 390468 - DNA, 493 bp, Oryza sativa
ggtcgacccacgcgtacgagctcatgacttcctgcaaactaaagctactcttcagtgggattgcatttcgaccgagctagagagatttatagctaagccaatggcatcacaggttgagagccaccgtgccggcgcggagatcgtcagtggagacggcgtcagcaggaagaagtccatcgagctgctggaggagctcggcctccccaagggcctcctgccattggaggacatcgaggagtttggctacaacaaggaaacaggattcatgtggctggtgcagaggaagaagaagatcgagcacaccttcaagaagatcaagcagaccgtctcctacgccggcgaggtcacggcgttcgtcgagaaggggaagctgaagaagatcaccggcgtgaagaccaaggagctgctgctctggctcagcgtcgtcgaggtctacgtcgccgatgcctcgccggagaaggtcaccttcaagactggaactgggcttttgata

SEQ ID NO: 390469 - DNA, 650 bp, Oryza sativa
ccacgcgtccgcgttctcaacacctcattgcatataatttcctgaagaatttacaagagatttagaagattaagatgtcgtgtggtggaagttgcaactgcggttcgagctgcggatgcggtggcggctgcggaaagatgtaccctgacctggcagagaagaacaccaccaccacctcagtgaccatggtcctcggtgttgcacctgaaaaggggcacagcgaagcgggtttcgagttggctgccggctccggtgaggccggccatggctgcagctgcggctccagctgcaagtgcaacccctgcaactgctaaatgtcaaggcgaagactgtaaccatgcaacagcattcccagctgtgatgaacaaataaaagaagatatccagtgtgcatgatggatcagtccctgtatatttggttgtgtgaattcataagtatgtgtgtgtgtttgtgtggacaagattctcctatcaattgtcaaaggccaattgtggattttgtggctggaaaactatgtggcttcttgtccaatctactggtcatcatcttgccagtgtgccatgtgtaatggttgttcagtgaaatgcaaagattggttgtgttgaaaaaaaatatatataaatataatttatttatatattaaaattatt

SEQ ID NO: 390470 - DNA, 867 bp, Oryza sativa
tatacaggaagagactcctactcctagatagatatcgatagagataaaatcccccaccccacccaccttgcgctttctgctccgcccgcaatttcgccgtcgccgtcgtcgtcctcctccccggccgcttcccttcatccaggttcccccatggcggactccggcgctcgcaggcagcctagcttcaccaaggtcgaccagctccgccctgggacccatggccacaaccttctcctcaaggtcgtcgactccaagatggtccttcagaggggcggaggccctcagggcaggcacatgcggattgccgagtgcctcgtcggcgatgaaaccggcattattgtcttcaccgcaaggaacgaccaggtggatgtaatgaaggctggggctagtgttgacctgaggaatgccaagattgatatgttcaaggggtcgatgcggcttgcggtggacaagtgggggattgtgaaagctgctgaaagcccagctgatttcacagtgaaggaggataacaacatgtccttgatcgagtttgagctggtgacagtggtggagtgagagccttttttggtgtaggaggacggtatgtggtagaaccaattcatcttaaccaagcaataagtggaatcatggttgatgggtttttgtttatgtatttggagatccggaggttgagtagtgtcatctttaattaattaattatccgacaattgttgagaatagtctcctgtagtagtcctctgttggacctgttatgatgatgcatcatcgagttgcttattgccgtactataaaaatatgccactggtggtgttttgcatgggccctccaagaaagagtgctgtgcttcctggcgatggcgatgataat

SEQ ID NO: 390471 - DNA, 743 bp, Oryza sativa
ccacgcgtccgcgaacacctttaagcaattatgatgctgttgttctcctccaccaagagaagctttgtcgtcctcaccaagtacttttccctgctgagacccctaatggcaagctggtaatttgtggcaaaccatgtaaagatttccacccttatatgccactcaataaaggagttgtgaaaagcttgcatgattcaagagagaaaattttggtaaattttgacccaaccacatactttctgcgggatttgaagagtgcatttcctaaaactttcaagctgtggtatgattcaatcggaggagacgcaatcggtcttacatgggagaactcaaagaagcgtggcagagacgaggccgatgaaaccatgctggatccagcttctatcctaaaggaggttggaaatgttggcaaaggtttggtaaggggcgtgtatctcctcaaagcaccaaagcttcagtaaactattgaaaactcgctgaaagttgtgtggaagagagaggcttgtgctgtttgtgcaattaacacaacttctaaccgatattcttacactggcaaagagcaagacggtggtttccatggcactgattggacatggtaagggatcaacatctggcaatgtactgattagaagtaagcaaggaatgttgtgtttagactcaagttgattagggtataaaagtttgtatccaaatcttgattctgaggtacagaaaagtatagcaatgtattttgatccttcctt

SEQ ID NO: 390472 - DNA, 522 bp, Oryza sativa
ccacgcgtgcgcgcggccccaaaccctaaccctccccgcggcgatcccgatggccaccacctcccgccgatccctccacgccctcctcggcggcggcgcgagtcgccgacttctggtgctgtggcggcggaggaacgtgtccgcggcggccgtggcgggcgccacggcggtgtggttcctcttcgagcgcgcggggtacagcttcccgtcagtcatggccaacgccctgctcctcctcgtcgccatcctcttcttctgggccaagtccgcctcgctgctcaacaggcctcttccaccactccctaaactagaggtctcagatgtggttgttgagaaagctgcagatcgggctcttgtatggatcaacaaggtgttggctgttggccatgatattgccatcaacagagataggagtgtttttaataaaggttataatggcttctatgggtggtgtcatacatctggaatgctctttaaacttccttacgctcatttacattggtgtaaatgttttctctgtta

SEQ ID NO: 390473 - DNA, 720 bp, Oryza sativa
  unsure (1)..(720): unsure at all n locations
gaaggaaaantggtccccggcaacactttatcncgcccatacattngcccatgctatagaaacaggaactggttatggagcatggcnccatggggaggctnttccagctggaacagttatgccagctgacatgtctccaccgcctgggttggatagacgagtcaatcaagaaacggncaattgacatactagagaaagcgaagcttccaattacacctccagaggccatgacagtggagcggttcaaaagtattatggccgttgataagaaggttgctgatggattgctgaggctcatcctcctgaaaggacctctgggaagctgtgttttcactggcgattacgacaggaatgccctcgacgaaaccctccgtgcattctgcgactgctgattcttcctacttggatcttcagactgtatactaaataggctacattatcatttcagagaggagactgcattgtatatgtatgagatctttcccccttttttttttgtcggagaaataatggagaatgtggataggggttggtttctggttgtagcgcgtaaagactgatcaatcgtgatacagttgtccccattgacaagaagggtttactgcattttccttgctgttgccaattcttgcaccagatttttaataaagcctgtttcctgtttttataaggaaaaaaaaaaaaaaaaaaaagggggcgggnccgaccaacccgagggtt

SEQ ID NO: 390474 - DNA, 1298 bp, Oryza sativa
ggattaacatagcttcctgatcaccaaactgctcgtgcgccttgattagaacatgggtggttagtaataaaaatgtattgtccctccccatatctctgtttcccccccatttttccatggttgtatgggtttggtccccttttatcagtcaaggacaggactgctcttgggcgagtcaaacaatttccacttagcacattcctttcgttatttttcggagcaaatcatttttctataaaaaatgctttaccctactctactccactactaacatctcaacacactctgtttatgtgagcaaacatatataaattattgtgtaccaaccgtacctctcaacatatgtagttttttattctgtagattaattgaatatgcacatgagaattgcttgattaagctggtgttatggtgctgaattgctgattgaaaggctggtgataatgttggtatcggtttggtattagttcatattttagaaaggttgcaagcttagtgctattatgttggcttaatactcacaggcagatgttgtttttgcatgctaagtgatattgataggtgctaagctcttggaaattgttacaaaccagaaacataattacctcattcagtttttctacaataaatatttttctcttgaatgaccaaaattaattctatgccttctttttgcttaattgttgattacacatttatgctaaactaattactgctctttctgtgacattttaagcatcctctgacaagtgttaggtagagcctgctttcatttgccgcagatcgggtttaagtgtatgatcaacaaagtggaacactcatggatatcatacctaattattgttgttaaccaggaaacgaactcggcaaatccagagaaagtgtcgacacctaagattttgaagcacacagctgacaaagtggacatggtgtaacaatttctagaacaagatgcaccatttatagagaaaaatgtagtacacgtattcccatagcagtcctaggagtgcaattgggtttttcccatggatgaaatggaaggcgcgatactctgttcctgtgaatgaattgaggccatcctaatgttggtttgcccagtttgatcatgcaaagttatagaagatgttgtggtggtcttgcggaggcaacaagtttgattccattggccaagataatcttttagtgatgttgtgcaaaatgttatgtcagagccatgggtgttacccacactagaaccaaatttgtgccacaatgtgttgtgattattgctgaggcacagaatttatttgtaaaccaaa

SEQ ID NO: 390475 - DNA, 1048 bp, Oryza sativa
  unsure (1)..(1048): unsure at all n locations
aaccttccaatccaagaccgatcagataccccgatcctcccgaaccccaaatnagatctcacacgctttggagcgaacagtccaaggagcagagcagccttcctcttcctctcttctccgatcggaagcaggcgcggtggcggtagcggaagcggcagtcgccgtaggagcggatcgcgatgggagcggagtgcaagtacgaggtggcgcaggtggcgtacgtcaagctcgcgctgcacgccctcaagcaccccgccgccgccgtcaacggcctcctcgtcggccgcctcctcgacggggccgcctcccccgccgccgtcgtctccatcgccgacgccgtgccgctctcccaccacccgcaccacctcccgctgctccccaccctcgagctcgcgctcacgctcgtcgaggaccacttcgccgcgcagggccttcgcggtcgtcggctactaccacgccaacgcgcgccgcgacgacgccgacctcccgcccgtcgccaagcgcgtcggggaccacgtcttccgcaacttcccccgcgccgccgtactcctgcttgataacaagaagctggaggaggcagtcaaggggaagagtcgcgagccagtcgttcagctatacactagggattcatcaaaaagcggccgtcaggctgcatcagatggaagtagtcagctgactttaaaagaaccatcaaccaatatggtcttagccgatcatgttacaacgaagaaatggcagcaagttgttgatttcgatgaccacctcgatgatattagcaaagattggttgaacccagggctacttgcttgaaataattatgtgctttgatatttttatacttgttggtaccaatatgttgaggctcgtctcaccagattattgcggttctctctatagctagacgagttatttgacagggtttgtacttaaatatggacaagtaatttttgtaacaaactgtagcatgtgaaaatgcttagatctgcattaagattactggcgttcatgccatttcttcaaagaaaaacaccaaaaaaaaaaaaaaaca

SEQ ID NO: 390476 - DNA, 728 bp, Oryza sativa
cacgcgtccggcagctttgagcttagctatggcaatggccgcgccgctgacgttggtggtggtggcggcggcggtggccgtcgtcttcgtcggcggcggcgtggaggggtgggtgctcaaggaggggttctacgagcagagctgcccgcgcgcggaggcgctggtgaagcactacgtggagcagcacgtccccctcgccccctccgtcgccgccaccctcatccgcacccacttccacgactgcttcgtcagggggtgcgacgcgtcggtgttgctgaacgggacggacggggcggaggcggagaaggacgcggcgccgaacctgacgctgcgggggttcgccttcatcgaccgcatcaagagcgtggtcgagagcgagtgccccggcgtcgtctcctgcgccgacatcctcgcgctcgccacccgcgacgccatctacgtcatcggcgggcccttctggcgggtggcgacggggcggcgcgaccggagggtgtagatcaagcaggaggcgctggaccagatcccggcgccgaccatgaacttgaccgacgttctgtgctccttgcaaagcaagggaccttgcctccgcgacctgatctgagagtcaggggcgcacacgatcggtatggaacactgaaactcgtgcagcaagcgggtgtacaacttcaccgggaaaggctggcccggagacgcggacccttctcttgacgcggagtacgcggcgaacc

SEQ ID NO: 390477 - DNA, 1066 bp, Oryza sativa
  unsure (1)..(1066): unsure at all n locations
ttcccggtcgacccacgcgtccggaggagaaggttaggaaattctagtgaagtgggcttcttccgtggtagaaagaagagggaggattgaaaaacaagttatcttcgaagatccagagcactcttcaacatactgtcttgcatttaaagtggtcaatccaaatcatttacctcctttaaaggagctgcaaaagttgatgagaattcagtcactccgttgtcacgctctgtataaccatggtgctaccagactatctgtaattccaatccacgcatcacggtctaaggctctaaggtacttatctgttcgctggggcatagagttgcaaaatgtggtggttcttgttggtgaaactggtgattcagattacgaagaattgtttggaggtcttcataagacggtcatccttaagggtgaattcaacacatctgcaaatagaatccatttctgttaggcggtatcctttacaagatggtgttgcacttgatagcccaaacatcattggaattgagggttatggcactgatgacatgaggtctgctctgaaacaactggatatacgggcacagtgacaccaagcccccatctgtttatcattaatatatgaagaaaaccagtggacgatacaaagacagcaaacaaacactagcatttccatacttgatggagatgccgattttgccatgtaagtcatgtagtttatgtgtgtggtccttgagctgtgaatagcattccgaaatctcatcccattgagattttggtatgtggcaattttggagtaaaaatcgattccatccaggaatacggacaaaagaaattggttacaatgttgataatgaaaaacatgttaaggaagcattaattcagcaagaaaagcttccaaaatcactacaattcttggccaagcttgcaatttccctttttttgaagtggaagcttatgttgtgtgtttactgctgggtggaccatatggccctggcagnccttctttactatgtttactccaggagggctgcctagctttcgtgtaagtattggttgacacgatggttcattctatatatcc

SEQ ID NO: 390478 - DNA, 545 bp, Oryza sativa
ccacgcgtccgccgttcctcacacaacgcaccaacggcaagatcatcttttgcaccgcagctcaagtctgcagagacccttttcagatacattgctcctgagcaagtcccgtgtccaattccgaggcctctacaaagaggatgacaccgagttctccacctcagatgctgtcacagagcttccgatcaaaccttcatccaaagaaactgttgagattcctgctactgagaactccacggttgtgtgggagcttcgggtgcttgggtgggaggtgagctacggtgcagagttcacccctgatgcagagggtggctacactgtcattgtgcagaagacatggaaggtgcccgccaatgaagagccgatcatgaagggcagcttcaaggttggcgagcctggcaagatcgtcctcacagtcgacaacgcagcatccaagaagaagaagcagcttctttaccgattcaaggtcaagagctcctctgaatctgcctaaggttcgagatatttggctctatagatatgatcaccaaccaaggtccacaggt

SEQ ID NO: 390479 - DNA, 458 bp, Oryza sativa
ccacgcgtccgctctctgaattctctctccaaagtccaaaccatggctcctgctcatttgacttcgggaagccatggccgcctgcctcacgtagctatgtggccgttcatggcgaaaggccacaccatcccgctcatccagctcgccaactacctgcgtcaccaccggctcgccaccgtaaccttcttcaccaccccgggcaacgccgcgttcgtccgtggtgggctgtcgtccggcgacgacgacgacgacgtagccgccgtcgtcgagctggacttccccgtcgacgcgccgggcatccctgtcaggtttccctaagtgatcgacaaacaagctgtggaaaacacacgcgaacatgaggaaacacgctgagttttgtggtgcgatgaagctgcacccttttcggtttttttcttctccttttattatgcaaataacagacttaggattcgatccaa

SEQ ID NO: 390480 - DNA, 772 bp, Oryza sativa
tcgaccacgcgtccgcagctcttaagccgaggcggtgggtttggtgattcagggtttggtcgttcaggtggtggatttggccgttctggtggtggaggatttggccgttccagtggtggtggcttcggtgattctgggtttggccgttcaggtggtggtggtttcggagactcaggatttggtcgctcaggtggtggcggttacggtgattcaggatttggtagttccggcggtggctcaggccgttctggttttggccggtcaggtggatttggagattctggctcaggtaggtttggtgggggatttggtaactctggctcaggcagttttggcaactttggcggcaacaattctggacaatccggtgggtttggctcctcttagattggcagcttctatactagggcaaaagtaactacagttttttatctatgctatgggtgcctgctacaaatttagatggacggttttcagatattgtccaccaccacagaagggaattcctgaccaattgtttgttttccggaatcactacaagactggatatctagtgcaaatagcatatgcttatcgttattatgggtgaagggaatatgtaggcagcagaaaataatcacgagtcttattttgtttttcttagttattcctcctgcaggcattcatgtttgcaggaggactttagtttctggtgctcgatctagctcatacctgtaaaatatggcagaggatcttctgcagatgatatattatcagtatctttttttggtac

SEQ ID NO: 390481 - DNA, 745 bp, Oryza sativa
attcccggtcgaccacgcgtccgacgggaagagcttctcctggtatgcttgatcacatcatggtggagactacaggtgttaaggttgcgttgaatcgcttggccgttgtttctgtccttgatgcacataccctatcagtgatgccttatgatccgagttcaatgaagtctattgagcatgcgatcatctcatctccattgggcatcaatccaacacctgatggcaacaggatcatagcaaacatcccaccgttgacaaaggagaatatacaggcactgtgtaaggttgtcactaaatctgccgaggatttcaaacaaagtattagacgagcgcgccaaaaggcacttgatacgataaagaaatctgcgtctggtatgccgaaggatgatgtaaaacgacttgagaaggaggttgaagaattgaccaagaagttcataaagtcagcagatgatatgtgcaaggctaaggagaaggaaatctctggaaactgaggacgttaatctggcagaagttttttcttttacttacacaactttgatgccaacgagttcacgggttgcaattctgcagcagccgggaagatatatcttttttgtttgtgcccgttctaactatgatgttagaaattcgaaacagtgtgataccaagggcggcctgcccagcttgtgacaaaacattgattcggttgcaaggcactcatgaattcacgaatcgagaatgagtttaccctaaaaaaaaaaaaaaa

SEQ ID NO: 390482 - DNA, 612 bp, Oryza sativa
  unsure (1)..(612): unsure at all n locations
ttgggctgagatccggtcgagctcgtgccgaattcggcacgagctcaatgcaaatctnaatcggggttatggttttgttgaatactacaaccgtgcccgtgcagagtatgcaaggcaggagatgtcttccccaacgttcaaactagattcaaatgctcctacagtcagctgggcagatcctaagaataacgactcggcctctacttctcaggttaaatctgtatatgtgaaaaatctgcccaagaatgttactcaagcacagctgaaaaggctgtttgagcaccatggtgaaattgaaaaggttgttcttcctccttcaagaggaggtcatgataataggtatggttttgttcactttaaggacaggtccatggccatgagggctctgcagaacacagagagatatgagcttgatggtcaggtcctggattgctcacttgcgaaacctcctgctgctgataagaaggatgatagagtaccactacctagttcaaatggagctccattgctcccgagttatcctccacttggatatggtatcatgtcagtaccaggtgcctatggtgctgctcctgctagtactgcacagcctatgctgtatgctccaagagc

SEQ ID NO: 390483 - DNA, 1110 bp, Oryza sativa
ttgtgccttccgatgccactagtgcagaagaaaccatttcatttcacgaagtggatattgtaacaccatcgcagaaactgttggctagcaagctgtcgtgcaatgtggtacaagggaaaagccttcttctgactggccccaacggtagtggaaagagctctattttcagagttctgagagatttatggccagtgtgttccgggagagttaccaaaccttcagatgggatgtttcatgttcctcagcgtccatataccagcttgggtactctgagagatcagatcatataccctctctcaagggaggaagcagagatgaagatttgttcgttatacaatgatggtaacgggtctagtgcttctaatctgctggatgatcacctgaagacaattctagtgaatgttcggttggtctatcttctagaaagagaaggatgggactcaacttcaaactgggaagatgttttatcgttgggagaacagcagaggcttgggatggcccgtttgtttttccaccatcctaaatttggtattcttgacgaatgcacgaatgctacaagcgttgatgttgaagagcatttgtacaagctagcaactagcatgggcatcactgtgattacttcctcgcaaaggccagctttgatccccttccattccttggagctgaaactcatcgacggagaaggaaactgggagctatgcgagatccaccaatgatttgtctgaccggttcgcatttctcggcattcggcttcccagtcccagctgctggcctgctgctgcttgttgatgtcaggctgtctagaagtgtgtacaattgcaaagcagctgttgtgagtgaaaagtacaggttttcagtctcattgtctttgaagaaagaaaaaaaaaagaccttgtcgacaatttggcgtagaacatggcatttgtagtttagttcatacggaggtaggtgatgggagttgcagggatgagcatagagagatgtggtatttgtttttaagtagataataaatgataaggtgatagtacagtacagatcttccggcattgttaatattaattcgataagtaataatgtggcttccttccccctgccatcaagttatggcat

SEQ ID NO: 390484 - DNA, 1023 bp, Oryza sativa
  unsure (1)..(1023): unsure at all n locations
tcctcgctgagactcgagaaacaccgcgaccaggagaaatttcagcaggagcaggcgatggcgagcccgcagtgctgcgcgaacccaccgacgctgaacccggccggcggggaggggaaggtggtggagagcttcggcgggatcaaggcgtacgtcgccggcgccgcggagtccaaggccgccgtcgtcctcatctccgatgtcttcgggtttgaagcgccgaacctgaggaagatagccgacaaagttgcctcgtctggatactttgttgtggtgccagatttcttacatggggatcctttagtacctgaaagtactgagaaaccgtttcaaatgtggataaaagaacatggcccggacaaagcatttgaagaggcgaaaccaattattgccgctctgaaggagaaaggagtgtctagtatttggggctgtaggttattgcttggggtgcaaaggtggtggtagagttagtgaaagctcatgagatccaggctgctgtgatgtgtcacccctcttttgtgactgttgatgatatgaaagaggtcaaatgcccaattgctatacttggagctgaaattgatcgtatgtccccaccagaagtggtgaagcagttcgagcaggttctttcttcaaagtcagggattggccactttgtcaagatcttccctggggttgaacatggatggactgtgagatacaagaatgatgatgcagctgctgtcaagagcgccgaggaagccctggcggatcatggattgactggtttaataagaacctgaagtgaatttgacatatccgctgtccacgatcggtttgtgtattgctcatgtttcatcgcaagcatcctgaatttacggttgagtagccttcccattatgtttgtgctagtagtgtatatgctttgcttgtgttaggaatttgctttgtgtcaacctgaacttccacttctgtaataaaaatggatgggcgagcatnttctcggtttggtggtcnnnnnnnnnnnnnnnnnnnnnnnnnnnnnnn

SEQ ID NO: 390485 - DNA, 591 bp, Oryza sativa
  unsure (1)..(591): unsure at all n locations
ccacgcgtccgggatgacttcggcaactcgagcataatgaagcacaataacaagaccgggagatggctttctactttcaaggcaatctggggctggaatgacactgacctgtttattggaaacatggcgcgggcaatagatatcattttggttgatctgaatggcagtagcctcttagctatgaacaacgcacgtctcgagagcgaacacatgacggccattccgggccggttctctgcacacccatataaagttggccatcttgcttgtgcaagctctggtggcaaggtgtttctttggaccagagcatgaagcagcaagatctccagtggctggttcttttgacccagctcttggtaaggtgttaattttgacggttgcaacacctaagccttgtttcatgacccctcatgatgaaatgtataatagtagtagttagtctgctcttgccttctgttttctgacgtttgagctcttggagctttcatgtatccctctagggaaagtttgtttagtatgattggaagctatggagataatcataatatatagtagcattgttccttcnnnnnnnnnnnnnnnnnnnnnnnn

SEQ ID NO: 390486 - DNA, 568 bp, Oryza sativa
tttggccgccgcctcctcctctgccgccgcctgcttcctctccccgtcccctcctccccccccgcgccaccattccatcaaacacctggcgtgcgccgcctccaggtcgccgtcgccggggccctcctcctcccgctccctcgccctcccttcgccttcggcttcggcttctccgtcgccgtggccgcggcggctccgcgacctgctccccgacgagaccggccggatcctgtcgtccgccacgggctccctcatcgtcgccctcgcctcggccgcgctgatcctcggcgacgccggctccgcctccgcgttcgtcgtcgccacgccgcggaagctgcaggccgacgagctcgccaccgtgcgcctcttccaggagaacacgccctccgtcgtctacattaccaacctcgccgtgaggcaggatgccttcacgctggacgtgctcgaggtgccgcaggggtccgggtcggggttcgtctgggacaagagcggccacatagtcaccaatttccatgtcatccgtggcgcgtcagatctcagggtcacacttgctgatcagacagtgtat

SEQ ID NO: 390487 - DNA, 563 bp, Oryza sativa
ccacgcgtccgcacgcgctgagcccgccgccgacgccgacgccgagccagccgtcgtcgtcgtaccaccggcggaggagggagtcgtgggagtgcgcggcggggagcaggcacacgtcgatccgctccgtggggagcgacaccgccccaagtgagctcttccctactatgagcagggagttctcggccatggtcgccgcagcagccaacgccaacgccgccgccgccgcagccgcgaacggcggcgactccagccgcgccggggtggacgacgcgctggggaggatcggggaggatgagctcgaggagacgaacccgctcgccatcgtcccggacagcaaccccatcccgtcccctcgccgcgcccacctcgcgctccccgcccccggcgacgtgtcgtcggcgggcggcggccacggcgacgaggtgtcggtggggcacgtgaagaacgaggaggtggagtccaagatcgccgcgtggcagatcgccgaggtcgccaaggtcaacaaccgcttcaagcgcgaggaggtcgtcatcaatggctgggagggcgaccaggtcgag

SEQ ID NO: 390488 - DNA, 970 bp, Oryza sativa
  unsure (1)..(970): unsure at all n locations
ccacgcgtccgcggacgcgtgggcacgagacagggaagaccatcacggtcggcggcgagggtggcaccgtcgcctgggtggacctctggcgtggcatcttcctctgcgacgtgctcgatgagttccctgcgctccgggacatccctctgccgtgcccagcgaggagcaacagggatctcttcctgatacaatatgaccccagctatttccgggatgtgaccatcagccgaaacagagactctatcaagtatattgagatggaaatgtggtcaccaaaagagccgatgaataccaccagcactcctgtttcttatgtggattgcgtgctcaataaccccaggaaatcccaggtaatccgtgacgactggaaggccacaacatggagcatgccaatgccggtgattggttcttcgtgcgagcactggcaccgtgactgtgaggttggtgttaaagacatcaccttgggtgccagcaacccatgtcgttctaacttgagcttcagcgagatcgtggaaatgttcaaggaacttccaatggtaaaccccaccataagcatggatgatgatgttgttttcttgctttctagaaccagtcccagtcccatggacaagttgcatttggtgtttgctattgatgtgaggaagaggacgctgcaaggattaaccaagcttgatgtccagccgcagaactccgtttgcatggtcaccttatgcaccagtgagatttgcaggtatctgaggaatattacagtcacaggcgaagcacttaatgaactggaaattagctcttaaattggccaggacaaagaagcgtgtcagatgatgcaacttgagcttgttgatttatgaaaattggccgtgtttagtttcacgcccaattttttttatacggacacacatttgaaatattaaacgtagtctaataataaaacaaattacataaaaaaaaaaaaaaannnnnnnnnnnnnnn

SEQ ID NO: 390489 - DNA, 528 bp, Oryza sativa
cgaattccgggtcgaccacgcgtccggttattggagctctgaaaggggaacttgcagcttcagcactcaacgcaccaatggttcctgctgaggtgctgtcagagcttgcaccttatgctgtgctcgcacagaagcttgcgcgcctggctgtgcagctagtggctgagtggcggtggtatcaagtccgtgaaagtgacctatgcttctgcaagggctcctgatgatcttgacacgagacttcttcctgcaatgatcaccaaggggttgatcgaaccaatctccagcgttttcgtcaatctggtcaatgctgacttcactgcgaaacagagggcagttcgtatcactgaggagagaatcttggtggatggctcacccgagacacctattgactacatccaaggtcatattgcccatgttgagtccaaatttcccagtgcaatatcggagagtggagagatcactgttgaggggaaagtgaaggatggcatcccccatctgacaaagggtggatcattccaagttgatgtg

SEQ ID NO: 390490 - DNA, 465 bp, Oryza sativa
  unsure (1)..(465): unsure at all n locations
gcctcctcctccttcctcggtttcccccaaaaaccccaaacccctcctcctcgccatggcggtggtatcaagtccgtgaaagtgacctatgcttctgcaagggctcctgatgatcttgacacgagacttcttcgtgcaatgatcaccaaggggttgatcgaaccaatctccagtgttttcgtcaatctggtcaatgctgacttcactgcgaaacagaggggagttcgtatcactgaggagagaatcttgttggatggctcacccgagacacctattgactacatccaagttcatattgcccatgttgagtccaaatttcccagtgcaatatcggagagtggagagatcactgttgagggggaaggtgaaggatggcatcccccatctgacaaaggttggatcaattccagggtgatgtgagctttggaaggaagcctgatcccctttgaaggnaggtcgtcaacc

SEQ ID NO: 390491 - DNA, 662 bp, Oryza sativa
  unsure (1)..(662): unsure at all n locations
gtttgggaatgcatgtgattgcacacgatccgtatgcttctgctgatcgtgcccatgcaattggagttgagctagtgagcatggaagacgctttgacaactgctgactttatctcgttgcatatgcctcttacccctgcaacaaacaagatgctcaatgatgaaactttcgctaagatgaagaagggtgttagaattataaatgttgcgcgtggtggtgtaattgatgaagatgctctagtcagggctcttgattcaggaatagttgcacaggctgctcttgatgtgttcactaaagagccaccggcaccagacagcaaattagtgctgcatgagaatgttactgtaacaccacaccttggtgccagcacagttggagcacacggaaggagtggctattgaaatagcctgaagctgttattggagctctggaaggggaacttgcagcttcagcagtcaacgcaccaaatnggttccngctgaggtgctntcagagnttncaccnttatgttgtgcacncgagaagcttgggcgcctcggctgtgcagctagtcggctcgtnngcgctggtcatcaangtccctgaaagtgncctatgcctctgcagggctcctgcatnatcctgtacacnagactntnacagccatgntcaccnggggnttc

SEQ ID NO: 390492 - DNA, 502 bp, Oryza sativa
ccacgcgtccgcggacgcgtgggtttggatgatgatatatgtttagtgattgccgagcttgggaaattttttagggaattgtgcagccaaacacgtcgcaaagatatcttggttcgaatgaagacagaaataccagctatactatgcaagcttgaaaaactatttccacccgctttttttgatgtaatggttcaccttgctgtccatttgcctgacgaggcaatgcttcgagggccagtgcaatttgggtggatgtatcctgttgagcgacgattgtacactttgaagaggtcggttaggaataaggcacgaccggaaggctcgattgctgaggcttatgttgcagatgaagccctcacattctgctctaggtatatggaggatgtggagactaggtttaaccgagcaccgagaaatccaggattctcagatccatcggccttcaatattgatgtttttgggcacggtgttaatctgattggtgcatgtgactatggttact

SEQ ID NO: 390493 - DNA, 323 bp, Oryza sativa
ccacgcgtccgcggacgcgtgggcggacgcgtcggcttgttcttgaggttggccatggcggatcaccagcggatgtggattcaccccgtcgacctggaggccggtggccggcaccggcccacggcgccgctggtgcccggcggctcgttccgctccgacaagggcgacccggcggcgctgccgcagcagtcgccatcgcacggtcacctgccgccgccgtcgtcgtgccttgtggcgccatctgtgccgtcgctgtcgccgacgtagcgatgtacgtgccgttttgctaggtcgttctgtacatgtctattgaccgtgattct

SEQ ID NO: 390494 - DNA, 799 bp, Oryza sativa
ccacgcgtccggctgatgccatgaagaagatagatgaattgtctgccttgcttgctgaagcgatgataaagaaacatcccgaggaggaggagaagctagtggttgtggacgaggcatacagttctgttcacgaagaagttacagattcagtggtggaaaatggagacgcagaaagcgaaaacgataaaaaccctaaactggaacttgatgttctcaataggagctccaatggggacatgaatcacgaagaagagaaaggcgaaaccaaggttgagcaggaggaagtgaaaaccgagtgcaccacacaggagagcaacaaaatcatcgagaagcagccacatccagacagaaaacaagaaaccgtatcctccaaagatgaactggagcccaaggaggataccaacactgagcatccaaatgggcaagtatcagaagataccagcaaagtggcaatgtccccgacaaaaccccagcagcaacagaaaaagaacaagcctcttctgaagaagtttgggagcttactgaaaaagaaaaacagcaagtaggtgaacgacacatgtactactattgctattctgatttgtttttttttgtttgacaaggtagtgtggttttctacgagtttactgtcaatggctgtacttgttctggtgattgcagtagtttgggggtgtctcatttttttttataatttggacctcctgttcttgccctgtgtctgtggttgttatctacacgattgtggcagctcgagtgtaactggagttcctcctgatcagaatggtttttcatttctgag

SEQ ID NO: 390495 - DNA, 540 bp, Oryza sativa
ccacgcgtccgcccacgcgtccgcagagttgagctactggctaagaaaatcaccgagcttggctattcatgcttctacattcatgcaaaaatgttgcaagaccatcgaaaccgagtgtttcatgattttcgcaatggtgcttgcagaaaccttgtgtgcacagatctgtttacaagaggaattgacatccaagctgtgaatgtggtcattaattttgacttccctaagacttctgaaacatacttgcatccagggttggtcgttcagggagatttggacaccttggtttggcggtgaacttaatcacttatgaggaccgtttcaacttgtatcggattgagcttgaacttgggacggagataaaaacgatacccccacaaatcgatctggcagtgtattgtcaatgatcaatgtaacattgtaacggtgtttttatcatttacttattgttaggcaagtacatcagatgtacatagcacctcatcagggttttatttgggtgccttgatgacacatctaagcttatattccgatatgtga

SEQ ID NO: 390496 - DNA, 707 bp, Oryza sativa
  unsure (1)..(707): unsure at all n locations
ccacgcgtccggcagcgcgtcgagctccgcgtcgaccgcgtcatcgaggtcggcgaggtcgaccccgccgcctacccgctgcccaagaccaagctcacgctcgagaatctcagggacgtcgtccatctccgctcccgcaccaacacgattggtgctgttgcgcgtattagacaccagctagcctgtgcaacacacaggttttttgatgagaatggttttctttatgtgcacacaccaataataactacaagtgattgtgagggtgctggtgagatgtttcaagtgaccgcttggttcagccatgcttgaaaaggtggagaaggaattgaaagagaaccctgcaccatcagagtctgatattgaggcagctagagttgttgtcaaggaaaaaggtgatgcggttgcacagcttaaagctgcaaaagctagcaaacaagaaatcacagctgctgttgctgagcttaacaaggcaaaagaaaatgtctcaaggctggaggaaagatctaagttgaagcccggaattccgtacagagatgatgggacagtagcttatgagaatgacttcttcaaacgccaggcttttctgactgtgtctggacagcttcaagttgagacctatgcatgtgctcttagcagcagcagctgtgatttcttgtttgctagnttttgcagctttaagctgtgnaaccgcatcacctttttccttn

SEQ ID NO: 390497 - DNA, 379 bp, Oryza sativa
  unsure (1)..(379): unsure at all n locations
cacccccaacccaaaaccgcccaaagagaggaggcatccaaccaccaatccatctcctcctcctctctctctctctacgcggctcagccatggtggagaaggccagcgccgtggcggcaagctcgacgtctccgtcggccgctgctcgacgtccccgtacgggagcggcggtctcccgtcgccgacgagcccgctcgaccgcgcggcgcttcacgcgcggtcgccgcgcggcgtggtggcggcaccgcgacgcgtgcggggtcgggctcggcatcctggcggcgctcgaggcgcaggaggaggaggaggcgcggaagccccggttttcgccgtcgcaatngcggcgtcggcgtcggcgtcgtcctccgcggccgccaac

SEQ ID NO: 390498 - DNA, 888 bp, Oryza sativa
  unsure (1)..(888): unsure at all n locations
ccacgcgtccgcttcaacatatagttctgatgaagccaaagaggacatcaaactattgcgcatccaagttgaagaagacctgaaaaatggaattgttgggtctgttccaattccacctgacgatgctgacaaagaagaggttatcaatgcattagttgctaatgttgaatcgatgattaaagcagacaggaagattacgtcgttgaaacaactccagggccacatatggaggactggttttgaaagtaaagaactgcaaggagttgttttcgatgatgtccccgaggcgctaaagcactggcatgctagtggcatgaaggtctacatatactcaagtggcagccgggaggcgcaaaggctattatttggcaatacggcctatggtgatctgcgacaatacctctgtggtttctttgacaccacaaccggtaacaaaagagaaacaaggagctactttgagatttcgcaatcacttggggtggacagtcctgctcagatcttatttatcaccgatgtcttccaagaagctgttgctgcaaaaagtgcaggttttgaggtaataatctccattcgcccgggaaatgcaccgctccctgagaatcatggtttccggactatcaagtcgtttagtgagatctgaagaaggtacgcaaagacaatgtcaggagtgctttgatggcgagctacctagcatatgtaagaacaatgcaaataataaatggaaaatccggaatggtggcaaaataaataaatttgtaaatgtgggcatattgttgcattattgtgccatccgtcgacggttttgtagctcttttttagcaaagaggaataataaaattgttgttgcgaaagttgttacttaaattgtttactgtcaaccccnnnnnn

SEQ ID NO: 390499 - DNA, 626 bp, Oryza sativa
gaaactttcctcgtcggcgaggagcggcgagatcccccgggccccggccatggaggggctcctgtccaagctccggagcctggacgcctaccccaaggtgaacgaggacttctacagccgcacgctctccggcggcatcatcacgctcgcctcctccgtcgacatgctcctgctccgcctctccgagctccgattatatcttcatgcggtcacagaaacaacactaagggttgatacctcaaggggagaaacacttcgcataaattttgaggtcacctttccagcccttcagtgttctataataagccttgatgcaatggacatcagtggacaagagcaccttgatgtgaaacatgatatattcaagcagagaattgatgtccatggtaatgttattgcaactaagcaagatgcagttggtgggatgaaggtggaacagcccctacagcggcatggcggcaggcttgaacacaatgagacctattgtggctcttgttatggtgcggaagaatctgatgagcagtgttgtaactcgtgtgaagatgttcgagaagcatacaggaaaaaaggttggggtgtatcaaatccagatttgatcgaccagtgcaaaagggaaggcttccttc

SEQ ID NO: 390500 - DNA, 649 bp, Oryza sativa
ctcttctcttgcatcctcccatctcctctccggcggcggcggcgtcttgtgcgcgtgagaaagagaggagaagaagatggcgacgatcgtgaacacgacggaggaggagccgatgctggccgtggtgcgcttcaccgccgagctggcctgggcggacgccggcgccgacgtcgccgagccggaggtcacccgtctctgcgtcgaggcgcagcagcacatcctcgccgcccgctggctcgacatggcctccctcatgctcgcctccgccgacctcctcctccaatccacgcgcctccccgacaaggacaaagatctcgagtgcatcctcgctatcatctgcaacctcgtcaccaaggcccgatcccaagacgaggccctgcagatcgccgaactcatctgcgccaagctcacccaccagccccaagacaaaccggccctgcgcctcatagttctcttcagcttgtacaatctgctcgggagcccctatgccaaggccttcgtctacaagaaggcactcgacctcgccgccgctgggaaggctgccgactgcattatccctacttttaagaacatcgacagctttattagcgattggggcattggcaaggtggagtacagggacctgctaactttttgcccttaggatcct

SEQ ID NO: 390501 - DNA, 352 bp, Oryza sativa
cccacgcgtccgttcaaggcgccctgcgacgtcttcatcaccttcgccgatgagaggagccggatgcaggtggcgatcaagatggataacgggaagacgttgatggtgccggccttcccagagcctggagactattgcaggagaggtgtcggtagcgcccgttccaggtaaaagggtggagcaccaaggtgtcaagattgagctgctgggtcagatagagctgtaccatgagagaggtcacttctatgacttcacttcgatagtgcgagagttataggttgctggtgaaatctatgataggaagacttatctatttgaattctctactgtcgatatgccttatgagttttat

SEQ ID NO: 390502 - DNA, 506 bp, Oryza sativa
  unsure (1)..(506): unsure at all n locations
aaagaacccggaacagaggcgtgttccggtgtcaattgatgtcccagatcctgactttcatgattttgacaaggatcgcacagagcgtgcttttgatagtgatcaagtatgggctacatatgatagtgaggatggtatgcctcgtctgtatgcaatggttcagaaagttctttcaatgagacctttcagaatccgcatgagtttcctcaactccaagtccaacagtgaactggcaccaataagctgggttgcctctggttttcagaagacatgtggtgatttcagggttgggagataccagatttctgaaacagtcaacatattttcgcacaaagtcagctggactaaaggcccccgtgggattatcaggatcgttcctcagaaaggtgatacatgggctntataccgaaactggtctcctgactggaatgagttaacacctgatgatgtgatatacaagtatgagatagtagaaattattgatgatttcactggtgagccagggc

SEQ ID NO: 390503 - DNA, 928 bp, Oryza sativa
  unsure (1)..(928): unsure at all n locations
cccacgcgtccgcccacgcgtccgaatcaaacaattcctagttccactttgccagtcctaccaaagcacattttagccatggctagtccatttttcaaagttattccagtacggcctgtgctccgcgatcagtgtgagattaccatgagattgtacttgcaccaagttgttacagggccaaaccacaaccaagaaacaatggtgccctcatcacatcccgcttcgtttggtatgattgttatcaacgattggcctatctatgatggacctgacttcaacacaagtactattgttgcacatgcaagaggaatgcatgtccaggttgatcaagttaacaacacctggtacacatctatgaacatagagtttgtggatgccaggtttaatggatcaaagcttcaggtgatggggactactccagaaactggtgagtgggccattgtcggtgggactggacaacttgctatggcatatggcactattcagcacaacatagtcaagaacaatcctggcattgagacaactagacagcttgacattcatgcattctatagtactccacaaacacaagctgatgtaatgactacaacgaatacaatagaccagcaggccgaataatgcatcatgcagcagtccaagtacaagaaatggtggaactactcggaaaataaataatggtgtggtttgatgtctattgtgtacattcacgtcaaaagaaaatgtctattgtgtatattgctggcaatcgtcatcagaacgaagggcatgtgatgttaccgtgctatagcacatttgtttgtttttgtaaaacaatatgttttaattgctctttgttatatatgtactgtttgattgtgaactatggatcataacttatatgtctgatccctggaataaagaaatttgtttcagaaaaaaanaaannaaa

SEQ ID NO: 390504 - DNA, 841 bp, Oryza sativa
ccacgcgtccggcgctcgccgtcgacgcgctccctctcctccgcccctgcgtctcggcccacggttacctgaggtgaatacattggagttggctgggatacttctgatttgaggagattataaattggaacaatgcctccccataagatagagacaggccaccaggatgttgtgcatgacattgccatggattactatgggaagcgcatcgctacagcctcttctgataacacaataaagatcattggtgtaagtggcaactctcaccagcagcttgctactctgagtggacatcagggccctgtctggcaagttgcatgggctcatcctaagtatggttccttgctggcatcctgcagctatgatgggaggggttatcatatggaaggaagggagcaagcctgatgaatgggcgcaggcgcacactttcattgagcacaagtcctctgtcaattccattgcttgggcacctcatgagcttgggctgtgcttggcttgtggctcatctgatggcaacatttcagtcttcactgctcgttctgatggtgggtgggacacaacacgcatcgatcaggctcacccagtgggtgtcacctctgtttcttgggctcctgcaatggcgccgggtgctctaatcaatacaagggccttccggtcagtttgaatatgttcagaaacttgcctctggtggttgtgacaatacagtcaaggtatggaaactgtacaacgggagttggaggatggattgctttccggctcttcagatgcacagggactggggtgagagatgttgcctgggctccaaatctaggcctcccaaagtcaacaattgcaagtgcct

SEQ ID NO: 390505 - DNA, 762 bp, Oryza sativa
gatgacgcggcgctggcggcgaagggcggcggtgcggatgtgaaagagctgatggcgccggcggacgggaaggcgttccggcggctgatggcgctctgcgtccaccgcccgcccaagtacatccccgacttcctcgtccgcgacctcctccggaaatatttcgcggacaaaagagaggagaagatccggctgatcaaagagatcgtcaccgaggaacaagactcgcagcttaattctcctctccctcaagaaattttgatcatctggggggagttcgaccagattttccctgtggagaaagcacacaaagtgaaagagatgcttggggagaaggcgacggtgaagataataccgaacacggggcacctggcgcaccaggaggatcccaagatgttcaacgatatcctgctcaagttcttgctgccttctcctgccgtcgccaatggtgcaaaataatcaagtgtgctaatacaattatacaatgcgatctgcttttccggccatcgggtactcgggtgtaatggttcaggatctttgattcgtgtttcttaaatttcgaattgtgtaattggttgcatttgaatttgtcatggtcgagagaggagagacatcgaaatgttttgttttggttcagctactttgcgaagttattttggagtacgctcaatgtaagaatttataaagatattcgatgtcactacatacaaatgaactaaaaaaacatcacaaacaaccaccctcaacacacccctctctctctct

SEQ ID NO: 390506 - DNA, 506 bp, Oryza sativa
cccacgcgtccgcccacgcgtccgcacacttgaagaaaaaaaacacgacgaacacgttaaaaaaaggtcgaagagaagtgggagacccaaaccgcgaacaatgtgtggaggcgccatcctcgccgagttcatcccggcgccgtcgcgcgccgcggcggcgaccaagcgggtgaccgccagccacctgtggccggccggctccaagaacgccgcccgcggcaagagcaagagcaagaggcagcagaggagcttcgccgacgtcgacgacttcgaggccgccttcgagcagttcgacgatgactccgacttcgacgacgcggaggaagaagacgaaggacacttcgtgttcgcgtccaaatctcgtgtcgtcgccgggcgcgcccacgccgcggcaacacgagagccaccgccgtgccaccgcccgcgacagcacccgacgacgccccgccgcgcggtctgaaacgagtattgtagaccctgctgagaccgttctaccttttttacca

SEQ ID NO: 390507 - DNA, 719 bp, Oryza sativa
ccgctccggtcccggttcgatccaccggggcgtttttccgttaaaaaaaggtcgaagagaacgcgggttggtcccatttccgcgaacaatgtggggaggccccatcctccccgagttcatcccggcgccgtcgcgcgccgcggcggcgaccaagcgggtgaccgccagccacctgtggccggccggctccaagaacgccgcccgcggcaagagcaagagcaagaggcagcagaggagcttcgccgacgtcgacgacttcgaggccgccttcgagcagttcgacgatgactccgacttcgacgacgcggaggaagaagacgaaggacacttcgtgttcgcgtccaaatctcgtgtcgtcgccgggcacgacgggcgcgcggcggcgagggcgggcgagcaagaagaagcgggggcggcacttccgaggcatccggcagcggccatgggggaagtgggcggcggagatccgcgacccgcacaagggcacgcgcgtctggctcggcacgttcaacaccccggaggaggccgcacgcgcctacgacgtcgaggcgcgccgcctccgcggcagcaaggccaaggtcaacttccccgccacgcccgccgccgcgcgcccacgccgcggcaacacgagagccaccgccgtgccaccgccggcgacagtacccgccgccccccccgcgcgcggactgaagctagaattcttgccggctgctgagacc

SEQ ID NO: 390508 - DNA, 609 bp, Oryza sativa
cagaggctgatggttatcaaccccacttgattgcccctgagcaagggtacagaaggcttatagatagttcgctccactacttcaggggtccagcggaagcttcagttgatgcggttcatttggtcttgaaggaacttgttcgtagatcgattgcagcaacagaggagttgaagcgtttcccaacacttcagacagatatagctgctgcagcaaatgaaagcctggaaagatttcgtgaggatggtcgaaagacagttattcgtcttgttgagatggaggccagctacctaactgtagaatttttcagaaaactccctacagaaccagataagggggctaataataacactccagccaatgacagatatcaggacaaccatttaagaagaatcggtaacaattcaacattctattttgtttctttaatggcaattgattgagtcaactgttctaagacctcaacacagaggtcacacgaagtacttaacaaactgacttaataagcagaatctaagatgtaacatagggtactaggtgccatcacgttctgctgagtgctgacactagcaaacatgtcaagatatgaccctatgtgaatttcgatgacaa

SEQ ID NO: 390509 - DNA, 878 bp, Oryza sativa
ccacgcgtccggttcgctccactacttcaggggtccagcggaagcttcagttgatgcggttcatttggtcttgaaggaacttgttcgtagatcgattgcagcaacagaggagttgaagcgtttcccaacacttcagacagatatagctgctgcagcaaatgaaagcctggaaagatttcgtgaggatggtcgaaagacagttattcgtcttgttgagatggaggccagctacctaactgtagaatttttcagaaaactccctacagaaccagataagggggctaataataacactccagccaatgacagatatcaggacaaccatttaagaagaatcgggtcaaatgtatcatcttacattaacatggtttgtgagacattgaggaacaccattccaaaagctgtggtgcactgtcaagtgaaggaggcaaaaagaaacttgcttaaccgtttctatgctcatgtgggaagcaaggagaagtaacagctcagcccgatgttggatgaggatcccgctttgatggagtagagggattcccttagtcaacaggctagagctgtacaaatctgcccggaacgagatcgactcagtcgcgtggaaatgatcggttagcgaagtcacagctggaagagatagacatacatctgcgacacgcagatcattgccgtagaatgctctaattccatttacgtctggattcacatggagatccggactctattctgtctttcttttttctttcaggcgagtgtcctttctaccttgtcagacaagtatatttccttggccatcttggcccttttgtatgatgttgatgatgatgagctggtccaaagaggataaaaatgatatgaccccagaatttaaaaaaccaaaa

SEQ ID NO: 390510 - DNA, 838 bp, Oryza sativa
  unsure (1)..(838): unsure at all n locations
tccgaatgacatgntcatagttacaatagtgctggtgctactctgtcattgcacctctgattattccatttggtgttgcttactttgctcttggatggattatagtgaaaaatcaggttctcccgagtttatgttcccagctacgagagcaacgggcgaatgtggccacatatgcacacaaggatcattgcagctctactgatttaccagatcaccatggttggtgtcatcctgctgaagaagttcttgtactcccctgttcttgtgcccctcatcccaataagcttcatcttcgcctacatttgccatatgcggttctacccggcgttcgccaagacccctctcgaggtggttcagcacaacgtgaaagacacgccgaacatggatgccgtctacacctcctacatcccggcttgcctgaagcctgagaagctagaggatgtggatatcttcgaagacgcccagtcgcacaccacctccagagccccatccatctaatgcaagtgctggttgcttgtgtcgagaccggagagtattactcatcatcactgcaaacgaatttctgatgaatttccacgttgaaatgaacccctgtgaagtgtgaatctgctattgccaggataggaaaacttatgtcatgtccgtgtacataatatgcactcgggattgcttgccttcttaatgtgtgtggtgaggtttattctttacttcatagttctaggtagctgctgtggatatcgcccctttttaagtttaagtttctatcatatgttcatgctcgtggtgactgctaaatctagttctcttatgtgtaacaaaactcagaaatctgttgcct

SEQ ID NO: 390511 - DNA, 581 bp, Oryza sativa
cgcgttcaacagctcggtgctctgggaccccgagcggtggggccggtacccgacctccgagcccgacaagtcccaggactcggtgaagttcgtacagcaagtggtccttgaagattatagcaaagtgagaggaattccttcagactgttcagaggttatggtatggcatgtcaacacgacgccgctaccttcttcgcaaccgtctcctcagaacaagaggtgatagaacgatgagctgtagaagagactggacgagccggaggagaggagggtgtacattgtacatgcatggttacaacttgaagctgctgatttcctactagctgcaaagaaggaaaaaattttggttttctttccaagggattgattaatctcccatgggcgatatcatcataatgtacattttttttactattctttgaaaattgtgatatatgtataatctcttctctgttttttttttttgcttcaagagggtttaggtgattacacacaacaacccctcggagtgtctctcttgagactaaaatgaatagttcaaaaatccacttacaaatgaaaaaggcccgtgctttcttctt

SEQ ID NO: 390512 - DNA, 512 bp, Oryza sativa
gttatcttgatcaatggcttcatggtgatgtaggggaggtgagcccactaacgggggaagtcaggatgaacataattcttggaactgctaaagggctggcctatcttcatgaggggctggaaccgaaggttgtccatcgtgacatcaaatctagcaatatccttcttgaccagcaatggaatgctaaagtgtcagattttggtcttgcgaagctattgtgctcagagagaagttatgttactacccgtgttatgggaacctttggttacgtggcacctgaatacgccagcacggggatgttaaatgagaggagcgatgtttatagctttggagtacttataatggagattataacgggtagatcaccagtagattacaccagggcacctggagaggtgaacttggttgaatggctgaagaccatggttgctgacaggaaagcagaggaggtagtagaccccaagctgcccgagaagccttctcccaagcactgaaacgggcacttctggtcg

SEQ ID NO: 390513 - DNA, 1349 bp, Oryza sativa
  unsure (1)..(1349): unsure at all n locations
cgcctgcggtaccgtccgtactcccggtcgacctcgcgtccgcggtctagggtttgcggcggcggcgcccgctcacctcctcgccggccggacggcgcgaggaggaatctctccacccccacactcctcgcgccggtgcccctccctccccctccatcctcctcgcgtttcgcttcccctcttcgcactactccgactcccagccggaagcgccggtgtcgatggcggacgatgccggtgccggtcgcactcgcagtcgcagggatccttccgatcgccctacgcgttcaggccaatttctaatcagggctttgctacgaggcgaattggaggagcgcactgcagacgcaaggtttatcccacttacaccaataatggaggatctatttgtcagcggcattgaagagattcccgaagacacttctgtgcatcaccagcaaactgatgagccaccaccatcctacaacaccattaggaggggtgaaggcacattaatggctgaactgcgtgaggctacggagcaactacgtttgtctttctatgccaacacagatgaagaaactcgggcacaaatgaaacagttttgggatgaagaattcaatgcaatatctgaagaagcaactattgagagaggtttagagtggatgcgggcggaggttgttgaggcattcagtacacacagtggggctaatgtggttgaatatgagcttgaagatatttctcaccagtgtttgatttttgatgattgtgccaagtcttatcatcattacaatttcataatgaagtcgaagtgtcctgattctcatttggagggttcttgtctcttttttgctgaagttaaagttgtggatggagagaaacactatttttgctgtcccctacaacctgatgacgacggtcattgtcacggatgccaaaactctggaattgatcttaagcatccttcagacggtggctacgaggagggcaacgctgactctggattcccttttgatccaatttaatttgatggatgaaaattcagaaatatgtactaaattgagcagcgcctgaattgagttgtgtaatgaatgctcctacataaaccttgtgttcatgttcaaactggctattggtattgtgttttattcggtagcattagcaatctattagcaatatgttgcatgttcgtgtctggagtacgtgcgaaatgctcatgggcatgactattatttcttacgtgtgaaatgcttgtattgtaaggtcgccaggtttgtgattgagatgtccatccttgcaccctgttcctgcatacacggtaatttgcagagatgcccttggctagngtnnnnnnnnnnnnnnnnnnnnnn

SEQ ID NO: 390514 - DNA, 549 bp, Oryza sativa
gaacacaagaaaaaagaagcagttttttttgcccgtctcatcttcttcttctccctctcgccgcgcttcttgcacgcagcaatctctctctctctcgccgccgtcaatcccaccacgaattctccggtggctggctgctctcgactccttcgcgcgtcgatttcatgcggccgggtggttgcccgcctcctcccgaacgatccctcgccgccgccgctgccgctcatcggcgttgtcatccaccaccgccgccgctcctccgccgcggacgtgcctcgccggcggcgagccgagcggtgagttctgccccgtgtggtgtggactcgtagagtggccgtggatctgccgcggcgacgtaaatttgctccggttgctcgccgtcgaaaggatccaatttttttcgactgcagaatcccctcacggacgcgaggaatttcgtcgtaggtggagcacacgcggggagtgtttttgacagagttgatttcaacggatgaacatgtgtgagaaagatcaaaatttccactggggttatgacttttccgtgacctt

SEQ ID NO: 390515 - DNA, 517 bp, Oryza sativa
tcgaaacagagcttattgcacgcagcaaatctatctatctctcgccgccgtcaatcccaccacggattcttcggtggctggctgctctcgactccttcgcgcgtcgatttcatgcggccgggtggttgcccgcctcctcccgaacgatccctcgccgccgccgctgccgctcatcggcgttgtcatccaccaccgccgccgctcctccgccgcgggcgtgcctcgccggccgcgagccgagcggtgagttctgccccgtgtggtgtggactcgtagagtggccgtggatctgccgcggcgacgtaaatctgctccggtttttcctcggacctctcgatccctcttctaccctcgcgtgccccaactcctatccgcgctcaagatcgtattccggggaatcgcagggctcgccgtcgaaaggatccaatttttttcgactgcagaatcccctcacggacgcgaggaatttcgtcgtaggtggagcacacgcgatgcatcacatctggatgagacgcac

SEQ ID NO: 390516 - DNA, 655 bp, Oryza sativa
  unsure (1)..(655): unsure at all n locations
tcaaaggcggctgctgctggangtcccancgatataaggtcgctgcggctctcccaacagttttttggaggtcttcgacgtggtgacnacgcatcgagttcgacgggtcactgtcgccgctggcggttaggccaatggcatagaggaggattaggacgagaagaagctgtcctctctgttgcctctcctgtacagcccaacatactactatcatattgtctgtagctagcacatgcagaagatacgactggcaggatgaggtggtggtggttcttccccagacccgtcactgctctggttgcatttattaccttttgggttgttgtcctatgaattgagcctaattagttgatattcaacagctggaggttatatttcctttttacattgcatcttcttggttgttcaacagcagtgatagcatttgttcccttagtgaaacagctatcttgttgtagcagtgatagcttttgttcccttagtgaaatagcttttggcaaattgtactatcttgttgtattggctagatgagtgtcctagatgtttaatatggcccgaggaggttgctaagatgtgtgacagaattcaaaaatatatttcaatagaaattttgttgttacctctaaataaaagaataatgttctaaatgataact

SEQ ID NO: 390517 - DNA, 938 bp, Oryza sativa
tatagagaaatctcccgtgaggtcgtctcctccgctccttgcgccaagacgagtcgcggctcaacagaggaggggcgccgatctccatctggcgagcagagcaggggaggggaagggaaggtatcctgaaagatgcttaatcttatcaaaataaaggataaaaagaaagagcaggcagcaagtgctgctggaaaggctcctgtgaagaagcaatctgctggagagctccgtcttcacaaagatattagtgagctaaacctacccaagagcacatcaatttcttttcccaatggcaaggatgatctgatgaattttgagatcatcgtccgacctgatgaaggatattacctaggtggcactttcgtctttacttttcaagtctctccctcttatcctcatgaacctccaaaggtgaagtgcaagaccaaggtataccatccaaatattgatttggaaggaaatgtatgcctgaacattttgcgtgaagattggaagcctgttctcaacatcaacactgttatttatggccttaaccttctttttacgcaaccaaacgatgaagatccgttgaaccatgaagcagcagctgtcctccgtgacaacccaaagctgtttgaagctaatgttaaaagggcaatggccggaagctatgtgggtcaacactatttcccaagatgtgcatgatatggtgctgggtgccccaaacattattaagttaagccacctgggcctcttcccgacattctggattgtttggtttcggtgcgttaaattctgtcggatggatgtgatatgttgaatgtttgacggggaagccgccactgtttgatattgttaaatcgtcagtaaattggtaatctggtggtggtacagataaaatttgagttgcagttcaagctggatttatacatcattttcttttgtgcaaaaaacaaaaa

SEQ ID NO: 390518 - DNA, 385 bp, Oryza sativa
cccacgcgtccgcccacgcgtccgcccacgcgtccgcggacgcgggggctgggctggtggtatgagccctacaccgacgcggtggcagatgcagctgctgcaatcaggatgaatgaattccatattggatgggttatgagtcctctggtgcatggagactaccctccggtaatgaggagccgcgtaggcgctcggttgccatccataacggcgtccgattcggagaaaatacggggatcgttcgacttcatcggcatcaaccattacttcgttatctttgtgcaatccagcgacgcaaatcatgaccagaaactaagggactactacgttgatgcaggtgttcaagagaatggtggaggaggattcgacaaggagcactatcagc

SEQ ID NO: 390519 - DNA, 1035 bp, Oryza sativa
tgataatccccccctcctctggcagacatccgggccccaccacgtcagcctctcatggccttcgcggcggagccgatggatctggaggtgtcgccggattcctcgccggcggcggcggcggcggcggcggcgtgctcgatctgcctggacgcggtggcgtgcggcgacggggtggcggcgaggtccaccgcgcggctgcagtgcggccacgagttccacctagactgcattggatctgcatttaatgcaaaaggggtgatgcagtgcccaaattgtcggaatattgagaaaggtcactggctctatgggaatgagagccaaccatgtagccattctgatacaggtgactggctgaatggtgaaacctttgactacccgttctcatttgaatttgggtgggggtcccttcaatacaccattgacctctgtttttggggaaagcgaatctgagccaaatccttttttggagtatatagggtctctgcatggttttcaccatccaatgtatgcgccttctagttctactgccagtactgaaagcataccattccatcagcgtcctactggtacggacggccatgcaactacagatttgagaaatactcaagttttcaatgaatctgagccaagaaaccatgagagagaacagcagtatttaggtagtgttcaaatgcctggaacactcaatcattccaccgccccatttggcataggaatgccaagatatgatggaggcaaccagcaaagattgcgaccacatatgcatgataattccttattccacaggccgacagctcgcagagcaagcaatcttgcacatttgaggtcattaactgctgcgtctgaaactagaggccatggccatggtatgacaagtcacgctgttcaacaaacaattccatcatccatggcaggcattccacaacctcctgcgaccagaagggttcgaccaagggctttgtcaatcacatctttcattgcagcctcatcgtcagctgagatcagagccccccatgactttcctctcactgaaac

SEQ ID NO: 390520 - DNA, 475 bp, Oryza sativa
cccacgcgtccgcccacgcgtccgcccacgcgtccggcccgctcggtcatcggagcgagaaagctcgccggcgacctcaccgtgcacatggcgcgcgccgccatttgcctagccgtcttcttcctcctcgccgtcatttcatccgctgcctcagatgacccgttgacaaccgtgcagcagccaattagccaggtaagccatggcgccaccatggaggaaaagagaagttcgccggtgaagcaagacgaaggcgaggagaaggcagccagcaaggccgtccaagccggtgatcggcgagacggcgagcttgacgtcggtagaggatcaggccaagatgctgagcatcaccgaggtatagagatcaagaaattagataatgatgacgatgatggcagtggatggggactctgttgatgactccgattcggaccacggttcagactctgatcatgatcatgactcggactcagatcat

SEQ ID NO: 390521 - DNA, 994 bp, Oryza sativa
  unsure (1)..(994): unsure at all n locations
cgcgggggtctcgcnggaggaggtggtggtcatcacgcaggcgncctcgcttggtgggaagttaccttttgatgatgcatcagttggttctgttcttgctgtcattaagaaagtggaaaacttgggcgatctgttcataactgaaataagcagggttcttaaagctggaggcatggtgcttatacagagttccccctctgatcaggatcccaataactctattcagcgcaagctactgttaggaggatttgttgacgtgcaagcttctgctgcaagttcccaggatagcgagcattctgttactattaaggcaaagaaggtctcttggagcttgggctcttccttccccctcaagaaagccacaaagggtcttccaaagattcagattgatgatgattctgaactgattgatgaagacagcctcttgactgaagacgacttgaagaaaccagaacttccagttgttggggattgtgaggtgggagccacaaggaaggcatgcaagaactgtacttgtggccgggctgaggctgaggagaaggtggagaagctaaatctcacatcagaacagatcaataaccctcagtcagcttgtggcaattgtgggttgggcgatgcatttcgatgtggtacttgcccatacagaggtctaccagcattcaagccgggcgagaagattgccctgcctggcaacttccttgcggctgacttgtgatgatagaaaggaacatcggcgacagcagcagataggaattggcttctttaattcgttcgtttgttaggatgttaagttgctggtcaagtatgggtgtgagtatggatagaagaggaccatttgctgtagtccctgctagttattaccactttctggttcccaggtttcatgtgtgagtgtcactcgcctatatgcgtcctgtttgaggatatctgtactaataactgagaaagtaccgcactgttgtttcattatggaaccgcccattctcnnnnnnnn

SEQ ID NO: 390522 - DNA, 983 bp, Oryza sativa
  unsure (1)..(983): unsure at all n locations
ccacgcgtccgctcgaaacccccaacgccaacgccgccgctttctcccctaaagtctactagtcctcctcgtcctctccaccctcctcggcggcggcggcggcagcagcggcgcttgaagctcgggctatggcgagcccgccgaggatcgaggtggagaagctgagcgtggagcagctgaaggccctcaaggagcagacggatctggaggtgaacctcctccaggacagcctcaccaagatccgctccgccgccacccgcctcgagaacgcctccgccgcgctccacgacctctccctccgccccaaagggaagaagatgctcgtgccgctcacggcgtcgctgtacgtgcccggcacgctggacgactccgagaaggtgctcgtcgacgtcggcaccggctacttcatcgagaaaactatgactgaaggcaaagaatactgtgaaaggaaaattaatttgctgaagtctaattttgatgaactagttgagatggctacgaaggaggaaaacatagccgacggaatgggtcggcttctacaagccaagctgaggcagtcatcgccgagcccgagttcatgagacccgaccgcacctcctgtctccaccttgttagatggccaggttgaagtagtttgtggcatctatctagccaacatagaaaatttttagctgctgctctggtcgtgtgtctgtgcaaaggcaaccggttcacttccatggtttactgaaagaacctgcctcatcaggttagcccagaagccggtgttgaacacgcaaattttattggctcaagtcgcaggtagccgaattgtgataatcatttgtgtggttgttaaatcagaatggctgatttcattagacattttgctgctgttccctgtttctggaagacgatattttagccatctttctatgtgatgaactgaccttgttgggnctgtnnnnnnnnnnnnnnnnnnnnnnnnnnnnnnnnnnnnnnnn

SEQ ID NO: 390523 - DNA, 267 bp, Oryza sativa
ccacgcgtccgtgcatctgtgtcactctagcttggtgatgcttagatgggttaggatttgtgtatgcgtagggttgatcgatcacaacatgtcgttgtgtgttgggtcgccatggctggcctgctggtggattgatcgatcggcatgcagttttgcaattgcatccagcaggttagatataggcggcttgattagggcatgcgatggcatgtgatgttttgtggggcgtgtgcggaattgaaattcatgaagaagttggatgagaaa

SEQ ID NO: 390524 - DNA, 551 bp, Oryza sativa
  unsure (1)..(551): unsure at all n locations
ttcccgagtcgacccacgcgtccgcgagttgccacctgttggccgatcagatgatgtggtggtgcctttgcatgctaagtcagcgccttcgtcgccaaccgcaggctcaggtgtcagcttctttagtgatagtgatactgctatcgcgactgagaatctgaggagaatcctccacctgaaaatcgctgatcactgaatggatgatgggcaggtccttgtacataggctatctgcaaactaaccttggtagtgtgtatagagtaaccgagaatggccatctttcacctggatggtggttctgcatagttcatcaacaggaggtacttcaggcaggcaaagcacctcaagtatgcatggcagcgtgaaactgcggtgaatgacttggtggtgagactgttggttgtctggatgagagcacagcagtttctgggtagcctttgtagcttgtggtcacctctatgttactaatgtctttcagccttttggggtatccttctttaaggttttagatcaccattatncatgggtcccanatcattaaccttagtcga

SEQ ID NO: 390525 - DNA, 810 bp, Oryza sativa
  unsure (1)..(810): unsure at all n locations
aggtatacttgttcaggtcgagcagcggcgactgcgcggcgttcctgtccaacttccacacgagcgcggcggcgagggtggcgttcaacgggcggcggtacgacctcccggcgtggtccatcagcgtgctgccggactgcaggaccgccgtgtacaacaccgcgacggtgacggcggcgtcgtcgccggcgaagatgaacccggcgggcgggttcacctggcagtcgtacggcgaggccaccaactcgctggacgagacggccttcaccaaggacggcctcgtcgagcagctcagcatgacgtgggacaagtccgactacctgtggtacaccacctacgtcaacatcgactccggcgagcagttcttgaagtccggccagtggccgcagctgaccgtctactccgccgggcacagcgtgcaggtgttcgtcaacgggcaatacttcggcaatgcgtatggtggctacgacgggccgaagctgacgtacagtgggtacgtcaagatgtggcagggcagtaacaagatctccatgctcagctccgccgtcggcctcccgaacgtcggcacgcattatgagacgtggaacatcggcgtgctcggcccggtgacgctgtccggcctcaacgaggggaagagagacctcagcaaacagaaatggacataccagattggcctgaagggggagaagctgggggtgcactccgtcagcgggagctcctccgtggagtgggcggcgccgccggcaagcagccggtgacgtggcacagggcctacnttaacgcgccggccggtggcgcgccggtggcgct

SEQ ID NO: 390526 - DNA, 438 bp, Oryza sativa
  unsure (1)..(438): unsure at all n locations
ccacgcgtccgcggacgcgtgggcttcggaaatgtgtgtgaactcgacatcatgttccatctagagaaggtgcacttcatgctggaagagatggtgatgaatggctgcatagtagagacaagtaaacagaacatcttagcaccaatccagcttatggagaaaacttcttagaatcgcattctctaactatctagcttttaatccttttgtctctggggggctttatctttcatctactggggaggataaaaaatttctggttgcacatattattgatatgagctgactggagatgattatatgctggataccaagatgcgatgtacttttcttcatggtatttcattttgattttttacacatgatttgtgaagattacnaagccactgattgtgagatcataataagtgctacggnttaaaanaaaaaaaaaaaaaa

SEQ ID NO: 390527 - DNA, 783 bp, Oryza sativa
cttttccccatccatcctctcctccgactccgagctcccttaaccgcagcgccggccgatccgccgccaccgccaccgccaccgccggcagctcgatcccccgcactcgggggggttttggaattggcgaatggtggcgaacgaggtggttgcggcggcggcggtggtggaagaaccggcgcccgcgtcggcgggggcggttgacccgatgaggctggcgtcgcggtggcggtcgccggcggagtggggggccgcggcggccgagatggaggcggagccggcgccgtccgagctcaacaccaccaacagctcgggcctcttcgccgtcgtctctaccgaccggatgtccgtcaggtacctcggcgtcaaccagcacggccacgacgtcggcgtcgtgcaggccaaccgccccgcccccacgcgccgcgccgtctactacttcgagatgggcgtcaagaacgccggccagaaggggcagacctccatcggcttcaccaccgagaatttcaagatgcgccgccagcccggctgggagtcggacagctgtggatatcatggcgatgatggctatctttaccggggtcctgggaaaagtgagtcattcggtcccaaattcacttctggtgacacaattggtgctcgcatcaactatttctcacaagaatttttcttcacgaaaaatggatctctagttggatccttacgaaacgaaattaaaggcccactatatcctaccattgctagtcatacccaagatgaagacgtgacagtcaacattggaaa

SEQ ID NO: 390528 - DNA, 942 bp, Oryza sativa
tagttctagatcgccggagaccaaccggaatcgccgcgcgccgccgccgccgcctcctcgccgtccgccgcagccgtcgagcccatcggcgccggtcatgtcgatcttcgagtacaacgggagcgccgtggtggcgatggtggggaagaactgcttcgcgatcgccagcgaccggcgcctcggggtgcagctgcagacggtcgccaccgacttccagagggtgttcaagatccacgacaagctctacatcggcctctccggcctcgccaccgacgcccagacgctgtaccagcgcctggtgttcaggcacaagctgtatcaactgcgggaggagagggacatgaagccccagaccttcgccagcctcgtctccgctctcctctacgagaagagatttggaccatacttctgccagcctgttatcgctggacttggagaggacaatgagccatttatttgtaccatggactgcattggtgcaaaggaactagctaaggatttcgttgtatcggggacagcatcggagtctctatatggtgcttgtgagtccatgtacaaaccaaacatggaacctgaagaactctttgagactatctcacaagctctgcagtcatcagttgatcgtgattgcctcagtggttggggaggctttgttctgcttgtgacaccaaccgaagtaaaagagtgtgtgatcaagggcaggatggactaaatttatcattgcgaagagttcttggaaccatttctgatgcctgctgttcctggtctctcagcattactatccgtgttgtatgtggattccgagggaaccttgtaatatcaaagatgttcattcacccgtagaagaaactgttgttttcttacttttctacgcttcctatgaatgaaaggacttctatttgttgcatgagatgtgcacttcttggcaaaaaaaaaaaaaaa

SEQ ID NO: 390529 - DNA, 397 bp, Oryza sativa
  unsure (1)..(397): unsure at all n locations
ccacgcgtccgcgaacctcgacgcctgcctccgcgcccgcctccgcctccgcctccgcctccgccgcgaactcgccgccgcgccggccatgtcgatcttcgagtacaatggttccgccgtggtggcgatggtggggaagaactgcttcgcgatcgccagcgaccggcggctcggggtgcagctgcagaccgtcgcgacggacttccagagggtgttcaagatccacgacaagctctacatcggcctctccggcctcgccaccgacgcgcagacgctgtaccagcgcctggtgttcaggcacaagctgtatcaactgcgggaggagagggacatgaagccccagaccttcgccagcctcgtctncgctctcctctacgagaagagatttggaccatac

SEQ ID NO: 390530 - DNA, 574 bp, Oryza sativa
tcccggtcgacccacgcgtccgcccacgcgtccgaaaggaaatccatccatggcgatctccaagctccagctcgccctcctcgccgccgcaatggcggcggcggcgatctcccccaccgcctccggcgcctacaccggctgcgcgacgccgaggaaggtgacgatccagaacctctccggccgcgacctgcccctctccgagacgccgctggcgaacagcggcgcgctgttcggcgccggctacgtgctccgccacggcacgcacgccgagttcacgacgtgcctgtggacggggcgcgtggcggcgccgggggcggcggtggtggagttccacgtcggccccgacggcggcgcgtggtaccaggtggacaaccgccaggccgggtcgccggtgaaggtcaccgtgacgccgcacggccggccgctccagggccactgccccgccgccgggtgccgcggcggcggccagtgcttcgccgacgccgtccccggcggcaactgccacgccgtcgacgagctcaagatcatctactacagcccgtgattttggtttttgtttggttaaatttcggtt

SEQ ID NO: 390531 - DNA, 569 bp, Oryza sativa
  unsure (1)..(569): unsure at all n locations
gtgggcaagctgctgttcgaccantcggcgtccgtccttcgttcgccgccgtgccgcccaacgacgagcggcactggcgcttnccgtggcgaggcagccggtgacggtgtacatcgacgcgagcgcgcaggagttccagttctacaagggcggcgtgtacaagggcccctgcaaccccgggagtgtgaaccacgccgtcaccatcgtcggctactgcgagaacttcggcggggaaaagtactggatcgccaagaactcgtggagcaacgactggggcgagcagggctacgtgtacctggccaaggacgtgtggtcgccccagggcacctgtggcctcgccacctccccattctaccccacggtttaatccgcgttcgtgtgcccggctttgcttaagtatacagtgctagtgtctaatctgtccgtggatgaaggctcggacggctgagattgatggactgttgatagtttctaccacctgttgtgagagtgtaatcatgaaagacaataaatcaataatacaaattcattccgctttgattnnnnnnnnnnnnnnnnnnnnnnnnnnn

SEQ ID NO: 390532 - DNA, 530 bp, Oryza sativa
  unsure (1)..(530): unsure at all n locations
ttcgccccccgttccgcctaacgncgacggcagttggngcttgccgttacgagncagccggtgacggtgtacatcgacgcgaagagcgcaggagttccagtttctacaagggcggcgtgtacaagggcccctgcaaccccgggagtgtgaaccacgcccgtcaccatcgtcggctactgcgagaacttcggcggggaaaagtactggatcgccaagaactcgtggagcaacgactggggtgagcagggctacgtgtacctggccaaggacgtgtggtggccgcagggtacctgtggcctcgccacctccccattctaccccacggtttaatccgcgttcgtgtgcccggctggcttttcttaagtatatacagtgctagtgtctatctgtccatggatgaagacacggacggctgagattgatggatagatgcatccgttgctagttttctaccagttgtgagaatgcaatcatgcaagataataaactaataatattttctccgattttttcaaaaaaaaaaaaaaaaa

SEQ ID NO: 390533 - DNA, 613 bp, Oryza sativa
gtggttgagttaggcaaagtccatgaaatccaggctgctgtcttgtctacaccacttctgtacttgctgtcgatgacatcaaagaagtcaaatgcccaatttctatacttggtgctgaaattgacaagacgtctccaccagagctgttaaagcagtttgagcagatcctttctcctaaccccgagattgctcacttcgtcaagattttccccggcgtacagcatggatgggctgtgagatacaatcacgatgatgcagctgccgtcaagagcgctgaggaagccctggaagacatgatggattggttcaagaaatacctgaagtaaaatctgaattagcagctctccatgtaccaagatattgctaagtgctagctgatgcacgaacagctgatcttgagatgccattttgggcctgaacttcggttatgccattgtgttcgaatggcgtgtgtgcttcccttccatgtgcctcatgatacttacttttaggactatttctgaacatgtgtgtgaggttgatccaatcctgcaccaacaaacctgaaatttttgctgtgcattggagttgattttccagcaatgaaatttgcaaatgccaggaaggtttagag

SEQ ID NO: 390534 - DNA, 1006 bp, Oryza sativa
ccacgcgtccgccacgcgtccgaagaagtattctgcaatctttagccgcctcacgcggcatgagattattgattttgattcagatggccagatcaggtgttacccacatgtcattggtggtctcaggagccaccgagaccttggcatcgacccaagttcttctccccagaactatacaatggtagacttccggctgtttgtccgggaagcctatggactgcctgcagctgaagtggacataccctataaggctgactaagatgaccctgtcacgaagcccccgataatgctgattgacaggggcaaatcctgcagatttgtcaacgtggcacatgttgtacaagggctggattggtttggttttgaggtggtcaaggcccgatccaaagatcgattctaaccttgatgaatttgttcgccttgttgactcctgcgatgcaatcattgggcgtgcatggtgcgggcttgactaacatggtgttcctgcggtccgggggagtggtggtgcacattgtgccatacgggatcaaattcatggctgatgggttctatggtgcacctgcacgggacatgggtctgagacatgtcgagtacagcatcagtccagaagagagcacactgctggagaaatacggttggaaccatactgttatcaatgatcctgaaaccatcaggaagggcggatgggagaaggttgcggagttctacatgtccaaacaggacattgtgctcaatatgacaaggtttggacctagcctgttgaatgcaatagagttcattatgtaagtttgtgaaatgaggtttttgtgtttgttttagctacagcattctacagtcacgaaaaaaatacacttttttgttggccataggtggaataggtattgttgttttagtgctgcttctgtataggattgtcggtgttagatttgaataaccatgatcaactgttacaggaaagatgacaataaacctgtgtgctgagttttcttaaaaaaaaaaaaaaaaa

SEQ ID NO: 390535 - DNA, 566 bp, Oryza sativa
ataaagagcttcagtatatttcggatggtgataacaatggtgttatctactatgccggtacatcatttggtaaacaccaatggatcaaccctgttttagccaaggtacacggatccaaaggctttggtttcaaaaaattaccaggcgacttgttttgctgggcctcgtcttgaagatggcaagatgtgttcttggtggatggtagacattggaccggatcaccagcttatgtgcaactactacacggtgaggcaggatggctccgcgaccttcatgaggtcgtgggttcttcagggatcaatggacggccgtagctggactagcctgcatgtccacggagacgaccagaccatctgccagcctggccagttcgcgtcgtggccgatcaccggccagacggcgttgctgccggttcggttcttccgggtcatgctgacggccccggcgacacgggtctccaacacctggaatctctgcatctgcttcctcgagctctatggctacttccggtgattgggacagctttgctgcacacccctgagaaaagatcggagtgagcaatgtct

SEQ ID NO: 390536 - DNA, 502 bp, Oryza sativa
tgcttagctagctgtttgttttggcgataccatttgcattgcttgcccagcatcgtcgtcgtcgtcgtcgggagcaaggaggaggagagaccatcgatcttgattgatttgaagctagatggcggaggaggcgaagaaggtggaggtgaccaaggacatcgccgaagagaaggcagtggtgccgctgccgacgccgccggccaccgagcacgacgactccaaggccatcgtcctcgtcaaggaagctgaggctacaggaggttcagctgaaagagatgcttatctcgcaaaaattgtgtcggagaagagattggtactgatcaatgcctgggaggaaagcgagaaagctagagcagagaacagggcggccaagaagctgtcatacatcacttcatgggaagaatgcaaagaaagcagagatggaggctgagctgaaaaggatcgagcaagaactggagaagaagaaggcggcgtacgaagagaagctgaagaacaagctggc

SEQ ID NO: 390537 - DNA, 395 bp, Oryza sativa
ccacgcgtccgccacactatccaagagtatgccactagtgaaacagtcagagttataactgcttcaattgagaaggacatatgggcatctgggagtgctaatgaggagtatcttaaggctcttaacgctctacttagtaacttccctcgcttaagggtcactgaacctgctaccttatgcattcctcatcttgtaacatctctcaagactggttctgaggcaacccaggaagctgcactggactcactgtatcttcttagacaagcatggggagcttgtgcagcagaaatatttaaagctcagtcagttgctgcctcagaggctattccgctacttcagtacttgatacagtctggcccacctcggttccaagaaaaggcagaattgcttcttca

SEQ ID NO: 390538 - DNA, 380 bp, Oryza sativa
cggtcgaccacgcgtccgggcgtaagcctagtcttggctccttgagccccgacggacggcggcaacggttttccgtcgcttctcttcctgaaggcgtcgttttggcatcccctagggggcgatcttcgtctatgttcctttgttggtctagcggcggtcggtcacgcttagcggcggccggttcggtgctagccttctcccgggtgtgtgtgtgtcttggcgctgtcggtgtgtgggcggtggtatatttttttcctttttcctggttacgaccctccaggggtgtaatcttgtaattttttcctgctctatcattagaacttcgcaccgtctcgtgcgagtcgttcaaaaaaaattacagttgattgagtgatcgactc

SEQ ID NO: 390539 - DNA, 696 bp, Oryza sativa
  unsure (1)..(696): unsure at all n locations
cgaagaaaagcntgcatggccttcttttgatgaggttnatggctattgggaggttgctccgcttccgatgatgggggtttggggggtgataaatgaggtttcagcgtaccatgttggaaatttgtgaaccaactcgatgggtttgatgcgaggggaaacatcaaggttctgatggccacaaacaggcctgataccttagatcctgcacttctacgtcctggtcgtttggacaggaaggtagaatttggcttacctgacctggagggccgtacccaaatattcaagatacatacacgcaccatgaactgtgagcgcgatatccgtttcgagctgctggctcgcctctgccccaactcaactggagctgatataaggagtgtctgcacagaagctggcatgtatgcgattcgcgcccgacggaaaacagtgactgagaaggacttccttgatgctgtaaacaaggtcatcaaagggtatcagaagttcagcgcgactccaaaatacatggtgtataactaaaccgttgttgctcccatttactatggcccatgagattgtctctggctgtctgcaaagattgttgttgtttcttctcggaattgtgcatctttgtggcgaccatgtcatcttgtacaagttctattaaattttataagtagggttccttttgacggttaatgtgtcnnnnnnnnnnnn

SEQ ID NO: 390540 - DNA, 1030 bp, Oryza sativa
  unsure (1)..(1030): unsure at all n locations
cgacccacgcgtccgcccacgcgtccgccgagccccactgcaatcccacctccccaactccgccgcacgcatccccgcacccgccaccatggctcgccggagcggcctaatgctactactcctcgccgccgccgctgtcgcctccgcggccgtgccgccgtcgtgcgagcgcatcgagtgcccgtcgtacgaggtggtggacagcgccaacgggttcgagatccggcggtacagcgacgccatgtgggcttccaccgcccccatcgaggacatctccttcgtcgccgccacccgcaccggcttcctcccgttgttcaactacatccaggggaagaacgcgtacaacgagacgatcgagatgacggcgccggtgctgacgcaggtggcgccgagcgacgggccgttctgcgtctcctccttcgtggtcagcttctacgtgccggcgaaaaaccagccggacccgccgccggcggaaggggctgcacgtgcagaagtgggccggggccaggtacgccgctgtgcgccgcttcggcggcttcgtggccgactccgacgtcggcgancaggccgcgctgctcgacgccagcctgcaggggaccaggtgggccgccgccgtgtccgacgggcgcagggccgaccccacgtcctcgtacacggtggcccagtacaactcgccgttcgagttcagcggtcagggtcaacgagatatggatgctcttccacgcgaaggatgcatccgacatgttacgcgatgagcgcgcggcaattcccaatcttcaaatgttcaccggagtagtagactccatcgcacagcttgtgttatcttcaagctcctggtcggaagaataatggcatcttaaagccctaaactgctcgagtgaactgtttttttgcactgtaaagtatgtagttgagttgtgactcgtgcgtatcgagattaacaacaataaaagttctgtttagtcaactattttaacgcatgatttaacggggaacatcaatatatnnnnnnnnnnnnnnnnnnnnnnnn

SEQ ID NO: 390541 - DNA, 1811 bp, Oryza sativa
  unsure (1)..(1811): unsure at all n locations
catttgttaagccaaaaccccaacttaatgagggaaataatgaatatgccaatgatgcagaatctcatgaataaccctgatttaattcgtaacatgatcatgaacaatcctcaaatgcgtgatatcatcgaccggaatccagatcttgctcatgttctcaatgatccaagtgttctctgccagacccttgaagcagccagaaaccctgaaatcatgagggagatgatgcggaacacagacagagcaatgagcaacattgagtcttctcctgaagggtttaatatgctccgacgcatgtatgaaactgtccaggagcctttcctaaatgcgacaacaatgggtggagaaggcaacacagctccaaacccattctcagctcttcttggaaatcagggttctaaccaaccaagggatcctgctacaaatgctccaaatactggctcagagtctacaacaggaacccctgctccaaacactaatccacttccaaatccttggagctccaatgctggaggtgcgcaaggagcaacacgggcaggttctactggcaatgcaagtaaccggtgccactgggggccttggagggttggggtcagctgatctgagcagtttatttggtggtcttgccggtaatacaggaactggtgctactggtggtctaggagggttgggttcagcagatttgggaagtttgcttggtggttctcctgattcttcttccttgagccagattttgcaaaaccctgttatgatgcagatgatgcagaatatcatgtctgatccacagtccatgaaccagttgcttaacttcaacccaaatacacgcaacctcatggaatcaaacactcagttgagggaaatgttccaaaatccagaatttattcgccagcttacatccccagaaactatgcagcaattactctcgttccagcagacattattatcacagcttggtcaaaatcaacctaggcaggatggtagccaaggaggcaatgcgacaggcatgcggggaaatgttagcctcgacaccttgatgggcatgcttagtgggcttggtgctggaggtggcataggtgtacccaatacatccaatgttccaccggaagaactgtatgcaacacagctcactcagctccgagagatgggtttcatcgacactgcagagaacatccaggcgctagtcgcaactgctgggaatgtgaatgctgcggtggagcgtcttcttggcaatcttggccagtagctaaagcgtaccagacgctgcccataacgtcaccaactccgctcttttgcaagaggttttttagcccctccaagttcaaacgcagcgtctgtctacagtctcaggagaaaataaaacaaagaaatcccacccccaccattaacttttccatacatggtcgtcatgcctttgtttttaccgtgttgtatttgactatttgggttgatgtacatacatatgaaattatcggatcttaccgcatagaaaatatgggtctaccctttgcaatttgtcggctcccaatcctcaagatgtatgttgatgccttcttgtgttttggggtatcttcataaatcataacgcagccttgttcttctaggcataaggtaattaaggtagctggccttgttctagacaaggcagctgccatgctagtgctgtgtcttctctgttggttgctctatccatttgacatttgcactgctctcgggattctattggcaaatacatgataggttactgcaccattttttttnnnnnnnnnnnnnnnnnnnnnnnnnnnnnnnnnnnnnnnnnnnnnnnnnnnnnn

SEQ ID NO: 390542 - DNA, 684 bp, Oryza sativa
  unsure (1)..(684): unsure at all n locations
tggagaaaagtgnactttcgttgaatgaccagctccccagaaatgatggcatgatacctactgttggtgaagctctcatggcaccaactgttatctatgttaagcaggtgctcgagattattaacaaggntggtgtaaanggaatagcccatattactggtggtggcttcaccgataatatcccaagagtatttccttctggacttggggcaaagatttttactgcagcatgggaagtgccacctgtattcaggtggattcaagaggttggaaaaattgaagatgcacagatgaggcgcacgttcaacatgggaattggaatggtccttgtggtacgcaaagaagcagctgatggaattctcgaaggtacccatggaccgaaccacgcatatcgcattggagaggtgatcactggcgaaggagtccatacgtctgatctaattaatgatctttataatgctttgagtagtttgaggtttgttcatccgacaggcaaaccagcctaatttttgtaatcgcataacataaagggggccaagtcctggagcaacagtgagtttagtcctgtaagataagaaaacatggggcgtactccttttagttccacatgagaacttgcccccaaacggcagaacctattatttggacttgcatctnnnnnnnnnnnnnnnnnnnnnnnnnnnn

SEQ ID NO: 390543 - DNA, 336 bp, Oryza sativa
gaggaggaggattctggcaagacggcgacgacccgcctccgctcgatcatgcctcgcaggctcaggcgttaatgcatcctggcaatggcagcagctccggctatggccatctgcactgattctgctgcatctatttggaacgggttgatgactggttactccgttcatgatcttaccctgtcagtgatggactctgaataatttgggggcgaattgtcctgcaaccccaggatttattatttctatttttgaaaccaaaccaccaggatatttgccattggatgagaagtgttcatgatcatgaaatgatctgttttgttcaaaaaaaaaaaaaaa

SEQ ID NO: 390544 - DNA, 646 bp, Oryza sativa
  unsure (1)..(646): unsure at all n locations
caacttggtacgatatccatggataaagttaccccatcaacaattgttggcccttcaccagttgcaggcattacagttgacaaatcagtagagttctcatatgaagaactttctaatgctacacaggggtttagtattggcaataaaatagggcaaggtggttttggtgctgtctattatgctgaacttagaggcgagaaagctgccatcaagaaaatggacatgcaggctactcatgagttccttgctgaattaaaggttttgacacatgttcatcatctgaacctggtgcgtttgattggttattgcatcgagagctctttgttccttgtctatgaatttatcgagaatggcaacttgagccagcatttgcgtggaatgggttatgaacctttgtcttgggctgccaggattcaaattgcactagattcagcaagaggtcttgaatacattcatgaacatactgttccagtatacatacatccggacatcaaatcagcaaacatcttgatagacaagaactaccgggcaaaggttgcagattttggtttaacaaagcttacagaagttggtggtacatcaatgcccacaggcacacgtgttgttggtacatttggttacatgcctncagagtatgctcgatatg

SEQ ID NO: 390545 - DNA, 384 bp, Oryza sativa
ttatcttgagcataccgaaacggaagccagtagccgagacacaagaaactctccggacctctgccttccccagtaatcatgtcaaggataaatgggcgaaaaatctgtacatagcatcgatctgcttcgggcgaaccgtctgttgacggtgtggctggctggctgccttccattgaagttgaagcgattgccattcgagagatgaggagatctggagatggaagaggattcgcatgatcattgggctagggagcattagaagtttcggtattttgcaactgtaaaaaaatgttgtattaccggatgccggccttgtgggcctttttccataaaagaagctaacccattcttgcatgttgaaatcgatatctctgcatttttatc

SEQ ID NO: 390546 - DNA, 1398 bp, Oryza sativa
caagtaagcaaatcagcaaactgattgcagcgagagtttctgaagtgctcttgttattagccatgaagttggagcatgacttccatatggcaataggggaagcagaggataactatgcaaacaactctaggcttcagcgaaaggctttgctcaagaccaagccggtgcttgacaaggctgtgagacaggtgtgcatggctctccatcctcgagctatgatagttgctgacctaggcttttctgtcgatgcaaacactctcctcttcgtctccgatgtgatcaacacggtagctgatgctcagcaccatgatgagctcaggtgccatcccatgggaactccagttcttcctgaatgatctgtctggcaatgatttcaatcaggtgttcaagtcagttaaacagtttactaagtcgatcgcagcatctcatcccaagggagtagcactgcctccattctatatctctgggctaccaggctcctactacaccaggcttttcccttgccaaagcgttcaccttttccattcctcgtactgcctccattggcgttctcagatgatcaaggacatggatcaaaagatctcagacataaatggagggaacatttacattgccaagagcatgccaccatcggtggtgaaaatgttccaagatcagtttcagaaggacatgtcccttttcctcaagctgcgacatcaggaactagtgcctggtgggcagatgctgctcacattccttggaaggaagaaagagggcgtcttgggatggagatctgagccatctatgtgcattgcttgcagaagctttacaagcccttgttactgagggccttgtggagagggaaaagctggagtcattcaaccctaccactgtatgggccatccattgatgaagtaaaagcagtgatcgcattgaacaagctctttggcattgaccatatccaggctctttgagtcaaactggggatccctatgatgacatggaaaatgatggcatgtgcagcagccctcagcatggggtgaatgttgccaagagcatcagagcagtgttcgagcccttgctggcagagccatttcggagaatgtatactccacgagctctttcagaggtatgcacggaatgtagagaggcacctgtgcggaggacaatacaaagtactcggtcatagtcttgttgttgaaccgaaaagtctagatcagacacaggacacttggggaatctacatagaaacactacaatatatatttttaattacgcctgtatgctgctagtttacaataagatttccatcaactggttcttaagcttttaccgcagaaaattcgtctacggctggtgaatttcaatttgtgtgtttatttaatccactatagtatttatgcaaaaaaaaaaaaaaaa

SEQ ID NO: 390547 - DNA, 581 bp, Oryza sativa
ttttccgctctcgctgcagatgatgggatgcgcgacgcccttgcggtcacagacgcggccgtggtgtcgcaccactctgtcctggtgttcgaggccttctcggcttcggcgcccggccgcattgacccggccacgggctacctgctcgacgagctcaccgacgactgccacgccgactaccgcaacctcatggccgccgcggtgcgcggcgactttcgacacctgcgctctgtacgccgaccagctgaagcggcgctgcgccgatcagttcaaggacggcgttcttggcctggagcacctcgccgcggtggacagcctctgcgagatcgtcgcccgcggcatgggcgccgccgagccgccgcgcacgtaccacatcaacctgtccgtgttcacctccctgccggacatgtgggcgatcgggcagatgttcccgatcatcccaatccagcgcctcggtgagcgccctgcggtcgacggcgtcctctccgacctcacctgcgacagcgacggcaaggtcgaccacttcatcggcgggaggcacagcctgccgctgcacgagctccccgtccacggcacccgcg

SEQ ID NO: 390548 - DNA, 755 bp, Oryza sativa
  unsure (1)..(755): unsure at all n locations
ccacgcgtccggtatcgtcctggtgcagtcgtgcttcagtgcggcgctgattcgttgtccggtgaccggttgggctgtttcaatctctcaggcaaaggtcatgctgaatgtgttaagttcatgaggtctttcaatgttccgttgcttcttcttggtggtggtggatataccataagaaatgttgcacgctgctggtgttacgagacaggagttgcacttggtgaagagctacgggagaagttgccttacaacgagtattatgaatattttggtccagaatacagtctttacgttgcagcaagtaacatggagaacagaaatacaaacaagcaactggaggaaataaaatgcaacattctggacaatctctcaaaacttcaacatgctcctagtgtccaatttgaagagcgaattcctgaaacaaagctacctgagccagatgaagatcaagatgatccagatgaaaggcacgaccctgactctgatatgctgttggatgatcacaaacctatgggacactcagcaagaagccttattcacaacatcggagttaagagagaaattactgaaacagagaccaaagatcagcatggtaagagattaacaactgaacataaagtaccagaaccgatggcagacgatcttggttcctccaagcaagttnctactncggatgaaattcgatggccatcaacggggcagggaacgcaagnatgtaccgggaggtactatgactacccacttnaggcaccagt

SEQ ID NO: 390549 - DNA, 610 bp, Oryza sativa
ctggggcagacatttaattccctctcaacccttcaacattatgagaaaagcgaaggtcaaactgttttatttgttggggatttgtcatatgctgatagatatcaacataatcatggtgttcgttgggattcttgggggcggcttgtggaacgtagtaccgcttatcaaccatggatttggagcgctggtaaccatgaaattgaatacaggcctgatctgggagaaacttctacatttaagccatatctgcatagatgtcacactccatatttggcatcaaagagcagttctcctatgtggtatgcagtcagacgtgcatctgctcatatcattgtgctttctagctattctccattcgtaaaatacactcctcaatggacctggttgaagtatgaattgaagcatgtggatagagagaagactccttggcttattgttctcatgcattctcccatgtacaacagcaatgaagcacattacatggagggtgagagtatgagggctgcttttgagaaatggtttgtgaagtacaaggttgacttggtatttgcagggcatgtgcatgcttatgagagatcgtatcgtatctctaacatcaactacaacataa

SEQ ID NO: 390550 - DNA, 424 bp, Oryza sativa
ccacgcgtccgggtcaatcagtataaccttcatgataatcattggcttacaaccttatttgaagagagggcaaaatgggtaccagcatatgtcaaggatactttctgggctggtatatccactgttcgccgcagtgagcggttggaggcctttttttgatggatacattacaccagagaccacaattaagacatttattgaacaatttgatactgctatgaagcttaggtctgaccgagaagcgtatgatgattttcgctcatttcagcaaaggcctcaagtcttgtctggtctactctgtgaggagcaatttgcaaatgtttatacaataaatatgtttcagaagttccaagatcacttgaagcagctgatgaacgtgacttgcactggagtcagtaggaatggatcaatagtgacttacact

SEQ ID NO: 390551 - DNA, 401 bp, Oryza sativa
  unsure (1)..(401): unsure at all n locations
aatgtttgtttgtgctttagtacatttggtacacctaaattgaatgatttttgcccacctcttaagattaactgtgaaaataattttttgaagacacaagccttaagagtactctgttgaagagaagggaaggaatagagtataagagatatgcaagttatgaagagtttcaagtctatctttaaactctgatgagtacaaggtcagcagcctagtgcttgctttatctgttgaaaaatttgtgtatcaacatccagggaaaggaatcaagggtcaaggatatgaataatcaattgttcctttacttgactaaagtcaagtatccttttcaggattttcntggtaactggtcagnttgtgcaattaattaaagctaaatcttgttatctggnacaggaggc

SEQ ID NO: 390552 - DNA, 1084 bp, Oryza sativa
gggagaaccgcggcgatgtcgtcgtggaactcggtggggatggaggtgctgtaccaggtgctcgggtgggtcgccttcttcgcttggtccttcagcttctacccgcaggtcttcctcaacttcaagcgcaagagtgtggtgggtctgaactttgattttctggtgttgaacttgacaaagcactcatcctacctcatatacaatgctgctctattcttcagccccttcatccagagacagtatcatgagacatatggtgataaagagatgattcctgtcgcggcaaatgatgttgccttttctgtacacgcggttgccttgacagcttttaccctttttcaagtattcatctacgagcgaggaaaccagaaaatctccaaagtctgcatatcaatcactgctattgtgtggacagctgctattgtttgccttattgtagcttggccaaaaagtaactggctctggcttatagatgtgttcaattcaatacaggttgggatgacagcaatcaaatacattcctcaggccatcatgaacttcaggaggaagagtacaattggttggagtattggcaatattttacttgatcttacaggaggggtgctaaactttggccagatgggtgtgcaatcaatagatcaacacacgctagtgaacttctatggaaatattgggaaaacccttctttcattggaagtcgttttcttcgacatcttattcataatccaacactatgtgctgtaccctgtcaaacgagatgagaatggtaaggctatcatttctgaaagggtagctcctcttatcaggccttcagacaagcctgaagaagatagtgtgtgatatacctattgtatttcaccttttttatggccctgattacattcgcttcagggtatagtcccaactatccattcatatgaaacaaatgcatttttcgtaaaactaaattttgtacatatttgtttacggattaatgtaaagatgtagatacaataggcctttgatactagtcttaaaacaatgtttgtgattatgtaagtgtaagtatacttacaatatctatcacggatttgtcatgagtaac

SEQ ID NO: 390553 - DNA, 398 bp, Oryza sativa
  unsure (1)..(398): unsure at all n locations
ctcgagcactctaagttttaactcgagctcatccatggccatcgcgacgacgaccttaccactcgcgccactcgccctcgcgccgccatcctccccgatctcccagtgctcgctcctcctgctgcgcccccgcgccccggccgccctctcgctccgcccctccgcgcgcctcctcgtcgccgtcgcggccagggagcccgagctcggcggatcgggaggcggaggcgcaggcgacggctctgggagcggcggcggcggggacagcgagaagccgcggggtggtgggggcgacgaggagggggaagggaggagtagaaagatgcancattttgctctccatgtatcaaaagaggaccctcgcctacgccgctcataactgagcgggaggtacgtcgggg

SEQ ID NO: 390554 - DNA, 1232 bp, Oryza sativa
cggaggttcgcgccgggcagcgcattgggatccaagggatgcctgaattggcaggatcggggtagatccaagaggggggtggatggtggcgaggccgtgaggatcaaggcgcaggttctggcgccgcagcggcagctgctccatgacccggaggttctgccattggaggaggttgccacgaagagcttgaacgggaatggcgcgtgccggcgtgggaagccgctgggtttccccgagaacgctgcgccgacgaagatggtggttgctgttgatgtggatgaagttcttggaagctttcttgctgctctcaacaaatttattgcggaccgttattctttgaatcactcagtatcagaataccatgtgtatgagttcttcaagatatggaattgttctcgagaaagagctaattttcttgtccatgagttctttacaacccattacttccaagatggtatacatcctatccccggtgcccgagatgctctgcaaaatctctcttctttctgtagcttatctgttgtcacatctcggcaggatgcaattaaaaatcacacattagactggatcgacaagtactatccagggttatttgagcagatccattttggaaaccattttgctttgcaaggtcaatcaaagccaaaatcagaaatttgcagatcttttggtgctcaggttttgatagatgacaaccccagatatgctttagattgtgccgaggatggcatgagggtccttctctttgattatcacaactcgtacccttggtgcaaaactggtgttgacgaatcgcatccgctggtgaccaaggttcacaattggcaagaagttgaggaaaagcttctttcttgggtagtaccagagttctgacacttgattcggtaggagacgcaccatttgagagcagcagatgtctcggtagactttgatttctgaagaaacatgttcaacccattccagtatgtcagagttaaataggatctacaacatccctaggcaaagactggcagaatgaacgttgttgcagaatgaaggtctggaaggctccagttttagtatgtctcccatgtgattcaagacgaatttgcaatgttgacgactgaaaccgtctccactcttcagttcttttaccctgctgtggggtgtatatattgacactgctataacctcaatgaatttggggaacgcttcatataaatttgacatgcgtgtgagccgtgtagatcttt

SEQ ID NO: 390555 - DNA, 577 bp, Oryza sativa
tcgctcaatgattgatgaagatgatgggactgtttctccaaaaagaactattgaagaatcagtggataagtccactcatgctgatgcgattaagactgctttgatggaagctgtttcaagtggaaaattatcagcaagagaacatttggaatcctgtagtaatgaagaagaagaagaagaagaagaagaagaagaagaagtggccatcaaacaaggcacagatttcgaagagcaacggaaggctcactatgatgaattccgcaagatgaaggaactgcgtcggaggggaacgccgtcacaagagggtgatgaatgatgactctggcaccgtcgcacaactcggaagcatatgatcagcgaatcctcggcatgttaaatattggcagtggcaggaatgttttacagatatcctactaaaccttaaaaagctcatgtgactatctgttctcttgcttaattattagtactggtcctaggacagtaccaggtaaaaattttggctcttattatggaggtaagaaaatctgtatcgatcttgtactcaaaaacttatgctcttgttcatgctgttgattac

SEQ ID NO: 390556 - DNA, 642 bp, Oryza sativa
ccacgcgtccgcccacgcgtccgcccacgcgtccgcaagaccagaactacatttacggcatgcttgctttcccattactagaacttggaaggatggatgacgctgaaaaagctgctcggaaaggcttggccataaacaagaacgactgctggtcacagcataatctgtgccatgttttccagcaggaatgccatttcaaagaagctactgagttcatgaaatcgtgttctccatcatgggcagcatgctcatcgtttatgctaacccacaactggtggcatgttgctgtttgttacttggaaggtgaattccctacaagtaaagttctggagatatacgatcataacttcatgacagagcttgagaaaagtgattgtgaggcagcagaggtgtaccttaatgcactagggctgctactccgtttgcatattcgtgggcaggttgatctggccaaagatagattggcagcattgctagatgcacttacgaatgagaaaatatggcatgtggaatggctccttgatctacttgtattatgggcactgtcaagtatgggtgagattacaagagcagacaacttgttggaatcacttaggtcaagagttagttcgattggcaaaaaaaaacagcaagtgatgcaaa

SEQ ID NO: 390557 - DNA, 449 bp, Oryza sativa
ggcagcaggagcagagacaaccagagtgacagagcagagtgaggtgaggcaaggtccccttcgtcttcaaggcaagctcagctcagagctcagatcgatcgatctgccactggagatggtgtgccaccggatgctgccgttgctggtggtggcggtggcgctgctgccggcggcggcggtggcgaccaactacacggtgggcgacgagaaggggtggaaccccgacgtggactacaccgcctgggtcaagaagcaccgccccttctacaagggcgactggctcctgttcgagtaccagaacgggaggtcggacgtggtgcaggtggacgaggtcgggtacgacaactgcgacaaggcgaacgccattagcagctacagcaaggggcacagttacgcgttccagctcaaggaggccaaggactactactttatttgcagctattgcttct

SEQ ID NO: 390558 - DNA, 1032 bp, Oryza sativa
  unsure (1)..(1032): unsure at all n locations
caagggagccgtatgcttggatgggagcttaccagggtatcacctacaccgagggtttggatcaggggcaaacagttggcttgtcaatttggagggtggaggctggtgcaacgatgttaaaagctgcgtgtttcgcaagagcagtcggcgtggttcatcaaatcacatggagagccaactccagtttactgggataatgagtaacaggcctgaagaaaatcctgatttctacaactggaacagagtgaaggttcgatattgtgatggcggatccttcactggtgatggggctgatgcgtctgcaggcctttatttccgaggtcagcgtatttggcaggctgctatggatgatctgatggcccaaggaatgagatatgctaaccaggcacttctttctggatgctctgctggtggtgtttcaaccatacttcactgtgacgagttccgtggattgtttagcggcagtacaaacgtgaagtgccttgctgatgctggaatgtttctggactttgttgatgtttctgggcaacgagaaatgagggacttcttcaatggtattgtgagattgcagggttccggaagaagcctgcctaggtcttgtacctcccgcatggataaaacttcgtgctttttcccccagaatgtggtgccaaacattcaaactccaacttttattttgaacactgcttatgatgtgtggcagcttcaacaaagtgtggcccccaaaagggctgatccgcaaggtctatggcgaggatgtaggatgaatcatgcctcctgtaatagcaaccaactgcaatttttacaaggtttcaggactcaaatgctcgatgcggtgaggggtttctcccgcgcaaggcagaaacggtctttctatcaactnctgtttcgcacattgccaaagtgagagacaggacacatggtacgcagggtgattctcctcgtctcggtaacaagaganttnctgaagcagtaggcgactngtttttcgatagggcagacgcgaggtacacagactgtgcatacccttgt

SEQ ID NO: 390559 - DNA, 497 bp, Oryza sativa
  unsure (1)..(497): unsure at all n locations
ctcaagtatcagactcctttcccagtgaagaggagttcaagaagtggctacaagtggctgagaagaatggtgtgcgagtaccgactcggcaggatgtattggagaagaaagaagccattcaacaggcctacaactttgtgtattcagcacatactgtacagaagatgctaaaagagaagcgatcagctatcagacgtcctatcaatgttgctgctgagaaggatcggttgaggaatgagttggatatggccattgccaggagggatgaagctgaagcagaaaggatccgttcaaagctcaatcagctgcagaagatgtcgaagccaatatcaaataatgaggaaggctgcccaagttggagggcgatgaccaaggaggaaccgtgctgagaacttcaagaacgcatcagaaatgaagcccgttaacacgagtttgaagggtggagaggctggttatgatcccttttcaaggagatggacanngatcaagaaatacta

SEQ ID NO: 390560 - DNA, 734 bp, Oryza sativa
  unsure (1)..(734): unsure at all n locations
tgtgattgatcaaaatattgctgatgaagatgttgatcattacctggaaaagattcagcaaaagatgttggaaaatggagatatggttgcaaacgacgatgaaatcaccccaacagtcttggttcagacgctggattatgtgaagcaatgcgaagagantattgtcaacatgtcattgatgcaacgcccatccttcgcgaataaaccaacagcggataagctttacaaccaaccattgctaggatttgtgcggaataaaaacgagcctaccaaaaaccagcaagtacaatcagaagaacctttggatctgcaaaataagtgctcctcggaacatagtgaatcttgcactagttccgatgaagacggttcatggcatgagattttgaaggtgggacctgaggaaaggaaggctgctcggaaggaaaacaagaagaaagtaaaagcagaaaagagagaagctcgcaaagataagatcccaaaggctgagaagaagaagaggaagaaaatggcaaaagccaagtgcaagcggtagtcaatctgtgtgtcgcaccaacaatggtcaatatcatcaaagctaaattagctataaaaatctactaaagttatcatatacttttcagtagattacaaatgtgagatggcctttatgaatgtaatgcaattggaagatgatttttaaattgagtataatcccttgcagcnnnnnnnnnnnnnnnnnnnnnnnnnnnnnnnnn

SEQ ID NO: 390561 - DNA, 533 bp, Oryza sativa
  unsure (1)..(533): unsure at all n locations
cccacgcgtccgacgtactcttgagaaatctcaagaattggctcaaactttggccacagacaactcagctttgactgataagttcaaccaacaggcacaagttatcagcaacctgacatctgacatggagagattgcagaacgaaattcaagctcaactgctggcacttgagtctgtcagaacggaatatgctaatgcccagctagaatgcaatgctgcagatgagagggccaaagttcttgcagcagaagtcattctacttgaagataaggctcttagactgaggtcaagtgagttaaagcttgaaaaggaaattgagggtttgagctctgagatttcttcatacaggcgcaaagtttctagtctagagaaggagcgtcaacatcttcaatctactgttgaggctcttcaagaagaaaagaaactcctacactctaaatngaggaatacttctgtgactgagaaggtcaatattatagaaaaaccttcagctgataaaagagatgcatcaactgcaacagaagatctagata

SEQ ID NO: 390562 - DNA, 527 bp, Oryza sativa
  unsure (1)..(527): unsure at all n locations
gccaactggtatatggcttgtttcgattggagtagtaaagtggacaagtcagagattaagcagcaggcattcattggatccaattttatcacatggcagcactttgggcctgtatgaggtgctgattggaaaaccttatatctgtgacatgnttacagattctgtggtgcactgcttcttcattgaagctgaaaagatagagcaattgcgtcaatcagggccttctattgagatttttctgtggcaggaaagtgctctagtcgttgccaggcttttgctccctatgatgtttgagaaaatggcaacacatgagctcagggttctcatcactgaaagatctactatgaacatctacattaagggcgaagaaattgaacttgacagaatttattggcatttactggaggattttgagaccaaaccaaacttgacacactcaggtactgtccacaaagccactgactattggctagtatagtataaccgatgctacgatcagaccagtatagggggtaagcagattgtcg

SEQ ID NO: 390563 - DNA, 452 bp, Oryza sativa
  unsure (1)..(452): unsure at all n locations
caacgccggcaacaagatccgcaacgccgagactggttcttcttggagatgtgggcgcaggaaaatctagcttggtgcttcgttttgtaaaaggacagtttgttgagtttcaggaatcgacaattggagcggcatttttctcacagaccttagcagttaatgacgaaaccgtgaagtttgaaatctgggatacagctgggcaggagagatatcacagcttggctcccatgtactataggggtgcggctgctgccatagttgtctatgacatcacgaatccggcctctttcacccgtgcaaagaaatgggttcaagaacttcaagctcaaggtaactcgagtacagtggtggctcttgctggcaacaaagccgatttgctagagactangcaggtgcanatagaggaagcaaagacatatgcacaggagaatgggcttttcttcatggaaaca

SEQ ID NO: 390564 - DNA, 634 bp, Oryza sativa
acgcgtgggcgacaccaccgccgtcagcgacacaacagggcggtgacgcgcaaggcgcggcccgacgccgacgacgctcgcaccgcgccgatgtcgtgccgctcgccggacacgccgacgtccaacggcggcaagccgtcgtcgtcggacaaggagaagggcgccgcggaagacgtgttcgactcgccgcccctgcgcgatatcgacatggaggcggagcagagcgcgatgcagcggcagatcatggagatgtacatgaagagcatgcagcagttcaccgaatcgctgtccaagatgaagctgccgatggagctcgacggcgacaatggcgtcgtcgtccagaaggaggagaagccggaggcagaggtgaagctgcagcccaagaaggatggtgcaagggtgttctacggaagcagagctttcttcttgaacaaaaagcatacaaaaaaaaattgcagagagaaacaaattaagatgatctcttcttgcaattgcaaaaggtatatctctgcaattctttggcacaaaattcagtgtgcagttagagaaataggttttgcttgttaattgttaacttaattcgttcatcaaaagtgtaaactaaaatctatttccgagagagagtaacagatgg

SEQ ID NO: 390565 - DNA, 378 bp, Oryza sativa
  unsure (1)..(378): unsure at all n locations
ccacgcgtccgcccacgcgtccgctcgagctcgcgagcggcgagcccaaaacctgacaaaccacacgcccacctcgccatggcgcggcacctcgcgccaccaggaagcttccaccgcctcctcgcctcccggcactacccgccttcctccccggcaccgccgccgcgccctctccttctcctccccaaaaccctaataccgccggccgccgccgcaatggaattcccttcgccgcgggcggcgcgacgtcgccgccccctccgccccggcatcctcctcgccggagaccgaggtagcgccgggggcctgggggaaggtctccgccgtgctcttcgacatggaacggcgtgctctgcaacagnncgaaggagctctcgc

SEQ ID NO: 390566 - DNA, 447 bp, Oryza sativa
gaatcaaataatgccaccagcttttctgtcctgttggatgacgattccagcatacctttttcacttaaagacattgcgaagtcgatgccaaccattgaggagacgacagagaatgacctgctaccttttgtccgtgaaaaccaaagctttgcgtttatattgcacaggagagattgagtggttccctcttcacagatcattcaccggctatgtgaaaaaggagcgcctctgtgtagcgtggatattacacgttattcatgttgtagactagtaacccatttaggaatcaagagcaattgcagctgagggtttctaggcctctctggtttgaatggttggttaagcaaactgtacatgttttatctgcagtgtgtataacacacgttattcatgttgtagactagtgacccatttatgaattaagagcaattggacctgacgttttct

SEQ ID NO: 390567 - DNA, 1728 bp, Oryza sativa
  unsure (1)..(1728): unsure at all n locations
ccgctccagggcaacacgggaggcgacccgaagccgccccgccgccggccttctctccctcgcctcccccacctcgccgccgcctgagcagccgccggcaaagccgaacggcggcaaggacggcggcggcggggccttctaccccctccaacaccctgcggttggggccccgacgggaaacaggcggaggggcggcgacgcgtcgaggcggctccggcgacgcgacggccagaggcagcagagccagcgtcgctgttagcggatctggccccctcgcagccagatcgggacgaagtggcgccggccgcgctgcatcaggacgaggcgctggctggggcagtcgtggcgccggcggagaaggccgctggatggggcagtcgcggcgcgggcggaggcgacgtcgctggcggcggggacgaggcagcgagcctgggcgccgctggatctggctctcccaggccggatccaacgcccgcagctgggccacgaaggaggccggctccggggcggcggcggcggcgatgacgacgagacggcggaggcggcgctgacggcgggagaggcatgggcctggctacgcacagcgcctccggctatggctccccctatttcgacaccggctcccccagtccggatttggcctctctggcgagggaggccggatcccctccggtggctcctcagctgtggacgacgcgacaagggcagcggtcagagggcagcaggaggcgtgggtggccgcggcaggagggcgagtgctgcggctggtctggcgatctgccagagctgtgggtgatggcctaggactgattgctaaagggacgatgcagccgaccggcgacgatcattcttgcgcgaattgggtgtgtgggtttggacgggaaatcgctggcgaaagcttcgccgtgccattggccggctgacgacggcggcgcctttgggtcgttcccctccttggaggcgtcgttctggcgttgatccctctcctttccctaccgttctccgagtgaaaacctggctccggcttccggacgagcggtgacggagatccacgtcgtgtcctccttggaggcaccgctttggagaaacattttcgtgcaaggatgtagttaatggtctatgcattggcttcgaagcttttcagtacttggttttgatgaggccttcgctgtctagtcccactttttgttttgcggcgggcaatcttcgctccttgcttgtgtttgctaggtgaagtcggagctgcttcgtagggtgacgaagctgggcaacgatgacacgttgcattctctttctaggggttttgtttgttggccgtgaataggttgtggcgtttagacggctttggctgaagttcttcgtgggaagttgaagccacttgaaccattgacagcgagttaggtatggatgatgcaaccgatttgaagtcggagctgactgtgtccctaggcggcaagctcggcaacaatgacccggttgcaaggtcggaaccccctttgccgtcttggtcaagacttggtaaacgaacgttctatgttgggctcccgtcaagtggttttctgttgttagtgaagttgtggcgtgtgcggtgcagctattcagccagccggtagttgttttttcttttcttgtaacccgtctagggtttttactcctgcttattgaaaatataattggcagttctcctgccggtttagtttcnnnnnnnnnnnnnnnnnnnnnnnnnnn

SEQ ID NO: 390568 - DNA, 655 bp, Oryza sativa
aaaacccaagctttgcttctgcgccggccgccccaccacctccggtccatctcggccgccgccgctgtcgctgtcgcgatcgcgatccccgcctagatagacttccccaagaacccgccgccgccgctgcaggggtggcgtggcatcgcgggagaccagctcgagccttcagcctcttttgcgccgccgccgccgccgccggtcgatccgtgttcttggctcaggcggcgtcaatggcggcggcgaatgggagcgcctgcggcggaggcggcgtggacaaggagaaggaggagttcaagcagatctacggggtgctcaaggaggagctgctcagggaccccgccttcgagttcaccgactcgtcgcggcagtggatcgatcgcatgttggactacaatgtacctggagggaagtgcaatcgtggtctctctgtggtcgatagctataagctgttgaagggcaccaatgttctaagtcaggaagacatgtttctcgcgagcactcttggttggtgcgttgaatggcttcaagcttactttctcgtgcttgatgatatcatggatgattctaacactcgacgtggtcagccttgttggtttcggcagcctcaggttggctccattgctttcaaggttggaattttccttccgaacct

SEQ ID NO: 390569 - DNA, 607 bp, Oryza sativa
tccgcattcccggtcgaccacgcgtccgcaatgaattctcccggatgcaatttaccggaccacagctcttttattgcaaaacagaaagacatcttccaactgcagttcatgattcaattccctcagaggtgcaggttaatggatcaaattgagctggtcgagctagattttatattgaatacagtgaagctaagaaatctgagggacacaagatggcatcatcagatactcaaatgttcccgcctatcactgaaatatgaaaaatgagggtatcttccaactgcagttcatgattcaattacctctgagcagctggttaatggagcagatagtcatgcatgaaataacaagggatggatagatggtctcatctatccctgcaatatgaaaaatgaatgtttgagatgcaatgcgaaactgtatttttttgctttactgagtgaagcacctgagtcgcgatcacttggacaaaagcagaacatgactgacccttttctgagtgatgttgataagggatttacctaagctgtatgcagtcactgttgatgggtcgtataagctgcatggtggccagaagggttacttgcagaaccatgggtaacattta

SEQ ID NO: 390570 - DNA, 775 bp, Oryza sativa
  unsure (1)..(775): unsure at all n locations
ggacntgnccnnaattccagactccccccgcagccgcatcgccaacgccatagccgccgaggttgaggtgagccaccgagaggggagagagagcgcgccgagatgtccggcgaggaggaggagaacgcggcggagctcaagatcggggaagagttcttgaaggccaagtgcctgatgaactgcgaggtggcgataatcctggagcacaagtacgagcagatccagcacatgtcggacggggacccgtcgtcgcaggtgtcgcaggtgttcgagaaatcgctgcagtacgtgaagcggttcagccggtacaagaacccggacgcggtgaggcaggtgagggagacgctgagccgctacggcctcgccgagttcgagctctgcaccctcggcaacctctgtcccgacaccagcgacgaggcctgcgccctcgtgccctccctccgctccggcggcaggttcgtcggcgaccccggcagcgagaagatcgacaagatgctcaagcgacctctcccgtatcaacaagttcgagtagtagggctgtagcttatcacatttgctggtgaactgtctaattaatatgtgtgttatcttcttgagagaaggtgaatcataattagggctcatttgatttgaatgctcgtttaggttggtgcgctatcaaagcgatccaaagttctggtgtgtataagtgtatcaccttcaggaggaatgtagtgagatcatgaaaaccgagattaagtcaatatctatctagtgtcgtttgcaaacacaaaaa

SEQ ID NO: 390571 - DNA, 535 bp, Oryza sativa
gtccgcggacgcgtggggccagtcagtgctcgagtgcgtctcgctctccgcatccgcaactagggtttccccccaagcaagtcgcagatggaggcgccggcgatggagcccggcgagatggaagcgatgctccgggcggcagcggagttcgcgtcctacccaggagcgcatggtgatgacaccgtgaggcagttcctggagcaataccctctgcccaagctgttaggtgcattgcagagtgaggctgatgtacctgggatggatgaaactattgccgcatgcttggacaaagtattttcttcgagatatggagcatcatttctgccaagctatggtgcatttattcaagctggattgcttgcaaactcgaagaataccagacaactagcctgcaaagctgtgatacatcttcttgataaggctggagatagtgctggtgttgtggacacatttgttcagcacaatctatatcctcttctgatgaattgtttaactgagggagatgaggagatttcagcaatttctctggatggat

SEQ ID NO: 390572 - DNA, 503 bp, Oryza sativa
tcgggtcgacgctgtcgagtaccggagtaggggagctcgccggagtaagctcttctcaggctgtgcgggggtggcggagggcggcgcggcgcggcgagggggcatggacacgatgaggggggcgctggagcgggcgaggatgctggtggggatggaggtggacgaggagtcggcgccggaggagcagtccttcttcgacgacgtcacccgcaactgcgccctcaccaccacccagaggctgtacggcttcgcgatatgcttggctgccggattgacgtgcaccttcttgtcaatgcttgttttcttcaatcctgtgaaaattcggggtaaccattcaccccttggcaaatttgatggcacttggaagtacagcgtttcttataggtcccaaaaggcaatttgacatgatgcttgattctgggcggatatatgcaactggtggatacattgcaagcatcataattgctctgttctgtgctctctttgtgcacagaaggctgctg

SEQ ID NO: 390573 - DNA, 563 bp, Oryza sativa
ccacgcgtccggatatggacttggctgccatgcttgaaagggatgtcctggattctaccccaggtgttagatgggatgatgtcgcaggtcttagtgaggccaaaagacttcttgaagaagcagttgtacttcctctctggatgcctgaatatttccagggtattcgccgaccttggaaaggggttctaatgtttggtccacctggtactggaaagactcttttagcgaaggcagtagctacagaatgtggcacaacatttttcaatgtttcttcagcaactctggcttctaaatggcggggagagagtgagcgcatggtccgctgtttatttgatcttgcaaggttctatgctccaagtacaatcttcattgatgaaattgactccctctgcacatctcgtggagcttctggtgagcatgagtcatcaaggaggttgaagtctgaacttctagttcaaatagacggtgtaaataatagttctaccactgaagatggtcaaccaaaatagttatggttctggcagctaccaactttccatgggatattgatgaagcactgagac

SEQ ID NO: 390574 - DNA, 844 bp, Oryza sativa
  unsure (1)..(844): unsure at all n locations
ccacgcgtccggtgataattttgttctcttcttgttggggtcttggggaaaggagcaaggaggaggaggagaccaagaacacggagtgaaagggagagggttctgttcttgcttcttaggccatatggagatccagcagcagaagggggttggcaattccaaagttgtgaaggttgagaaggaggagtcatgggatctgttcgtcaatcaagcaagcaacgaaggccaccctgttgttgcccactttggggcttcatggtgtgtgacttcgctgtccatgaactacaagtttgaggagctagctcagacacaccctgagatactgttcctctatgtggatgttgatgatgtccagagtgtttcgtccaagcttggagtgaaggccatgccgacattttttctcatcaaggacaaggaggtggtgaacaagattgttggtgccaacccagatgaggtcaagaagatggtggacgcttctgctgagtcctttggagttactgctcctcctgatatagtggtggaatagatatatagatgttgcctttatcttcagaaacttctctgtgaccgtgggtgcttcttggtcaggtccggaaaaatgcgtccatgtgtacattctagctttgctcctgtgactctgaatggtgtccctttgaactgataggcttgtgccttgcggtagtttgttctgcaggctgcagctgtggctttaccatgctctatgaaatttacttacatgtgtttccagttgaaaaatatgtggttcagncttcngngtttngnctnnnnnnnnnnnnnnnnnnnnnnnnnnnnnnnnnnnnnnnnnnnnnnnnnnnnnnnnnnn

SEQ ID NO: 390575 - DNA, 1174 bp, Oryza sativa
ctttgccacagggaacaatacatacctatcggttgcaacagctccggggatggcaaagcatgctggagcatactggctcgatagtccgaattatggagtttttacctgggatgacaagcttccaggagctcaggttcttctgagcaggttgcggcttttcctaagtcctggatatccttacgaagaaatactgagaacatttcacatccaaacagacaatgttatgtgctcgtatctgccgatgtacaattcattcaactttaccaaaggaggaatgatacagctcaaccacggaaggcctcagccacttcagtatgttgtcaatgcggctttccttgcctctctatacagcgattacctggatgctgcagatacacctgggtggtattgtggacctactttctacactacagaagtcctccgcaaatttgcaaggtcacagctcgattatgtcctaggtaagaacccactgaagatgagctacgttgtgggttttggaaacaagtaccccaagcgcgctcatcacagaggtgcatcaatccctcataatggtgtcaaatatggatgcaaaggaggctttaaatggagggagactaagaagccaaatcctaatatccttattggagcactggttgctggccctgataggcatgatggcttcaaagatgtccgtacaaactacaattacacggagcctactcttgcagcaaatgctggcctggtggcagccttgattttccctaactaacattcacggtcaaaaagtggaatcgataagaacaccatcttctctgcagttcctccgatgtttccaactcccccacctccaccgtcagcttggaaaccatgaagagtcagatcgctgaatatttcttgagcatcaaacggagggaacgacagatgtttgtttggtacagcaaaggacacatacagaaagcagacaacataagcttacagagcctctattttctgtatcagtatgacagatcggtataaattcatctgtcgacaatagaaccgggatgttgtgtgcaccttgtgaaactaatttttggggtccttgttgttattcgttcagagctcatgtgtgaagttctttttgtaaaaatggaacctttataaaccgttttataggagtgactttatcatcatactaaaaaaaaaaaaaaaaaaa

SEQ ID NO: 390576 - DNA, 724 bp, Oryza sativa
  unsure (1)..(724): unsure at all n locations
ctataggncgaattgggtaccggccccccctcgaggtcgacccacgcgtccgcccacgcgtccgcacagagagaggtcgagagatggcgacaaataggatggcagtggcgatcatggtgcagttgctggcaacggcggcggcggcggcggcgaagtcgtcggagccggcccttaccggcagcagtatctccgccgccgacgacgacctggcgtcgaaggtggggataaggaggctccttcaggacggcggcgactgcatccctaactacaatgtttgctgcagcaactgcggctggccgttcgaacggaccaattgctgcgacccggacaactacgtgtgccagtactggccggaaatggatccagcacatggccaggactggtgcattcctcgcaattactggagtacttcctccccataatgtttgttcagttttatatcttcacaatttgatttttttttgaagagagagtaagccttaaggccatggaaaacggtccgttctgttaacgtgatcgcccgaatcaaaactccatttttagctaataattggccgtatcccatttaatcgtctgaataatcattcacatgttatacttgatgggtagtatttgggaccttttttagtattatttttttctacatattttgttttacttattcaatataatataacaaaacatgtcgctgtttggtgnnnnnnnnnnnnnnnnnnnnnnnnnn

SEQ ID NO: 390577 - DNA, 971 bp, Oryza sativa
  unsure (1)..(971): unsure at all n locations
acattttttgtcattcgtcaagttcttgtccgtagagagcttgatctttctgccaaagagttgcaggaacaagtgagaagtggtgatgcaagtgctactgagtattttgagcttggagcagtcatgctacggagaaaattttaccctgctgctatcaaatatctacagcaagcaatccaaaaatgggatagggatgagcaagatcttgcacaggtatacaatgccctgggagtcagctacaagcgagataacaaacttgacaagtcgatccagcaatttgagaaggctgttgagcttcagccaggctatgtgacagcttggaacaacctcggggacgcatatgagcaaaagaaagatctgaagtctgcgctcaaggcattcgaggaggtactcctatttgatccaaacaacacggtcgccaggccacgccgagatgacctaaagcagcgtgtgggcatgtacaagggagtcccagtgaagtcagaaaaacgataggtcctgtgagtatgtgttaaggggggcgcgcttgtgtgtgttagtgtggtgtgcatttgtgcataattgtgcgcgcaacatgtaattggggaaaagtagaaaagcagtaggctcagatctcaaatttgtgcaaaatctttgtttcctcaattttgaacggtagtatatgttttaattagcaacggctagctgcgtaggataactaaggatgtacatggttgacaagcctaacattattactacgttcatttatcaacaatcgcatggatttaagagtttgcacaagacaaaaaaaaannnnnnnnnnnnnnnnnnnnnnnnnnnnnnnnnnnnnnnnnnnnnnnnnnnnnnnnnnnnnnnnnnnnnnnnnnnnnnnnnnnnnnnnnnnnnnnnnnnnnnnnnnnnnnnnnnnnnnnnnnnnnnnnnnnnnnnnnnnnnnnnnnnnnnnnnnnnnnnnnnnnnnnnnnnnnnnnnnn

SEQ ID NO: 390578 - DNA, 784 bp, Oryza sativa
ccacgcgtccggctcctcgcccccgcccccgcagcagcaggcctcctccgaagatgacaaggagaagccaacccatctgaggtttctggtatcaaacacggcagcaggatgcattattggcaagggtggatcaaccattaatgaatttcagtcccagtctggggctcgtattcagctatcgcgtagccatgagttcttccctggtacaaatgacagaattatcatggtttctggtctgtttgatgaagtaataaaggccatggagctgattctcgagaagcttttagctgagggggaagaaagcaatgaagctgaagctagacctaaagttagacttgtagttcctaacagttcttgtggtggaatcattggtaaaggagggtcaacaatcaagtcattcattgaagactcacatgctggaatcaagatttcaccacaggataacaattttgttggtttgcatgatagactcgttactgtcacaggacccttggaccatcagatgcgtgcaatatatttgatattaagcaagttatcggaggacgttcactacccacctaatctgagttccccatttccatatgcaggccttggtttccctagttaccctggtgttcctgttgggtatatgatcccacaggtgccgtataataatgctgtgaactatggacctaatgggtatggaggaaggtaccaaaacaacaagcccagtacacctatgagatcacctgctaacaatgatgcccaagattctctcactattgttattgcttgtgaacatatt

SEQ ID NO: 390579 - DNA, 434 bp, Oryza sativa
gcaaattctgcatcatataatagctgtaccgttaattgtcatgaagaaagctggggctcgaatgagggttgcagtctgttggacatttataatcctgatgatgctttctctttcctattggatacgccctctgagtttctgggtagttttactgcattatatgatgaagttgtaccaattgattcattggtgaatataagtggccgatgtggagtattcccacttactgagagcactacagaagccagtattggtaatgagccatgcagatctgagggggatatgctatttagtaactcagaggtgttagagtggctcaatccacatctggctgaggaggatttgcctaatctcgttgattttactgagctgaactcacatgctgtatcaaaggagcaaggtgccaggaaggtcactcttgtacttgatttgga

SEQ ID NO: 390580 - DNA, 617 bp, Oryza sativa
  unsure (1)..(617): unsure at all n locations
ccacgcgtccgcccacgcgtccgcggacgcgtgggctgggatcaacatagtctgcacaatgaaaaccactagcggaactgatccagaaacagatggagatggaagctcagaagcaggtgcaaacagatcattgcattaccatgcatcgcttggccatgttagcattcgaaacactgaagaaacagagttccctccagcaagatcatgggtgacggaaggcgattacatctcctggtcgaatggttcagatgaatctaaacttgcaagcctgaaaatcagttgggaacttgaaaataaacagcaggcaccattcatgaagtacaatgtctatgttgagaagttaactgcagactcaaatgcaaaggctcccagaattttccttggagttgccagcgtacaagtcttctatgtatctgacctagaggtccccagcgaagtcactgctctgaaatttttcattcaaccgtgtgggcgtgatgggagttgccaaggnctgcacgaatgcccaaagttccatttggttcctgttgattctgccatgtaacatttatctgcctaccttgctgttttcagtactctatgttttcacatcatttatcacggtatatgtttataaa

SEQ ID NO: 390581 - DNA, 471 bp, Oryza sativa
ccacgcgtccgggatcggctcgtcttcccccctcttctttggttggcttcgtctccgcgcactcacacaccaccaccaaaggggaacggaagcgaacccctcctccgccgccgccgccggagatcgcccgctgtcccgccaatccgccgctgcggcctctggttgtcgtcgcgaagccggcgcctgcgctcagctgggatggcgtcgagtggagatccatcggcagtcgtcgtgcctaggaacttcagactgctagaagagcttgagagaggggagaagggcatcggtgatggatcagtaagctatggaatggatgatgcagacgatatctacatgcgctcttggacaggcacaattattggtccccataacactgtccatgagggccggatataccaactgaagcttttctgcgacaaggactacccagacaggccaccaactgtaaaatttcactcaagaatcaacatg

SEQ ID NO: 390582 - DNA, 627 bp, Oryza sativa
  unsure (1)..(627): unsure at all n locations
ccacgcgtccggatagatagaaagatagatagtccagccagaaaggtgccgtcgcctgtctgtctggtccaagaaacagaaacgttcgtgtcgccgtataagttgcagaactcgtcgatctccagtgtataagcgaatcagtttgtggtttgttccgggaggaagaacagaggaccggaagggttggctgcgatggccggagggaaggcggtgtactcgttccaggaggtgagcaagcacaacgaccggaaggattgctggctcatcatcgccggcaaggtgtacgacgtgtcgccgttcatggaggagcaccccggcggcgacgaggtcctgctggcgtgcaccggcaaggacgcgaccgcggatttcaacgacatcgggcacacggcgacggcgaaggagctgatgccgcagtactgcatcggcgaggtcgacgcctccacggtcccggccaagccggcctaccgcgtcgtctccgaggacgcgagcgccaagccggatgncgcgagccagggcgcctggctcacggcgctgcagctcgccgtgccggttgtgctgctggggctggcctacgcgctccaggacttcgccaagaccaagacggcgtagggctagggcggctctgcn

SEQ ID NO: 390583 - DNA, 402 bp, Oryza sativa
gcacgagggccggccacccggctccggcaagaagaagcagttcgaagccctaggctcatggggcatcgtcttcactcctcacatcctcaccgtcaaggccggcgaggatgttgcttcaaaaattatggccttctcacagcaaggccctcgcacggccggcattctctcagcgaatggtgcaataagcaatgtaacacttcggcagccagctacatctggtggacttgtgacttatgagggccgatttgagatcatctctctatcaggttctttcctgcttgcagaggatggcgacactcgcagcaggactggtggcctgagtgtcgcacttgcaggatctgatggccgagttcttggtggatgtgtagctggaatcctgatggccgaacccctttccaggtt

SEQ ID NO: 390584 - DNA, 534 bp, Oryza sativa
  unsure (1)..(534): unsure at all n locations
ttgggaannaccatcncnggagatagganggnaacatctccggagagcaaagngaagagtgggattantaaagggaaaatgggaaaatntaaggatataagtacaacnaaaaaccagggtacnngaaggtcccattggaagactgaagtgcatgaccggagagtggcctaccagataagtccatcaaatgatactttgctgggttaaacctggttcaagtatgcttctgctgcctgtgggatggtctgcattgaaaaattggactgcactgtaggtagtgtagtttaagtgatgctttaggttagatcatcgatagcatctatctgtgctcacacaattgccaatgttagtgtttcgaggtcgatgactcgttgatagaaattattttcttctaatgtatggacgggacaattgattgttcgtgacggcttgtatagtatagtaatggtggtcgagctagtgaaaggcaaagctacatgccactatgctagagattctggcgaagttcatggagtaaaaaaaaaaaaaaaaaaa

SEQ ID NO: 390585 - DNA, 595 bp, Oryza sativa
atttcctgactggcaaacatctgcattatgtgatggactgcacttcaccccattgggaaacaaaattttgtttgactgtgtgctggagacactggaaagcattggtttcagccaagggagtcttcaaccagatcttcctctcttccatgatatcgacccaaaggaccctttgaaagcctttgaaatctgaagaaggtcccggccggcatggtttgttcaggcacggatactcgttgtaacagggacacccgcggccgccctcgcgtcccagctgtatgtgcttgaattttccattataagatggttgaatttccatgtagaacataataaatggtttgtatttccatgtagaacataataaatagtcatacaattccatgggtcacatttaaaaagaaagggaaatttattttggatcttccaatatagaagctaaaagaattttccagaaaagaaaaggaacatattaaagcttttttcttctttttaaacaaatacgcacacaccagccatgttcatgcctaaaaaataaaaatattccatcttaaattatatatcaccttctatcatttgattttaaataattatttttttt

SEQ ID NO: 390586 - DNA, 513 bp, Oryza sativa
ccacgcgtccgaattttgctagttgttttgctgactttatcggcccttttagtactgattgtctggagaaagaaatttagaggtcaagcggcatatagacctgtggattcagcagttcctgagcaagagctccaaccgctataatttggagtggttcaacggagtaaacatataggcgattctttggtagaaataccgttgtgcgggctgccatgttgcagcgggttcacatcccccgctgggagttgccctttttctttgtatgtaacccaagctacaagcttacagaagaagcccaagattccatagcttctcgattcagcacttagagcctctgttcataaactgtctagcgattcagatcaagagcttcctcttgtagcttacagtaaaagaaggttttgttcgtgtaatgtagattaagtagaatagagcaaggtacaaaagcgcagcagccatggacggaatgttgtattatctagtatctgataagtgctgaggatattcggcttc

SEQ ID NO: 390587 - DNA, 775 bp, Oryza sativa
  unsure (1)..(775): unsure at all n locations
ccacgcgtcggagccgaatccgaggagaagagagagaaagcgcgtggccggcggcgagaggagcggcggcgatgggcggcggcgggcacggcggcggcacgacgtacaaggggtacaccatcccccacaacaagcgctggcacaccgtcgccggcaagggcctctgcgccgtcatgtggttttgggttttctacagggctaagcaggacggtgctgttctcttgggcatgcgtcatccttgggatggtcatgatgatcactcacatggtcatgggcatgagcatgagggatcatcatcaacatcgtcgtctcactaaatcaactgcttcttggcggctgagggagactcgctgctttggttgtcgcgatgaaatcctcgaagataataaagtttcacactattaattttattaagatgggttcatgttgttggcaactgttttaaggcaaactggttatgtatcttgcttttgagatagcctccctggtggaatgtgtggctggagaggaataaaagaaatttcaggatgatcaccagcaggaagaacgggtggtggccttggtgattcagaacatgaatgaaagagtgtttacgattaataatttcatagggtaattcactcttttatgcacgctgtgaaagttgtataattctgggtttgtaatcatttgaaactgtcataaacacttctttttctttcctgcttaatataagaacaggcagagctctacagttgttgctccnnnnnnnnnnnnnnnnnnnnnnnnnnnnnnn

SEQ ID NO: 390588 - DNA, 533 bp, Oryza sativa
  unsure (1)..(533): unsure at all n locations
ccacgcgtccgggagaagcttccctttctgaaggtggtggtggaccaaccgaaaatcaagactgtcctacaggcttacctcccgcagcttgcacttattgttttccttgctttgctgcctagtcttctaatgttcctctcaaagctggaggggattccttcacagggtcatacagttagggcagcagcagggaagtacttctacttcattgtgttcaatgtcttccttggggttactattagttccacattgttcagtgctttgacaaccataatcaataaccctcctgggattgtgaacatgcttgccagcagccttccaggaagtgcaactttcttccttacatttgttgcactgaaattctttgttggttatgggcttgagctctctcgcttggtccctcttatcattttccaccttgaagaggaagtacctatgcaagaccgaggatgaagtgagagcagcttggggctccaggcgacctaggatataacacnaggggttcgaaatgacatgntcatagttacaaatag

SEQ ID NO: 390589 - DNA, 718 bp, Oryza sativa
  unsure (1)..(718): unsure at all n locations
catttgaagctctttatccccgagttatgtcttacatgttattgggggactttgatgatgcaaaagaaggtttttgagagatgatagctgtcgaccaagtcctcagagcctgatgctacagctgcccttaataaacttaaacaaacaattcaggaaactgaaaagaaaagcgaggaagcagttcaaagggctgttcgacaagaagccaggcgagatttccgaagtaggtgtaggagagccagagggcaacaagactgacacgacaggctcaggcgaggcagcgtcaactgctgacagagacacggatgcaaaggaggctattccccgtgcagattcagggttggccttcgaggaagagaggcccggacttctcgcccgcatctggccttcagcgagtcggatcttctcctcgcttgggctcaacaggtgcacaatcctctgatgcaccaccagtattcaaaccactacaaacagcagccagaaaagtcgcccagcaaagccctggaacgcattacacacgcaaaattatcaccttggatatatatctctaaaaattatactccattacatggtgtaggctgatgacctataaatgaggtaggcgtagtagtaacgagttagttaaggacatacggagtattactgtggaaatgcatttgtgcctgccatgataagaatcactaccacnnnnnnnnnnnnnnnnnnnnnnnnnnnnnnn

SEQ ID NO: 390590 - DNA, 348 bp, Oryza sativa
cgcaattcgttcggaatgcaaggagtgagcgtaaactatagaaaaccgaagcaaaagcttgcacagttgtcgacatctggaaatgttcttggaagagttacggagccatcaaatttcgcagcacccggccagagagaatcccatgattggacgagtacgtcgagcacaagacctactcaaccagtcagaaacagcgcagctactgttgcccagggtaccttagatgctccattggcaaatttgcctgcaatagatccaatggacatcttggacgtgcctgaaagtaacgacatcagttcgtgggttactgatgggcttgatgattccttacaagattttgacttcttc

SEQ ID NO: 390591 - DNA, 1066 bp, Oryza sativa
  unsure (1)..(1066): unsure at all n locations
accataaagttgctgcaggcatacacacataatacattagttaacacagagttggtcgccagcaagaatattgtaacatgcatgatctagctggatggaacttccagtcacgaaagtaaatcatctcagttttttcacagcgccaataagttagaacaagatgtgaaaaaaactgagcaaaagaaaaaaaatcgatgtagtagctaatttcccacgtgcccccccaggccgcaggcagtgggtttggcccaccagttccggtcgttcccgcagggaacatccatgaccgtccagtcagtgaagagcaagaaggaagaggaagctgacaagcagcagcagcagcccgctgccaatgccagcggcagcaacagctctgccttcgtgaaggtcagcatggacggggcaccctacctgcgcaaggtggacctgaagatgtacaacagctacaaggacctctcccttgctctgcagaagatgttcggcaccttcaccgcaactgggaacaatatgaatgaggtgaatggctctgatgctgttacaacttatgaagacaaggatggtgactggatgcttgttggagatgtccccgtggcagatgtttgtcgagtcatgcaaacgcttgaggatcatgaagggttccgaagccattggtcttgcaccaagagcaaaggacaagtacaagaacaagagctgaaaatgttgcagtattaagatgctgagcatggtgccataagaatggtgttcttgcagtgtgttatggtttccttagaaatataaggttttacttgtttagctggattaaaagaaggaagagttgtcatgtttaatttgtttatggaccagaagcaataatctatttgtgtgtagctggattggtgttatgtgatgtcccctaccgtgtgtcccaagatctacttgatgattttattccaatgttgttaatttaagtttgtgtgattgtgaagtaaagggtatcaatgagactattattattatggtatctggtaagttaacatgtttgttaatcatcagcaaaaaaaannnnnnnnnnnnnnnnnnnnnnnnn

SEQ ID NO: 390592 - DNA, 969 bp, Oryza sativa
  unsure (1)..(969): unsure at all n locations
tcgacccacgcgtacgattgacaaattacaatctcttaaaggcatggcagcggatgagggtcttattaatcacgatgttctcagccatgtacatcagtgttgtccacatcttctggagttgaacgtgtttgctctttatgtcgacgaagagatggcttcaatcatttgcaactcccttccacgtctgaagaagcttgagataccaaactctgatatgtcttgtgctgcaataataaaattccttgattgcctagaggagcttgagtacttggacatatctggttatgagacttcggcaatatcaagtgctgtgctccaaaaagcttctcggctgaacatcttcatctggaactcaaaatttgagcttggggagttcacggactgttcgaattgtggtgaacattgcattaatcctcaagagccttgtaagtgcgtgatggagcacagagtcatggactggctggctggaccttcacaaccttcctgatgcagtaaactgtgacttaagttaaattgacaatcctacctgctcgtcaaatttcaacatttgtctgggttacttgtcaatcaaatggtgggtaaggtggtaccacgctttgatgtgccttatgtggcactttattttggagtttaatatgtatgtgatatcccgatttccagcattttattgtcaatgatgtcttgtgagaacgaaagcaacgcacgctacatggtgcagtgttgagccttgttttacaataaattttaagtcgttgcagtctcttgggcctgagcgagctggcaaacgcatggctgttaggctgttccgcctgtgcagagtactctgctttgtactcttttgttaagcaaaagatgccctgtgtttcctcgagaggcatttacgttggagatctccatgattgcactctttttttttaagttcttttactgtggtctgtggcgtgtgggcttctgccnnnnnnnngggnt

SEQ ID NO: 390593 - DNA, 522 bp, Oryza sativa
ccacgcgtccgggtagaacagcattacagtatgctattgacagtggagctattgacgccgaagagattcttgttttgttagaagacccaagtagataatccattagctgccaataccccttcagttcagcagagcgaagctttgtgtgctcagttgcctccatgagagagtcatccggcacagcaagctccaagtttgtgtcgccgatgatcacaatctgtgaccagaacagtattggtgttctggagctgcattgtgccctcctcgttttccgggtctcgtcttagcgtgacgaatgaccagaccccaatttccgtctgggtacaggtagagaagctcttttggtctttctttttcccctgtttgctgatgatgcactgtgagttttgtacattgccattggccccatactccccaacatgaaggtgagcaccttctgatgacagatgatgatgtacatatagtgatcccatgtaccactatgatttttcctgcaagcattactagtttggtgaacatgac

SEQ ID NO: 390594 - DNA, 812 bp, Oryza sativa
atggcacaaaagatgaggtgtcagttcacagtgttaggttgccaaagaacagcactgtcggtgatgtgctaaatgatataaaatcaaaggttgagctgtctcatcctaatgctgagcttagactacttgaggttttctatcacaagatatacaagatttttgcaccgaatgaaaagatagaaaacatcaatgatcagtactggaccctgcgtgcagaggaggttccggaggaagagaaaaatcttggtccttttgatcgcttgattcatgtataccattttaccaaagacactcaaaatcagacgcaagttcagaactttggagaacctttctttatggttattcgtgaggatgaaaccctttcttctattaaagaacggatacagaaaaaactaaaagttccagatgaggatttctcaaagtggaaatttgcctacatatcacttggtcgcccagattattttgaggattcagacactgtagcttcaagatttcagcgaaacatgtatggagcttgggagcaatatcttggactggagcatccagacacggctcctagaaagacacacaacgctaatcagaaccgccattcatttgagagacctgtaaagatctataactagacttgagaaatttgagtgacgtgccgccatccaacaccaagcaagggcctgaaaagtgctggcttgaataaattgtgtaccataattgatggtaggacgggttgctcaggtttttcgatggagctagaaagcatgcatggtgtttcctgaggagacgttttttagatctgaggcagtttctcatctttc

SEQ ID NO: 390595 - DNA, 707 bp, Oryza sativa
  unsure (1)..(707): unsure at all n locations
cggacgggatggcgnacgcgtgggcaagaggaagaggaaggaaggaagctagggttagctagctgtgcatggaggagcctggccctgaggaagagaaggaggaggaggaggcgcgcttcgacttcctcgagtggatcggcccggacacctccgccgccgttttcaccttcctagaccaccccgctgatctcgcccgcgcctccgccgtctcccgttcctggcgccgattcgttgttcggaatggcttcagcaagatccaatgcctgcgcctttgccctgaagcttcaaacttcacccgtattattaccaaacaagccattgcctctgcttctgagtcggatgcggagcaccagcacagggcgtacatgcatctcaagctatgcccttctcttggatgacccccaggactgcatcatccgctgcatcggtgcctccaccaccgacaatttccctgaggagaccatacaaaacacccttgtgcccaccgattgggtggccatgatgaggccctcttattggtccagcgccggccacttcgatcctgctgtgcccgaatgcctcttttacaggcttcgctccgatctatgcctcgttcaacaaatcatcatactgccattcagagctttcttccagtgtggtgatcctatatactccgcaaaatatgtccgctttcagatgggtacccaaagacacctctaccatctcaa

SEQ ID NO: 390596 - DNA, 1362 bp, Oryza sativa
  unsure (1)..(1362): unsure at all n locations
tatttaatcccgtgcgacgcgtagagacctccgcctgcgctttctcctccaaagcccaagctaatccccctcctcttcctcgtcgccggcgagagctcttcgtcttctccaactcgaccggaagcaagcgcgcttccgatccgccatggtgctctcccacggcgtgtcgggctccgatgagtccgtccactccacgttcgcctcccgctacgtccgcacctccctccccaggttccggatgccggagcagtcgatccccaaggaggcggcgtaccagatcatcaacgacgagctgatgctggacggcaacccgcggctgaacctcgcgtcgttcgtcaccacgtggatggagcccgagtgcgacaagctcatccaggcctccgtcaacaagaactacgtcgacatggacgagtaccccgtcaccaccgaactccagaaccgatgtgtgaacatgattgcacacctcttcaatgctcctctaggggactctgaaacggccgtcggagtcggcactgtcggctcgtctgaggccatcatgctcgccggtttggccttcaagaggaggtggcagaacaagatgaaggcagccggcaagccatgcgacaagcctaacattgtcaccggcgccaatgtccaagtttgctgggagaagttcgcgcgatacttcgaggttgagctcaaggaagtgaagctgagtgacggctactacgtcatggacccagctaaggccgtggatatggtcgacgagaacaccatctgcgtcgcggcgatcctcgggtcgacgctgaacggggagttcgaggacgtgaagctgctcaacgatctgctcaccaagaagaacgctgaaacaggctgggacaacgccgatccacgtggacgcggcgagcggtggttcatcgcgccgttcctgtacccggagctggagtgggacttccggctgccgctggtgaagagcatcaacgtgagcgggcacaagtccggcctcgtctacgccgggatcggtggtgcatctggaggagcaaggaggacctccccgaggagctcatcttccacatcaactacctcggcgccgaccagcccaccttcaccctcaacttctccaaggggtccagccaggtcattgcgcagtattaccagcttctccgcctcggctttgaggggtacaagagcgtcatggagaactgcctggagagcgcgaggacgctccgggagggcctggagaagacggggcggttcaccatcatctccaaggaggngggngtgccgctggtggccttcacgttcaaggacggngncggcgcgcaggccttcaggctgtcgtcgggctnagaccggtacgggtggttcgtgccggngtacacg

SEQ ID NO: 390597 - DNA, 752 bp, Oryza sativa
gtgatcgagagagaagaggatcgagcagctagcaagccggcgggcgccatggtgctctcgcacgcgagctccggccgggacgacgccgtgcgctgcaccttcgcgacggctacgcctgcgagacgctgccgcggttcaggatgccggagcagtcgatcccgagggaggcggcgtaccagatcatcaacgacgagctgatgctggacgggaacccgcggctgaacctggcgtccttcggcaccacgtggatggagcccgagggcgacaagctcatcatggactccgttaacaagaactacgtcgacatggacgagtaccctgtcaccacggagctccagaaccgttgtgtgaatatgatagctcacctgttcaatgcaccaatcaaggaggatgaaacagctatttggagttgggacggttgggatcctcagaagcaattatgcttgcaggactggcattcaagaggaagtggcaaaacaaacggaaggaacaggggaagccatgtgacaaacccaacattgttactggtgctaatgttcaggtttgctgggagaaatttgccagatattttgaagtaaacttgacggaggttagctcaatgaaggatactatgtcatggatccctgaaaggctgttgaaatggtggatgagaacactatatgcgttgcggccatcttgcgctttactcttacttgagagtttgaggatgttaagttattgaataatctcctaacagaaaagaataaggaaac

SEQ ID NO: 390598 - DNA, 875 bp, Oryza sativa
ttcacctttaccctcaacttctccaagggttccagccaggtcattgcacagtattaccaactaatccgcctaggctttgaggggtacaagaacatcatggagaactgccaggagaacgcgatggtgctgaagcaggggctggagaagacggggcggttcaacatcgtgtccaaggacaacggcgtgccgctggtggccttctccctcaaggacagcgcccggcacaacgagttcgagatctccgacttcctccgccgcttcggctggatcgtgccggcctacaccatgccccccgacgcgcagcacgtcaccgtgctccgcgtcgtcatccgcgaggacttcagccgcacgctcgccgagcgcctcgtgctcgacgtcgagaaggtgctgcacgagctcgacgcgctccccgcccgcgtcgtcgccaacggcggcgacgccgccgccgcgtcggcgagcgagagggagatggagaagcagcgcgaggtgatctccctctggaagagggccgtgctggccaagaagaagaccaacggcgtctgctaaagcaagtcagctgcgcagcggggatcgtatactattattatggtccacttcgtaattgcgacttcttaatttttaccgtgtcgatcggtttaccgtctcaagtctgctctcatccgattttcggattgatgctgcttaattatgtaccaagttaattaattcttagaggacggaatagttccgactcaatacgaagcattgcctgtataagtcgaacacgggatcatgcattttacgttgggtgtgtagcagtgaattgatcagtgatgctccatctctactctgaacgtgctacctccattccaaaaaagaaaaaaaaaacttttatg

SEQ ID NO: 390599 - DNA, 416 bp, Oryza sativa
  unsure (1)..(416): unsure at all n locations
gtcccctctcctagctagcggctatcaaacccccacaccactgctcgatcgatcgtcgcagccggagtaactaaggcagagatcagatcaggcgaattaggagcatatggcgctgtcgacggcgcagacaggggagtcgatgcactcctcgacgttcgcttcgcggtacgtgcgcacggcgctgccgaggttcaggatgccggagaagtcgatccccaaggacgcggcgtaccagatcatcaacgacgagctgatgctcgacggcaacccgcgcctgaacctggcgtccttcgtcaccacgtggatggagcccgattgcgacaagttcatgatggccgccatcaacaagaactacgtcgacatgggattgagtaccccgttaccaccgagttccagaaccggtggntgaacatgat

SEQ ID NO: 390600 - DNA, 910 bp, Oryza sativa
  unsure (1)..(910): unsure at all n locations
aaatttaagaaatccaggaagcatgaccaaaatgttccgttttcagttgtcgtaatatctgacaaagactggctaggtggagatatctgcacaggttgataaacagttagcgtatactcttctccttgctgaaaacatttgccagaaacatgacattaaggttgagcatcttgtatcagaaattgttgacacgggactgggaaagcaaatgtctagaataaaaccatccctctcatttattggagcagaggaagttatgagccttgtaacagcacaagttgcgggaagtagtgagttgaatgaagtatggaaggatattctgaacgctgaaggagatgagatctacatcaaggaaataggattctacatgaaagaaggggagaagatatcattttcagagctcactgaaagggcgattttgcgtcgtgaagttgcggttggctatgtcaagggcaagaagcngtatataaatcctacgaacaagttggagctactttcttttgaaatgacagatcaactcattgtgatatctgagtttgaaggtgaacagcccgttgtaaggggtggagacccttccccataaaatttccagcttgatgttctgctgaaatttcagtagcttcatctattatgatgaggtcttgtatcccgttagatgttaatcattctttcccctgggttccaagggaaattaaaaaaaagtcataaaggccctttagtaaaatatcatatatgccttaatagctgtagaaccctttgagcttttcttttatttatcggcagctaaactgcagaatcttttctgtttattggaaacatagttgattcacatagtcaacttgtctgatgtagccatcttgcataaagaaatggaaaggaaagttctttgnnnnnnnnnnnnnnnnnnnnn

SEQ ID NO: 390601 - DNA, 860 bp, Oryza sativa
  unsure (1)..(860): unsure at all n locations
ccacgcgtccgcggacgcgtgggcagctcccttcttcccaccgattccaatctccagaattctgcttcgatatggccgccaagatctacatagtgtactactccatgtatggccatgttgcaaagctagcagaggagatcgagaaaggtgcttcttcagttgaaggagttgaggtcaagctatggcaggtcccagagactctttctgatgatgtgctcaccaagatgggtgctccttcaaagaaagatgttcccataatcacacccgcagagcttgccgaggctgatggtgtcatctttgggttcccaactagatttggaatgatggctgctcaattcaaagcattcatggatgctaccggtgggctgtggaggacacagcagctcgcaggcaagcccgcgggaattttctactctactggttcccagggtggtggccaagaaactactccgttgacagcaattactcagctagtgcatcatggcatgatctttgttccagtagggtacacctttggtgctgggatgtttgagatggagcaagtgaagggcggaagcccgtacgggtctggcacattcgctggtgatggatcaagggttgccactgagcttgagctgcaacaagccttccaccaagggaagtactttgctggaattgcgaagaaactcaagggttccgcatgatcacctagacaatgtttgagtctgatcatccatatggaataaagtttcagctctaaagttgatagtttgttattttacctcagagtgccattggaatgtaatttgggttgttgcccaatactttgccatgatatatgtgatcccatacttttcctgctttaaaaanaaaanaaanaa

SEQ ID NO: 390602 - DNA, 576 bp, Oryza sativa
ccacgcgtccgctaccagttgaatctgaaacacctgtgcatgccgagagcattagggctcgagtactagacccagtatcgacagtttcagtggaggagacccctgaagcaaatgaaaaacctcgtaataaggaatcaaaaggcttcaggaaacttttgaagtttggtaggaagagccacacatcaggtacaatggattctgatgcatcatctgttgacggagccttagccggagacgggtcaatgctgaaaaccctcatttcgcgagatgactctggttcttcatctaaagcttctcggtcgttctccctactgtcaccgttccgcaggcagaaggtgattgtactgtgaccgtgagttggctgatcctgatctgtcatgttaatgcagcttgtgcattaaactaatttgtttcttagtagtacatacacatacagacatgttagtagtacatacatactattgcctacatctgtgtacgttgcttgtaagctgtgtattttgagtgcgcgtttatgtgactttctgtatatgtagtacttggtatgcatatgtatattatgttacacacaagcac

SEQ ID NO: 390603 - DNA, 514 bp, Oryza sativa
  unsure (1)..(514): unsure at all n locations
ccacgcgtccggccgtttgtcctcatttgcagaaagggttagaaacccttagatttcatgccatcaagcgtaacagtgtaaccccaccatgtcatttctttgctacttatagcatcccaagttgatgatccatttcatgttttctctcctttttcagatgcatactatgatgtccaatgtgggtgtctgaactgaaatctgaactctgaactctgaaggctgttgtttccatcagggtgcattggttcagcagagatcggtgatctatgttttcatatttggtcacgttctaccggtctttttcgatgggaaatgaaggtaattggaggagttctatctgtttgatgggattcaggaccaaaatccggattccacaaaatggctaaaggaaattttagggctatttgcaatncacaaccataagntggccactgnagtctccagtaaagagtagggctgtatgtggacaatatcagttntcattnnccgagtcatgcaggaagaagtttcaacc

SEQ ID NO: 390604 - DNA, 632 bp, Oryza sativa
ccacgcgtccgcccacgcgtccgatggcgccctccccttcaccgtcattggctccgactcctcctacctctccaggccggtcaccgtctccaacctcgtcctctcgccggccgagatcttcgacgtcatcgtcgacttctcccggttgccggcggcgatgaccgagatcgagatgctcaacacggcgccctacccgttccccaacggccctaatgtgacggacccgaacctcgacgggaaggtgatgctgttcaaggtcgccggcaaggggaaggtcgacgacatgccggacaaatccaaggtgccggagcacggcgtgccgtacgcgagcgtggcggcgctcccgccgccgacgacgacgaggtacatcgtcctgtacgagaaccagaccgcgccggggaacctctacatcaacggcctccggctggaggacccggtgacggagacgcccaagtccggcacgacggagctgtggcaggtgatcaaccttaccggcgacaaccacccgctgcaccttcacatcggcacgtttcaaggccgtcaagatgaccaagatcgagggattccaggtgttcaaggactgcatgatcgccaacaacaacaccggcacgtgcaacctcacccagcacgcc

SEQ ID NO: 390605 - DNA, 369 bp, Oryza sativa
ccacgcgtccgccaagggaggcaatggcaatgttaactcgttcaagatgaatgttggggtcaacaaatatttgcatagtccaaatggcaaagatgtcaatggcaaaaacagtggtgccaacagcaatggaagtaacagcagcgggaacaacagcagcaactctgctgttgacaaacgattcaaaacattgccaacaagtgagatgctaccaaggaatgaagtgctcggtggatatatctttgtttgcaacaatgacaccatgcaggaggatctcaagaggcagctttttgggttgccagcaagatattccgattcagtccgagcaattattcctggtctacctcttttgctttataactacacgaccca

SEQ ID NO: 390606 - DNA, 535 bp, Oryza sativa
ccacgcgtccgggacagagtggggaagctgaagctgaagcaagcggaggagtgcacgcgaatccctcctcgccggcgagaatgcaggagcaggcgacgagctcgcggccgtccagctccgagaggtcgtccagctccggcggccaccacatggagatcaaggaaggaatggagagcgacgaggagatagggagagtgccggagctggggctggagccgggcggcgcttcgacgtcggggagggcggccggcggcggcggcggcggcgcggagcgcgcgcagtcgtcgacggcgcaggccagcgcgcgccgccgcgggcgcagccccgcggataaggagcacaagcgcctcaaaaggttgctgaggaaccgggtatcagcgcaacaggcaagggagagaaagaaggcatactcgaatgatcttgaggtgaaggtgaaggactttgagaagaagaactcagagttggaagaaagattcttcaccctacagaatgagaaccagatgctcagcagatactgaagatacaactgtgagca

SEQ ID NO: 390607 - DNA, 537 bp, Oryza sativa
caattggaaacttgcgacccaatgtggaaggtgtatttgctgctggagactgcagacgtgggcaatcactggttgtttgggccatcacagaggggcgccaagctgcagcagccgtagacaattacctgtcgaaggatgatgaaggtgaaaccaatggcacagaagacattgctgtctcaagtgaaggtctggtccaacccgtagttgcataggccgagagaacatttctgcaattttgatacagcattgatgatgcgaagatagtagggccatgcattttttagctataaaaaggtaaaataaagggcctgtaaataatttacaagaaaagagggggcccttttgtttatataagtatgataaaagggaaattttgcggacgcgtatattttttccctgtttcttcttgtgaagagatgcaaatcctgtgattataagagcaatgtctggtttttgttaaataaatgtgaggggattctgttaaaaacatctatttattatgtgtaagtacataatggatcttcgtgtttctcttcc

SEQ ID NO: 390608 - DNA, 1062 bp, Oryza sativa
ctcaagtggtacaggcttctaaggagattatgacggacagacaaaagtatgagctaagcgtaagacttcaatcatatggtgggttgattccaaatcatgtagttgatttcataaggagccaccttcctgatgataatgagggtgatgaagatgagttagagcttgacatgaatgtcctaagtgatagtacattgtttgaacttcagaagcttcttgatgactatgatagggtaaatcagtcaggaaaccctacaaaagatgagcatcgtgaggttgagtttgaaagtgaatatgggcttagcaactcatcgatgcatcatgaagaaggtaatgagctcgttgaagaagatgttgatattggtgggaatgatcttccacctttgacgtatcctcctgcagtatttgaaagtgaaactgcagaaagaagcagcaagcatagcacttctagcagttctagtagtgattcagaatcatcctccagtgattcagattcaagtagctcttctggaagcgatctggatgtcaatgttcctccatcaacaagtggggccaaggacaacacgcaatctgcggttaggttggatcaggaaaacgatccactgagctcgaccaatctaccacaacaaagtagtgatcctgtacctatttctgccgaagatgagggggagaatgtgtctgagaaacaggtcccccctgcaaagcaataccgagctgctgttttgttaaaccgctttgctgatacaattgttaaggctcgtgagaaaactctggatcaggtcgcgaaaaaggatcctgagaaacttcaacacgacatggaggagcttgaaaggttacgaagagaacagagagctcggatacaagctcgaggctaaagcagcttgaagattgcttcgcaagagagctgaggcagtagtagctgctgaggctgctgcagaagctaaacgtcaaagagaacgtgagaaggaagcggctcgtaaagccttgcaacagatggagaaaactgtagacatgaatgaagggaacctgtttttgaaagatcttgaaatgcttggaacttgtaca

SEQ ID NO: 390609 - DNA, 447 bp, Oryza sativa
ccacgcgtccggtcgcgagggcaataacacaggcttctgttgtacttgccggcagcctgacataacatcattgaactcaataggctggacattgtttcagcaatcaaacaatccaacaggccaaagaacgtttgacctgcatggatagtcatgttatgctggctattgatcctctttacaatttgattccttaagtccaaggaaaagaatgaagatatacccaattcatggcgatcgattcaagcacgaagttggaatgttacttgtacagatgcttgtgtagatttttttgtacacatgcttgtgtactacttttgtagttgtattatgtgtatagcttatagatatacaatactgctttgattttgtattgcgttctctgagaaaacgcttgaacgtcaatgggattaagaaataagcactccatgataaacaaaaaaccacccc

SEQ ID NO: 390610 - DNA, 716 bp, Oryza sativa
tcatcagatttgagctccccccgtaacttcatcacaaggatagctcctttatggacaaggtggtaaacacccccaacagtatgacaattttggatgagcttttgccccatctcccattgagatggcgaagcgggactgcaggggcatatggaaacttcaccaatcctggggttgtcagccacaacgagatcctggagatgtacaagaaatacctcaaccccgacttcaagtggaccaacttcactcttgaggaacaggccaaggttatagttgcaccaagaagtaacaacgaaatggatgcatcgaagttgaagtccgagttccccgagctactgtccatcaaggattctttggttaagtatgtttttgagccaaacaggaaggttcctgctaactgaagatttacgggcgcgggcgggagttatggaggttacgagcgcgggcgggagttatggaggttattgcacggatgcagttgtgaccatacttttttttgtagtttttggttatatctggtgttttgttaagatacatgtaggtgaactacataccgttcgatacttaacctatttatttatatattcatagcaattcgtgtgcacggcatgtgcatattattttaattggttcgatgtgtgcggtggttcagaatgcctcccccctgtaggttgtactcgttaaactacttactctatctaaaaaaggtctattctccc

SEQ ID NO: 390611 - DNA, 681 bp, Oryza sativa
  unsure (1)..(681): unsure at all n locations
ggcttcctttctcctgttcagtgcatatatggatgaagtagctgctttcgcacaattgccattcaaagaggttgacatagcaatcccagaggtttttgttggtggtttacttggttcaatgcttatattcctgtttagtgcatgggcttgttctgctgttggcagaactgcacaagaagttgttaacgaggtcaggagacagtttattgagaggcctggcattatggactacaacgagaagcctgattacggtcgttgtgttgcaattgtggcatctgcttccttgagggaaatgataaggccgggggctttagccattatatcacccatggctgttggtattatcttccgtatgttgggtcacgctactggccggcctcttcttggagccaaagttgtagccgctatgcttatgtttgcaactggttctggtattctcatggcactcttcttgaacactgctggtggtgcctgggataatgctaagaagtacatcgagactggcgctcttggtggcaaaggcagtgagtctcacaaggctgcagttactggtgatacggnttgggatccatttaaagacacggcggngccttccatccatgttcttattaagatgctcgctacaatcacattagtgatggctccaatattctggtgataaccatgaatgatcacaactaa

SEQ ID NO: 390612 - DNA, 1021 bp, Oryza sativa
tttcttttctagcagaagaagataattaacctgctcatttttgtatgtgcagaaaaatcaaaacaccgaccaaaagcaaaaaaaacaataaataagggtgtagagagttgttgagttgggtccgcgaatcgtggtttcccactagcaagcgcaagcgcaggcgcaaacgcaaacgccgccgccggtatgccggagcacgggtcgaagcccgacatctccttcgccggccgcttcaccgcaagcgccatcgctgcatgcttcgctgaggtgtgcacgatccccctggatacggccaaggtgaggcttcagctgcagaagaacgtggccgccgatgccgcccccaagtaccgcggtctcctcggcaccgtcgtcaccatcgcgcgcgaggaaggcgccgccgctctctggaagggcatcgtcccgggactccaccggcagtgcatctacggcggcctccgcatcggcctctacgagcccgtgaaatccttctacgttggcaaagaccatgtcggggatgtgcctctcaccaagaagatcgctgccggcttcaccactggtgccattgcgatcagtatcgccaaccccactgaccttgtcaaggttaggcttcaggcggagggcaagctggcgcccggcgccccgcgccgatatgctggggccatggatgcctatgccaagattgttaggcaggaagggtttgctgctttgtggactggcattggacccaatgttgcgcgcaatgccatcatcaatgctgccgagttggccagctatgatcaagtcaagcagactattttgaagcttcctgggttcaaagatgatgtggtcactcacctcttatctggtctgggcgcgggcttcttcgctgtctgtgttggttctccagtggatgtggtcaagtcaagaatgatgggtgactcggcctacacaagtactattgattgtttcgtgaagaccctgaagaatgatggaccttttgcattttacaaaagctttcttctcaaactttgctagaatggga

SEQ ID NO: 390613 - DNA, 696 bp, Oryza sativa
gcaggcaagaggaggccaatgtcctcctcgccgtcgatgcggcggagggcggcggcgcgtggtcgccggtggggtggttcaggatgctggggagggagctgcactggagcttcgtggcgggcgtggtggcgacgtacggcgccagcagggggctcggcggcggcgtcatgcgggtggcgtcggactactactggaaggacgtgcagcgggtgcagccgtcggcggcgcaggtgtaccagggggtgacctccatcccgtggatggtcaagccgctctggggcctcctcaccgacgtcctccccatcgccggctaacgccgccgcccttacttcgtcatcgcaggcttcatgggagtagtcgcgatgcttgtattatctctccacagcaagcttcatgtattgttcgcgttgttggcattgatggccggaagtgctagtgtggcaatagccgatgtaactatagatgcctgtgttgctgaaaacagtatagtgcaccctcatcttgctgctgacatgataagcttaaacggattctgtgcatctgtgggagggcttattggattctcaataagtggtttccttgtccatgcaataggctctcaaggtgcccttggcatgttggcaataccttctgccctggtaatcctagctggaatgatgataaaagacgtccatatgcccaactttccatatgagc

SEQ ID NO: 390614 - DNA, 615 bp, Oryza sativa
ccacgcgtccgcggacgcgtgggcggacgcgtgggcggacgcgtgggcggacgcgtgggcggacgcgtgggggaattgcaccagggccaattgaaggcactccaggaatgaggaagcttgcacctgaggaaatggccaaggggagtcgggaaataatccctttatttaagttgggtgaaaaatgggacatagctatggctgccactttaccttgcttctgatgcaggaaaatatgtaaatgggactacagtggttgttgatggaggtctttggctaagtcgccctcgccatattccgaaggaggaagtgaaggagctctcaaaggttgtcgagaagaaggttagggcctctggtgttggtgtgccatcaagcaaattgtgatgtcctctatggtttatatcgccctcctacgtgtactgtagaatcctttaccgaggagtcccgtagaatacttggatgttgctatcacttgtcatcgaagttttctatgattctatctatcaactcctgtaacatgctcagcacattcaccttgttcacgctcgagttaaacatttgccaaagtggttctcattcataatgtatctggtaatattgcaatcaactttgaatcgc

SEQ ID NO: 390615 - DNA, 423 bp, Oryza sativa
  unsure (1)..(423): unsure at all n locations
ccacgcgtccggcacggtgaagctgctgaagcacaaggagaccggcaaggtccgtctcgtcatgcgccaggctaagacgctcaagatctgcgccaatcacctcgtggcgacgaccacgaagatgcaggagcacgccggcagcgacaagtcgtgcgtgtggcacgcgctggacttcgccgacggcgagctcaaggaggaaatgttcgccatacgctttggatccgtcgagaactgcaagaagttcagggagatggtagaagagattgctgagcagcaaggaaagaacgaggagaaagaaaatgaggaagtctcctctactgcagggttggttgagaagctttcagtgacccagacaaaaaaggagggaaaatgcagagaaagaggagactcctgcagaagaggttaagaaggncgctaaagagt

SEQ ID NO: 390616 - DNA, 499 bp, Oryza sativa
ccctttcgacagccttggagctccacgcggtggcggccgctctagaactagccgcacacttgcacgcacacacgaacaccacagagagagtccagcggcgcccggcgagaagcttcagccaagtcacagcggcctcggcttcttgcagctcgctgctcttccctctcttgatcgtgtctcgtgccacacatcctcgtttcgtcatctccatggcggcgtcgaccaaggccttggctctcctcttcgcggtgctcgtcgcgctcgtggcggcgacggcggccgtgagagtgctggaggaggaggccgtcgagctgggcggcctcgcgcctgctcccgcgccggccaacgcggcgggcgccgtccccgccgggggcgtgggccgtggccgcggtcgtctcgctcctgggccttcctcgcgcattgagattagaattccaccccctccaaaaggcccaccggttttttttttgcccgaaatcttttttggaaccggggaacc

SEQ ID NO: 390617 - DNA, 827 bp, Oryza sativa
atcagctgtcacacaaacaaagttccacatcatgcgatcggggcgcaaagttgaggaccctgacacattggaaaagatacggctaacagttattaacaaccttctgcagtatcatcctgaatcaagtgagaatttagccatgggtgaattttttggaataaaagctcctgagaagaaggttgatgttgatgttgtaacacatgtaattgttgaagatgatggacctaaaagaagcatgctgtacatagagacagctgatcggcctggtctacttctggaaatagtgaagatccatcactgacgtgaacgttgatgtggaatcagctgagatagatactgaaggcttggttgcaaaggacaaattccatgtgagttacagaggtgcaaaattgaacagctcattatctcaggtgctcgtgaattgcttgcgttattatctccggaggcccgagacagatgaagacagctactgattcttatgaaaacccgggctttgagttcctttctgcaagcccattgtgctgatttttcggttgtagtgaacaaaaaacgtggtacatttgtcctcaaaatgcatccgtatattatgctttacgtaggatgcatttaaaatcgggccagatccgggagattcagctcaatatggcccgttatcatcaccattggttcctacagtagtagaggaatcacattgggactgggaggccatcacctgatggatgctgtctgtaatttcctataattcgcttgaacctgtcgaaatcacaaggatatgcatacattacatggctttgtgggttcgtggttttaaaaaaaaaaaaaaaaaa

SEQ ID NO: 390618 - DNA, 590 bp, Oryza sativa
ccacgcgtccgcaggctgcacagcccacccccgaccacccctcgatccgcctccgcctccgcctcgtcgtcgccgtcgacgcccccacccaccatggcggcgctcctcgcccggcaggcagcgcaggcgctccgcgcgcgccagatggcgcagctcgggccgtccgcgacggcgatgcaggggcacatccggacctacatgggcgcagggaagcccacgaggttcaaagaggatgaggagaaagagaagcttgcaaaggagatagcgaaagattggaatgctgtatttgaaaggagcatcaacacattgtttttgactgaaatggtccgcggtttgatgctgacactcaagtacttcttcgagaagaatgttacaatcaactatccatttgagaagggtcctttgagccctcgcttccgaggagagcatgctctcagacgctatccaacctggagaagagcgttgcatcgcctgtaaactatgtgaagctatatgcccagctcaggcaatcacaattgaggcagaagaacgtgaagacggtagtcgtagaactacaagatatgatattgatatgaccaaatgcatctatt

SEQ ID NO: 390619 - DNA, 1139 bp, Oryza sativa
  unsure (1)..(1139): unsure at all n locations
tgacgaagcagatcgaagcatcgcgcccgagccaaacctaaatccctcggagagagagagagatagagaggaggaaaaaatcaaatctttttgaggaagaaatcatggcgtggcagcaacccatggacggatcccacgcgagcgggagcaaggcggcggcggcggtggcggatggcccgggaacccagaggacgcagtatccttatgtgactggctcatcaattattgcactgaaatacaaggatggtgtcatcatggcatccgacactggagcctcatatggctcaactttgcgatacaagagcgtggagcgcattaaggctgttggtaagcatagccttattggagcaagtggggagttcagtgatttccaggagattttgcgctatttggatgaattaaccctgtccgatcatatgtgggatgatggaaactccttgggtcccaaggaggtccatagctacctgacgagagtgatgtacaacaggcgcaacaagtttgatcccctctggaactcccttgtaattggtggggtgaaaaagggtccaaagggtgaagagaaatatcttggcatggttaacatgattggtacacactttgaggaaaaccacattgccactgggtttgggaaccatatggcaatcccaatacttcgtactgaatggcgcgaggacatgacatttgaggaagctgtcaagcttgttgagaagtgcttgcttgtcctgctgtaccgtgaccgatcatctattaacaagttccagattgccaagatcacaactgagggagcgaccatctacccgccatactcattgaagacttactggggcttcgctgcctttgaaaatccggcccagggtgctgtaggatcatggtagatttatttatgctgcagaggctgaatgtcaggccatgaaccaggatgaagaaacaggctctgttgctgagaggccttgtgaaatgttttatctgaacatcaatgaaactccagatttgctttgtatgacattctgatcgtgcaacttagatttctaccttctgtggccgttaagcctggaactatattatatatgatgaaagtctgttttgtttcgaaataaaaaaaaaaaaaaannnnnnnnnnnnnnnnnnnnnnnnnnnnn

SEQ ID NO: 390620 - DNA, 1075 bp, Oryza sativa
cgcgtccgccacaatcaagagtacataagactccatctattacacgaggataccaaataaaagtttaacaaaacggttaaagaagaacaacagtctaagcctgatggttttcacttttcaggtgagcttcaccggctcgacggaggtcggccggctggtgatggaggcggcggcgaagagcaacctgaagcccgtctcgctcgagctgggtggcaagtctccggtcatcgtgttcgacgacgccgacctcgacacggccgtgaacctggtccacatggcctcctacaccaacaagggtgagatctgcgtcgccggctcgcgaatctatgtccaggaggggatctacgatgcgttcgtgaagaaggcgaccgagatggccaagaaatcggtggtcggagatccgttcaacccgcgagttcatcaaggccctcagattgacaaggagcaatacgagaagatcctcaagtacatcgacatcggtaagcgcgaaggcgcgacgttggtcaccggagggaagccctgcggcgaaaacgggtactacatcgagcccaccatcttcacggacgtcaaggaagaaatgtcgatcgcgcaagaggaaatcttcgggccggtgatggccctcatgaaattcaagacggttgaggaggcgatccagaaggcgaacagcacccggtacggcctggctgccggcatagtcaccaagaacatcgacgtcgcgaacacggtttcgcggtcgatccgggcaggggcaatctggatcaattgctacctcggcttcgaccccgacgtgccgttcggggggtacaagatgagcggcttcggcaaggacatgggcatggacgcccttgagaagtacctccacaccaaggcggtggtcacccctctctacaacaccccttggctatgatctgatgatgaacagcacagaaagattaattacagtggaaaaaaataacatttctatatatacagctgaaaggttgggttatatttgtggttagttgattgcttgtatcaaatatcaatttgtcggaataaagacagtatatttcagttaaaaaaaaaaaaaaaaaaa

SEQ ID NO: 390621 - DNA, 1155 bp, Oryza sativa
  unsure (1)..(1155): unsure at all n locations
tgatttaactactaaggactgcagaaccgcgggagggttactatacaattagggtggcgagaacaagactaactccaaccatattaatggataacaggccctctaccaattacggaaaaccaagcgtcctggcaacactcagaagaaacacactgatcctgatgctattatgaatacagctgcacctgggattttacctacctcacgaaatgcaccagttagaaaagtggcagaatgtgatgtactatctgccaaacaagagtctgttcctgttgcagtgcctgccaagcaagaggttcatagtcccaaacaagagagtatcccaaaattcaatactggatcttcaagagttagccagttgatttctgtgcaacaagcaaatgattcgtcaccaaacagtaaagtctctgcagatgctaatattggcagttttgatctggcaaagttttccaagaaaaatgctcttccctgtgatatctgcatgcgatctgagactgtactgaaccggatatttgtctgctccagctgcaaggctgctgtgcatttggattgctaccggagtgtgacgaatcccacaggtccctggaagtgtgaactttgccaagagatgccatcagatgttgtcgctggcagtcaatcagattgcgacggttcaaaaccatgcttgttgcagtgcgatttgtgccatggaacatctggtgcttttagaaaaacaataaaggggcgatgtattcatgccttttgtgctgagtggttgttggagagcacgttcacaaggggacaatataatgcagtagatgggatggagagccttcccaaggataaaggatacatgcgctatctgccaccgcaatgttggctcatgcttgaagtgcagtactgtggactgtcaaattacttttcatcctacgtgcgctagagatgctggtttttacatggatacaaaaacaattggtagtacgttggaacataaagcatattgtggcaagcatggcattgagcaaagaaaggctgacttactacaattacatggacctgaggaggtcaagaatatgaaacagatgagggttgactttgaagtattacgccttaattgtgaaagagttgtgaaaagaagaaagtgaagaaagactnggttgatgtgacatgatacac

SEQ ID NO: 390622 - DNA, 782 bp, Oryza sativa
cattaactcgccccccaaaattcctcctgcttggggtcgaaggcggcgaaccccatggattcctcttcctcctccgccgcacgcgccccaatccgattcaaccgccggcggcggcggcggcggcggcggtggcggcgatggaggtcggggacctgcacaaggtgtgggagatccgcgcgctcaagagaaagcccgacgagcccgccgcccgcgcgctcctcgaccgcgtcgccaagcaggtccagcccatcatgcgccgccgcaagtggcgcgtcaaggtcctctccgagttctcgccgaagaacccgaggctgctggggctcggcgtcggcgggggagtcgaggtgaagctgcggctgcggcacgcgggacgggactacgacttcatcccctacgaggaggtgctcgacaccatgctccacgagctctgccacatcgcgcggggcccccacgacgcgcaggtctacaagctctgggatgagctccgcaaggaatgtgaagaacttgtttccaagggtatcactggatcaggccaaggatttgatggtacaggtcggcggttaggtgggtttacagtacacccaccgccaccatctttaaggcaagcaacattagctgcagcacagaaacgggcaaggaatggagctcttttgccatccggtcctagaaagcttggtggaaataatgatattatgagtgctcttagtccaatacaagccgctgcaatggctgctgaaaggagaatgtatgacgatttgtggggtgatcgcacgatcaatctg

SEQ ID NO: 390623 - DNA, 699 bp, Oryza sativa
ccacgcgtccgctttctgttcttggttgattgccggagatgtcggattcggaggagcatcacttcgagtccaaggccgacgccggcgcctccaagacctacccacagcaggccggcaccatccggaagaacggatatattgtcattaagaaccgcccctgcaaggtggttgaggtctctacttccaagactgggaagcatggtcacgccaaatgccactttgttggtattgacattttcaatggaaagaagcttgaagatattgtcccctcatcccacaactgtgacgttcctcatgttgatcgtactgattaccagctgattgacatttcggaagatggatttgtgagccttttgactgagagcggcaacactaaggatgacttgaggcttcccactgatgatactctgactaaccagatcaagaacgggtttggtgaagaaggcaaggatatgatcttgactgtgatgtccgccatgggtgaagaacagatctgtgccgtcaaggagattggggccaaaaactaagcggctttgctcgattgcctgcctgcctacgatactttgctatcttagtgttgagagctgagacacataaatagaagttttttttatgctacctgtggatgaaatgacgatcaaaaccttcatcgattttatgttacactggatggtcatgagatacttgttaatgcttttt

SEQ ID NO: 390624 - DNA, 544 bp, Oryza sativa
ccacgcgtccgaagaaatcaggtggttcaagtgagaaaactgaaccaagtgcgtcaatagaattaaattctcaaaacttcgataaacttgtcaccaaaagcaaggatctttggattgttgagttctttgcaccatggtgtgggcactgcaagaaattggcacctgaatggaaaaaggctgcaaagaacttgaagggccaagtgaagctaggtcatgtggattgtgatgctgaaaagtctttgatgagcaagtacaaggtagaaggctttcctactattttggtatttggtgccgataaggagagcccattcccttaccagggggctagagttgcctctgctatcgagtcctttgcattggagcagttggaagccaatgctgctccacctgaagtttctgagttgactggcccagacgccatggaagagaaatgtgcttctgctgccatttgctttgtatctttccttccagatatcttggattcaaaggcccgaggtaagaaacaagtaccttgaggctgctattatctgttgctgagaaattt

SEQ ID NO: 390625 - DNA, 627 bp, Oryza sativa
  unsure (1)..(627): unsure at all n locations
ccacgcgtccggctcctccccgttctacgtcgactccgatgggctccagcgccagattgatgagctggcttcgttctccgactcgccggtgccgtcggtgacccgcgttctgtacagcgacaaggacgtgcaagctcgaaggtatataaagggaataatgaatcagcttggcctgtccattcgtgaagacgctgttggcaacatttttgggcgctgggagggttctgaggcaggactaggagcggttgcaactggttctcatgttgacgcaatcccattctcaggcaaatatgatggggtggttggtgtcctgggtgctcttgaggcaattagaatgctgaaaaggtctggtttccagccaaaaagatctttggaggttattatgtttacatcggaggagcctacaagatttggaattagctgcttgggaagccgcctaatggcagggagtgaagaactggctcgatccctcaaagaaacagttgacaatcagaatgtgtcattttttgatgctgcagactctgctggctacaagatgcatcctgaggagctacataatgtgtttttgaagaaagacgactatttngcttttgtagaattgcacattgaacagggccccattttgga

SEQ ID NO: 390626 - DNA, 817 bp, Oryza sativa
ccacgcgtccgcggacgcgtgggcggacgcgtgggtccgatcttaattacatcattagccagctaattaagtatatatctagcttgcttagctagaacacactctacagctaagctagcaatggcgcgcaataatggcgtcgcggtgatgttcgccgccgtggtcgtcgtcgccggcgcgctggtggcgggggcggcggcgcagagcgggtgcacgtcggagatggtgagcctggcgccgtgcctggactacatgcaggggaacgcgtcgaggccgacggcgtcgtgctgcgcggcgctgtcgagcgtggtgaagtcgaggccggagtgcctgtgcgcggtgctcggcggcggcgcctcctcgctcggcgtcaccgtcaacaccacccgcgccctcgagctccccgccgcctgcggcgtcaagaccccgcctcccagcgagtgcagcaaagtcggtgctccgattccgtctccggcgccggggggcgcggcggcgccgaatgcgccgccggctgcagggaccgggtcgaagacgacggccgaccaccggcgcgagctccgccggcgagagcgtcggcaaggcggcgtccgttgcgatggtgatcgtgtcggctgcgtttgcaatgttgtatgcttgattaattagtttaatttctgcgtggattaattgagcagtttgattattgtttataatgccattgatatatactgtgtgacatgtcatttatttcttcatgtattttaaatttcgattattattatattcattgtatgatgatatatcatttgttgaataatatattcaagtgctttgcatt

SEQ ID NO: 390627 - DNA, 574 bp, Oryza sativa
  unsure (1)..(574): unsure at all n locations
ccacgcgtccgcgccaaccccgatgctagccgccgccgccgccctccgcccgcccttccgccgcgcccgcctgagcacctcccatggaggaggcggaggagtgacgcaccctctgcgcccgcgcctgcagcggcgtgctttggcctgccgggctgacctgcagcaggacgcgccgttcgccgccgccatcggcgcctgcttgctagcctccctcgtgcccccgacggcgacacgccgccgagatgacgacgaggaggaaggggagtttggcgcgacggacacgaggatgggcgtcatggggatcatctccttgctgccttacttcaactggctgagctggatcttcgcgtggctggacagcgggaagcggcgttatctgttctacgccgctgcatacttggctccttatctgagaacaaatttatcactgtcgcccgaagagagctggttacctatagctagcatctttgcctgcattctccatgttcagctagaagcaagcatcaggactggtgatatcgagaccttcaggtttgttcaganactttgaggctantttccctagtgctctgaa

SEQ ID NO: 390628 - DNA, 405 bp, Oryza sativa
  unsure (1)..(405): unsure at all n locations
cttctctctctctcgactntcgacgacgacgcggcggcggcggcggcgaggttgggaatggacatgccgcccacgccccttccgccggagaccgccaacacctcgcccgctcccaacggcgccaccgccggaatccgggttgagaactgctacgtcttcaagagccggctgcaagagtatgcacagaaaaccggcctccagactccagagtatcataccttcaaggagggaccttcccacgagcctgtcttcaagtccacagtggtgattaataataccagctatgactccctgcccggattcttcaacagaaaggctgcagaacagtctgctgctgaagttgccctcatggaaattgtcaagtccataccagccaacggaaatatcccagctgttcaagagact

SEQ ID NO: 390629 - DNA, 1386 bp, Oryza sativa
  unsure (1)..(1386): unsure at all n locations
cccacacgtccggcgcaacaaaaggaaagcagggaaacctcgccgtcctctctctccatccatgccctagcacgcgccgcgcagctacgagcgggagccacacctcgaggtcttcatctgttgcactcatgatttagcaccagctgaagtgacctctgagactgcgcggtgacgtagcctgttgctaggataaaaatctcagtagttaagcatggcggattctatggtgtcaagtttctgggggcctgttacttcaacaactgagctctgcgaggaaaattatgcacactcgtcatatattgcagaattctacaatactgtttctaatgttccatgtgttcttctggcacttgttggacttgtgaatgctcttcgccaaggttttgagaaacgattcagtgtcctgcacatatccaatatgatacttgctatcggcagtatgatcttccatgccaccttacagcacgttttacagcagagcgatgagactccaatggtgtgggagattctcctatatctttatgtactttattcaccagactggcattaccggagcactatgcctactttccttttcctatacggtgctgcttttgcagtagtccatttcctggtgcgattccaagtggtattcaagttgcattacgttggcctctgtctcctatgcatcccacggatgtacaagtactacatacaaactaaagacatggctgccaagcgtctagcaaagctgtgggttcttacgttgagcttggcgactctttgctggctatttgatcgaatgtcctgtaagaagctttcacattggtacgtcaacccacaagggcacgcatggtggcatattctcatgggatttaactcatactttgcaaacacattcttaatgttttgccgagctcaacagcgtgggtgggagcccaaaattaccccccttttcgggttcttgccttatgtcaagattcagaaaccccaaaagagggaatgagttctctatttgtcagtgctgttctccaggaccttaaagccaacgccctcatgtgcttagacaagaagcagaggcattttttttgtatatgggcttccaagtgattacggactacagtgttatgatgcctcactagattttgttaacttttaactaacgcctgttttgtaccatacttaattgttgctcagagattagttggagtgttgtctcatagttttggtcattattttttgtttctctacatttgattttccgttctaataggactgaattttatttgttttttgtttgtcttgaatgttgtcgaacagttttagtcaagttactgcttcatatggccatnnnnnnnnnnnnnnnnnnnnnnnnnnnnnnnnnnnnnnnnnnnnnnnnnnnnnnnn

SEQ ID NO: 390630 - DNA, 766 bp, Oryza sativa
ctttttacacacatgttgttttcacagggatcaaaatcatggataattgtggtcaggcctgctgctgctgctgctatactgttgttttgatgatgaattcagtgcatccttccctccttcgatcttgattttggttcatgttcatttttttcttgattttggttgtggcagcgatggcggcaagcagcgaggtcgcgatttgcgaggggcgctgcggcatgcagggagcggcaaggagctgggcttatgggggcagccgggcaggggcaaacgcgccgggcgcctaggtggtcagatgggagcagagcaacgcagcgcttctccctgtatcaattcttttggttccaacagtgagtcagaataatcacaactgggcatggttgatggataaatgttggcggggaagattaaggaatctgcaacaccgcgtgggctcgacattgatgtgtggcacttgcactatctggcgtccatgggtctttctcccagcatattgcattccccagctgaaggttccctgccaagaatttagagaagaaacaacatctagagaaatatgtattcctgttctttagacattgcatcattagactactacctctattactacatgaagtttgtattagcaataatgtgactacatggtgtttgtattagcagtaaaatgtggctatgttagtaatttggaatttgaaattaattccatacaccgagagaagcaatgttggatactattcttcttgttcagtattgtcctaatgtccac

SEQ ID NO: 390631 - DNA, 913 bp, Oryza sativa
  unsure (1)..(913): unsure at all n locations
caattttctagaatgaatagattcaaaagaagagcactaagggtcattgccgatcatttatctgctgaggaagttgaggacataaaggagatgttcaaggctatggacactgataacgatggcattgtatcttatgaagaattaaagagcgggatagcaaaatttggttctcatctggcagaatcggaagtgcagatgcttatcgaagctgtggatacaaatggtaaggatgctctagattatggtgaatttttggctgtctctcttcatttgcaaaggatggcaaatgatgagcacctccggcgagcctctcctattttttgacaaggcatgtgcaatggctacatagagcctggaagagcttcgagaggctctagtgggacgatggagcaggtgacagcatggaagtggtgaacgacatattgcaagaagttgacactgataaggatggcaagattagctatgacgaatttgtagcaatgatgaagacgggcacagattggagaaaggcgtcccggcattactctagaggaagattcaacagccttagcatgaagcttataaaggatgggtccgtaaaactggtcaatgagtgaaggcctaagggtgataattttatgcgtgtagtttaggcctttgggctcgctaagcagaaaccctttctccttttcttctcatgattattttgcgtggaaatttagataggtggaacctcccgattggcttacctgtgtaattagctcatctgacaagcacgcgccgaatgatataccaaatgctgtgcgcctgcttagccctcgtggccttgttcctatggggtacctgatgccaagtgttgtacaatgttttgccgtgttcaaatgcaatttgttcatttggggtgctaaaaaaannaaaaaaaaaaaannnnnnn

SEQ ID NO: 390632 - DNA, 532 bp, Oryza sativa
  unsure (1)..(532): unsure at all n locations
tcgacccacgcgtccgcggacgcgtgggtttttaagtctggatttcaatcatacaatgcacgatggaagatgccttatgaagagagcgaatccacatcaaatctctactactccttcaaagttgcaggggtgcatgctataatgttaggttcttatacagattatgatgaaagttcagatcagtacgcttggcttaaggctgatctagctaaggttgacaggaaaaggacgccatggctcatcgtattgttgcatgcaccatggtataatagcaattgggctcatcaaggcgaaggtgacagtatgatggctgcaatggagcctttgctctatgctgctcatgtggatatggtaatcgcaggtcatgtgcatgcttatgaacgtgcggggcgagtctacaaggggggacttgatccttggtgggttgttcacataacaaatggggatggtggaaaccaggaaggcttggcccacaggtaccgcaatccgaaaccagcttggtcagtcttccgggaagcaagncttgggcatg

SEQ ID NO: 390633 - DNA, 613 bp, Oryza sativa
  unsure (1)..(613): unsure at all n locations
ccacgcgtccggagcgaaccaagtcgcgcagcttaagagcttcttcgttgttgctgctgccgtgtgttgctaagcttcaagatgtcgcagagagccgggaggcaccagaggagggcgtcgcagagcgtgttcgtgctgccggagaacttcgccagcctcgaggacgtggcggcggacgtcatcggcggcggcggcgccgagcagcggaagcccgcggcggcggcggacgcgtcgtcggagcagcagccggcgaggatgcaggcggggcggcaccggcgggcaatgtcgatggccgtggcggccagggacctggagatgatcacggaggacatcgccagctacaagtacggtgcttaggctacgacctcacggctcacgcatgtgttggtacgtgttccaacagcggcggcggtgtactcctgggctaggtgcagaaaaagggttggggtggtggttcttcgatcgagactgatctcgtgtcctgtttagcatgccgtttgattgtttttctcgtgatgtatttcctcctcctcctcgtgatgcgtaatttctatctcgatcacaagtnnnnnnnnnnnnnnnnnnnnnnnnnnnnnnnnnnnnnnnnnnnnnn

SEQ ID NO: 390634 - DNA, 730 bp, Oryza sativa
  unsure (1)..(730): unsure at all n locations
ccacgcgtccggtcaagagtaataataataataatgcaatgcagttcactcaagaacacctttatgccgagtatatgtaaactcgcagaagtcatggaattacacggtttatccataaatcacacgtagaattcttatatggttgcagttaaactattgcatacaggatctatttctgaagtggtagctaattaactcagtgttggtttagatcatttctagtattctttggatcaattaaaacctaaataacttcatgcatgatagtgctctcggattaattgtacaacaacatggctgccctgattgacaaaaaaaaaagttggtggagaacttatttgttaaaatcccaaaggggacgctgtcaccactcttcattcagagttgcacttgctgctgctgttgttgctgctgttgctgttgctgttgctgttgctgctctttatcatgttcagcaacttttggagggaggtgcaaggcctcctgcctcttgccccacagcagaagataaaggccacctatcacaagtacagatcccagcacgcttccaaggaagagctgttcatggaggacagtgaagtcaatcactgaaacaatgatctgcaccaccggaatgaaggctgcgacgaacactggaccgngcttctcgatgcaccatgtcagtagcacaaacgaaaaggcanaccccaccaaaacggggtaaaaggatggtgagnatgtgggacttggg

SEQ ID NO: 390635 - DNA, 502 bp, Oryza sativa
tcgtacatcccccaaatcctcttcttctgctccgacctcacctcgcctccttcctccgccgactccctcccctccgccattgcagcctcgcctacggccttgagctcgtcgccgatccccgccaccgccgcgacctctgcctgccccccatgcctcggccggcgaaaatcaggaaaaaacatgagaatgtgtttgatcaattgatcaaggcgataaaagctcctgtggactttgatctgccgcctgtattgaaagaatggaagtcaaattactatgtgccaattaagcggaatgcttatattactcggaaacgcgttgaggatgatggcattttttgttcctgtaccccttctggatcatccgcaacttgtgacaaagattgccaatgcgggatgttgttctcttgttgttcgtcgacctgtaaatgtgagaataaatgtgctaacaaaccggttccagcataggactttgaggaaaaccaaattaattaagacagagaaat

SEQ ID NO: 390636 - DNA, 478 bp, Oryza sativa
  unsure (1)..(478): unsure at all n locations
gctgggaaattatcctgtgatacatttattgccccactagtccagcttttgtatgactcgtctatgtcaggccgggttgctgcccttggtgctatttgcaatattgctgtgaatttaacacccaggaaatcgattcttcttcaatctggggctgtctcccagcttgttcatttgtccaagtctatggatccaacattgagattaaaaagctgtgtggggctcttaggaatattatggtccttttgaatccaaagggtaaagactttattctcaagggaccaaccttatctactctttcaagcctcatatgggattctggacattttggccaggaaccaaccttggcacctggtgcccaatcttggtggtggatatgtggaacctctttaattatggcattggggaagatggcatgattttaaatgctatttaagacaactgaataatgcacctgcctnagagtatgcatcagggtatg

SEQ ID NO: 390637 - DNA, 507 bp, Oryza sativa
ccacgcgtccgctctttgaagaacttggaggagataatccgtgcttcagatggtgccatggtagcccgaggggatatgggtgcacaaattcccttggagcaagtcccctcagtacaacaaaagatagttaaactgtgcaggcagctcaacaagccagtcattgttgcgtcgcagcttcttgaatcgatgattgagtatcctacgcccaccagggccgaggttgctgatgtttctgaagcagttcgtcagcgtgcagatgcgcttatgctttcaggtgagtcagcaatggggagatatccagagaaagctcttagtgtcctccggagtgttagcctaaggattgagaagtggtggagagaggagaagcgccatgaggaactggaacttaaagatgtttcatcttccttctctgacaaaatatcagaagaaatctgcatttcggccgctaaaatggccaacacaattggaggtagatgccgttttcgtctacacaaacactggccacat

SEQ ID NO: 390638 - DNA, 585 bp, Oryza sativa
tcgaattcccggtcgaccacgcgtccgcggacgcgtgggcacacacccaaacccaacctcccaaaacacccacccggtttaccagagatccgcgcccgccacttgtaaacctgctgcacccatggcgcccagagcagctacggtggagaaggttgctgtggcgccacccaccgggcttggtcttggcgtcggcggaggtgtcggagccgggggtcctcactacaggggcgtccgcaagcgcccgtgggggcgttacgcagcggagatccgtgaccctgccaagaagagccgggtgtggctcggtacctacgacacggcagaggaggccgcccgcgcctacgacgccgccgctcgagagttccggggtgccaaggcaaaaacaaactttccgtttgcatcacagtcgatggtcggctgtggcggcagccccagcagcaatagcacggtagacaccggtggcggcggggttcagacgcctatgcgggccatgcctctgccgccgactctggacttggatttgttccaccgcgcggctgctgtgactgcagtcgccggcaccggcgttcgctttcctttcagaggata

SEQ ID NO: 390639 - DNA, 556 bp, Oryza sativa
  unsure (1)..(556): unsure at all n locations
ccacgcgtccgactgctttgtgacaatgcagactgttcagctcccagatgcagggatataaaggcatatattgctgacagaagcatgacagaccttagtatatctggatgagcttcatgtgaacttgtagaagttttgttagacaatacaatttgttgctagagatgcaataagctggtgttgaccatagtaagtggcacagtagtggcaatagcagcatagtttcgctggtttccccagtatttgcatgaaggcatgcagatggtggtggtttggggatcaactttatcctcgtattttcttgaatcgcctatttcgactttcgatggaggcatagcaaaaaccttacgtaggcaatctgacatgttcccgtaaatacctgtatagttccttattatagctagattaataggatagaggattttcattcctttttattattccttttcttgattgtattgaacaaaggcacattttgttcagtgtttctgtgccgtggcaaaagtccaaattcaatgaatgtgtatatttactcnnnnnnnnnnnnnnnnnnnnn

SEQ ID NO: 390640 - DNA, 776 bp, Oryza sativa
ccacgcgtccgcggacgcgtgggcggacgcgtgggcggacgcgtgggcgaccgccgagggctgatgaccatccacatgccggcgtacctcaacgcgctccagaagggcgtctccaccgtcatgatctcctactcgagctggaacggcatcaagatgcacgccaaccacgacctcgtcacccgctacctcaaggacaggctcaatttcaagggcttcacaatctcggattgggagggaattgacaggatcacaacaccagcaggttcaaactactcctactctgtccaggctggagttcttgccggcattgacatgatcatggtgccgaacaactaccagtcgttcatcagcatcctgaccagccatgtcaacaacggcatcattccgatgagcagaatcgacgacgcagtgactaggattctgcgcgtcaagttcaccatgggactcttcgagaaccccatgcccgattcgagcatggctgatcagcttgggggaagaaggacacagagatttggcgagggaggcagtgaggaagtcgctggtgctcctgaagaacggcaagacaagtgacaagccgatgctgccgctgtccaagaaggcgcccaagatcctcgtcgccggcagccacgccgacaacctgggctaccagtgcggcggctggacgatcgagtggcagggcgacaccggccgcatcaccgtcggcatgaccatcctcgacgccgtgaagggcggggtggacccgtcgacgacggtggtgttcgtcgagaaccccgacg

SEQ ID NO: 390641 - DNA, 384 bp, Oryza sativa
  unsure (1)..(384): unsure at all n locations
ccacncanacgcccacattccacaaaacacgcgtcgcggcgcgccaagccctttcgtgggcgacggcggcacgagatatggtgtcaacgaggacaacaccatcatcgaccgccgagggctgatgaccatccacatgccggcgtacctcaacgcgctccagaagggcgtctccaccgtcatgatctcctactcgagctggaacggcatcaagatgcacgccaaccacgacctcgtcacccgctacctcaaggacaggctcaatttcaagggcttcacaatctcggattgggagggaattgacaggatcacaacaccagcaggttcaaactacttctactctgtccaggctggagttcttgccggcattgacatgatcatggtgcc

SEQ ID NO: 390642 - DNA, 503 bp, Oryza sativa
cgatcgagcttaactaattaaccatcagtagcaaattaagcctcgaccagctaatcaattaattgagcttgtgctgttagccgtgtcatctatagctcgctagcttgccatggtgtcctctgctatggcggcggtggcggtggcgtttgctgtagtggtggccgcgacgatgagcagcgcgcaacttgacccgcacttctacgacggcttgtgcccggcggcgctgcccaccatcaagcggatcgtcgaggaggccgtcgcggcggagccccgcatgggcgcctcgctcctgcgcctgcacttccacgactgcttcgtcaacggttgcgacgggtccatcctgctggacgacacgccattcttcacgggggagaagaacgcggcgcccaacatgaactccgtccgcggcttcgacgtcatcgaccgcatcaaggacgccgtcaacgcccactgccgccgcaacgtcgtctactgcgccgacatcgtcgtcgtcgccgcgcgcg

SEQ ID NO: 390643 - DNA, 1251 bp, Oryza sativa
  unsure (1)..(1251): unsure at all n locations
cggacggcatgccacgcaaccgagtcgagactagacaaggggagcagccgccgcgatccaagtcctcctccgccgccgccgacgccgccatggatccgaagctggtggaggtgacgcagctcttctcccgcttcaaggcagccttcgccaggaacgacttcgacacctgcgtagacctgctgtcgcagctcaaggtccgcctcaccaagttccccagccttcctccatcatttcagcagacaccgaatgcagtggaagagctgaaaattgcgagggacatctatgagcatgcagttgttctgagtgtgaaaattgaagaccaagatgcatttgaaagggacttttgtcaactcaaaccttattacatggatacatgcggcataattccaccatcaccacaggagtatccaatcttgggtcttaatcttctaaggctgttagttcagaacagaattgcagagttccacactgagctggaacttctgccggtcacagcacttgaaaatccttgcatcaagcatgcggtggagcttgagcagtcatttatggagggtgcttacaaccgagtgttgagcgctcgccaggctgtgccccacgaaacatatgtgtacttcatggatcttcttgccaaaacagtcagagatgaactggctggttgcagtgagaagggttatgattatatgtcaatagctgaagcaagacaagtgctgatgttcagctctgacaaagaattgcaccagtacatcgcagaggagcaccctgaatgggaggtaaaggatggttccgtcttcttccagaaggcgaaggagacccagccctgcaaggagataccatctttgcaggttatcaaccaaacgctcagctatgctagagagctggagcggattgtatgatttgttaatgaatatcatttgagatcatttgggacggcatgttcatgctatgtacacatcaggtgtcacggttgagatgcgcatgttgcagctttgaacgtttgagatgcccatgttaccttatgatactttttttaaaaatttcatttaatgggcctgggatctgtggtctgatgtttggctgcccagtaactcctgatcgtgttttgatatgtcagttcgtgatcaatttactttgctgaatagctgtcctgaaaatgttcngtattagtcgtgaattgcnactgcaaactgttgggcttatgatgatgaaatgagatcgtncttattttgntgatcaaaaaataaaaaaaaaaaa

SEQ ID NO: 390644 - DNA, 384 bp, Oryza sativa
  unsure (1)..(384): unsure at all n locations
ccacgcgtccggcgcccccgagcgaagcagccgagcacccacccgccgccgccgccgtcgccgattcatggccaagttcaacgtggtgcagaagaacaggcgcgagtggaagcaggaccgcaagcgccaggcccatggcgaccccaagaccggcaagctcaagcagcgcacggcgcccgtctccgtctccggcaagcgccagcgcaagctcctgcgccgcctcagccgggagcagaaggaggctgtgatggccaaggcgctggagaacaacatgggcgacgtcgagatggtatctgcggaaggctcttcagaagctgcaaaggacaagtcacaactgaagtttaatgtgaaaaagaactcangagtacagatcaaaagattaaa

SEQ ID NO: 390645 - DNA, 805 bp, Oryza sativa
ccagcaagcaagcaaacccaaacccacccacctccgctccgcggccgtcttcttcttccctttcttccaccgcaagaagaagaagaaaccccacccgagccaagccccacacacaaagcgagcgactcggcggcggcggcgatggccacggtggcgatggacatctccaagccccctcccgcggcgggcggcgacgaggctgcggcggcgaaggggaggggcggcgccggaggaggaggtggggaggggctgcggcagtactacctgcagcacatccacgacctgcagctccagatccggcagaagacgcacaacctcaaccgcctcgaggcccagcgcaacgacctcaactcccgagttagaatgctcagggaagagctgcagttgcttcaagaacctggctcgtatgttggtgaggtggtgaaggtcatgggtaaatcaaaggttctagtgaaggtacatccagaaggcaaatatgtggtggatattgataaaagcattgatattacaaagatcacaccttcaacaagagttgctcttcgaaatgatagctatatgcttcatttgatcctgccaagcaaagttgatccgttggtcaatcttatgaaagttgagaaggttcctgattctacttatgatatgattggaggtcttgatcagcaaatcaaagagatcaaagaggtcattgaacttcctatcaaacatccagagctatttgagagtcttggaattgcccaaccaaagggtgtccttctctatggccctccaggcacaggaaaaacattgttggcacgtgcagttgctt

SEQ ID NO: 390646 - DNA, 469 bp, Oryza sativa
  unsure (1)..(469): unsure at all n locations
ccacgcgtccgcggacgcgtgggcggacgcgtgggcggacgcgtgggtacgaccgcctcgccgacttcttccgggacgcggccaaggccgtcgtcgacgagggggagcgcctcggcattgcacgggaggaggccgtgcacaacatcctcttcgcgctctgcttcaactcgttcggcgggatgaagatcctgttcccgacgctggtgaagtggctgggccgcgccggggcgcgtgtgcacnggcggctcgccaccgaggtgcgcggcgccgtgcgggacaacggcggggaggtnacgatgaaggcgctggcggagatnccgctggtgaagtcggcggtgtacgangcgctgcggatcgagccgccggtagcgatgcagtacgggagggcgaacggggacatngtggtggagagccacgactacnggtacgaggtgagggaaggggagatnctgttcgggtaccagcccat

SEQ ID NO: 390647 - DNA, 415 bp, Oryza sativa
  unsure (1)..(415): unsure at all n locations
ccacgcgtccggaaatgatgaagaacgctgccaaagtgtacccgcacaacacgcccgtcaacaaggaggcgtactactaccgcatgatatttgagaggctcttcccgcaggaatcggcgagggagacggtgccgtggggcccgagcatcgcgtgcagcacgccggcggcgatcgagtgggtggagccagtggaaggcgtcncacgacccatccggccggctgatcgcctcccacaacttcgtctgtcgcctccgtcaaccacaccaaccacgcaatcgccagcgtcaacggctacagcaacggcttggccaatgatgcctattcgatggcagccaacgggacaaacggcgtcatcctgtttgagctcattgatgcatagaatgaggagcttcaagcgtaacgcttcaagcttgct

SEQ ID NO: 390648 - DNA, 479 bp, Oryza sativa
  unsure (1)..(479): unsure at all n locations
ccacgcgtccggcgggaggcgcgggagaaggcagcaagtggccggcacggctggcggcggcggagggcggcatggcgcgcgcgaggaggcacgtgcggtgagaggggacacgcccggcggcaacgtaggctggcgaggaggcgcagacggcggctgtggaggctggcgcggccggcacggagggaggtgaggccagcgcaaggaacgggccgttggcggaggcttggaggctgtgaggccagcgtgngcgcggtggcttcgctgagaggccgtcgcggacgacggcatggaggccgtcgtggcgagtcctccagaggcggcgaccgacgaggtgcacgacgagcacggcacggtgcggcgtcgagccttaccgcattgggaggtccgggtggtcaagagncggtggcgattcgaccaagtagcccntcaaggcaagtttggtttaaggcggcgaccggcgtaacgcatttaggtgggaa

SEQ ID NO: 390649 - DNA, 711 bp, Oryza sativa
ggcctctctctctccctcgccgcgccgccgccgaacacaccccccccaccccccctccccacacgcctccgcctcctcgcaccgaaccgcctcggcgcgagcgcgagggagagagctcctcttctcctccacggcggctgcgcggcgtcgtcccgctccaccgggccgtcgtctggatctgatctaggagcggtcgcttcttcctcttccggaagccctttttatcagtcatgtacggacgcatgccaaagaagagtaacaataccaagtattatgaggtgcttggtgtatctaagacagcaacccaggatgagctgaagaaagcgtaccgtaaagctgccattaaaaaccaccctgataagggtggagaccctgagaagtttaaagaattggctcaagcttacgaggttcttaatgatcctgaaaagagggaaatctatgaccaatatggcgaggatgcactcaaagaaggaatgggaggaggcagcagcagtgatttccatagtcccttcgatttatttgagcaaatttttcagaatcgtggtggcttttgggggtagaggacacagacaaaagcgtggcgaagatgtggtacatactatgaagggtttctttagaagacctgtataatgggtactaccaaaaaactgtctttgtcacgggatgctctgtgcacaaagtggaagggtaaaggatccaagagtgggggag

SEQ ID NO: 390650 - DNA, 617 bp, Oryza sativa
agttctgataactacagtcttgtgttggtatatgattacatgctccagggaagcttagacaaagcacttcatggcaagcatgacagcaaggatagccttagctgggagaagagaaacaaaatagcaattggcatagcaaaggcacttgaatatctacatcatggaagtgtcacccaatctgtgattcatggagatgttaagtcttcgaatatcctcctctcagaggattttcaggcacagctttgtgattttgggttggcaaagcaagtctcagcttcaaccccccacctaacatgtactgacatcacgggaacgtttggatacttggctcccgagtatttttcgcacgggaaggtcaatgagaagattggatgtctatgcatttggagttgtaattctggagattatttcaggaagaagacctattagaacaggatgttcaaagggtcaggaaagcctagtttgatgggcaaagccattactatcaagtggggaaattaaacaattggttgatccattcttgggaaatgattatgactgtgatgaaatggagaggatgactctcgcagcttcgctgtgcacaaggacatcttttcatttccgacccgaaatgtcac

SEQ ID NO: 390651 - DNA, 710 bp, Oryza sativa
ggaaatcccaacacaatacaaggcaacacttgatctccaacttctaggccgtcgccaaagaatacagccaagaattcctctgccgccacctatgaggaatgcttattcgaggtctactagctttgaccaacattctggtgtttattcacgatctagtagctgcggcccacaaacaagtggctttcagcaatctgaaagcttcaaacagagacagcctgtggctaccactgcacctgacacttatacctcggaaagttctttagaaggaagacttttgtgcgctatctgtatggataaatcaaaggatcttgcatttggatgtggacatcagacctgttatgaatgcgggaagaatttggtgcgctgccctatgtgccagcagcatataaccacaaggatcaggctgtactgagaaaacaaaaatggatatcctgaagtttctgaagcctgcagaaacagaatctccaacatcagaagaaactcctgtgcaaaatttatgaaccagcctaaattgtactgttctttcgtcttgtaattggtggtttactattattattgcagtgagaaatgtttaggcagatagtgatccatataaaaagctaaggcacacactgtagtattaactacagtagttatgtgaagaagaggtacactaaataatgtacagtaattagcttctctattatacattctcctttctttcccttggt

SEQ ID NO: 390652 - DNA, 961 bp, Oryza sativa
  unsure (1)..(961): unsure at all n locations
atcgctgccctctgctgcgcgctgctaccaagcgcacagctagctgctctcggacgaggcaacgacgactccttcccttcccttaaccattaagctactctaaaatcccaagcttcggatcgaatcgagctacgaatcgcgtcccagggcaaagaaaggagaggagctttctcgatcgcaatcatggagctggtgatgggggcaatggaaaacctgatccccaagttgggtgagctgctcaaggaagagtacgtcatgcagtcgggcgtgagagagaagatccagtctgtctcacgggagctcgagagcatccacgctgctctccgcaagatcggcaaggtgccatgggagcatcttgacgatgagttgaggctttgggcgcacgaccttagggaggcgtcgtatgacatggaggacatcatcgactccttccttgtgcgcgtcgacggccatgaggcaagtgaagttcactgggtcaaatggttcttggagaagatgaccaaccagttcaacaagatcaaggctagccatgaaatcggtgtcgcaatgaaagaaatcgatgagaagctccaggaggtggctaccaggcatgcgaggtacacaatcgacaatattgccatcaatcctgcaggcccagcaactgtcgatcctcgtctcttgagtatgtacaaaacattggcagagcttgttggaattgaggggcccatggatgagctcatgaagatgttggatattgatttgccgaccaagaagaggaagatcgaaatcgatgtgtccgttagaaaaccgaagatggatgcatctttgggtttgaggacttgcaagaccactctgcaaagagctacgacagctaaccaagttgatctgggcttattcggcgcagatctatatanaagtttaggaatctatgactgcagagatcatgctaattagtgtgcgaagactatacaatcagatctca

SEQ ID NO: 390653 - DNA, 609 bp, Oryza sativa
gtccgttaatctgatctatatatgaagtctcgatcggcgcgatcttgctatttttatttttttctgcacagagtaaagtgatttgtgtttgcgagacagtggcccacagccatgccaaaaggtaaacatttaaagtgagcaaggtagtagataagatggatgaacagatgatcatcctgaacagcgccgtccagtccaagctgtttcccgaacacgacagtaaaacaattcaattcacagagattatctggagatcgacgaggcttcacttcacctgtatatactcggctgctggtggataggcagttgtatgtggtttttgcatccaattggaatggcaaaaaggaatagtgttattgtactagctattctttcctctcttttttttttttcctttctttttgggatcttgagttctgattttgcaaggtgcttctgaaactgctggagagagaccgatggctggtgttcgtggtccagtcgtgtataatagccttccctcctgctactttcgtcgcagcataccccttgtaatttcagtctgatgatgctgatgtacaattttgtgttccaagttttgggtggcgaatggagtttgatttggtttac

SEQ ID NO: 390654 - DNA, 550 bp, Oryza sativa
cttcacgtgataaaaccgaaagcgacttctccgagtctcgtcaggtcagactcgcagtcgcagcaatggcggccgaggagatcttggagctctccaatggccgcatcaccgccaagatcgccgcctggggcgccaccatcacctccctcatcgtccccgacgcccacgggaatctcgcggatgtggttcttggattcgacactctggagccttacatgaaaggcatatcaccttattttggatgcattgttggccgtgttgcaaataggatcaaggagggaaagtttactctgaatggagttgagtattcactagctatcaataatggacccaacagtcttcatggtgggttgaaggggtttgacaaagtagtgtggggatgtagtagagcgcaaaagtgaatgcccatcaatcaccttccaatatcacagcaaggatggggaagagggctaccctggcgatgtgactgttcgagcaacatactctcttcctgattctaccaccttaagacttgacatggaagcagtagcagagaacaaagcgacgccca

SEQ ID NO: 390655 - DNA, 1087 bp, Oryza sativa
  unsure (1)..(1087): unsure at all n locations
ccacgcgtccgcccacgcgtccgggacaaccttccctcgcgtcgtcctcccccaggggcggcacgggaggcgacgactcggccaccccttctctctcccccacctccctcctccgcctcgccgctgcccagagggccgccggcaaagccgcgcggccacaaggacggcggcggcggggctcctctctcgcgccactcttaggagaccgggggtctctccggagaggcggcggcggtaaaccgccagattcgcgccgcttcggccggatctggcggggcggcgatgggcgacggtggcggggatggagatggcggcggtagtggcggcagcggccgatggcggcggggttggagacgggcggcggtggggtgaacagatccggcggcggcgcgtctggatccggcggtggcgcgacgtccggtggtgtttggagcgtgcggcgccggcagccaacctcgcccgtggctggcgatggtggtgaaaggaggacggccgatttgggctttaggtctagatccggcgcgttctcagtcggggtcaagggtggtgcagaatccggtcattgtgcaggtggtgtccatagtgcaggtacccttcggtgtgcaggaggcatttggaagcttccgttttggatgctttggttgacagggtctccgaggtgaaaaccttgctccgcttctggtgctactaacggcagcgccctcggacgccgttcaccttcttgaaggcgttgcgtttggagccctcgtttcaactccacttcaaggaaactcttcgggtgaaaaccttggattcgttaggatcggacgttgtcgccgttctgtcagcgtaaccttcttgaaggattcgttctaggagtttttttccttgttggacaattgtcatttggttcagttttgtcaatgccgggttttcgccagttttcctttaattaactgtgcagttgtaaggtttttgggtccggttttccttataaactggatcaactctctttttctatagtaaattgcaggagctccctgcatgtcccctcgaaaaaaaaaaannnnnnnnnnnnnnnnnnnnnnnnnnnnnnnnnnnnnnnnnn

SEQ ID NO: 390656 - DNA, 568 bp, Oryza sativa
gtcggcaagaatctacctcccctccccaaatctcgctcccacgcctcttccttccgacttgtgacagaatggcgctcaatgaggagtacacatacgtggagctggagaaggagccttactggccatttgagaagctgcggatctcgattacgggagctggcgggttcatcgcatcccacatcgcgaggcgcctcaagagcgagggccactacatcattgcttctgactggaagaaaaatgagcacatgactgaggatatgttctgccatgagttccatcttgttgatttgagggtgatggacaactgcctcaaggtgaccaccggggttgaccatgttttcaaccttgccgctgatatgggagggatgggattcattcaatccaatcactctgttatcatgtacaacaacaccatgatcagctttaacatgcttgaggccgctaggattaatggtgtcaaaaggttcttttatgcttcaagtgcttgtatctaccctgaatttaagcagctggacactgtagctagcttgaaggagtcagatgcttgcccgcagagccttaagatgcc

SEQ ID NO: 390657 - DNA, 560 bp, Oryza sativa
cccacgcgtccgcccccaccaccgctcgccgccttctccgcctcgcctcgccgccgcgtcgaccgccatggctgagactgttgtgctcagggttgggatgtcctgtgaaggttgtgttggagctgttaagcgggtactgggaaagatgcaaggagtggagtcctttgacgtagacatcaaggagcagaaggtcactgtcaagggaaatgttacaccagatgccgttcttcagaccgtttcaaagacgggcaagaagacctcgttctgggatgctgagcctgcacctgttgaagctactgctgcttcatcttaaaatgtcattttatctcctgtgatatgtaaaggttgatgtaacaatttcccagtggaactgtcttgtgagatcacaaagttgtctgttcttatgatcataacttgaagctatttcaaataatatcagacagctagttacacatatgtacatctttgtatttctctatcctaccagtattgggactattggtatgatcaatttggtaaaaatacatgggtcatcacattgtttctgtggcaaaaaaaaa

SEQ ID NO: 390658 - DNA, 461 bp, Oryza sativa
ctggtttgttacaatacattttacatgaagtcattgagttgattaaaaacagaagtgatgaagtccatgcatcaaggcagccactccaaatgcgaaagcagaagcctgaaccaatcaggcagttgaatccgaaatttgaagagaattacattaaaggccttgattatgaccctgatcgggaaagggcacaaatgaagaaaatgaagaaacgccttaagagtgagaagaagggtgcaatgcgcgaactgcgtaaagataattatttcctgtctgctgcgaaagagaaggagaggataaaacaagagcaagagagagctgaaaagtatggaaaagccatggctttccttcaggagcaggaacatgcttttaaatctggacagctagggaagggcagaaaaaggaggcggtaacattttcttcatatttagtgtgtgtaaatatatggattatattccccatgc

SEQ ID NO: 390659 - DNA, 574 bp, Oryza sativa
ccacgcgtccgaaaatacaatcttttcctcctccgctgttgacagtccaatgtctagcttcactcacttcatctcgcttccgttgggtatccacccacaacttgttgataagctgaatgaattcaagaggtcaatcctgacttctaatgaatataaagctgcaggtttccgcatcgacgagtcaatatttgctattcccgaatcacttcacctaacggttcttatgttggagctaaagggtgagaacattgctaaggcttccagtgtgctccagtcagtatcggacaaactaatggaagccttgaaaaacagacctatctccatacagcttagaggtctggcatgcatgaaaggctcaccagattaggcctgggtagtatatgctcctgtgctggaagttggtgaacagggacgcctacaacaagtttgcgacattataattgatgcctttaccagctcaaacctagcacctacaagtgatgagaagcgagaactgaagttgcacgctaccgtgatgaatgcaaggttcaggaagggctactgtccggatgcttcatttgatgctcgcaagata

SEQ ID NO: 390660 - DNA, 467 bp, Oryza sativa
aaagaaggctgcaaaagcagaagagatcaagagagctccattcataaagataaacatggatggtgtccctattggtagaaagatcgatctgaatgcttttgatagctatgagaagctttctttagcggctgacaagctattccgaggccttcttgcagcccaaagggacccactcactgctggagcaaaggactgccagcaggaagatgtggcaatatctggcttgctagatggacctggggagtacactttggtttatgaggattatgaaggcgccaaggtgcttgttggagatgtgccatgggggatgtttgtttcttcagttaagagactgagagtactgaagacatctgacctctcttcatctctaataacctctggacggaaaagaacagctgctgagtgttgaccttctttgttgagctagcttgacacattcagtgacctgctgtgaagaacaaaatgat

SEQ ID NO: 390661 - DNA, 825 bp, Oryza sativa
gttgtgtccatgtcggccaaagttgaggaaatggagaaatttgcagtgggtacgaatggtatgctgaatgagatgaggcagagggttgaagacatggtgttggagaccactcgacaaaggcaacgtgcggctgaaaatgagcaggagcttagtcgtgtgaagcatgacttcgagtctctcagaacctatgtcggcactctcgttaatgtcagagaaactcttctttcatcagagaagcagtttgaaacaatggagaaactcttcgacaggctagttgcaagaaccaaccaacttgagagtgagaaagcacaaaaagaagccgaagtccagaaggtggtggaggagaatgtgaggctgcgtgcgatgattgataagaaggaagcgcagcttcaggcgatgagtgagcagtgcaagttcatggcgctgagccgtcccaactagctggatactccctccgtcccaaaaaaaaaggcaaaccctgggttttcgtgtccaactttaacgatggacggtcaaacgttggacacggaaaccagggtttgtttttttttggaacggagggagtacatatgacaagctgttacgcttgttcaatgatgccacttacgaattaccgtcactgcattgttgcaacaagaagaagagctccagatagatgtggcgaaacaacggatggtgccaactgctggcgagtccgttccaagcactctgattgctgctgctgaaacaaatagttaccttaatgtaggtgtgatgtgtgggactggaacctgcatctttgattcttgaacttgaattgtgttaaaaaaaacagtgacatttgtc

SEQ ID NO: 390662 - DNA, 681 bp, Oryza sativa
ccacgcgtccggcggagagggatacaaaggatcttacccttcctcggctgcagaagcaaatatctgaaagtgaattgattgagctcaaaatgcacaaagaacgccaagaaaaggcgcctcttggtgcaaaaaaggctaacaaagtctacaagaaggagcttgctctctctcttatcctcctcaccgccgcaactcggagcctcttgtctgctcaaggaattcacttctatttccttctctttcagggggtatcattcctttttgttggcctcgatctaattggagaacagatagactgatcactctcaggctttttgtcaaaacatagaaagcatgcctctcttcgtacacacactggttatcaaggtctgagaggtccgaacatgccatggaattttacttcattttggacaagttacttgtccgtacagatatgcaaaggtgaatttgttctgcaatccagattcagggcacaaaaccggagtgatccaacaggaataagctgaaagagtagatagaattcgttcatttgtacccagtccacatagagttccagcaatgttctttggatccaaaaaatactgagatgtgtgctgttcatttgtaaatcgttaatacacaatttgttctgataaaattatcaatctgtatatattcctactttagataatgaaaatgttt

SEQ ID NO: 390663 - DNA, 414 bp, Oryza sativa
ccacgcgtccgccggcaagaagggcggcaaccctctggaagccatgggcgccttcttctcgtcgcaggtgaaccgccggaagctggtcaccagcgagaagcaggcgctggccacgcggctgtccgccggcggcgaggcgttccccggcagcgagcaccggccggccgaccggaagacgtggatggcggagctcgggccggagcggctgcgcgtgcaccagctggtgtggccggggacgcacgactcggcgacgaacaagatcggcatcccgttcgtgacgcgccccttcgcgcagtgccagtcgctgtcggtgtacgagcagctcgccgcgggcgcccgcgtcatcgacgtgcgcgtccaggaggagcggcgcgtctgcccacgcgtgctcgcaacctactccgtcgacgtcgt

SEQ ID NO: 390664 - DNA, 808 bp, Oryza sativa
  unsure (1)..(808): unsure at all n locations
ccacgcgtccggaagatcaggggtgcaacggacggtgcggataaaagaaagacggatgcaatactcaggaggctctatgatccaaagaccagactcaatgatgcacagaaacgagcacagaacatgcgagcatataaagctgatctgcagaacctgaagaaagagcaggaggaagaacaaatgaagcgactggagaggcttaaactagagaggcaaaagagaatagccgcaagaagtaatgggaagagtgatcctcctaaagcaagcagagagcatgccaatggactaagtatatcagttccatctctaactggtctgaagcaagaaaagagtggatcgaccgaatcattcatcgagcgactagaagaggctggctgaacccaagagcatcggtggtgctgaccatctttcaaatccaaagtcagttaccacagaccactcaaggagaagaagcatggtatgaggctcatctgatatcggcagcgaaaaattccgagtatttatcatgtaatttcacaacccagaaaaacaggacgaaaataacagccagatctccaaaagctgtacagggaaaaagtttggtgttgattattaagtggtggtgccttgcatctgagattgcggatgagaaatttgagaattattacaatgggtctggcattttaatttttcggtttcatatattgtattcattcttttgattgaaggtggcttgtaatagctgtaaacctgtttttgttcatggcacatactactatattgtggatgtatttagtggagnnnnnnnnnnnnnnnnnnnnnnnnnnnn

SEQ ID NO: 390665 - DNA, 986 bp, Oryza sativa
ctgtacgttcccttgagcgtcttttacagtatggcgagcagaatattagaagggcggttcctctagctctgggtttgctttgcatatccaatccaaaggtaaatgttatggacacaatgagtagactgagccatgatgcagatgcggaagtttctatggctgcaatcatctccctgggcttgataggggctggtacaaacaatgcccgtatagctgggatgcttcggaacctctcaagttattattacaaagaagcaggacatctgttttgtgtgaggattgctcaaggtcttgttcaccttgggaagggtttgctgaccctttcaccatatcactctgaccggttccttctgtcccccatagcacttgctggtcttgtgacggttctgcatgcctgtcttgacatgaaatccatcattctggggaagtaccattacatgctttatatccttaccctagctatgcagcctaggatgctattgactgtggatgaggatctcaagcccctctctgttccggtacgtgttggccaagcagttgatgtcgtcggtcaggcaggtagacccaagacaatcactggattccagacacattcaacgcctgtattacttgctgcaggggagcgagcagactggcaactgaaaaatatcttccactgacaccagttcttgagggttttgtgatcctaaggaaaaacccagaataccatgaagattaaggcctggagtactatgaagaggcttggatcaatatctaattgtcacacaaagcgacgaacaaatagcacgatgaagacgatgcatactagatacggtgagggctgggttaacaggagttcaggtataatggggccaatatgacaggagaactttataagaactaggaatagaatcgttgggtgtaatggcatggccgaaaatgtttttgactcgttataccagaatgaaaatgacccgagagtttgttgccaaaaaaaaaaaaaaaaa

SEQ ID NO: 390666 - DNA, 549 bp, Oryza sativa
tcgacccacgcgtccgcggacgcgtgggcggacgcgtgggcggacgcgtgggcggacgcgtgggcggacgcgtgggcggacgcgtgggatccatcattctggggaagtaccattacatgctttatatccttgccctagctatgcagcctcggatgctattgactgtggatgaggatctcaagcccctctctgttccggtttgtgttggtcaagcagttgacgtcgtcggtcaggcgggtcgacccaagacaattactggattccagacgcattcaacgcctgtattacttgccgcagggaacgagcagagctggcaactgaaaaatatcttccactgacaccagttcttgagggttttgtgatcctaagaaataacccagagtatcatgaagattaagggatagatatggcacacgcaaaatgcaggaagggcctggagtattaggaagaggcttggatcaatatctaattggtcacacaaaagcaattaaccaatagcacgatgaaggcaatgcatacttgatacggtgaggcctaattgttacaaag

SEQ ID NO: 390667 - DNA, 700 bp, Oryza sativa
  unsure (1)..(700): unsure at all n locations
ccacgcgtccgcggacgcgtgggagctaacattcacatttcctgaagatgcggtcactagcacgggtgcttttttctggtctgcccccaaacggtttcctcgcccactgcaattctctactgtgaattcatctcacattcacttcatactggctgcttccatattgagagcagtgtcattcgggatctccatacccgactgggcaaagaacacaagtaatctggtcgatgctgttagtaaggttgtagtgcctgaatttgaaccgaagagtggggttaagattgagacagatgagaaagcttctaacatctctagtgcttctgttgatgatgcttctgttattgaagatcttttaaccaagctggaagatctgcaaaaaaattacctcctggattccagatgaaggctattcagtttgagaaggatgatgcgtgcaaggaactatggtattcaagaggtcgacaagctgaaggcganagttcattgcaggaagaatcattccngcgatcgcaacttcgacagccatggcaacaggacttgtgtnccttgagctttacaaggttctggctggtgggcancccgtcgaagntaccgcaattcgtttgctaacttggcaataccaatgttctccatgngctgaacctnttccacccaaggtgatcaagcatcaaggacatgaganggaccatatgggatcggt

SEQ ID NO: 390668 - DNA, 625 bp, Oryza sativa
ccacgcgtccggtgaggactaacaaattcatatttgaatgcaggcattgatcttagctaggcttctggagcaacggatgggcatggagaatattaatggtggcgaatcctacttagacagcctcagaagcttgtttcagatgatgtgaagtcctactcggtactcaccgtatgcctcacctatctgtctttttagaagcaacttaaaaagatattccaagtcacacttattctagctaagagtttatcgtctccccaggcagtttcacccgaagggaacacttctctacggatgccgattcctccagacgcctatgcaagatgcaggctaaaaacgagaacaaaccgtagaggtttctcctatagggtccttagcataaacacttgtctagaacaaacgtgcaggaatacttaagggaaattacttcatattaaacagataagcctacatacggttttcctttcgggaaacccgaaggtaggtacaagcaagctgttcttaccttacacagcgttataacacacctccttgcttcaatatactatgcaaggtaggctaaagtcactactactaagaacggtggaatggagggtgagagcgcgcttggaagctttgctctgaatgg

SEQ ID NO: 390669 - DNA, 501 bp, Oryza sativa
ccacgcgtccggcatggtcatattgggtaccatatttatctgcggtgtttataattctgagtgcttttgttcacccttctataagaaccaatgtatcgaagagtgttggatcaaatgagcagggaattgctcaaggctgtatatcgggcataagctcgtttgccagcatattagctccactaatttttacccctctaacagcatgggtcctttcagaaacagcgccattcaaattcaaaggtttcagtatcatgtgtgctggcttttgtacgctcattgccttcattatcagcatgaggatgcgagcagggcaatctggtgcaagtgagatgttggccattgtgcagcatgagcaagcatgatgagtatgctagtagattgtaaatttggccaacctgaaaccattgtaaatttacatactgtacattgtaaatttggccaacgtgaaaccatcccattgtctactatcctgatgggcgaatgactattcccctattcccc

SEQ ID NO: 390670 - DNA, 612 bp, Oryza sativa
  unsure (1)..(612): unsure at all n locations
ccctcttcagttgagcgcctgccccctggtgaacctgcagtcatagactgtacgtgcgagctcccaagaagctctactatatccgagaattcatatttgtgtgttgccacctgggatacaagggctcctcaaccatcgcagattgagtctgccgtgagatgggcactgagaaagcgttcgcagaacaaagctgtatatgtccactgtgcctatggccatggaagaagcgtctgcgtgatgtgtgcacttcttgttgcattgggattagctgaggattggaaagctgctgagcaaatgattcgtgagaagcgaccttctattagcatgaattctcttcatcgtaaaagtttagaggaatgggcaaaacacttgctcactccctcaaaaagaagtggggaatcagatgtgagttatgcgattctttcggatcatacccgaaaaaggcattgatctcgcaagaaaactaacttgctcagtggctgtgataattgagatgaagtttaaatgctctggcattatctactgttatcctagtcatgtccaaggcatttcattctctaagttaatngttttgggagtatgttgaaaacttctactactgtggttacaacg

SEQ ID NO: 390671 - DNA, 507 bp, Oryza sativa
cacgcgtccgagagagaggaaggaaaacgatggaggaggcatggatcgatcgcctgccgcaggatgtcctccagagagtgatccccctcgagacgccgcgggacgcatgccgcgccgccgccgtctccccggccttccgcgccatcgccgactccgacgtcgtctggggcaagttccagccagacgattcgtccctgcagctcgccgacggtgagctctttccgccgccgcgttccaagaaggagcgcttcctcgcctctccgccggcctactcctccttccagataggctcaggggcatgtggttggacagggggaccggggccaggtgctatatgctctcggccagagcgctggtgattatcactggtggagaaaccctttgtagtcccggttcgtaacccccctttagtcccggtttccaaaccgggagtaccaatccgggactaaagatcgctatctttagtcccgggtgaaataaccgggagtaaagatcggatcttagtcc

SEQ ID NO: 390672 - DNA, 776 bp, Oryza sativa
ccgtttgagtacctcggcaactgcctccgcccttgcttcgtggaggtcgacacggccggcctgctcggcagcggcgccgacggcgtggtgacggcggcggtggccatcggcgcggccatcagggggctcgacgacggcgtgctggacggcgccgacgggtggttccagaagatcgcgtcgctgatgccgcaccggccgatgtccatcggcggctcgccgcggtacggcgtgtacgacaccgacttcgggctgggccggccggcgaaggtggagctcctgtccatcgacatcccgcccggcacggtgtccatggcggaggcgcgcgacggccacggcggcatcgagattggcgtggcgctgccggaggccgacatggcgcggttcagctcatgcttcgccgacggactgaagcagctgtgagtgacgaacagcttggtgcatttcttgctttcttgctgctacgaattgttgcagagctcagaactcgctcagtttggatgtgattctgtaatgctagctgttggattgcaatcgttgatcgatcacataagcgattgtgaatttgcaattgtcaatctatgaaataatcagataagctgtaatctattctacatttttttcagagatggagcaggataaggcctgcttcgatcaacttctgttataaaaaagacactgaatattcggctgtatactgcatctgaatctcctttttgcttttaagcattaatagtgagcttggtgctgaattaccgacggcgatggagacacgagag

SEQ ID NO: 390673 - DNA, 668 bp, Oryza sativa
  unsure (1)..(668): unsure at all n locations
ccncggcccgnntttccccngggggngtggnccccaagnnngaanaacaacgcggncnccgggcnnaacccnccgcggnnggnacaaccngaggaantnttnaagttnntttgcantgggacggnaattnaaattaaatnttnttccntggttggaggccncctttttccttggccggggcatgaagcaacttaaggataaagctttgaagagagcagggttgactgaagaactgttgcaggagcaaattgagcagagaactgctgcaaggaaaaacaagcagtttgatgtgtctgaccaaatcaggaaacagctaggcagcaaaggcatagccctcatggatgaacctactggtacagtatggagaccatgcgagccagagtctgaatagtcacatgattgatttgtgctttggttaacaggtgatggtacaaactggaaaatttaaccaagcacatctgctgaattggtgtaaattgatgcagatcaacatttttttttgtaattttgtaggggtttaagttcactggccaactgaaacttgcgtttctcgtggtgtaagaagcaaaaccccatatactgatatactcgaggactcccttgttggatgttatgctttggagttggatattggagtcaaatcataattacctttgcctgatcaaaaa

SEQ ID NO: 390674 - DNA, 718 bp, Oryza sativa
  unsure (1)..(718): unsure at all n locations
ccacgcgtccggcaccattcagaattcttggaatctatggcggatgatcttagaacaacagatgttctggatggctttactgacttgctgaaggcaattaacagcaatttgaatgattttaagaagttgcaacagaagctagagcagcaaaagaagaaacaacaacagcagaagcagcagaagcaaaagcagcagcaggcacagaaacaaccagaagaatatattcaagctatgtttgcacttgagacagaaattaaaaataaaatatctatccttggtctgatgccaccttcttccttggcagaggcactgaagcaacttaaggataaagctttgaagagagcagggttgactgaagaactgttgcaggagcaaattgagcagagaactgctgcaaggaaaaacatgcagtttgatgtgtctgaccaaatcaggaaacagctaggcagcaaaggcatagccctcatgatgaacctactggtcagtatggaaccatgcgagccagagtctgaatagtcacatgattgatttgtgctttggttaacaggggtttaagttcactggccaactgaaacttgcgtttctcgtggtgtaagaagcaaaaccccatatactgatatactcgaggactcccttgttggatgttatgctttggatttgaatattgaaagtcaaatcataattacatttgcatgatcagaaggatccgggttgacnc

SEQ ID NO: 390675 - DNA, 731 bp, Oryza sativa
ccacgcgtccgaccagggcctctcggcgcgcgacatgacggcgctgtcgggcgcccacaccatcggccgcgcccagtgccagttcttccgcagccgcatctacaccgagcgcaacatcaacgcctccttcgcgtcgctccggcagcagacgtgcccgcgctccggcggcgacgccaacctcgcgccgttcgacgtgcagacgcccgacgccttcgacaacgcctactaccagaacctcgtgtcgcagcgcggcctgctccactccgaccaggagctcttcaatggcggctcgcaggacggcctcgtcaggcagtacagcaccaacccctcccagttctcctaccacttcgtctccgccatggtcaagatgggcaacctgctgccgtcctccggcaccgccacggaggtcaggctcaactgcaggaaggtgaactaattaaggatgataaaccccaattcccatcgcattgcatttgcaggtgatcatttccgatgatcaccgtcttcgccgacgccctgggaaccaatgcgccggtgagatatcaaaacacaagaagagacgaaacgtgaaatacttgtttgataatgtattaccacaaagtgtaataatgtgcgacgcttatatatgatgatatataccatggtaaattatcgcaaccacgacaatgtattttttttatgatgcatgataatacaatccttgctgttaaagaaaaaaaagaaaaaaaaaa

SEQ ID NO: 390676 - DNA, 1063 bp, Oryza sativa
  unsure (1)..(1063): unsure at all n locations
tccacgcgtccgcctcctcctccttgactgtcctaacaaaaaaatcgattttttgttctcctcttgatggttgctgcgaccttcgatgtccctatgcggaatgaaatctcctgctggggcggctaaaaatcggagattttctgtctttttgatccgtctttagtggagctttttgagcctgatttatgcgatgggcttcttggcgtgcttgttcccatgtcctcaagaggtgagagatgaggatgaggaaccaagaagcggccagagagtcagctcagtggaatattcaaagtcgtcagagagttgcccactgaagactgaagggtcgatagatatggttggaattcggcgaaataaggggcatggtgaagcaacgatcttcactttgcgcgagcttgctgatgctaccaacaaacttcagcacggagtgccttttgggccgaggaggattcggcagtgtgtataaagcatttctcaatgatagacaggttgttgcagttaaacagcttgatctaaatgggcttcagggaaacagagaattccttgtggaggttctcatgctcagtctcttgcatcatcctaatttagtcaagttgtttggttactgtgtggatggagatcagcgcctgcttatttatgaatatatgccattgggatcactagccgaccgccttcacgatctcagacccgggccaagaaccactagattgggacaacacggatgcaagattgctgctgatgcagctgctggtttggagtatctgcatgatgaggccattccagcagttatttaccgggatattaaaccgtcaaacattcttcttggcgaagggtataatgcaaagttgtctgactttggacttgctaaacttggtcctgttggtgataagactcatgtgacaactcgtgtcatggggacacatggttattgtgctcctgagtacctctcgactggaaagcttacgatcaaatctgacatttatagttttgngtgggtctttcttgagctaattactggacgaagagcgcttgacagcaatcggccacctgatgaacaaagact

SEQ ID NO: 390677 - DNA, 845 bp, Oryza sativa
gtcgggaagcacgcggtgatggcgcggacggggctgccggcgcgcgacctgcgggtgctggacccgctgctgtcgtacccttccacgatcctgggccgcgagcgcgccatcgtcgtcaacctggagcgcgtcaaggccgtgatcaccgccgccgaggtgctgctcccgaactccaaggatcccgccttcgcgagcttcgtctgcgacctgcaggcccgcgtcctcgcctcgtcctccgaccaggctgcagaatttactgatatggaaggcgaatcatctgcagttacttcaccatttcctgctctgacttcaaccgcaccaaatgaattggagatgactaacaagaattccaatgtggtaggcggaatgactcacagcaacagtatgcccacattgactgctgcaaaagatggaaataccaaagttttacccttcgaattccgagcacttgaagtgtgccttgagtcagcctgtagaagccctagaagaggaaacgtcgactctggagcaagaggcgtatccggcacttgatgagctgacttcaaagataagcacactaaatcttgagcgagttaggcaaattaagagccgcctggttgcaatctctggtcgtgtgcagaaggtgagggatgaacttgagcatttgttggatgatgaaatggacatggctgaaatgtatttgacagaaaagcttactcgacaagaaataagtgagacttcatctagagttgaggttgatgacccatctcaactggaggtggatagggatgaagattatagagtgaggcagatgtaagcaatggtacccttattggtataagccacacaattgagaactggagatg

SEQ ID NO: 390678 - DNA, 771 bp, Oryza sativa
gtacgacaaaccatcttcagttgagcctttgacttcgatatctgtggcttctggagcttctacttttgaagtctggatgaccctacctaagtgggcaggacaggttttgaaatatcttgctccggaaatctcttacaaaagcctggttccacttggaattgcttgtgtaaatggaactccagtttcttcgtttgatagacaagatgtggatcggcttcttttcttttgcaaaaatgaagctattgtaaatggtctatattctcatctgccaagatggtcagcatcccttgttaaggacagactgaagggaactccagagtcaaaatcaagtacttttagtgcaaatggagttggagagtaccagaaacatccaatgaaagggacttccctagtagtcaaaccaaagctgaaatctgcaaaaatgaggcctattccacactcttcgaagcggcagatgcacccttttgtgggtatccctccgtcctttattcatgatgctagtcaagttaagcctagcttgccagcacctccggtaaggcataatgcattacctgttgctccaacaactcaaagaaaattatcatctgggacatcacgtgttgaaccagctgttccgttaaatcctctgccaatgaagaaacatgggtgtgatcggttgcctattggaatttgctctgaagaagacttcttaaaagatgtcatgcaatttctacttcagagggggcacacccgacttgttcctcaaggaggactagccgaatttcctgatgc

SEQ ID NO: 390679 - DNA, 889 bp, Oryza sativa
  unsure (1)..(889): unsure at all n locations
ctgcagaagatgctcgtggcttgctcaaagctgcgattagggatccggaccctgttgttttcttggaaaatgaactgctctatggagaatcattccctatttctgctgaagtgcttgattctagtttcgctctgccaattggcaaagcaaagatagagcgtgagggtaaagatgttacaattactgcatactccaagatggttggatatgctcttcaggccgcagatatattgtccaaagaaggaatcagtgctgaggtgataaaccttcgttcaattagaccacttgatagagctactatcaatgcatctgttagaaaaacaaatagattggtgaccattgaggaaagcttcccacagcatgggattggtgctgagatatgcatgtctgttgttgaggaaagctttgaatatcttgatgcaccagttgagaagaattgctggagctgatgtacccatgccctatgctgccaatcttgagaggatggctgtcccacaggttgacgatattgtccgtgcagcgaagcgtgcgtgctacagagcggtgcccatggcagcaactgcctgataggagagacctcttttacatcatctttcttttcccgtccggccaacatatgattcataatggtgtccaacaattgcccaaactcaaagcgagctaattttgcaagatatttccatgacccccacctattcttttagctgcagttgcatcactgcgttcgttggtggtgacccaaatttccctcttttttttttggtgtgtatgcgagaattatgcagcttatggtgattggttcacagtacacactggcgctagttacataaatgaaagaaaaatctgagctcttgatggacaaatnataaatatatttgatattatgata

SEQ ID NO: 390680 - DNA, 764 bp, Oryza sativa
  unsure (1)..(764): unsure at all n locations
tcgttcacgcgtccgcggacgcgtgggccgcgcttcctccagggatctgttaatcaaaatagtattcactcacttgtaatgaaaggtgcacaaggagcctcaaataattcggcaaaacacaagaaaagaaagtctgctgtgcagagatggaggccaatctccacagaagccgctgctccaaaagctgaccttaatgagatgtcaggtcctgtaagcaaacaagtggaagagaattcagcctcagatggaacaactaatgttgttattgaagtttccacctacaacgcatccttgccaccgaataaattagccacagaagatactatggaggatgctagcttcaataaggacatagataggtccaatctatctgaaaagtgttcctcttctgttcaggtagatgctcctctgatgcgccttgtgaaaggaaaaggtggaaccatgcagaagcagattgaagatgaaactggggtcaaaattatatttccatcttctaaggaggaaacatgtgttgttcttgaagctaaaactactgaagatattagaaaggcttcagagaaaattgcaaaggttcttgaagaggccgtgaaaagtccaatactagattactctcacttcatttcgcttccattggctatccacccaagccttgttgagaagctgaaccacttccagtgctcaatccttgggacttcttctaatgtagatagtgataagggtgaggacctaagtgaaggtctatggatgaaatngccatgaacaga

SEQ ID NO: 390681 - DNA, 551 bp, Oryza sativa
  unsure (1)..(551): unsure at all n locations
cggacgtgncnggtacgcgtgggcgnacgcgtggggtctgggtctgctgcttataagcgttttttgaatgcatcagcggatttagagagttctaaagacagcgttactatacctggaaatgaaattcttgtgcctaacacaaaatttgagcctgatccagatgatgttggtcaagatttttctcaggacaacactaaggtggagccagacccagatgataatgatgacatgaacgtggatgtagggactggggcatcttgggtcctcagtttctagatcatttacagaacaagataccatcagtcactcagagcctgaccctgatgatattcaccagcaaagcactgctggttgcctagaacctgaccctgatgattcctcaaatggttgatattcttagccaggagttgacgattgatgggaagcagaatggagaacctgatcctgacgataatggtactagcaaatttattcccgaacctgtaaacaagatggaagtagagactgaattgggaagtaacttcgcagttcagaattctgaaccctgatcc

SEQ ID NO: 390682 - DNA, 1012 bp, Oryza sativa
  unsure (1)..(1012): unsure at all n locations
cacatcccttggacttgcgaactctccacgcctccacaaataaagctcgtcccgaggaagggcggcgacccaccccccccaatcgccaaaaccctaactccgatccgatcgagctctgcttcccatggcgactgccgcgagccaggcgagcctcctgctccagaagcagctcaaagatctcgcgaagaaccccgtggatgggttctcggcggggcttgtggacgatagcaacgtgttcgagtggcaggtcaccatcatcggcccgcccgataccctgtatgatggaggctacttcaatgcaataatgaccttcccccagaattatccgaatagtcccccatcagtaaggtttacctctgagatgtggcatccaaatgtttatcctgatgggcgcgtatgcatttctatccttcatccacctggcgaagatcccaacggttatgagcttgcgagcgaacggtggacacctgtgcatacagttgaaagtatagttctgagcatcatttcgatgctctctagtccaaatgatgagtctccagcaaatattgaagcggctaaggattggagagaaaagagggacgatttcaagaaaaaggttagacgcattgttcgtaaatcacaggaaatgctctgaaagataaggagcacaagggggagtaagcgagtgctacaacaggtgcactacacttaactgtctgtcgtcaaacgactacctaaagatagcatttttgcttcttcccctgtatatttccccctcagtgtcattcgagtggtgatgttggtcttgtctccgagatgctcggaaatgttgcctattctagaaatttcgattgtattgtgtggcatggagtgtcaacgttgaggaatattttggaatgctgccaattagtcataattgtcgtaatgaacttttcataacagaaaacctagtttcacatatctgctggcttactgcagcagcccggaatgccatctcgttgtgagtatatnnnnnnnnnnnnnnnnnnnnnnn

SEQ ID NO: 390683 - DNA, 605 bp, Oryza sativa
aattcggcacgagaaacaacctcagatggttcaccatctgcccagcaagtgattacttctgataaaagatattacgattatgatccatacaggtggacaccagatgaaattaaagctgctactgggaatgaagattgcaccttcgtggaacataatttgaaagtccgaagtgtctacacagatgtggaggattttgaagggacaaaagatgccaacaaggagcctctagtaacaagttacaacagaaaatttatgggaacagtggactacatatgggcttccgaagatctgcagactgttcaagtgctagataccttcccaaaagaaattctgaaacaaacaattgggttccctaccaagaaatggggaagtgatcatatcgctttggtttgtgaattagcattcacaaaataatgctcgtcatacaggcaaagaggggttttgccttcggagccagcgataggtgcctgcctacataaacagcaactaccctagcacaaaccccagggaaaaagaatcttggggcctatatcaacgaccatttctacattaacaatataaagcagtacattgtttcttctaatccaatagaagaacgcatcata

SEQ ID NO: 390684 - DNA, 649 bp, Oryza sativa
  unsure (1)..(649): unsure at all n locations
gtcaaggttgatgcaatctttggaccgggagcgaaattggtctacaaacatttggccacattgtactttgtttttgtctttgatagctctgaaaatgaacttgcggtgcttgatcttgtacaagtttttnttgaaacattggacagatgcttcaagaatgtgtgtgagcttgacatcgtatttaacttcaacaagctgcatacaattttagatgaaatgatacttgggggacaagtgattgaaacaagttcagagcaaataatgagatctgtcgaagagattgcaaggctggagaaacagtcaaacacaaccagcctcataccgaagtcgatttcagagcgtttcagccgttgagccgtgagagcttcactcatgttatggacagaaactttgaatgcgtgagcagtagaaatcagattgcatttttctccagtcgcgttgcgattctctcaagtcgcgagcatctaccatttgacatgaatatgagagcttgtagccatcgtgaatatctctgtgtatcccgcatgaaattgaatatgtgacctgaaacgtgaattcttcagtactatctggtttgcttgccgattgccagttgaggcatcgtgtctcctagacaagaaaaatcatactagcctgtttctccttcggc

SEQ ID NO: 390685 - DNA, 676 bp, Oryza sativa
ccacgcgtccgggaggactgggaggtggagttcggaccgcaccgcttctcctacaaggagctctaccaggcgacaaaggggttcaagaacaagcagctgctcggcaccggcggattcggcagggtgtacaagggcgtgctcgcgaaatccaacctcgagatcgccgtgaagagggtgtcgcacgactcgaagcaagggatgaaggagttcatcgcggaggtcgtcagcatcggccacctccggcaccgcaacctcgtgcagctgctcggctcctgccggcgcaagggcgagctcctgctggtgtacgactacatgtccaacggcagcctcgacaagtacttgtacgacaagaccaagcctgttcttgattgggggcagaggtttcagatcatcaagggcgtcgcctccggcctgctctacctccacgaggactgggagcaggtcgtcatccaccgggacatcaaggcgagcaacgtgctcctcgacggcgagatgaacggcaggctgggcgacttcggcctcgcgaggctgtacgaccacggcgttgacccgcagacgacgcacgtcgtcggcaccatgggttacctcgccccggagctggtgcgcacgggcaaggcgacgccggtcaccgacgtgttcgcgttcggcgtgttcgtgctgaaggtcacctgcgggc

SEQ ID NO: 390686 - DNA, 456 bp, Oryza sativa
gcggttgtcgccgtgaagaaggtggcgcacgggtcgaggcaggggatgagggagttcgtggcggaggtggtcagcatcggccggctccggcaccggaacctcgtgcagctgctcggctactgccggccgcaagggcgagctcctgctggtgtacgactacatgcccaacggcagcctggacaagcagctgtacgaccagggcaagatcaccctgagatgggcgcagaggttccgcatcatcaggggcgtcgcgtccgggcttgctctacctccacgaggactgggagcaggtggtggtgcacagggacatcaaggccagcaacgtgctgctcgacgccgacatgaacggccggctcggcgacttcggcctggcgcggctgtacgaccacgggaccgacccgcacacgacgcacgtggtgggcaccatgggctacctgggcgccgagcttgggcaca

SEQ ID NO: 390687 - DNA, 652 bp, Oryza sativa
ccacgcgtccggcaccctcggcgggacatgcctcaacgtcggctgcatcccctccaaggctctgttgcactcatctcatatgtaccatgaagcaaaaagttcctttgcacaccatggagtgaaattttccaatctggaggtagacctcccagctatgatggcacagaaagacaaggctgtggcaggcctgactaaggggattgaaggtctcttcaagaagaacaaagtgacgtatgtcaaaggctttgggaaacttgcttcgccctcagaggtgtctgttgatctgagcgatggtggcagcacagttgtcaaagggaaaaacataatcattgctacagggtctgatgtaaaatcactccctggagtcacaattgatgagaagaaaatcgtctcatctactggggccttgtgcttgtcagagattccaaagaaattggtggttattggagcaggttacattggtctggagatgggttcggtctggaaccgccttggttcagaggtcaccgttgttgaatttgccccagatatagttccatcaatggatggtgaagtcaggaagcagttccagcgcatgttggagaagcagaagatgaagttcatgctcaagacaaaggtagttggggttgatacctccggagatggtgtgaag

SEQ ID NO: 390688 - DNA, 529 bp, Oryza sativa
ccacgcgtccgtgaaaaagctaccagctcccgaggcggctttaaactattacctgaatgaggatctttacttattcgatgaatttcaaacagcaagagtcccatgttctaggtgccctaaaattgatgtcctgtatgatgtatctgtcaatatccgggatgatgaggcagatcactgcaagccgatgcaggccggtcaaacacatggcaaccttcgttcgccctcactctatgcagcagtgcttagaaactgacaccgagtgtgtaatacctgacgacgacggtgaaggtatcgtcgattgtgtcaaaatatctcttgtcagtcaagagtgcctgttcctaattggaatggagtgcgtcatagtctcatagtatagagttttgataacagtcggtttccttttttctttcaaaagatagggaccactatagtcttaacattcttgataatccttcagaataggctagctgtgtcgcaataaaaataatatattcatgagatagatgtccctgctaaaaaaaccacaaaa

SEQ ID NO: 390689 - DNA, 626 bp, Oryza sativa
  unsure (1)..(626): unsure at all n locations
ccacgcgtccgcccacgcgtccggctttgctggttttatgaggaaagcccgtcataatttcaggcttgatgaagtgggcattcgcaggcaactgaacatggtagccaggataatcaaatacaaggacttccatctttacagacatttggagatgctccaagctgaggactgcttctttgttgacagaatggtggtggtcatgttccgaagggagctgacctttgagcagaccctctgtctatgggaggttatgtgggccgatcaggcagcaaaccgtgctggaattgcaaaatcatcgttggggaaactgcggttaggagcccctccaactgatgacttgctactatatgcaattgcggccagcgtgctgcagaagaggaaactgataatagagagctatagcagcatggatgagatcataagggagtgtaacagcatggctgggcagctggacatttggaagctcctggacgatgcgcacgatctagtaacgacccttcacggtaggattgagtagtgatatactgatacactctactcattttgtacacggcttgttgtattactttacacattttcatccttacgtcatatttcatctctttttcactaaaaaaaanaaaaaa

SEQ ID NO: 390690 - DNA, 798 bp, Oryza sativa
ttttgcggcgcacggattcaccgaggccagcgacggcggcaactgctcctcccctcttacaaggttacacgatgttttctgtgaggtgcgggccgcctgcattcgcctttggattggaaagggctgccattacgcatccttcaaagttcagtactttagtggtatgtggtgccaggggcccgaggccaagatatcctcgtgtgtggaaaactcgcaagagaatcggaaccgtttccaagtctcaaaagcttgtcgaatgtgttaaaggcttgtctaatgtaaaggaggaagtatatggtgctcttgattcatttgttgcatgggaattggagtttcccttgatagcagtaaagaaggcacttaagacccttgaagatgaaaaggaatggaaacggataattcaggttattaaatggatgtttaacaaaggtcaaggaaagacaatgggaagttattacactttgttgaatgctttgattgaggatggacgagtggaggaagcagaagagctgtatggaaaaatattctcacgatatttggagggtttgcctcatacctttttcatgagaatgatatctttatattacagactagaatcatatcagaagatgtttgagatctttgctgatatggaggagctgggtgttagacctgacggttcgattatcagaatgcttggtgaggtattccagaagttagggatgttggacaaatatgtaaaattaaagaagatatatccaccaccaaaatgggactatcgactcatccaaggccaacgccttcagagtaaaagtttac

SEQ ID NO: 390691 - DNA, 500 bp, Oryza sativa
aactctgtagctatactgaccagagaagctcacatggatccgtacactagcagggctccggcgagtggtggtgtcgccgccggcgacgacgacgaggaggcggcgtgcctgcaggcgtttgagctaatgtgcatcttcaccgtccccatgacactgaaggcggcgatcgagctcggcctcctcgacgcactagccgccgccggcgacggccgcgcactgaccgcggacgagctggccgccgcgcggctcccggacgcggcgccggacaaggccgaggcggcgtcctcggtggaccggatgctgcggctcctcgcgtcgttcgacgtcgtcaagtgctcgacggaggccgggcccggcggcgaaccttcccggagacgatactcgccggcgcccgtctgcaggttgttcaccgccggcggcaacaaccaccgtggatctctggccccctcggtcttgttcggcgtcgacgaggactacctgtgcacctggcgtcagttggc

SEQ ID NO: 390692 - DNA, 849 bp, Oryza sativa
  unsure (1)..(849): unsure at all n locations
tcgaccacgcgtccgcccacgcgtccgcccacgcgtccgtgcagttccttaaagagcagaaggagaacagtgtaatggctggtgtcgtaaaggagatagagagtatgctagctcggggaaatctggatttgccaattacactctgttttgcagtaactagaggagatgattttttgttgcatcaacttcttaagcgtggtatggatccaaatgagtcagataatgacgggcataccgcactgcatatagctgcttccaaaggaaacgagcaatgcgtcaggcttctattagaatatggagctgatccaaatgccagagactcagaaggaaaagttccactgtgggaagcgctgtgtgagaagcacgccgccgtcgtgcaactattagtcgaaggcggcgcggttctgtcgtcgggtgacacgggcttatacgcttgcatcgccgtggaggagagcgacaccgagctgctcaacgacatcattcactacggaggcgacgtgaacagggctcgccgggacgggaccaccgncctgcaccgcgccgtctgcgacggcaacgtccagatggccgagctcttgctggaacacggagccgacatcgacaagcaggacggcaacggctggaccccgagagccctcgccgagcagcagggccacgacgacatccagctcctggtccggtcgcgcaaggcggcgacagcgagtggccaccatcacgtcccaagctccaccaccaccatggtggcgccggcggcggcggcggcatcactgatcgggaggttcaacagcgagcccatgatgaagaacatgatccacgaagacgccgacctggccatccgggttctccccg

SEQ ID NO: 390693 - DNA, 409 bp, Oryza sativa
cccacgcgtccgcactaatacacaatcaaagtagttccgagttctaattaacgtacgtaaaagaaggagaagagatggctgcttctcgccgcgtcgcgatctccctcctcctcctggtcgcggccatggcgagctccttctccttctccccgtgcaccgcgcagtcgtcgtcgtcgtgcgcgagctacaccttctccagcaaccagcagtacggctcgtgcgccgccctgccgcgcctgggcgccacgctgcactacaactacacggcggcggccagcaccgtcgccgtcgcgttccgcgcgccgcagccggcgggcggcaaaggggtgggtggcgggggggatcaacccgagcggcagcgggatgggggcacccccataccccgtgtggttcgcactccaacggcagc

SEQ ID NO: 390694 - DNA, 528 bp, Oryza sativa
ccacgcgtccgcggacgcgtgggcggcgagttcgagctacgcttcgacgccaagaccccaccaaacctcagcgccaccgccgccggcgacgacaacgacaacgacaacgacgacgaggtcgaggcgaagaagattacgatggtggtgtccccatcgccgtggcgcccggtggagccggaggcggcgagcaagaaaaggtcaccgccgccgccgccgcggcgccccgaggggaaggtggtgaccgggctcgccgccgtgctctaaccgcggcgaagaactcactttactacactagctaattaaccagctctcctccctcgccaattttctctgtttttttttttcatttttccatcgccgctttgatccgtccgaggcttagctcatggtgttttctcagttttttttccgattttttggaaaaagacatttacagaaaacacctccatttttcttttttcttttttttattctagaacaaattttggtttccacaaaaagggagtgcatggagcagtagctgtgaca

SEQ ID NO: 390695 - DNA, 1438 bp, Oryza sativa
ccacgcgtccgaccccccgcacgattccttcttggtgctctaaatggcatgctggccccaataaaggcttattccattgaagtttgtcgacctgggcatcaagctctaggagtgtcaatagtaagcactggttggggcgtagggcttgttgtgggtccagccattggaggctactttgcacagcctgctaagcaatatccaaatgtattttccgagaagtcaatatttgcgaggttcccatacttcttgccatgcctttgcatctcactcattgctcttgttgttcttataagctgcatatggctaccggagacacttcataagcataaagatactgaaggtgaaattgaaatgattgacaactcaagaagtacacttgaagaagattcacataaacagaagagtctctacaagaactggccattgatatcctctattattgcatattgtgttttcacccttcatgatacagcatatagtgagatattttccttatgggctgtaagtgagaaaagatattggtgggttaagtttttcgtctaaagaagttggtcaagttcttgcagttgcaggtgctggtctacttgtgtatcagcttttcatctatagatcggtccataaatttcttggatccatcaattcatctcgtattgcatcagctttatctgtaccaattctcgctacttatccctttatgacacacttgtcagggtttagacttgggaatagctctttaccttgggaaccattttaaagggtgttttatcaataactatcataacgggcacttccctactccaaaataatgcggtttcacaaagtcaaagaggtgctgcaaatggcatatctacgacggcaatgtcattcttcaaggcaattgctccagcaggggcaggagctctgttctcttgggcccaagaacgccaaaatgaagccttcttcccaggggatcaaatgatattctttattctgaatgtgattgaattaattggacttgcgttgaccttcaagccgttcctggcaataccaaattacaacaattatcagttgaagtagaagctggaatagcacccccaagcaatgaagaattattatgcaagactaccacttgggttgtggtttactgaattgatgtttggcttaagtgatgtacatagaaatatatggcccatcttcagaatcataaaattaatgtacaagagactgtttatctgaaaatgttcttctttccatgaagaccctatgtatggtgatggattagagtttacattgcgtggatgcaagcatagacttgaaggcagtgcaatgactactaattttagcttccacatttcttgtacgcaagcctgtctctctccccagcttcaaaggaatggggagatcttgtttcatgcgtacagtgttggatgtttactactccaaaaaaaaaaaaaaaaaa

SEQ ID NO: 390696 - DNA, 496 bp, Oryza sativa
ccacgcgtccgcgatcatcagtagctgcctgccccccatagcgagagaaaagggagctcccagcttgagctccggcgaggtacggagcaagagcgggggacgatggttggaatcttctccaggttctccgccggcgcacaccgccgcgccaagagcgccgtcgaggttgtggagacgttggcacccaacatgaacagcggagagcctgattcacaagctgttcctgcagatagtccgcatggcattgaggtcggcgtcgagttcaagccggtggagcacccagtggagcctgtcaaccttgatcaacctgtgaaatgtccacttcctgaaccatctatacttcatgatgggaggatatggaaagaaaggatcgctacagcgggtgtgagggtgatgacagacctgtccagtcgtgaaggaaggatcgcagcttgagtcccacagcagcggagcaaggtcgcgatccgcaataccgaagcgcgccatattccccttg

SEQ ID NO: 390697 - DNA, 1031 bp, Oryza sativa
ccacgcgtccgcccacgcgtccggagagagagagaaggggggaagaatggcgtcgcgcctcctcgcccgatccaaagccctagcgctcgccctgtcccgcgccgacgcggcggcgccggggcccgccgccggagtgcagtggctccgcacgctgtcctccctcccccgcgatccggccgccgccgcctcccccgcccccgcgccgcgccaacccgccgtggggtcccctctcggcctctccaagattccaggatatgaacagacatctcgactcagtggtacacaagtattgcctcgttggttttctactggaacatcaaatggatcttctgctcagcaggagggagccaccagaaaggtaatggcattcagcccattagaagcaagcatcgccaaacccagaaaaggtccattgacatctgaaagctggaaagtgaagcagacagagctactaacacgatctacgtattacatgatcccaactctgcttcttgtatcaaagaacagcatcagtacgtctcttctggtcgcatcagtattccatcaagtctacatgttctacaaggagatccttctggactatgtccatcacgatatcaccaggaagtgggttttcatatacttcaagattctcctgataatcatggccaaggaaacagttgtctacttcgatttattttaagttcatggtagtttcttgagagacgtgttaggcacccatctgtacactgaaaataatcaagatggacaaatgcctgctcgctcggtttcctctcgttctgccagttccaacttgctatacttttttctgacttttggctgaactgatttaaggccaactaaggcaccaaacaatgtatttcttcaagcaatgatcagtttgtccctaaaaccttagattgaaaaagtctcctgattttgtaataatggtatatatcaaccttgagttctgttaatttctcgtcttctggaatcgctcccagttgtcgtgttttgcagtaatatatgagctactgttagtctaaaaacaa

SEQ ID NO: 390698 - DNA, 530 bp, Oryza sativa
  unsure (1)..(530): unsure at all n locations
ccacgcgtccgaagttaaggagagcttctctgaagataaagatgttgtggtaggcaatgagctgcataatggaggccaaggtgctgatgacattgcaaagaacataacaggcattgtcaaggctgatgatcaatcccagcttgcagagaaggaagaggcgagagcgaaagtggacaaggtttggagaaaagatgaaccgaagagcaacgatgtgattgaggaaaccaaaagcaaactccttgaggagaggaagagcagggtgaaggctctggtaggcgcgttcgagaccgtcatgtccttcaaggaatagtgctcagccctacaatgcccatgcccatctcaggatgagttactcctgccatgaaaatatatccaatcacgagttatgttcatatgatgagttccttggttcattgtattcgatgtggtaattttttttccctcaatggtcattgcatttgaatggtgtagtgctgctgctgttcatgtangaaatgaatggaaatgtgattcttggtgattgggagggg

SEQ ID NO: 390699 - DNA, 355 bp, Oryza sativa
gtcaagttccaaatggtgcaccttctaccgagacaccggagacagcagataagccttcttcaactgagccatcaccagcaccacctataccaaatgtgcctgctgtataaaatttgtcggattcgattcgattcttttagcagtgtgccagttttttcgtatgctgatgtattcattccactgtaatttttccatactggtatagttttctgtattcagagaccgtgggcagtatgtgagtagccctgtacatcgactgtccgcgttccaaagagaactaccatatgcattgtgtgacatacttagcgttttgctgtccgtgattaatcgagaggacatactaaagttttgcttg

SEQ ID NO: 390700 - DNA, 471 bp, Oryza sativa
ccacgcgtccgaacggggcagccgatcgtcactcctgccaccccacaacaagatctcccacaagaactcaacgcgcccgagatcagacctaatctgatgctcttttttccctgaaaggacagtacaaagtatcaaacttgtagaagcagaagatagctgtgaatcatctgtcttgtcttccatgccgcgttggagtggattggattggatgggccttcttttggtggttccctgccaatgtatcactgattcgtttcttggccgcggaagacgatgaagtcgctgccatttgagcgcgtgcgcaagcgttgttgtggttggtatacggagttttatgcatttttgtgtagctaggctgcccttacgggatgcgatctcattcattgattattgttcacaccccaccggtggatcttatataaggcttccttttttttttctctaaacgaaaaatttaccattaataactac

SEQ ID NO: 390701 - DNA, 718 bp, Oryza sativa
  unsure (1)..(718): unsure at all n locations
ttgtcaaacgtagcagcgtcattcacacacattatcaaaagtgcagagcctgcattcagtgttttggtatcaaggttccttcttggggagacgtttccggttcctgtatatctttctcttcttccaatcattggtggatgtgctcttgctgctgtcacagagctgaactttaacatggttggattcatgggtgccatgatatcaaaccttgcatttgttttccgcaacatcttctcaaagaggggcatgaaggggaaatctgtcagtggcatgaattactatgcctgcctgtcgataatgtcccttgtcatactcacaccattcgctatcgctatggagggccctcaaatgtgggctgctggttggcaaaaggctcttgcggaagttggtcccaatgttgtctggtgggttgctgcacagagcgttttctaccacttatacaaccaggtgtcttacatgtctctggatgagatttctccattgacatttagcattggcaatacgatgaagcgtatatctcgtgattgtttcgtcaatcattatcttccacacacctgtccgccctgtcaatgcactaggagctgccattgccatccttggcacattcctgtattctcaggcaaaagcagtgagttcaaaaaagatggtaatgttcagggccatggatgaagaaaggatccagatngaaaatgtctctgccaaaccagtagcaagcact

SEQ ID NO: 390702 - DNA, 575 bp, Oryza sativa
ccacgcgtccggagatagagcggatctgcaacagggtaaacgacgccatccttgaaacagcagctattggggttccacctctagggggtggccctgaacagctgaccattgccggcgtcttcgaagaccaaagctcacaaacagaggattcgaatcacctgaaactggcattcaacactgctctgaagaaacttaaccctcttttcaaggtttcttcagttgtggtagtcccttcgctccctagaacagcctcaaacaaggtcatgaggagagtcctccgcaaggagttcacccagcagccaaagcactccaaaatctaggtagttacaaaaaagcaaaattggttctattgcatcatacgtacacccaaaaggaaaaaacttcggcacagcaaactgtgaatacacatgtctggttaaaaatcactaaatcagttgtatagcaaggcttttgttctctccggtgtgaaatgagatgatagatcaggtcatgatgaggtactgaaagtgttattgctacattttcctgtcatatgtttttcgctatgtgaataaagtctttgtgggacttcactc

SEQ ID NO: 390703 - DNA, 621 bp, Oryza sativa
  unsure (1)..(621): unsure at all n locations
cccacgcgtccgcccacgcgtacgcccacgcgtgcgaccgcttctggtggatagcaagctaggctcgggggaatctcgccgtcgcatcaccgccgccgccgccgcccgccggttcgatctgagaagccgccacctcgccgcccggatcccgatggcgcggcttcactggctggaggcgatgctgccgctgggaatcatcggcggcatgctctgcatcatggggaacgcgcagtactacatccacagggccgcgcatggcaggccgaagcacatcgggaacgacaattgggacatggccatggcccgccgggacaaggtgctcctccatcaggcctcctccgagaacaactaggatattgatcaacaatatctagcctggatgttgatgaagttatttcaaatgcccagaattactcctgttagtttccgtgtataatgggaagctgggcttatgtttttgtttacaacttttgaatattggatgaataatgtgtatctggaatctgtttaattacacaaagtgggtgtcgcttgtcaaatgtgtacccatttctccccaggagctgatcatgacgaaaatattttggtggtggtggtggtggtgtgtnttttttctctact

SEQ ID NO: 390704 - DNA, 513 bp, Oryza sativa
tgattttggtagtgcattttcgggtatattgacggatgagcaaggaagagttcaagcattatgggcaagcttttccacccagctgaaatatggttgtagcagttcggaggatcatcaatttgttagaggtataccaatatatgcaataagtcaagtccttgagaaggtaatctctggtactcctggaccatttcgtattatcaatggagttaggaggccaataccattcatcagacttctggaggtggaactctatccaactttgctttcaaaggcaagaagttatggattgagtgatagctgggtgcaggctctagctaagaaggaccctgtgcgaagacaagttttgcgggtcaaaggttgtttggctggatccaaagcagaaaatctccttgaacagggagacatgatccctgctatcaataaggagccaattacaggcttcctagatttcgagaatgcttgccagaaattggaccaatctgttgattcagatggagtccttaacatgac

SEQ ID NO: 390705 - DNA, 538 bp, Oryza sativa
  unsure (1)..(538): unsure at all n locations
cgtccgcnanntcccggtcgaccccgcgtccgcggacgcgtgggcgccgccgcgcttctcgccgccgcggcgagccatggacgccgcaggttacccgaagatgcaaggaggaggggcgtcctcctcgtcgtcgtcctcggcttcctgccgcgccgccgacgcagccgtgtgggacgcggtgcagcagcagaagcggcagcgctgccagggttcttcatccaatgatcaagttggactcagtactgaaaataattccttgcaagcacctgaacctgatctgcagaattctgactgtgtggaagatgaggaagaagattactatttgtatgatgaggatgatgtctgctatgatgatgatggagactatgaatttgatgaaactgacttcaatcagcagctagctgataagtttgatggtttgatttgccttcgggagtggaggctaccgttccatggctgcaaaaaaaggatattgctgatggacctagcacttttaagtcaatggcagaactagatgctgatatactaagaaatatga

SEQ ID NO: 390706 - DNA, 1132 bp, Oryza sativa
  unsure (1)..(1132): unsure at all n locations
ggtaccgatccggaggttccagccacgacccacgttttccccttgggcggtcactgatgaactgtttgagtaatatccctcgggaggcgggtggctttgagtacaagaaggctattgttgattcaattatcatactcattagagatattcctgatgcaaaagaaagtggtttatttcacttgtgtgaatgcattgaagattgtgagttcacttatatgtctactcagatacttcactttttgggaaatgaaggtccaaagacatcagatcctagtaaatacatacgttatatatataacagagtgatacttgaaaatgctactgttcgagctagtgctgtaagtactttggcaaagttcggtgcattggttgactcactcaagcctcgaatttttgtccttctgagacgctgcctgtttgatggtgatgatgaggtgcgtgacagggccacgctttatctcaaattgcttggcggggaagctacagttggtgaaactgagaaggatgtgaatgaatttctctttggttcatttgatattccactagttaacctggagactagcctacaaaactatgaaccatcagaggcaccttttggatatttcatctgtatctttggaaactaaatcacaacctcttgctgagaaaaagactacgggcaaaaaagccaacaggcccagcatctgctctcagcggtccagttcctactgttgatgcctcatatgagaagcttctttcatccattcctgagtttgctggttttggaaaactctttaagtcatcagctcctgtagaattgaccgaagctgaaactgaatattcagtcaatgttgtgaagcacatttatgacgggcatgttgtgctccaatacaattgtaccaatactatacctgaacagctgcttgaagaggtggtggtttttgtggatgcttctgaggccgatgaattttcagaagttgcaacgaaatcattaagatccttaccttatgattcaccaggacaaacctttgtggctttttgaaaagctagaaggtgnccttgctactngggaggttctcaaatatactgaaatttattggtaaagagggtgatccatccacaggtgaagctgatgatgatggcgttagggtga

SEQ ID NO: 390707 - DNA, 405 bp, Oryza sativa
  unsure (1)..(405): unsure at all n locations
ccacgcgtccgcttcagatccatcttctcctcctccctcctccctccagatccaccagcaccctctcctactcccttccaacaggcagcggcggttgctccggcggcgtttctcgggtggcggggcgcggcgctccaacagcagcgtgtggcggcgacggcgacagaacgtgtggcggcgacggaaggcgagcgcgccgcggtagcacggtccctccgcctctctccctcctcccttctctctccacggccgccagcctcccttctctctccaccgccgctagcctcccttcactccccaccgctgtgtggggaaggaggcggcggcgggggaaggaggtgcggcagttagcacgggtaagagggttgcggcgngttctcagcggtgaggttgcngatctaggct

SEQ ID NO: 390708 - DNA, 519 bp, Oryza sativa
  unsure (1)..(519): unsure at all n locations
ccacgcgtccgaacagatgcagctgttgcatctattgttcgatcttgtgcaagcttggaattgcttgatttaagcggatctagtatcagtgataatggtgtcgggatgatctgcaaggcatttcctcatactttatcaaggctactccttgctctttgcccaaatgtgacgacgtgtgggatccaatttgcaacagcacaattaccacttcttcagctaatggactgtggaatgaccttatgtgctagtttgcagaatgaaaaacaggggccttattttggtgaaattaacggtgccattagattttgtccaaaattgcccacctcgaaaaaacagtctactaaccaaaagcttatcattaagcatggcaatctgaagaagctcagtctatggggctgctcagcaatagatgctctatatctaaattgtccagagctgaatgatctaaacctcaactcctgtacaaatctaaatccagaacggttgcttcttcagtgtncaaaattanagaatgtgcat

SEQ ID NO: 390709 - DNA, 684 bp, Oryza sativa
ccacgcgtccgcagacaggctccattttccactctcccctcctggcctcccacctcccatccggatctcgccgcgccgcgccgcgccacccttttccgcgccgcgtcgtcgggcatgggcgtcgccaccaacggctcctcctcctccacctcggagtcggcggagaccgcgcagtcgcaggcgtacaagttcctcatctacggccggaccgggtggatcgggggcctgctcggccagctctgcgccgcgcggggcatccccttcgcctacggcgccgggcgcctcgagaaccgcgcccagctcgagaccgacatcgacgaggtcgcgcccacccacgtgttcaatgccgcggtggtcaccggccgccccaacgtcgactggtgcgagacccacccgaccgagaccatccgcgccaacgtcttgcggcacgcttacgctcgccgacgtctgctcgcgcccgcggcctcgtgctcatcaactaccccacgggctgcatcttcgagtacgacgccggccaccagctcggcacagggatcgggttcaaggaggaggacacgcccaacttcgtcggatcattctactccaaaaccaaggccatggttgaggaactgctaaaaaactacgagaatgtatagatacttcgtgtaaggatgcctatttcatccgatctatccaatcctcgca

SEQ ID NO: 390710 - DNA, 684 bp, Oryza sativa
gcttcaatgccccaaaaggttgccacgagctggaccctgcagcaactccagtggaccttcttaaggtcattacagaagttacggaagatacagcaacacaacctgctaagtagaagagggcaactatgaacactgaagatagcttggatgtctcaactgtcaaatgcacttcactgaactcaacatttgttggtcacttaagttctagtatgtcatcttatttttggctgatgacttggacaactctaccagggcaagcagcttatgtcgcagaattctgacataattcttaggcattttctaacattttggttttactgcaatacggatatcttcctgagagtaaaagactatttggaggccagttttggcaattgacgaggcgaccaagtggtgcttgctgaggctattagtcaacggaagctaagaagcctcatgaatcgctgaaggtgctacttgtttgtcactctttaaggtacggcgctctgcatccacagctgaatttgaggggagaaccactaggcttccccatgtacccgagtttgtgtactggtttacttatttagatgttgtacttcctttaatctatagtaattcatccctataatgttgaacgtgatgattcgaaattctagttaaattctgaggaccagttcgaaatttttaatatcattatattttagt

SEQ ID NO: 390711 - DNA, 760 bp, Oryza sativa
ccacgcgtccgcggacgcgtgggtttcaaaagctgcttgtcacccacttgatgttgtaaagaaaagatttcagattgaaggattaaaacgacatccaagatatggcgcccgaattgagagcagcacatacaagggcatgtaccatgccctaaaagagattgttgcgaaggaggggtttggaggcctttataaaggacttttcccatctttggtgaaatcggctcctgctggtgccgtgacatttgtggcatatgaatacatctcagactggatagggagcaaagctggagtcgagtgagttcttggatgaaggagccattgagagatacaacatacaatgatgagagaacagtgtccactcttaattgttttgtgaccgcaaggtcgaaagttaaaaagtgcatacaatcccttgagagctgatacttggaaagccttgcatagaattagctactcttgtcatttctcttgcctttttgccccattgacctgtgttgttgcattcgttgagatgtaacagtgaggatgagtaaaactaaggaaagtgtagagcttgtgacgcttgatgaaggccggggagcggcaggcatttttgttaagatgatattatctcactcctatatgtccctcactcacataatgcagttaatgtgaactgttacatgattcgtagcttatctgcctttatggctcatgcaaactgtaactctgggagactgggactgaaagtcgttatttgcttcgtgaaaaaaaaaaaaaa

SEQ ID NO: 390712 - DNA, 544 bp, Oryza sativa
ccacgcgtccgcggacgcgtgggggagaaacatggagaggcttgtgttagcatgtgggggtgaagctgttgattcagttgatgatttgactgaagattgtcttggctgggctgggcttgtctatgagcatactcttggtgaagaaaagtacacctttattgagaatgtgaaaaatcctcgctcttgcactatactgattaaagggcctaatgatcacaccattgcgcaaattaaggatgctgttcgcgatggtctaagatctgttaagaatacggttgaggatgaagcagttgtgctgggagcaggagcatttgaggttgctgcgaagaagcatcttattgacaacgtgaagaaaactgtcaaaggacgagcacaaccttggggtggaggcatttgctgatgctcttcttgtcatacccaaaacactagcagaaaattcaggtctagatacccaagatgttattgtctctctccagaatgaacatgatcgtggatttgtggggggattgaaccatcactctggcgaaccaattgatccccaaat

SEQ ID NO: 390713 - DNA, 476 bp, Oryza sativa
  unsure (1)..(476): unsure at all n locations
ccacgcgtccgataagaggaacgtgcgatatgctgttgccataaggcctttgtgtagaagatgatgaggcacatagttacatatatagccatcaaaggacatggtatatgcatatgatcaaggaccaagcaaagccagatgatatcctcaaagccgctttcctatgcacatgtttgactacactttattaatgcatcacatgctaactcgaatgcacgcatgcgcctgaactcctgtcggtcataccaaaatgcaaacccactgaacatggactttataccacacattgctgaatcttgccaagattgtcacttcatcatatggagttttcaagaagaaagcgagggaacagggatggataatgtcagtatcattgcttaaccctggacgagctcggttgtgtggaatagtacctcaatgacccaataatattcgtttgttatagttgaatggatggtacaattttntttcataca

SEQ ID NO: 390714 - DNA, 673 bp, Oryza sativa
ccacgcgtccgccacgcgtccgcaaggacttatttcaatctttatacgcttcttggtgtcactctccgatggctacaataagcttgtgtctacttgcgcaggcatacaatcatgcaatttctgttatccagtctttgggagaggaggatataaatgtgaagtttctcgtgcaactagacaaattaatccgtcttttagagactcctgtatttgcttacttacgtttgcagcttcttgagcctggaaaacatacctggcttctcaaaacactttatggtctcctgatgctactgcctcagcaaagtgcagccttcaagatcttgagaactcggctgaagactgtgcctttcagtgaaaatttgaaacgcacatcttcaacaaatccatactctcagattctacaagtgacagaagatggtaatcgaaatcacgacactcagagctacaatgcaatcaatttcccatcccggctccaccagtttgagagcatgcagcagcagcacagagttcatctaaagaatcaactgcaatcccaaaaatctgcttcagctatagtattatcacaggaaattcaaagatacgaagaagcacattcctcttcgacatcaagagattggcaggcccccttcgagaacatccagaggcatttcatgatgcattttgttgattggat

SEQ ID NO: 390715 - DNA, 406 bp, Oryza sativa
ccacgcgtccgggcatcagcaggaggtgtgtggcctcaagtggtcaggatcagggcagcagcttgccagtggtggcaatgacaacctcctgcacatatgggatgtgtccatggcatcctctatgccgtctgctggccgcacccagtggttacacaggcttgaggatcacttggctgctgtgaaggctctcgcgtggtgcccattccagagcaacctgctggcatctggtggtggtgggagtgaccggtgcatcaagttctggaacacacataccggcgcatgcctcaactcgatcgacactgggtcacaagtgtgctcgctggcctggaacaagaatgagagagagctgctaagctcacatggattcgctcagaatcagatcactttgtggaagtacgccgccaat

SEQ ID NO: 390716 - DNA, 457 bp, Oryza sativa
ccacgcgtccgcaatctttggccacaggctaaaaagatggctttcgatctcaagctaaccgcatgcctcctcctcgccgtcttctccctcgccgccgccgccgactgcgagtgccagcccagcgacgaaggccacgacgcggccaagtcccggacgctcaaggtcatcgccatcttctgcatcctcgtgggcagctcagcggggtgcgccattccgtcgctcggccggaggttcccggcgctccgcccggacacgagcctcttcttcgccctcaaggcgttcgccgccggcgtcatcctcgccacggcgttcgtgcacatcctcccggtgtccttcgacaagctcggctcgccgtgcctcgtggacgggccgtggcggaagtacccgttcacggggctcgtcgccatgctcggcgccgggccacgcttctcctcgacaccgatcgccaacggctact

SEQ ID NO: 390717 - DNA, 624 bp, Oryza sativa
ccgctctcgccgcttcactggtgccctcgtggagtgcggtggtggtgctattctcctacctaggctaccttgccaccgctggcgctgtcctccctggcaagcttgtccccggagccgtcctcccggactcgtcccgcctccactaccgctgcaatggtttggtctcgctcctcctcttgctggtgctctctgcgctcggtgtctacatgggatggatgtcccctacggtcattgctgaccgtggaatcgagctgttgtctgcaaccttcatttttagtgctatcgttaccgtcttactgtattattcaggattaaggtcccatcataaaagctcttccttgaaaccgcatgtcactgggaacttcatacaagattggtggctgggagtgcagctcaatccccatttcatgggagctgacctcaagttcttttttgtgagagctgggatgatggcatggttacttacctcccgatctttgtttgcaaagagctacctagctggttcagccaatctttcagtcattctctaccaattcttttgtgcgtggtatattgtagattacttcgttcatgaagaattcatgacttcaaccttaattttttttattatttccagatgggaca

SEQ ID NO: 390718 - DNA, 630 bp, Oryza sativa
caccaccatctgcataatacttccttctcaaatcccaaccaacagttgcagtagagtcactagccgcccactgcaactgaaatggcgccggcgagcgtgaaggttttcgggtcacccacctcggcggaggttgcccgcgtgctcatgtgcctcttcgagaaggacgtcgagttccagctcgtccgtgtcgacgcgtaccgcggcacgcagcgcatgccccaatatctcaagcttcagccgctcggcgaggcgctcacgttcgaagatgacaacctcaccctgtccgagtcgagggggatccttcgccacatagcgcacaagtacgcgaggcagggaaacccggacctgatcggcacgggcgcgctgggagcgcgcgttccatcgagcagtggctgcagacggaggcgcagagcttcgacgtgcccagcgccgagaatggtctacagactcgccttactgccgcccaacatgcccaagcagaacgacaacgggaacgggaacggtgacggctacggcaacagcaatggcaaggaggtccaagtggcgaacgcgtcgagcaagcgcgtggtggccggcgcgacagacgggaagacggcggcgagcggcgccaacggcaacaagcagcagcag

SEQ ID NO: 390719 - DNA, 643 bp, Oryza sativa
ccacgcgtccgtgccaagggagaagtgactggtcattggtatggttatgttttcctgatgatgtgcctgtcttgctacataaacatattggacaaggagagatcgtggaccatctatggaggggtcagatgggtttgtctgaagaagagcagaggaaagccctggagtctaaacacgtgacaaatggtgtgaccgaggatggtgcccatgaatcccctgaagaaactaccaacggttctgcttgcaaccctgtcgctgcaggtggttgctgccagggcaatggaggctttacctgctgccagagtgatctgccaaaggaggataagagcatcacagctgagcagaaccagaagagctccgagaagggggctgacaaagagtgtgctgctggcagcaagaagaggcacatgaagatgtgttccatgccaacctggtttgagacatgggaaacggctgacacctatgctgctcttggtattgttgcagctgctgcatcggtgttcgtcgctttcaggatctacaagaacctcaattgagaattctcagaacagggctaggttttgggcactaaggacagtttacctgctgtaaacagtctgttgtgagaataatatcctacgtgtgcataagtcatgcagattag

SEQ ID NO: 390720 - DNA, 631 bp, Oryza sativa
  unsure (1)..(631): unsure at all n locations
agaaatagagttgcagtagtggtggcaaatgaatggaaagatggcaatgataaagtaatgcctgttaaacaatggttagaagaacggaggattttacaagggagaaatgcagcaactccgggataaactggctatagcagaaagggccgcacgatcagaagctcaattgaaagataagttccagctacggcttaaagtacttgaggaaggtttgagaatgtcaacgactcgaaccaatgttagtgcagcacgccgccagtctattggtggtgctgatagtttatccaagaccaatgggttcctatcaaaacggccatcattccagatgagatcgtcagtatctaccaccacaactactctggtcaaccatgcaaaaggggcatcaaagtcttttgacggaggctgtagatcacttgaccgttacaagggacatgtaaacgggtctggtatgaatgtatctacggactccagtgaagataaggaatcaaacaactcagatgagaaggctaacgaatttacatcagttgagacagaggatacggtatcaggtttgctgtatgatacgctgcaaaaggaagtaattgctctaangaagcttgccatgaaaaggaccaaagcctgaaagacaagg

SEQ ID NO: 390721 - DNA, 756 bp, Oryza sativa
ccacgcgtccggtttcaggcaaaatgctatagttcttgaggaaaaagacggaaggagaaggagctacgggcccagatacttgctgaagccgaagagtttaagaaggctttctatgagaagaggatacagaactgtgagacaaacaaggtccataacagagaaagagagaagattttcgtagctggccaggagaaattccatgccgaagcagacaagcagtactgccggtcgatatcggagctcatcccacatgaaatagctaccattgagaagcggggaaagaaggacaaggacaagaagccatccatcacagtcattcagggccctaagcctggcaagccgacagacctctcacgaatgcgccagatcttagtgaagctgaagcacgctcctccaccgcacatgatgcaacctccaccagcgtctgctgctaaagacggcgcaaaggatggtgctaaagacggcacaccagccccagcaaatggaaccaagaagcctgcagagagcaaagagaaacctgccaacggatcgcctgcggaagcagagaaggagcagcctgcagcatcggagtaacttatggtagctctacaggaacgcccgaaccttgactgcagatatggaaatgcattttatttctaatccctggatctgtctatcctgtatttatctttttatggagaattgcgtcaggatggctatgtatcagctctcagaacattcagcttagtatcacagcaattgtactctttacttgtt

SEQ ID NO: 390722 - DNA, 828 bp, Oryza sativa
  unsure (1)..(828): unsure at all n locations
tggaaggaaattccancggatacctttngccttaaagaaantccatgccctggggncttcccggacactttatggaggaccaaggaccagattntgaacccacatacttcaagccatttgctggctattacttctccgttgatggttgccagcagggacaaagatggataccattttctgaactggacgggttgaacgatgttatcaatgtccagcggccaccggattgggacagcagaggttgaagtctgctctggtttcacatccaaaatgcgccgaggccgctgttgttggaattgaccatgaggttaaaggccagggaatttacgctttcgtgacattggtggacggtgttccttacagcgatgagctacggaaaagcctcgttatgactgttcgcagccagattggggcgttcgcggcgccggacaagatccactgggcgccggggctcccgaagacgcggagcggcaagatcatgcggaggattctgcggaagatcgcgtccaggcagctggacgagctcggcgacaccagcacgctcgccgaaccaggcgtcgtcgaccagctcatcgcgctcgccgatagctagctttagctaaagccaccgtcgtctcgtcgcgcgcgaggaacctctgctcggccgagagtctcattttcgttatgagcaagattacattcttattccatcaaaaaaaatatgaatgatttttttatgtgtcagaaaaaatggacttttttatgtgctgccgcggcttacgatcggtgtaaatggtgtatcacagcacatattagagaagtatacttgtgtacaaaaaaaaaaaaaaa

SEQ ID NO: 390723 - DNA, 1403 bp, Oryza sativa
  unsure (1)..(1403): unsure at all n locations
cccggtcgaccacgctcgggaccgtgggggaaagaaactcatagctctcaaagatatagtagatgtgtcgctggctgacagtgcgaagaatggagtcgatgtaggcatttctttgacatacgaaaatcagtcggcaatgaagagagaagacacaaaatggacgtcaggcagagacgtttggtggcaggatgttgtgccccaattttccaacaaaatgtgatgtggaatgggtagatgcagaggatccattgtttcttctatatacaagtggtagcacaggaaagccaaagggtgtattgcatacaacgggaggctatatggtgtactctgcaacaacatttaagcacgcatttgattacaagccatcagatatatactggtgcactgcagactgtgggtggattactgggcatagttatgtgacatatggtcctctcctgaatggagccacagttcttgtttacgaaggggctccaaactatcctgatcctagtcgttgttgggacgttgttgacaaatacggggtgacgatattttatactgcaccaacacttattcgtgcactcatgcgtgatggtaccgagtatgttactcggtattctcgtaaatctcttcgagttctaggaagcgtaggcgagccaatcaatcccactgcttggagatggttctatgatattattggtgatgcaagatgcccaatatcagacacttggtggcagactgaaactggtggttttatgatcactcctttacctggcgcttgggctctgaaacccggatctgcgacatttcctttcttcggtgtacagccagtaatagtagatgagaaagggaaggaaatggaaggagaatgcagcggatacctttgcataaagaagtcatggcctggggctttccggacactttatggagacaaggacagatatgaaaccacatacttcaagccatttgctggctattacttctccggtgatggttgcagcagggacaaagatggataccattttctgactggacgggttgacgatgttatcaatgtcagcggccaccggattgggacagcagaggttgagtctgctctggtttcacatccaaaatgcgccgaggccgctgttgttggaattgaccatgaagttaaaggcccngggaatttacgctttcgtgacattggtggacggtgttcccttacagcgaatgagctacgggaaaaagcctccgtttatggactgttccgcangccaagattggggggcgtttcgccggccgcccggaacaaagantccacttgggccggccggggggctncccgaaagancgccggaagggccaaaaggattcatgcgganggatccctgcgggaaagaatcgcggtcccaaggcaacttggaacgaagctccggcga

SEQ ID NO: 390724 - DNA, 426 bp, Oryza sativa
ccacgcgtccgtaattctcgcgtcgtgtcagaccacgctgccgcggggatctgccgggtggcgaggctgcggagatgtcggacgcgctgatcaacggcgtcgccggcgccggcggcgggatcatcgcccagctcctcacctacccgctccaaaccgtgaacgcgcggcagcagacggagcgcgacccctccaagccggcgttcaaggacggcgccgtccgccagatgtgcctggtggtgaagcatgaagggtgggagcggctgtacggcggcctcatgccctcgcttgttggcactgcggcctcccagggtgtctactattacttctaccagatattccggagcagggcggaggccgcggctctccagcgatccaggagaggaatcggcgatggatccgtcgggatgctccaatccctcactgtcg

SEQ ID NO: 390725 - DNA, 660 bp, Oryza sativa
tgagagtaggactggctcggctcgctcactcggtcagctgcacacacactgcacttcggctcactctctccactgttcttcttcctcggcgaggggggaaggaggaggcgagagctcgaggcggctaggaggaggagatggagggagattcggcgaggaggctcgcattgctggggctgtgcctgggcctgcttctgctggcgccctcccatctggcctcggccgctgcggtggaggatggcttgctcagcaatggtgactttgagacagcaccagctggtggttttgtcaaatctgcttcagttgctgaaggtgcatcatcgatccctggctggacgatcaatgggacagtcgagctcatctcagcaggccagcaccagggtggcatgattcttattgttccacagggggatcatgctgtacgtcttggaaacgacgcaagtatagggcaggtggtgcaggttgaggaggggctcagagtatgctatcacgttcagtgcttgcccggacggtgttgcacagctaggagtcacttcaatgtgtctgtgcttcggttggtgcatcacagacagtggaccctgcagacatttgtaccaacataggaaggctttgggatgcatatgcatttgcttttttcaaggcaacaaattaggcaaagcg

SEQ ID NO: 390726 - DNA, 440 bp, Oryza sativa
agctgttatgcattttggagagagcatcaaggaaattatcaatgaggagtttggtgatggaatcatgtcagctatagacttctactgttcggttgacaaggtacaaggtgctgatggaaaagatcgcgtggtggtcacatttgatgggaaatatcttccttacagtgagcagagatctgatcatatgatgtctaggctgacccgcaagacatcttgagatggctggtgttgtgggaaaaatgatgtatcatctgcttctgcttgtggattgaatagaatcgagcatgttttttactcccaatagtcgatgaaataaacatactttgtaatgatgtatacatgaataaattgtttaagcagagatacagttcgatgtcacctttactacttctatcattgaataaagttaataaacaacacaatgagtgttaaattgattt

SEQ ID NO: 390727 - DNA, 578 bp, Oryza sativa
  unsure (1)..(578): unsure at all n locations
aagccgacgncgacgccgacgccgacgtcggtcgcggcgaaatctgccgttgcgggaggaggagaggcgtccactggagactcacgcgcaggagcgcgcgcctgcagcaagcagccaagaagaagcggtcccgcgctgcttcgctccctcccgctcccgctcccgctcgacatcggcaggccgggaaggttctctgcgcgccggagatatctgttaaaaaaaaacagtggaaggtactataaacgatgctgaaatagagtccattgttttaaaactatggaatttcacagaagaagagagggttccatactataaccggttgaacaagagaagagctaacatggccttggcttggtacaatgaaaacaacccggaaggattgctatgaatttacgagtgtgctcttgcatgatgtatgcaatttttgtgatggaggtgtttgccatgtgcacattaattttaaggcaaggaatgtgacaacaaattcagaggagctcttcttcgctgaattggctttaatcaacaatgtnttcgatcaatataatggatatacgaccactgcctgctgtattattgat

SEQ ID NO: 390728 - DNA, 532 bp, Oryza sativa
ccacgcgtccgccacgcgtccgtatatatatatatatcaattgtttgtcaaatgatgtatctgcacacattctgctcaagaactcggagataaatggcactgaatggagcaactgtgaaaacctaatgcgcagtttttgtgcgccatccaccattcgttgtcatgccaaaaagttgaccgtcctgattgtggatatgatcacaattgtcgacaattagaactgatcaagttgctgttttctgttctttgcatacgctgtaaacgtgggcgagttttttgttctgctgtttttttttgggtgtgtgcgtgtgatagatatgtcaattgcaattcatgccccatttgggttattgcttcagatcatgtccaatctgaatccagtttatcatgtgatatctgttggttagttcagtgccgtgctgctgcggtgctgccctggtgtggtgaaaatgtatgcctgttatgcataatggaagtatggaacaatttggggattttcaaaaaggaggcaatgcaattacatttcatttat

SEQ ID NO: 390729 - DNA, 854 bp, Oryza sativa
ccacgcgtccgcggacgcgtggggaaatacagacaactttccagtgagtggaactacaagcaaaaagaagggtcagaagtggggaatggacaactcaaacaagaaaagctctgatatcagctatcatgggaggataactggaactgacactgaagttaaccaccatgtggctggcaactctaagactagtgataatgattttggtttggccagtaatcaaaaggttggtgagagcagtcatgttggatcagcaagtgaaaagattgttgctgagaaagggaagtctagcagtgaacctttagattttgacacgcctgtatcccctaacacgactttcccagggaaggagatctgattgtttatcggttggttgaactgtcttcctcttggtgtccagagctttcttcataccgtgttggcaaagttcttatatatgatcccatatctttgaggatcattctcttacctgttcctgagtatccgttcactgctggagaaaagaatggtgaagacgagtcagagatgctggtggacatgtcaccttacaaggaagatggttccttggagatcgagtactcttcgcttcttgatattagactgctcaaggacactgattccgtgcaaccggctgttagtactcccctgacagaaacaggcattaaaggtggatcccatgcccaaaagccagctaatttagataatcataaaggtaaaattcacagcgaaaaactgccaaacaacaccaaagatccagaagccacgcaagaaaaaacacaaaacacggtctgggaggaaaatggagaggtcgcaaatgacgagcctgctgtttcagggaaatggcttggggaacttgg

SEQ ID NO: 390730 - DNA, 533 bp, Oryza sativa
ccacgcgtccgcccacgcgtccgcccacgcgtccgcccacgcgtccgcccacgcgtccgcagtttttgtaacaggaagctgtctcgaggcactgttttgatgcttgctgatcaaatgagcaatcgcggcgaattggttcactccaagtcttgcttgcatacagatattaagccagatgatctgctcatgggcctaggcaaaagggcgaatcacggctatgccatagattttggactggcctagaagtgcagggatacatcaacacaccagcacatcccatatagggtgaacaagaacttgacgggaacagcacgatatgcaagtgtaaacacgcatcttggaactgaacaaagccggagggatgacatggaatctcttggatatgtactgatgtacttcttgagaggaagccttccgtggcagggtctaaaagctgggaacaagaaacaaaaatatgagaaaatcagcgaaaggaaaattgctacttcaactgaggccctctgtcgtggatatccctactgaattgcatctta

SEQ ID NO: 390731 - DNA, 564 bp, Oryza sativa
ccacgcgtccggcggctgcggcggcggcggcgggggcgggagggaagaagcgcgccgcgtcgaggagcgggatcctgttcgacgcggcgggggaggagcgggtgctggacgccgacaagtacgccatcatgcaccgcgtcgacatcaacgcgcgcgacctgcgcatcctcgacccgctgctctcctacccatccaccatcctcggccgcgagcgcgccatcgtcctcaatctcgagcatatcaaggcgatcattactgctgaagaggttttgctccgggatccattagatgataatgtgattcctgtagtagaggagctccggagacgacttgcaccttcaagtgccactcaacatgatgtggaaggtgctgaagaagatgaatctccctttgaattccgcgcactggaggttactctggaagccatttgcagttttcttggtgcacgcactactgagttggagagtgctgcttacccagctttggatgaactgacatccaagattagcagccgcaacttggatagggtgcggaagttaaaaagtggtatgacccgattgaatg

SEQ ID NO: 390732 - DNA, 790 bp, Oryza sativa
  unsure (1)..(790): unsure at all n locations
ccacgcgtccggaaggcgacaacgctctcgctgtctgtcctggtggcgattgagatgttcaactcactcaacgccctctccgaagacactagcctcctgaggatgcctccttgggtaaacccatggctgctcctcgccatgtcagtgtcgttcgggctccatttcttgatcctctacgtgccgttcctcgcgcaagtgtttggcatcgtgccgctcagcttgaacgagtggctgctggtgttgcttgttgcactcccggtggtgctcatcgacgaggttctcaagtttgtcggaaggtgtacaagctcatcaggccccaagaggcgaaccaggaagcagaagggcgagtaaaatgctaacagtgattcttcagactcatcagtaacaaaagtcactgaatttgttgtgatcaagtaacaatgatcaccaaatgatgtttattcaatagaaatatgtccaatacaagaaagttcaggaaagagattttctcaaaacaggtcatcactctttgggaagttgataacctttgctgttcttttattccttgtcctaaatggtactatactgagctcacagcaaaccagcaggcagcagcattgttctgttggcaacattttgcttctgtgaattattatatatagatgaaatatttagatcaaattatacacatttctgcctaccttattatgcttctgctgtgtggtttctgagctggttgatctggcaggccaatactcaattaattctccctgtgaattgtctctnnnnnnnnnnnnnnnnnnnnnnnnnn

SEQ ID NO: 390733 - DNA, 480 bp, Oryza sativa
  unsure (1)..(480): unsure at all n locations
ccacgcgtccgcccacgcgtccgatctcaccaagccgccgtcgacggtgcggctcgggcgttgtgagcgcggactcgtcggcgccaggtccggcggaattcctctcgtgggcgtcccatccgcgccggcggggctcaggcgggagccggatctggtggctgcgccgccgccatccccgctgctgctgccctttgctctaggcttcgtccaagggagaggcaggggcacgaggggagcggcgctcgcttccccttcccgtccgagcgcacgcagccggagcagcgttgctagcaaactgcttcgaccgcctgatggaggaggcggaggcaaggcccgcgccgnctgaccccaacgacgcgaggcagcggttcttgttggagctcgagttcatccagtgccttggcaaccctanctacaatncactatctagcgagaacagatactttgaggatgaggcgtttatcggtaatttaaatattt

SEQ ID NO: 390734 - DNA, 341 bp, Oryza sativa
ccacgcgtccgctttgctttgtcaagaaagttaaggctcgtgattatgtgttgtacttgtcgctgcttgatgtgctcagtcgaaatgagcagatccctctggaagcttacagcgagctttcacttcttttccgggatcacgacgatctgctggaagagctagcgaagttcagaccccttcctaccccaagcacagtttatagccacagctcagtctggctgctcttcttcctaatgcccctccttgtcctaagcattctcctcaagtgcttccttcttcaacagccagttgcaagctgaaaaagatcaagcgtgcaatgtcatgtgatatctctgttaaaa

SEQ ID NO: 390735 - DNA, 755 bp, Oryza sativa
cgcacggccgcgccgccttcgtacgccgccccaagtcgtcgtcggcgtcgtccgcgggggcggctgccgaacggaagcggaagcgcgccgccgccgccaagaccgtttccctcaagaaccagatccgctccaccgagcgcctgctccgcaaggaccttcctaatgacattagggtagctcaagagaagaaactggaagaattgaagcggcaacaagagcttcagaatcaactggctattcaacgaacagttcagctgagagatagaaagataaaattctttgagaggcgaaagattgagaggatgatcaggcgccttgagaagcagcaacgttcaaatgccgatgatgccagcaataaactgtcaaaattaaaggaagatcttgagtatgttaggtttttcccaaagaatgagaaatatgtcccgctgttttctggagggaataccccagatatgttagagaagaggaataagtggcgtaaacagataaaagaaaatttgatggctgctgcagaaaatggaaaagacttggaagagacagcaagcgatgatgatactgtggatgtgagtgatgacgacttcttcatgtcggggagttcaagtgatgaagaggctgatgatgaatggactgacaaaagtgccaaagaaccagcttccagtgcttcaggtaaggcagcgtctggcatgtcaagcgatgaaaagaatcagcgtcagagagatgctcgagttcttatgccaccacctcgttcattagca

SEQ ID NO: 390736 - DNA, 1144 bp, Oryza sativa
ccaaaatttattgaaattggtaaactgaagcatcagcagatatctcaaagagaacaagcattcttcaagggtgcatattatattggaaagatggtctggagtaaaggttatacagaactactccagctgcttcagaagcaccagaaggaattatctggtcttaagatggagctgtatggcagtggagaagattctgatgaggttaaagcatcagccgagaaactaaatcttgatgttcgagtctatcctggtcgtgaccatggagattccatatttcatgactacaaggttttcataaacccaagcaccacagatgtggtatgcacgacaactgcagaagctttggcgatggggaaaattgtgatatgtgcaaaccatccttcgaatgaattcttcaaaaggtttcctaactgccacatgtacaatactgagaaagagtttgtgagattgactatgaaagcattggctgaagagccaatcccactgtcagagggactgagacatgagctttcctgggaggcagcaacagagagatttgtcagggttgctgatattgcaccaatcatgtctatcaagcagcattctccctctccccagtatttcatgtatatatctccagatgaactgaagaagaacatggaggaggcgtcggcattttttcataatgcgatttctgggtttgaaacggcccgttgtgtttttggtgccataccgaatactctgcagcctgatgaacagcaatgcaaggaacttggctggaggctccaggaatgacagtcatttcttcccacgctgttgtcaatgacaatagaatgccaactaacagcccagggaacttggcttggggaactaactacgtaacgcaattatcttttgctccaaaactacgaaggactgaacagccaagggtgattcttgttttctgctatggtggtacactggtattgcaattctccttccacaattgtggagtgtccatcagacatcagttactgtaatgcatcatatcttggaattgtaaatgtgcggcagttgaagtgattaccaatgctgtcttttcatgtagcctgtgtaatgtaaagcttactgttgcttcccgagtttggcacaattttaaagatatcttgtctggtgtttcacaacc

SEQ ID NO: 390737 - DNA, 612 bp, Oryza sativa
ccacgcgtccggctgggggaaggagaacagggaggctccactgagaactgcatgcccacctgggatacctcttgatctcgtcagcaacttcgaaattaaatccttcgatgcgtgcgcaaacccgcacttgggccttgctgctatagttgctgctgggattgatggactcaggagaagccttacgttgcctgaaccaactgaatcaaaccctgcaggttatgcctccaactccaagctcaaaaggatgccgaaggacttgatggaatctgtcgaagcactagctgcagacaaaatcatgcatgaattgatcggcgataaacttgtcactgccgttattgctgtacgaaaggctgagaccgatcactacgagaagaaccctgcagcattcgccgatctcattcaccgttactagggtgaaacactagttagttccacggagcaaagaggattacgagtgaattactacgacccacgaaattgcttattctcgcgtccttttccgctgtacttgcagttgcagtaattttttttttgattgaataactggttttagatttccaaaaaaagggcacttggcaaactcatccttctagagaaaataaagcaattcac

SEQ ID NO: 390738 - DNA, 776 bp, Oryza sativa
ccacgcgtccggtgccaatcacacttgcgacagcatataagatgcagcgtggagataatctgaagttaaaaacttcccatggcttgaagataaagatcaaaatcaaggaagtagctagcacactgtacatgacgacatgatggaaataatttgtagaggcaactggattagaaactggagaaacgattcttttctggatgccatcacagtctaaagcgtgtgttatgatactgaacagacaaggccttattagatgtccagtgaagaccccatccaacagctcatcagcgaacaaaaggccccttgatccatcaggtcaattaaccagagcaagcacatttgaccatgcatcttctagcaaaagcgttccatttctgaggaatggaacagcaggcagtaacaaaagaaaacctagcagacacctccttctgccaccagattaagctcacagctgaattgaagagttacatcaaagagattgcagattgtctagaagaatcaaacaagttctatgtagtgcgtatgaacagaacattcatggaacaggacagagtgtactttgcgactgagttttcaaagaaatacattgtgaacttggttcgaggcaagacagcaaacattagagtgcagattgcaggtcgaccctcaacaacttaacatcggtggtggttagctttgtagcatccaacagcatcaacttacacaatctgcatcttccacttttataggacacaagtcacctcatgctcaccttaaatgctctgtgaaagttacct

SEQ ID NO: 390739 - DNA, 696 bp, Oryza sativa
ggaatgttagaggatggtaccatatttgtcacaagaggtcatgatggtgacgagccattcgagtttaagactgatgaagaccaagtggttgaagggcttgacaaagcagtacttagcatgaagaaaggagaagttgcattggtgactattccaccagagtatgcgtttggcatccgatgaaacaagacaagatttgtctgttgtccctcctaattcaactgtttattatgaggtggagcttgtgtccttcgataaggagaaagaatcatgggacatgaaggagaatactgagaagattgaagcggctgcaaagaagaaagatgaagggaatgcttggtttaagatggaaaagtatgccagggcttctaagagatatggaaaggctttaaacttcatccagtatgacagctccttcagtgaagaagagaagcagctgtccaaaccactcaaggtgagttgcaagctcaacaatgctgcatgtaagctgaagcttaaagactacaaggaagcaaaggaactgtgtactgaggtcctggagcttgacagcatgaatgtgaaggctttttacagaagggcacaggcacacttgtatcttgttgacttggatttggcagaactggatatcaagaaagcactagaaatagatccagacaacagggatgtgaagatggggtacctgcccgggcggccgctcga

SEQ ID NO: 390740 - DNA, 574 bp, Oryza sativa
ccacgcgtccggagcagagcatccagtaccagctccaaaacaggtggctcgagccgtggtgtcgatgaaagcaacatttggacgtgtgaccagtgcacatatgctaaccccagatctgccagaaactgccaggcttgtaacaaccagcatcgatagcattacatagctatggttttagttctcgacccctttggttgagaaaccttctggttcaaacctggtggtaaagaacatatgcaaagttgaagtttccaatgaccagtggacctggcgtgaggaggtattagcagagaactgttgcctatgcaaattagattttctcaactcatcatgtgctatggctaaaaaaacctcaggtcattcccaatttttttaatcaactgacggtatccttgaagcctcgctcatcatcatctagttcatcctgtatataactctatatcgatatctgtaactcttgtgttgttctatggaagtagcgcgtactagcagatgtgcgccaccaatgaactgagttgttgtaatgatgttgtaaccttgtaataatgaattgccccattctctaaaaaaacaa

SEQ ID NO: 390741 - DNA, 489 bp, Oryza sativa
  unsure (1)..(489): unsure at all n locations
gaggatggtggcagcaggcggcggaggcgcaccntnanctgctgcagggggaccaggtggacgccgagtggggctgcaggccgcaccgcattgtacttttcgtcgagccgtcgcccttcgcttacatctctgggtacaagaatcgcttccagaacttcatcaagcatctgcgagagatgggcgatgagatgttggtggtgaccacgcacaagggagctcccgaggagttccatggagctaaagtcattggttcgtggagttttccatgtccgttataccaaaatgttccactctcgctggcgttgagccctaggatattttcggcggtggctaaatttaagccggacataatccatgctacttcanctggagttatggtttttggtgctcgntttatcgcaaagatgctttcagtcccaatggtgatgtcatatcataccaaccttccagggntatacccaggtacaatttaaattggtaatttggccc

SEQ ID NO: 390742 - DNA, 402 bp, Oryza sativa
tccggattcccggtcgaccacgcgtccgaagcactgaggccaattttgcttgtgcaacttatcttgtagatataggggggttaggttttgatatgaggtcataatggtaatggtctatgttgctcgtttcttgttccttgttagtgcaaactgaactccagaggctatgaactgtggtcgagtgtaatcttgaaataaaaacttgaatgggaatttgtcgatgtttcattctgggtgtgggaaggtaactaccatccaagtcccaggtttcaatggttgttactacctttcttactggcaaatgaacggaggtcacaaatatgttgcaatttttcttgagcaacaaagatattgcaagttttcttgatcccttgaaaaaaaaagaggggggggggggggggg

SEQ ID NO: 390743 - DNA, 473 bp, Oryza sativa
  unsure (1)..(473): unsure at all n locations
actcacccctccggttcggagcatgtgttaccacaaggagctacctcctctcctacatctacaagatgctgcgcatcaagattccgtcggaggcgaggcacgccagcgaggacggcggcagcggtggcctgacggagtgctccctctgtctctccaggatccgtgtcggcgaggcgacgaggcgtctgccctgccggcatgcgttccaccgggactgcgtcgaccggtggctcctctcatgcaggcggacgtgcccgctttgccgggtttacgtcgtcgtcgaggtaacaagccaggggtggcagcgaagacaaccggcgagccgcgctcgttgaagacatggtgatctggttctntgccatgctcgtccctggattctgacatgtatatctctgatgtctaagcgnaatgcttttaatttgtttgttcctgcctggaaaccggtttgtttttttttctatataatcaaataa

SEQ ID NO: 390744 - DNA, 711 bp, Oryza sativa
ccacgcgtccgcttccgccccttcccgcgccagtccgactgcatgatcgtcgccggcgcgctcaccaacaagatggcccccgcgctccgcaaggtttacgatcagatgccagaacctcgatgggttatttcaatgggcagctgtgccaacggtggtggatactaccactactcctactccgttgtgcgcggatgcgacaggattgttcccgtggacatctacgtccctggatgccctccaactgctgaagctctactgtatggcgtcctgcagttgcagaagaagatcaacaggcgcagggatttccttcactggtggaacaagtgaaccagcacttctctgctttcctatctgctacgaatacgatcctgtcaaaatgttatcgagcttctgtgttaaataaaggaaagcgtgtgctttccgatcatcaaactctctgtagtagatgcagtgatagtgagctcctggctaccttgatcaccgttcatggacaaaaaaacaattggtgatgctgttgcggtgttgctgctttaatactatgtataatattttgtaatttgtgttgtcttctactagtgatgtaacattgggtatgacgctcaatggcgttgtgatgctgtatactttaccaacttgtgtaaatagaagtgatgataatataaaaaaaattaatagaagtgatgataaattgttaaaaaaaaaaaaaaaaaa

SEQ ID NO: 390745 - DNA, 512 bp, Oryza sativa
gggattggaaaatggtgaatttgttagggtgcggaccgtccttttgaatggcaaacctcgtgtgcttactttgaaacaggaccttcactactggccgacctgggagctcaggtttgaaccagagacttccacatggaagaggggaataataaaagcgttgcaatcaactgtagcgtgatcaactatgtttgtgtttgaactcttcatgctctcagagggtgttccttagggagcctaagcatggaggtgcggaaatggggaatgcgtgcccaactgcccatgttggtaagctagaatcctgcgtaatgcaggatggaatggttggcattaggataggatgcttgaagttgaaggatatagttattcatagaaaaatatatggattcattgcctgtggataattagaccgcagcatctgctttttgtataatctattctattgctacaatttttgcagtaataataaatctttagctctttagcgaccatataaaaaaaaaaaaaaaaaaaag

SEQ ID NO: 390746 - DNA, 1196 bp, Oryza sativa
aaaagctaaaaccccaacacggcgcacactactctccttcctctccccaccgtgtcacaccacaccacacaacaccaccaccgccgccatggccgccaccgaccgccgcctgctcttcctcctggccgcctccctcgccgtcgcggcggtgagctcccacaacatcacggacatcctcgacggctacccggagtactcgctgtacaacagctacctctcccagaccaaggtgtgcgacgagatcaacagccggagcacggtcacctgcctcgtgctcaccaacggcgccatgtcctccctcgtctccaacctctccctcgccgacatcaagaacgcgctccgcctcctcaccctcctcgactactacgacaccaagaagctgcactccctcagcgacggctccgagctcaccaccacgctgtaccagaccaccggcgacgcctccggtaacatgggccacgtcaacatcaccaacctgcgcggcggcaaggttgggttcgcctccgccgcgcccggctccaagttccaggccacctacaccaagtccgtcaagcaggagccgtacaacctctccgttcttgaggtctccgaccccatcaccttccccggcctctttcgactccccgtcggccgcgtcgaccaacctcaccgcgcttcttgagaaggccgggtgcaagcagttcgcgcggctcatcgtgtcgtccggggtgatgaagatgtaccaggcggccatggacaaggcgctgacgctgttcgcgcccaacgacgacgcgttccaggccaagggcctgccggatctgagcaagctgaccagcgccgagctggtgacgcttctgcagtaccacgccttgccgcagtacgcgcccaaggcgtcgctcaagaccatcaagggccacatccagaccctggcctccaccggagcgggtaagtacgacctctccgtcgtcactaagggcggcgacgtgtccatggacaccggcatggacaagtcccgcggcgcgtccacccggctggacgacaccccgacggttatccacacggtggacagcgtgctgctgccgccagagctcttcggtggcgcaccttcccccgcgccggcgcccggaccggcaagcgatgtgccagccgcttctcccgcgccagaaggctcctcgccggcgccctcccccaaggcggcgggcaaaaaaaaaaaaaaa

SEQ ID NO: 390747 - DNA, 566 bp, Oryza sativa
gtccgaattcccggtcgacccacgcgtccgcaaacatcaggagatcatttcagaattccagaaaccttccttacgatgaacagtttgatatcctatttgacgagatgatggagagcaccaggaagctgatcaaagcgacatcaaaggagatcgataagtggaggcggatgtagatgaaaacagcagtacagcacatgaatgaagaagagcttgatatccactaatagcttgaagcagtacagcacgtgcctaagcgggactgaaatgaaccccttgcttgcttgatgttacagcgaatatgttttcttcttcagggattcatgagatattctgtcaaatattctacaccattggagccccagaagtattaatctgcaacaccatgtgcgaggagatgcaacaccatgtgattgcgacgccatttcgcattgaaatatcccccatgggcgtcgctgtcggtattccgtgctcatctgcagaaacgctatctgttttcgtattgagaaattttgcagaacttacctttcaaaggctcaaaacactctaatccttccattacgtgtgcc

SEQ ID NO: 390748 - DNA, 506 bp, Oryza sativa
tccgattcccggtcgaccacgcgtccggagaaaacaaacctctctccatcaccggccgcagcagccgcctccgcctccgcctccgcccgcaccagatgcgacgctgaccggctcaccggcggaagcgcggcagggcgcggccttcggttcgagcggtagcatgcagcagggcggcatttgtggccaatgagattcccctattcatgaatcagtctcctccacatatgtctcgaccatcagtgattatcaagctgattctggggttgctttggttcatcgtccacttagcaatcagcctttgcagtttatggtttgatctgatctacagtatagaatgctatctcatttcattcgggctgattccaaagtatcggaaattccaactggataggctcaaacacttggcttgttgtggtagatagcagagaagctaaaaatgttgcaaagatccatcaggtcttatgctggcttcaaatgttgtgtgaggatgattgcttatgcattgt

SEQ ID NO: 390749 - DNA, 614 bp, Oryza sativa
ccacgcgtccggacctatctcaccatccgaagtacttgccaagcttcattaggaagcaaaaggaaactggtgctgatgttgtaactggggccgcgttatgttcagaacggtggtgtccatggttggaatctcatgcgcaagttgactagcaggggagcaaatgttctagcacaaacattactacagcctggagcttctgatttgactggatcattcaggctatataaacggaatgtcctagaagatttaatctcctcatgtgtcagcaagggatatgttttccaaatggaaatgattgttagggctaccaggaaaggttatcacattgaagaggttccaataacttttgtcgatagggtttttggaacttcaaaacttggtggatctgagatagttgagtatctgaaaggccttgtttatctgctgctcactacataggggaaaaaaacgctaggcgcttaactgtatcagacacaacttgtgatagaaggacttcaatttgttatatctacagttttgagttgcatgaattactgattttctgacttgccagtgggttctcgtacagtgtatttggtgtgtaagtacactttcatgagcatgatgattttgtc

SEQ ID NO: 390750 - DNA, 462 bp, Oryza sativa
agaaagggaaaagataaggaagagatgatcggaaagctcaaagatctcgggaattctgtgctcgggcgctttgggatgagcgtcgacaatttcaaagctgttaaagacccaaacacaggctcgtactccatttcgttccagcagtgacgacatggggtagtaacgagttgtttaaatgaatatggacaagtacacatgcagtcactgtaaatcctggaatgctaatgtcatttggttcaaaaactttggcccttttgtatcaataggtttgttaccatcgcccgcagttaaatctgaagatggtgcatggacgtttgcagttatgttctgagagaggtggtttagatgagtgaacttgtattataggcgtttgccacgctgtgattctcttcattttatcatagcaattcttgtttgcttgaacaccaaaaaaaaggaaagggcggccgcataaagaggagc

SEQ ID NO: 390751 - DNA, 647 bp, Oryza sativa
ccacgcgtccgaactggatggggtacgtcgccgtggcgacggacgagggcgtcgcggcgctcgggcggcgcgacatcgtcgtggcgtggcgcggcacggtggagagcctggagtgggtcaacgacttcgacttcacgccggtgcccgccgcgccggtgctgggcgccgccgccgccgcgaacccgcgcgccatcgtgcaccggggcttcctgtccgtgtacacgtccagcaacaaggactccaagtacaacaaggccagcgccagagaccaggttcttgaggaagtgaggaggctgatggagttgtacaaggacgaggtgacgagcatcaccgtcgtcgggcacagcctgggcgcgtcgctggcgaccctgaacgccgtcgacatcgtggccaacggcgccaactgcccgccggcgagctcgtcgtcgtcgcagccgccgtgcccggtgacggcgatcgtgttcgcgagcccgcgcgtgggcgacggcttcttcaaggcagcgttcgcgtcgttccccgacctgagggcgctccacgtcaagaacgccggggacgtggtgcccatgtacccgccgctgggctacgtggacgtggccgtgaagctgcccatcagcaccagccggtcgccgtacctgcggtcgccgggg

SEQ ID NO: 390752 - DNA, 421 bp, Oryza sativa
ccacgcgtccgtgaacactctgaaaggtgcgctcagattgtttataatgttgtgttactatcaagtggaaaggatttggtaactttccttgagagatgcacatctttctggatattatattgcttcagccttgctgcatttagtggctgagaaagctaatttcctaaagtttgccatctgtctagttttaaagttaaaatactgcctttcactatttgtttatgtaataatgttgttgtcgttgcaattcagcagtctacctttttatctaacaaatcctcggtgatgctgaatgcattggagttttttaaaactattactttttacataagggttgggtgggggtaagctttccttaattggttgacaattgcgcaatggcgtgtgcacttcgttttatttttgcacgtcacgatttttt

SEQ ID NO: 390753 - DNA, 1188 bp, Oryza sativa
aagccaagcacacacaccaccagctttgctcccgctagttcccgctgatcgatcttttttcgggagggcgttgcttgctcggatcggcggccatggctgagcccgctggggaggcggccccgcaggcggacggcgtctcggaggaggcggcggcgaggccgagggggtttaggcttcttgggggggacaagtccgtgcaccaggctctcggcggtggtaaagctgctgatgtacttttgtggaaagacaagaagatctctgctgcagtgataggtggcgcaactgtgttgtgggttctctttgaagttgttgattaccatttcctcactctgatatctcatgtcctgatcggtgtactggccatcttgttcttatggtccaaggcaaccatcttcatcaagaagagtccacctaatattccagaagtgaagatatctgaagatcttgctgtgaatgttgcactagcactgcgcactgacatcaaccaagcacttcacttgcttcgggagatttctctagggcatgacctgatgaagtttttaggcgtgatcgttgctctctggattctttctgaaattggaagcctctgtgatttcctgaccctgttttacgttgctgtcttgatgctccatacagtgccgatcttgtatcacaagtatcaggacaaggttgatcattttgctgggaaggcgcatgtggaactcagcaggcagttctctgttctcgacgcaaaggttctcagcaagatacctaggggtccagcaaaagataagaagcagaactagaaatgaaccaccatatcaccctggaacctgacttgggagtgttggcatctcacatcacaacatatgcatgaatcttgagtccttgacttggtttggcccttgttggtgcttggtacatatatgacctgtctgtagatttgtgtgttgggagtgtcttgtgtagtaaactgtcgatatgatgtggttggtgtgcaactctgcaatgttaatatacaagatcttgctgcaagcctgcaaccatatatgatatacgtacaaggactccatacctataatttacgttagtgtggttgtaatgtagatcgtgctcaagtaattgtaaagtgctgtggttctttcttatatcgctccaagtaattctcagttcttgttacttttagtttggttaaaaaaaaaaaaaaaa

SEQ ID NO: 390754 - DNA, 529 bp, Oryza sativa
ccacgcgtccgagattctgctataaagagtttgaacgagctgtgcctgcaatcggctgcggtaggtgattccaatagcgtcctgccagccgctcttaaggtatcggctgaaggtgttgctaataatggacatttggatgtgctcactgaaaacccacatgctacagaaaactttcagacaaatcatcatggttctgagtgggttgagctatttgttagagagatgatgagtgcatcagacatagatgatgcgcgggctcgtgcctcaagagccctggaggcattggagaaatccataatggagcgagcaggaactgaagcagtgcataattttgcaccaagggaaatgtgatgctgaaggagcaactggcaatatatctgagagagaacgctgttctgaaaaaggcggttgctatccaacatgaacgtcaaaaagagtttgacgagaggactcaaggaggttcatagcctgaaacaactggtgttggcagttcaggaacagataaaactttgagaaaataatatgcact

SEQ ID NO: 390755 - DNA, 543 bp, Oryza sativa
  unsure (1)..(543): unsure at all n locations
ccacgcgtccgcatcaccatcatatagcccaacatctgcatcatacagtccaacatctccgtcttacagccccacttccccctcatacagtccgacatcaccctcgtacagtccgacatctcctgcatacagccctacatcacctggttacagcccgacagctccaagctacagcccaacttcaccaaattacagtccaacttcaccaagctacaatccttcttcggccaagtacagtccttcccacgcgtactctccaagcagcccaaggctgagcccttatagtcagacttcaccaaattacagcccatcatcgccgacatactcacctacctcaccatcatattcacatccaagtccgtcatacagcccatcaagcccatacaccacatctggagggcccagcccagattatagcccaacatctncgaattacagccctagcggaagctactcccccactgcaccgggctactcaccatcctncaccggccagcagttctctccccaagctgccgacanggacaaggagaaggcaaaatg

SEQ ID NO: 390756 - DNA, 875 bp, Oryza sativa
  unsure (1)..(875): unsure at all n locations
ccacgcgtccgcgcacgcgtccggcttggaaagccttgttaatttcagcacagtgatggcatttataaaaggtacacctgaggagcccaagtgtggagtgcagtggaaaactagtgcatattcttaagcaagagaagatccctttctcaagttttgacattcttacggatgatgaggttaggcagggtctaaagcttctctcaaactggcctagttaccctcaactgtacataaacggtgaactggttggcggatcagacattgttatggagatgcataagagtggggagcttaagaaggttctatctgagaaagggatcgttgcgaaagaaagtctagaagaccgcctgaaggccctgatttcctctgccccagtgatgctcttcatgaagggcaccccagatgccccccgctgcggcttcagttcgaaggttgtgaatgcactgaagcaagcaggagtcagcttcggagcgttcgacatcctatccgacgaggaggttaggcaaggcttgaagacgtactccaactggcccacgttccctcagctgtactgcaaatcagaactgattggaggctgtgacatcgttcttgagctggagaagagtggagagctgaagtccacgctttcggagtgaggaaaatttaccgtcgtatccgcatcttcctcttcctggtgtttctaccatccgtcgaccatcgagtttgctctattgatggcattttcttgtattcatagatccgtatttcaaacttagatatatgcctgtgccacatcgcttttaactgtgacatctgcagaagaataactaagacgacctgttcagtacggctaataactaagacgacctgttcagtaaaaaaaaaaaaaaaaannn

SEQ ID NO: 390757 - DNA, 610 bp, Oryza sativa
  unsure (1)..(610): unsure at all n locations
ccacgcgtccgatgacgtccgtgtccatgttggagaaagagctagctgcactgatcactgagaacaaaatacaggctcggatagactcccacagacaagattctttatgcgaggcatgctgaccaaagaaatgcaacttttcaacgtgtccttcaaacaggcaatgagtttgagagagatgttaagtctttgcttctgagagctaacctcatcaaacatgatttcaaccaaagagctggacaaaggatgatgtgaactctgccactgctgttgctgaaacaaggcgtgccggcttatccttttggacacatttgttttgtgcctaaaagtgtatgggccatggagaagttttggtgatgaatcatgaattagactgatgactgagcatgcaagtctgtttaaatgccgttttacctctttcggacaattccttggctggctgtggttttaaatatgatgctgtgtaaacagctctggatatttaagcatctagagacttgacagaacgatctgtcacatttgaggccaagctattttttaaaatataaatgcttagagctnntnttgtnatgcnnnnnnnnnnnnnnnnnnnnnnnnnnnnnnnnnnnnn

SEQ ID NO: 390758 - DNA, 678 bp, Oryza sativa
  unsure (1)..(678): unsure at all n locations
ccacgcgtccgcggacgcgtgggcggcgatgtctgggagaggcaagggcggcaagggccgcggcggcggcggcggctacggcgggggcgaccgcggctgcggaggcggcggcgggtacggcggcggcggcggcggaggcagccgcgcgtgctacaagtgcggcgaggagggccacatggccagggactgctcccagggaggaggcggcggtggtggctacggtggtggtggcggcggctaccgcggcggtggtggtggcggcggcggcggcgggtgctacaactgcggcgagaccggccacatcgctcgcgagtgccccagcaagacctactaggcgctgctcgcggcgtcagatccagctccctcccatgatgcgttttgctccccctccctcactgaatcaccgagcagcgggtgatcagttctatcttattagtagtcgtagatctcgttaggaaagctatggatctatcggttcgtcgtcgtcgtcgttctatgtaatgggatgggagtcttggagtggtttaatctttttgtttcgttgggtcggtttgagagacaagccatggatttgcactgtctgatctatctatgaatctatctattatgaaccgagaagaaaatattcatcagcatttggatgactgctcgcgatctagataatgcaannnnnnnnnn

SEQ ID NO: 390759 - DNA, 969 bp, Oryza sativa
  unsure (1)..(969): unsure at all n locations
ccgaatcagatccacaaggcagcagctgcagcagcatcgaccatggcgatggcgcgatccatcctcctcctcctcctcctcgccgccgccgcctccgcctccgccgacgcgcccttcctcgtcgcgcacaagaaggtttcgctctcccgccccaagcctggcgtcgagcgcctcgccgtctccctcgacctctacaaccagggatccgcaactgcctatgatgtgagcattaatgatgatacttggccaaaggaggcatttgagcttgtctctggagagatgtcaaagacattggaaaggcttgaccctggtgtcactgcttcgcatgcatttgtcttggagaccaaagtacagggcaggtttcaaggttcacctgcggttattacctatcgtgttcccacaaaggctgcgcttcaggaggcctattcaacccccatccttgcacttgatgttcttgctgagaggcctccagaaaagaagtttgaatgggctaagaggcttgtggcgaagtacgggtcgctggtgtccgttgttggcttggttggagtgtttatctacctggttgcaagcccgtcaaaatccagcggtgcaaaagcaagcaagaagaggcgttgatatacttgcctaccatatataaggcagtgtttgttcttttttattaaaaagaggaagagatggtggcaggttttttagattgatagcgcgagagctttaaggctgccgcatccttgaactgtatgaattttctctgtttgtgtttttggaagttgaaaacctaacccagagaattggagagtagattttgtaacagatgaaatctcaatgcatcattttgaagttgcctgatacagatacctattcattgcatttggtaacagatgaaatctcaatgctcctttgtggttgccnnnnnnnnnnnnnnnnnnnnnnnnnnnnnnnnnnnnnnnnnnnnnnnnnnnnnnnnnnnnn

SEQ ID NO: 390760 - DNA, 736 bp, Oryza sativa
  unsure (1)..(736): unsure at all n locations
tttatgaatggctttggtaagtaatgtagcattccttcactatttataataccatcattgaagagatgatcttctttacgttttttttctttcatgtgccctttactactaaaaaagaattgaaagtacaacctgaataattggaggggatcttacttgaccagttggcatgtctctacttcacattagtggggatctcacttggctaattggccagttgtcatgtatctgcttcacattggaggggatctcacttggccaattggcatgtctctgcttcacttcatttcagctcctcagaaacgagcaaccaagttcttattgcccagggatggccaagctctccaaaaacaactgatataatgaaatattctttcgttcctcccacaaagcttcagagctggactatcgcaaaaaaaaaaaaaaaacttcagagctggagggtgaggttgctgccatgcacagctgaaatttcatttttgaatattcctactgtactattctgttttataatcgacgagcttttgtttgtagagtatgcttaattagtcatagaaccagatttacagtataaattcgtgaaagcagctgtaagctttttcatactattgcttattttcaaaanagataaaatggaaggacacgcctaaaacaacatatttgctttgcttccagacttaatgcctgtcgtgagagtatgctgttatgcttcaagttatggcctagttattttaat

SEQ ID NO: 390761 - DNA, 552 bp, Oryza sativa
  unsure (1)..(552): unsure at all n locations
cccgggtcgacccacgcgtccgatagattccatttcagaggcagcaaccaaggcccgaggatctccttcccgtcccagtcagatcgatcgcgggaggaagaggggcagcagcggaggagatgggggagatgaactgggtgagcaggaagatccatctctacaacgtcaccatgggcctctacatgctcgattggtgggagcgctgcctcttcaacataatggtgctgattctgctctggttcatctgcttcaatggctctcgctttgccagtgacgtcttcgagagtcatctgaaggctcggattatgcccggtggaaactatggcatgggtgtaggcatgccatcaacctaagtctgcattgacaagtaaaaataaggagggaagggttatgaaattatggaagtggcttccataacttcagaactgtatatttgtgtatgaaatagttccaaaatgaaatctgctcatgattaaatttgttcttcctgcaattggtgtaattcttcgntaaaaatttgttatgagcattaatgatcaacttttccccatc

SEQ ID NO: 390762 - DNA, 848 bp, Oryza sativa
gtcgaccacgcgtccgcccacgcgtccgcacgacgaacccccacgacgcacttagctaagctagcgtatagtctctgatcgatccgatctccgacgacgacgacgacgatggccggtaaagtaagcgcggtggtgctggtggcgttggtggtggtggcggcggcggcgggcggcgcggccgggctgtcgatgtgcggcgtcgaccggtcggccgtggcgctgtgccggtcgtactgcacggtggggagcgcggagaaggcgccgacgaaggagtgctgcaaggcggtggcgaacgccgacttccagtgcctctgcgaccgcagggacatgctccgcaacctggagaacatcgacgccgaccgcgccacgcagatcccgtccaagtgcggcgtccccggggcctcctccagctgcaagtaatttacattaggtgatcgagatgatcactctagctagccagctgcaaaatcacactctagctagctagatgatcgatgatcgatgatcactagtgtgtttctagtggttaaataagtattgttggttggttaattaggggggggctaagtatgtgatcgatcgattgctagtagtggccgtgttatgtcaggccatcgtcgcgtcagctggatcttattttgttctgttgttttgagtagttcacgttctgaatgtcgccaggctagctgacatgtgctcgtgttgctcttgcatatatgcatggcgcagtctgcctgtctctatgtatcaatcttgtgattctcttgtacgtcattgctgtgtgtctaccttaatcgtgttctcataataaattttgctgcttgttttgatctaaaaaaaaaaaaaaa

SEQ ID NO: 390763 - DNA, 459 bp, Oryza sativa
tcgttgtaatcatcatcatgatctcttcagtggctcgggtagctgggagcttcccttggggcagggctggttcatggcccaaaatcatacaggtgcttctccagcgcggccgcgtggggtcggcagttctagaggatcaaatcgacatcatgcttctcgtcgtcatgttgtgggctcattacgtggggttgggagttcacttctaggcccccaaattgatgaagctgaggttcatgctgcatcattaggtgttggatctgaacttactacctcactgcttgctgctggagctgctgaattaccttgcacagtgaagcttagaatatggcggcatgatatcaaggatccatgtgttacattggaacccgaggcatgccggttgacaatttctcatgccgttctctgcagtgaaatgggtgcccatttttccccttgtggacgattctggtagcatgtgtt

SEQ ID NO: 390764 - DNA, 573 bp, Oryza sativa
  unsure (1)..(573): unsure at all n locations
ccacgcgtccgcggacgcgtgggcggacgcgtggggagaatttctgaagaagcacaggtgagagaggcagagcgatgagaggaagccagagccacgagctggagaccgacgtcccggcgtccgagctgtggaagatctacggcacgctccgcgccgccgagctgctgcccgagctgctcccccacatcctcgccaaggtcgagctcgtcaccggcgacggcggcgtcggcaccatcgtgcgactgacttttcctccaggaattcctggattgcagagctacaaggagaaattcatcaaagttgacaacaagaattacgttaaggaggcagaggcggtggaaggcgacatcctgaagctgggcttcctctcgtacatgatccggttcgagatcattcggaaaggggccaacaacttcggttataagatcgactatcgagtatgagatcggtgatgagcatncagagctncaagccatggttagtaccgcatcattggctgcgaccgctgaaaaanttgcagagtatatcaagacgcagaaagtactcaggccaacacctgagattatctcaagc

SEQ ID NO: 390765 - DNA, 639 bp, Oryza sativa
ttgatgagatccaggaattgacaggcttgagagatgggcagtgttcctggaacctcagcaattgtggagcaaaaatgtccttgataaactagcttctgatgctcagaggctgtctattgtccaagccagcattgaagaaataaagcacaaaatggcgggtgcttctaagggaaaatctaccgtaagctctgaatacagcagcatcagagctcagctgcaggagattgatggctctgtcttggatcatatagatttcaactgtaatgtgacaaagaaggctgagaattaccctgcatttgaggtgagtgctgaactagaaggctattccagcaaaagaaaaatctcagagcaagtgcagaaaggatcagaaaaggtcgcaaagttggaattggaacttcagaagatacagtatgtcttgttgaagcttgaacaggagcatgagtacaaaagagttaaagcccctgagaaacgttcacgcgttcttttgagggattatatgactgcaaggaaggacaaaaatgatgccggacagaagacgaagaataagaggatacccttctgtgggtgtgtccgtattaaatcaagaactgagccttaaccattaagtatgtagcaagaggaacatattcatgtcaaccc

SEQ ID NO: 390766 - DNA, 377 bp, Oryza sativa
tcacgcgtccgcggacgcgtgggaaaaaacgatcagccatgaagagcggcagcctgctgacgctcaccctgggagccctcctcctcgccggcatccccatctcctccgccgctgtcacccccaacagcaacatccgcctccccaccgacggcggcgacgaatggccgtcaccgccgtgggactgctgcgacaagctgaagcagtcgccgctcaggatctggccgcccaagtacaagtgcctggacgaggtcgaccactgcgccgccgcctgcgaggactgcaagcgtgccgacggcggcggctacgtctgccgggactggtactggggcgtcaaccccgggcccaagtgcaccggcggcgggggcgaggaggcggtg

SEQ ID NO: 390767 - DNA, 779 bp, Oryza sativa
  unsure (1)..(779): unsure at all n locations
ccgcagatcgagcacctcctccagaccgccgaggccatccgcaaggatttccccgacgaggactggctccacctcactggcctcatccacgatctgggcaaggtgctgctgcatcccagctttggggagctcccacagtggtcagtcgtcggtgacaccttccccgtcggctgcgcattcgacgaatgcaacgtccacttcaagtacttcaaggagaaccctgactacctgaacccaaagctcaacaccaagtttggggcctactccgagggctgtggccttgacaatgttctcatgtcctgnggccatgacgactacatgtacctggttgccaaggagaacaagaccactcttccttctgcaggcttgttcatcatcagatatcattcattctaccccctgcacaagcatggagcctacatgcatctgatgaacgatgaggacaaggagaacctcaaatggctgcgtgtgttcaacaaatacgacctgtacagcaagagcaatgagaggatagacgttgagaaggtgaagccctactacatgtcactcatcgaaaagtatttcccggccaagttgagatggtgaagaagagggagagaacataaaaaaaattggtcgaaattatcctgtaatatgatgtaattgcaggagttcagttggctgtacaagtatgtagtagtacgtgtacacattttgtatgttaagagcagaatttgttgggagccatgcacgtggaataaaagttgccggtgattgttctttgtaaaaaaaaaaaaaaa

SEQ ID NO: 390768 - DNA, 1396 bp, Oryza sativa
  unsure (1)..(1396): unsure at all n locations
gcttgctgttccgctcaaagcaaaagcaagactctactcagtggatcgaagaagagaagcatatgctactatcctgcactcagcaagtgaatatgtctgtggtgctatctcagcagctcaaagcattcgccaagcagggtcaactagggatctggttatccttgtcgatgacacgataagtgatcaccaccgaaaaggattggaggctgcaggctggaaggtgagggttatccaaagaatcaggaatccaaaagctgagcgcgatgcttacaatgagtggaactacagcaagttcaggttgtggcagctgaccgactatgacaagatcatattcatagatgctgatctccttatcctgaggaacgtcgacttcctgttcgcgatgccagagatcaccgcaactggcaacaatgcgacactcttcaactccggtgtgatggtcatcgagccgtcaaactgcacattccagctactggatggatcacatcaatgagataacatcgtacaacggcggtgaccaagggatatctgaatgagatattcacatggtgggcaccgcatcccccaagcacatgaacttcttggaagcatttctggggagggggacgacgattctgccaaaggcggagaagactgaagctgttttggcgcagaacccgcctatcctctatgtcctccaactaacctgggcatgaagccatggctgtgcttcagagactatgactgcaactggaacatccccctgatgcgcgaattcgcaagcgatgtcgcgcacgcccggtggtggaaggtccatgacaatatgccccgagaagcttcagtcctattgcttgctgagatcaaagctgaaggctgggctggaatgggaacggaggcaggctgagaaggcaaacctggaagatggacattggcggcgaaatatcaccgatccaagactgactatctgctacgagaagttctgctactgggagagcatgctgctgcattggggtgagaagaacccaacgaacaacaaccctgtgccagcgacaatatcaagctcatgatctgtagatagctcaagatattattagtacacaaaaatccatcctatatagcactatacatgcatagaaacagcttgtgtaggttgccatgcttaggcctttccaacacacaaaagaaaaaaaaaacaccctccattgctgtcatggctgcagctgtgtctcgctgcgttgttgacagctaacaattctttcgggttggtttagctaattagttatggcaaatgtaaattccttgatgaaaaacctgagtactgcgggaaagagatgctgcacagagaggctgtcctttgttggttataatggaagtaaagcttttcttgtactnnnnnnnnnnnnnnnnnnnnnnnnnn

SEQ ID NO: 390769 - DNA, 537 bp, Oryza sativa
ctccagaaggtggttacggatacagccgtccttcttgatcaagagaggcttgatttcaatgccaatctgcaagaagcgaggaagcagattgaggtgctgaagctgaaggagattttggatgatgacttgattgaaatgaattatgagcaaatgctgaaagacattcagcttgacctcatccaaatttcttctggtaataaaaccggttcccttggtcaggccaataaaactgtagcacaggcaaatgagaagatgcttgactctcatggcatcgttggagctagcagtagccatgtacgcaatgatttgagaccgccgcaaagtgagtcgtttgagagggacaattacaaaaggcctccctctgaactgatggtcgtgaaagaactcagcattgacaagcaagagttaccaaggtcaatcaccacggagccgcaccaagagtggaagaacaaggtaatcgaaagattggcttctgatgcacaaaggctcaatgccctccaatccagtattcaggagctcaaaacaaacacagaggca

SEQ ID NO: 390770 - DNA, 737 bp, Oryza sativa
  unsure (1)..(737): unsure at all n locations
ccacgcgtccgcagaatggaagaggccctctgatcttgatttgaatggtgaagctaagcaagatgatgatgatgatggcaatgtagatcgtgcacgatgagctaatcacgaagatgataaagtcattactaatgatgatatcttaggggatgctgtaccttatgaccagcaagatttcctgcgcagtatatgttttaggttacttgaattagtgcccagtggtagagctaatgctcagtttcccggatctcatccagtttctcttaacagcgagaatctgcaaattctgagacagcgatattattatgctacgtggaaagctgatggaacgcgatacatgatgcttataacacgtgatggttgctttctaattgatcggaacttctgctttagaagagttcagatgcgttttccccttagaaattcgaatgaaggttttcaccccttttcgttaattgacggagatatgattgttgccactgtaccggatttgggattgaagaggagatacttggcatatgatctaatgtcaattaattcccaatctgtagtcaagttgcctttttctgagaggtggaaattacttgatgatgagataatacgcccacgctatcatgataaaggacgcagtcatncatacaaatatgacatggaactattttcggtaaggagaaaggattctggcaactttctgcagtgaacaagatactgaaggagtttattccaaagctttgtca

SEQ ID NO: 390771 - DNA, 402 bp, Oryza sativa
gcggccggggtcagatacggcaaggtagtgaacgtgggccccaagaaggaaaaaggcaaccggtcaagataaatactaaaagtggtgacgacaacccggtcgggcggccgggagcggcggcggcgcaacgccgcgctcgcccacgtcgagaagcactacttgcccggggtcgtccccttcgccgacgccgccggtgtcttccacgcccatttcttcgacaagatccgccagaccgagtcagtactccatccatccatcccatttggtttctcccttcccttttttttttgcttgattattagtactgtttcatttaggttgcaaattggaatgtgctaatccgaatgcttctttcttcatgttgatttctaaaaaaaaaaaatatgtaatataatattattc

SEQ ID NO: 390772 - DNA, 477 bp, Oryza sativa
attcgtatcacccccccgaaaccctagacccaccaccaccaccaccatccccgagctcgcggagaggcagcgagagcgagaggtagctgctagtaggcgtcgggcgaggagatgtacgcggaccagatctccacgcggccggaagcgctccatccacgaccgcatcgacggcgaccagcccgccgcccgcgctggcgccggcgccggcggccggggggcccgtaacccgccgtccaagaggcaacggcaaactgatgaaaaatggaagcatgatctttaccgggaagacgatgaaccagcttcaaaatcaattgatccacgggatttgcgattgaagcttcagaagaaaagctctcagcaaagctttgctggccaaaggggttctggtgtacgtgatctacgtgagatgctttctggaacaatgcacccacagcccgtcaatgcggaccctccaaggcaaagccatcatcagagatc

SEQ ID NO: 390773 - DNA, 520 bp, Oryza sativa
  unsure (1)..(520): unsure at all n locations
ccacgcgtccgcggacgcgtgggcgctgccatacaaaaacatgacctaacagcaatgcctagctcggagctaaacaccaccaatttccagaggagtatggctagtaatgatgatgtttgtgaaaacttagccttggagccatcttctgatatatctgagcaggtgagtattttcaaggacaacgtgccctgcagtaagatatcacagagcactgccaatgccattgtacagaatgatgaggataagttcacagtgcaagaattgctttcatcagtagcagatattgccccatttgtttcaacgaaaaacttcgcactagaaaaaggatcccctcctattcaatcactggaaagaacatcatctccccatttgaaccctccaattgaggatgtcatacatgtcataagacacagcagcttccgtgtctgcggtgaacaggcagttgcagaggacgctgaaatgggagtccaaagttcaganntggcaantctctcaacgnagagaagaggtggaggcgagg

SEQ ID NO: 390774 - DNA, 500 bp, Oryza sativa
gcccttcttctctaccagcggcagcggcggctggtagggaggaggagatcgccaccagatcgccatggagacgctggcgagcgccatgcggcgggagaaccgccgcttcaagcccccctcctcctcctccgcctccgcctccgccgccctctcctcggggagggtccccctcgtcatggccttcctctcctgcctcgcgtggctctacgtcgccggccggctgtggcaggacgcgcagacgcggatgatcctgtctggtctcctcgagaagagctccggcaatcttccgaaggtgctgtcggtggaggacaagctgaggaatctaggatgcattggaattgggaggaagattgcggaggcagaaatggaccttacaaaggcgaagagcgaggggtatctgtgggggaatggaactgctactggtagttctgacaagaagaagctccttgctgttattggagtttacactggttttggttcccggctcaagaggaacacct

SEQ ID NO: 390775 - DNA, 577 bp, Oryza sativa
ccacgcgtccggtggcagcaagtgcgcacagaaaggtcggtgttgttccctacggcatgtcgaggatgtattagtgcccaaccatggcacatcctgcatgcccaatgggagctctgatgctagcttgcggcgaagcattgggaacaaagtggcagttcaagctagtttgggccccaagagcacagggcaatccaaggttgacgacgatgcctaagaagttgcattggtgccctgctgctcctgttcctgcttgatcaggaaccccccccggaggtgtcaaaagcttttcaactctctattcgctttaggcaaatcagcttgtatctgcctgtgtgtgtgtaagaaaatgtgcccttcgttgcacccttgaagggggtagtccagtggcttgtaatctgagcatattttaggccccaattgtatttttagggtgaggggccaaaagggaaaggaaggccccctaaccttttcctcttttttttttctttttccaatgttgtatagagatgtttctcatatcaaaagtgctacatcagaatgacttgagaaagatataaagcagacccctgcgcggttt

SEQ ID NO: 390776 - DNA, 772 bp, Oryza sativa
  unsure (1)..(772): unsure at all n locations
ccacgcgtccggccactgcctgtaccgtgctgttgagaaccagctgtcactctattccagagaaaccacacaatacaattaccaggagctgcggcggatgactgccaattatatgaaagagcatgcggcagattttctcccatttttcctatcagagggcaaggtcgagtctggaccagatcccttggagagcttcaagaggtactgtgaggaggttgagtcaactgctgcttggggtgggcaacttgagcttggtgctctaacccactgcctgaagaagcgcattgttgtatactcgggctcatttccagatgtggaaatgggcaaagaatacaaattggattcaggtggtaaagatggccctagcattaggttgtcctatcacagacatgcctatggtcttggtgagcactacaactcggtggtcctgcttagttatctaaaaggggaaaaaaagaaatttaacagtcttggtctcagtatgatatgttttccagtcatccagtgataaccgtctcttaacacaatggatgacttgcttacagctgctgttgtgtttccatcttctcgtcaatcaatgatggtcgagtccttgagtgtaccaaagttttacctgggaatttacttcccaaacagttttgcttgtaaaactgaagtatgtctcattatcttagtttcctgttgaggctgttttaccacctactaatttcatcgagctataatttgttnctgctattctctgcnnnnnnnnnnnnnnnnnnnnnnnnnnnnn

SEQ ID NO: 390777 - DNA, 739 bp, Oryza sativa
  unsure (1)..(739): unsure at all n locations
ccacgcgtccgcactgaagcagatagtgaagagcatgctaaggaaaaacccagaacatagacccactgctggagaactattgaggcacccatatgtgcagccttatctagctgaatcatgcagctgctccccaatctaccttccagtgaagcccaccaaaagtaacctgggagacaagcagcagtcaagaaaaccaggcagtggcagaaagcgaatcatcaaaaccaatggatccagtgaagcattagaaaccgctgcagagcaagctgtggatacaagagacaactccacatatatttcagatgtttcaacagttggtacccaggacgcctgcatttcacaagtatctgtggatcctcaagctagaaacaaagcatatcaaaacatcgatgatttgacgctttttcaacagatagaggaaaatttgatgacaataaccgatcgacagattgatgaggccatctttcttaaagctgtaagaaccagcagcacagtagatgtcgtgccagtctctggtgcaattcagaagcctaatgaggcaccaataccaaaggaggaactgaccattggagtagtgcaagagcagagaaaggaagtgaaagcacacactcaccaaggatcaaaaccaggcacagggagacgttcccatcgttacagaggaatcatcaccgaagagcgcggtgaatttggcacattcagttgcactcctgccggtgggacntctgacatagtcagcaga

SEQ ID NO: 390778 - DNA, 849 bp, Oryza sativa
  unsure (1)..(849): unsure at all n locations
ccacgcgtccggctttactgccttcatgtgaacaacactgatgcagagctgggcggaggagttcgtcaaagagttagttcctgtgaggtggagggaaatgatggtgtttttagcacacaagaaagtgttaatgtatttgactttcgtgtacctgctggcatcggtcttaaaatggcaagacatggtggtacagcaagttcaatcttctcacgtggtgactcggtattcattgggagcacagaaggtaggctgcaaataaaagggggtctgaaatcacgagttcagcaatattcactgagaaagggaaagcttgttgcaacctatgagctacctgatttcaatgcccacttccatcactcttcaataacccaagtatggggcaactccagccttgtcttggctgcatgtggtatgggactatttgcatttgacgcctttaaggaggacggtcaacaaacttacaaggctttgaaccgtggaggaccactctttggaggtaagagaagggcttattggcttttggatgaattttgttactgcccctaccatttcgatttaactcggtcatcacagggttttcttccttgtactcaaagagtaccgtaccatgcacaatggagggttatctgtcatagctaatctatttaatcgtgtgcaatcatgtgatccgaccatgtaatatatttgtaactatgtttatgctttagcttatttagtcatctgtagtgccaagcatcttgctttcgctgtattagcagaaatgattgggtttcttccccttcagttaattaatataacccccatgtttaatatcccnnaaaaaaaaaggcggcggttaaaaagggtcaa

SEQ ID NO: 390779 - DNA, 521 bp, Oryza sativa
ttcggcacggaggataacgctaaatcttcaagagctatttctatgtcttcagcagtttgcagcttggtggttctctcacccgatgagcactacttcctagggagctccatggatggatctatcaagctattcgatctccgtctcattcagaaagggcctatacagtctgtatgcagggcatataaattcacatactcatttaccacttgttgtcgatccctctgaaacccttcttatgtcaggtggggaagacagaatggttcgaatttggagtataaaaacgggcgagcaaatatttgcacagagtgtggctggttcactattcacggcactttgctggccagaaagcggctgcgacttgcacaattcttcgctgttcggtgtaaatcacagttggggggcttggatgggatcgcgtgatggtctgttctatgtgcatggtacttaagcgactgatggtactgactcaagccatgatggctctactggtgttatgtacataagcatataaggagcgatgg

SEQ ID NO: 390780 - DNA, 1009 bp, Oryza sativa
  unsure (1)..(1009): unsure at all n locations
ccacgcgtccgggaaccttgaatatgttgggtctggcaaagcgaattggtgcaaggttcttgctaactagcacaagtgaagtttatggagatccacttgaacatccacagaaggagacttactgngggcatgttaatcctattggtgttaggagctgttatgacgaggggaaaagaacagcagagactttaaccatggactatcacagatgtggtggtgttgaggtgcgcattgctcgcattttcaatacatatggccctcgaatgtgtctagatgatggccgtgtggttagcaattttgttgcccaggcattgcgtagacagcctatgacagtttatggtgatggaaaacaaactagaagttttcagtatgtttctgatctggttgctggactgatggctctgatggagggtgatcacattggccctttcaacctgggaaacccaggagaattcaccatgttggaacttgcacaggttgtgaaggaaacaattgacccaatggcaacaattgaattcaaacccaacacagctgatgatcctcacatgagaaagccagatattaccaaggccaagcacctgctacgttgggagccaaaggtctctctcagggaaggtcttcccttaatggtgaaggacttccgtcaaagaattttggatgagtaatcaaaacaatgtgtgtttactcatctggattctatatgatgctgcaaatatagtcagtagcacttcacctgctggatcacgcagtacaacgttatttactgcatacacgataaatgttgtagaattacttgatttttttgtatcttggtgagacagaacagaattagttaattatttgtccacattgtgaatcttagtaagtcttgtgagaagtataggtttgtatatcaggagctgttattggtttcaaattttcatctagctcctaattgtaatacgaatatttgattcaagtgaaatatattcagacgagtttcgctttaaataaaaaaaaaaaaaaaaaa

SEQ ID NO: 390781 - DNA, 518 bp, Oryza sativa
ccacgcgtccgatccttcttcatacatcttcgcggccggcgcggcggaggacagatcgattgcttgctactactcgattcggcctccggcggcggatgggggtcgcggcggcggcgggccggctcctgccggcggtggactgggagcgggaggcctacccggcgtaccgcgacttcttcgcgctccccttgttcgccgtcttcttcctcgtcgtccgctacctcctcgactgcttcgtcttcgagtggattggaagaaaacttatatttggaaaggaaaaggttgattatgagaaggaggaaacaagaaagaagataagacaatctaaggaatcagctgggaaatgtgtctatttcctatctggagagattgtatctgtgtcagttacatataatgagccttggttcacaaacactaaatatttctggggttggacctggtgaccaggtttggcctgaccaaaagataaaaatggaaacgtaaaggctgtctatatgtatgctgctggattctacaca

SEQ ID NO: 390782 - DNA, 471 bp, Oryza sativa
  unsure (1)..(471): unsure at all n locations
tgatgcatcaaactatgtaacagaaagaaaatgggctgccgcttctgatggcactcaaatacccatgaccattctatacagaaaagatcgggtgaatcttgatggctcagacccaatgctgctatatggctatggctcctacgagatatgtatagatccgagttttgggagatcgagattctctctagttgataggggctttatatatgtgatagctcatattcgtggaggtggtgaaatgggacgtaagtggtatgaggatgggaagctgttgaataagagatacacattcactgatttcattgcttgtgctgagcacttgatagataacaagtactgttccaaggaaaagctttgcatcaacggaagaaggcaggtggcctattgatgggtgctgcctaaatatgaggcctgatttattcaagggcagctgtgctggagtccctnttgttgatgttcttaccactatgc

SEQ ID NO: 390783 - DNA, 454 bp, Oryza sativa
ccacgcgtccggccacgcgtccgggtcaaatgtatcaccagagtaacagcattcagggcctgtacgacagcagtgaacaacatgatgctaagaggaccaaagcaaagggtgaagctgctcgcgccgatgaggaggcaactcttctggtgtcagctaagccaggctgaacacaacgaggagaaccaaacggttggctgaacaaaacttagtactattaacttgtctgaaattcaggaagctccattgctgtctggagagagtgagattgctcagaaaggctcgcggacaacaacaaacttgaaggacaccatccaccatgttgtcgaggagcgtgatggcaccaccaactctatctgcgatacttggatttgtttttgggctagtgccatggttgaaatctcttgtcatcggtgatggcgcccctcttagagtcattcacgactccatccaactg

SEQ ID NO: 390784 - DNA, 787 bp, Oryza sativa
ccatcgcgttcggacaaatgcagcagtaattgctatgtccaagaactgttctgacctggtaacattccgtctttgtattatggggcgactccgccctgatcggatcactggggagcccatggatgatggttttggggcaattgtgatgaactgcaagaagctcactagactttcagtctctggtctgctcactgataaggcgtttgcatacattggaaaatatgggaaactaataaagacactgtctgttgccttcgctggaaatagtgacatgtctctccaatctgtgtttgaaggatgcactaggttgcaaaagcttgaggtcagagatagtccttttagtgataagggattgctctctggcctgagctatttttacaacatgaggttcttatggatgaattcatgcaggctaaccatgaggggttgtagagatgtagctccagcaaatgcctgacttggtggttggaatggtgaaatgaaaggatccactcttgtattgaatgaaagggcgagatggagactgttgaaataaactggtaccttgtatcgatcactggcaggagcaaggaataatgcaccttcatttgtcaacatcttgtagtactgctacaggaagaactttgttgtactcacaaaacaagtttgttctattaaaccttatcattctattgtattcctgaaccctgatcagtctatcaaaatcagacacaggtaaggcttcccgcatgttgattttcaagttccttgggggatcttcggttatggcggatcttccagattgttc

SEQ ID NO: 390785 - DNA, 1364 bp, Oryza sativa
  unsure (1)..(1364): unsure at all n locations
ccacgcgtccgggacgtgatgaagaagaaagctagtgagcttgataagatgaggatggaaagaggaaaacttgacaaaggaggatactcatcaatatctggtccccgggtaatcgagaaaacattcaatgacatgagcattaccggtagtggatttgggagtggttctggattaggtggactgggcatggatatggactcatttgctagcaagcccaaaggaggccgtccatctgcagctgctactgctcctggtaaaggtcttggtatgaaattaggcaaaacacagaagacgaatcagttcctagagtctttgaaagctgaaggagaagtcattctggaggatgtacaacccagctcagttcagtcaagggcatcgcctcttccaccaagtgatcctgtcacagtgacaattgaagaaaaactcaatgttacagttaaaagagatggaggtgttaataactttgatgtgcaaggaacccttgctcttcaggtccttaatgatgctgatgggtttatccagttgcagattgaaaaccaggatgtacctggacttagcttcaaaacacaccccaatatcaacaaagatttgtttaacagtcaacaagttgtgggggcaaaagatccaaacaggccattcccaagtggtcaaaatgaaactcctctggttaagtggagaattcatgggatggatgagtcatcgttacctctatcagtcaactgctggccatcggtatctggaaatgaaacttatgtcaacattgaatatgaggctgctgagatgtttgacctgcacaatgttgtcatatctataccattgcctgcacttcgggaggctccgagtgttagacagattgatggagagtggaggtatgattcgagaaactccgtgttggaatggtccattcttcttatcgatcagtcaaaccgcagtggctccatggaatttgttgtccccccagctgatccatcaacatttttccccatatcaattggattttccgcatctagtacattcagcgatttgaaggttactggaattcgtcctctaaaggatggtaacccaccaaagtattcgcagagggctcgtttggtaacagccaattatcaagtggtttaacgcccaaataagggagattacctcacttcagcacacatgtttgcgggcatttcctttcggcaatgagctgtttagaagtcatggagaagaaggattgttttgcatttataaagaatgtaattttgtctgtttcatatgtagtaacatgtttcaccaaattgctgttaatttgtactgccacctgatgagaaataaaagcatgtcttttccttcgacgccggttggctgttctttnnnnnnnnnnn

SEQ ID NO: 390786 - DNA, 591 bp, Oryza sativa
  unsure (1)..(591): unsure at all n locations
gcgggagcggaaggnaaggcgaaggcgtgacgtcacccaccggggagggaggagatggagctggtctcctcgtcgcgctccgtccttcctcggtgcggcggcggcggcgttgcaggtgtagctgctgctccgttcaggacggcgtccgccagctcgaggcgcaaggggacgagcggattcgtgtgtcctttgggttgcgatggtgaggggaagaagagcgtggcggaggggacggtcagaaggagggcggccctcgctttgcttgctggcttcgccggcgatgtcggtggcgttctcggctcacgggaagaccaaaagcaggaacccttacgacgagaggcggctgcttcagcagaacaagaagatccaggaagccaaccgggctcctgacgattttccgaatttcatcagggaaggtgagcaatcttgcccctgatttgtgcatcatcgggccgccgtagattatcttgttctactacagataacatgctgagcagttcaagtttactctggagcaatgtaatgtaagacatttgatgcctgaaggttgaatgacaaggtttacttccataaaaaagacttattttcttt

SEQ ID NO: 390787 - DNA, 497 bp, Oryza sativa
  unsure (1)..(497): unsure at all n locations
ccacgcgtccgaagcaactggattgatcgatcgatcgatcgtgaggaacaaacaatgccttgcctggcacaggagtatcatcccaagctaccagccaccaatcactactgcaagtccctctcctccctcatcagggagacctacgcccactgccatgtcccctgcgccaggatccccgccgccggctggagctccggcgacgacagcgacgacgatgacagcttgctcgacgaagtgctcgacaccaagcaggtgatcatgaacgagatgaggaaccggcagatgaagaagagggcgaggtgcagcctggattccccgatgtcgagcccgttcgtctggtcgttcacgccgctcgacccgaggagcgttctggagaagtttccgagtcccaaggagtcggtaacggaggaggagaagacgacnggcaaaggggggagggaagggcgcntactccnaccgacnagagcgaggcgtttttttatntgaagagcttcttc

SEQ ID NO: 390788 - DNA, 763 bp, Oryza sativa
  unsure (1)..(763): unsure at all n locations
ccacgcgtccgtgaagagggagtcgttccaaggtggtggtggcatgccagagctgtgcttctcagatagtgattgtgataggatacctgattgccggaaaccattgattagactgggggcacacatgccagcacgggcagagcaagcatccagaaggagtgagtttgacccatttctccttaatggtgggggattcttggccccgaatcagactggtgaagtgtatgatgtgattctatattttgggataatagacattctgcaggattatgacatcacgaaaaggctagagcatgcatacaagtcattacagaccgaccccaattcgatttctgctgtggatccaaagctctattcgaaaagatttcaagatttcattggcagaatttttgtggaagatggctagaaatggatcaaaggtgcactgtaaattccattcaaaggccagagcaccggcaatgatttgaagatggttttggtaggtttctgtgcacggtaaagaatatccattatcacgaacgatcatcttcatctactgggatccgttaaagcggctcatcggccaccggtaaagcctcaacccaggagcacaggtaatcgggtttgcaaagcggtttgatgcaaattcgttgcaagaactggaacggctggattttcagaggcagccacgacagaggcatctgtaaattttgtgattttggtgggtgacaaattgggacttncagttccctagtagttctttcttncttttctnttntttnnn

SEQ ID NO: 390789 - DNA, 689 bp, Oryza sativa
cgaattccaaggttggggagtggagggagcttggcgaaaaggggatgccgttcatggggcgcggcgagtacgtggaggagcacgggcaatggtttgggctctcctccacgccgaggctggggctgtacctctgttcctgcgatctctcctatctctgctgttcctacgatgcgcaggtgatggtcaggtgctggttggatggcctagaccggctgccccgcggcggcgccgcccaagcgatcgttactgatggagacctatgccgtgcacctcggctccggtaggttctgcatcgccaggttcatggaggaggaggagcaacacaacatctcacttcatccattcttccgcgtcgccggcgaaaaaagcaagaacgacaggttcttgctgctcaccggcgttgatgtggtgggcagtgacgacgccgtcgtcgtgcacaagtctactacgctacgcattccacaaacggtgatttcgttcgtggttactctcgagtcttttaatttcatcatcccctaatttacttattacacctctctagtctccggtaaaactagctatattttgttttgtgacggagtgagtatatcatttatatatatcccttttccttttcatttcgagcgagattgcaataataataatggtactccattcgtttatattaccaacaaaaaaaaaaaaaaaaa

SEQ ID NO: 390790 - DNA, 598 bp, Oryza sativa
  unsure (1)..(598): unsure at all n locations
gatcaatctttctcgctcttatctcctctcatctctcaatctctctcagataattaaaccaagtgtgcagatagatatatagctgctgctgcatgtgtaggggatttgcctctgaccatattactattccttgcatgcgaaagagagactagctcttgtcactctcctctgcccttcttccttcgattcaagaaggcacagtagtgtgtatatatatacaggcatacataccgttcttgccgcctctagtttgggtgtgattgaatgacaaaggagatggcccgatgatgtcgagtaccatgaggagtttgtgacggaatccgagggggttgcggctcttcacatgcggctggcttcctgcttcttcctcccccaaggcgctcatcttcctttgccatggctacggcatggaggtcagtggcttcatgaaagcatgtggggtcgagctggccacggcgggttacggcgtgttcggcatcgattatgaggggcatggcaagtccatgggtgccagatgctacatncagaagttcgagcatcttgtcgatgactgcgacagattcttcaaatcaatatgtgagctggaggagtacagaga

SEQ ID NO: 390791 - DNA, 468 bp, Oryza sativa
gtttcattacccgcaccgactaattaagggcgggcattttaagccatttcgagggacgtcatggcccggagtgccttcttcttccactgcgtcaccgccgtcacggcgtgcatcgtctctacagccgcggcgctcagtggcacggccacgttctacggcgggagcgacgcctcccgcacaatgggcggcgcgtgcgggtacggcaacctgtactcgacggggtacgggacgaacacggcggcgctgagctccgcgctggtcaacgacggcgcggcgtgcggcgagtgctaccagatcacgtgcgaccagtccaactcgaagtggtgcaaggcgggcacgtcggtgaccatcaccgcgaccaacctctgcccaccggactactccaagccgagcaacgacggcggctggtgcaacccgccgcgccagcacttcgacatggcgcaacccggctgggaacaaatcggggtc

SEQ ID NO: 390792 - DNA, 560 bp, Oryza sativa
gacagcttagctagcaggtagctgacgcggccccttcgatctcgatctctgcacggcgacgataagataagcaatggcagtctcgtcgccggcgccgtcgtctctgcatgtgccgatggccgctgcggcactattagggatgctgatgatgatgtcgtcggcgccggagatgaaggtggaggcggccggcgggttgtccgtcgggttctacgccgaatcgtgccccaaggcggaggcgatcgtccgggacacggtgaccaaggcgttcgagaaggcgcccggcacgccggccgacctcatccgcctcttcttccacgactgcttcgtccgcggatgtgacgcatcggtgttgctggagtcgacaccagggaacaaggcggagagggacaacaaggcgaacaaccctagcttggatgggtttgacgtcgtcgatgatgccaaggacctcctcgagaaggagtgtccacacaccgtctcttgcgccgacatcctctctctcgtggctcgtgatagcgcctaccttgctggtgggctcgacttcgagatcccaacaagtcgtc

SEQ ID NO: 390793 - DNA, 752 bp, Oryza sativa
ccacgcgtccgagccctccgagtttcgcgagcacagttccccgcatggagagcgcaagcccgagatagctggttctggaacagatttgggaagctgagttctaattaattgaacttttatgagctagttttaaggaatatatttaggctgttatagctacatagaaggacaactgatacggtgttaggtcatggaggagattcatggcatgcaagaatcaaagactgcatctgtcatcaaagttgccagagagcctgccgtcattatcaatggagttccagacttgcctcctgatgtagcatccgattcacaacctgagccacgtaatgctgcagaacctcctgttgatcatcgttttggtgaatttctagaagggcggaaagtaaggaaaccttttggggacaagcattttgtagggaaagtggacaagtttgatagtgaaagtaactgggacagtgttgtctatcaagatggagaccaggaggatctcgagtggaaggaagtggaggagatcatgctgccattggacataactatcccgctgaaaacacttatttcggataaattcgcacttcaaaatacagctcctgtcttcaaacctaaggtgggtagaccaagaaaagtctatgctataacggatggcaacacaaacaatgctatggaagatcagatgatgactggagcgggaaatgaacattaattcaataacttactaagcgttggttcagcatctacattcaacgatgcatatg

SEQ ID NO: 390794 - DNA, 824 bp, Oryza sativa
  unsure (1)..(824): unsure at all n locations
accggctattgaattcactggagaggaagcttttggccgatacctggacttgcatgagctttacaatgagttcataaattccaagtttggaactccaatggaatactcagcatatgttggcaccttttctcatgtggagaagatggcacaaaatctgaaaacctccaggcaatacagagaatacctggagcatattttggagtatctgacatcatttctgtatcacacagaaccattgcaagacattgagaagatttttgcaaagttggaaagcgagtttgaagaacagtggatcaatggtgaagtgcctggatgggagagcaaggacccagagaaagaatctgcacaagagtcagtaatagaccttgattactataccactgttgaagagcttgttgagctgggcccagaaaagttgaaagaggctttagctgctcgtggattaaaaagtggtggtactgttcaacagcgtgctgagcgacttttcttgttgaagcatacacccttgggaacaattgggatcgtaagcattttgccaaaggttcacacagttctgtctccaatgctacttctaatggtaacaatttcaaggataatttgaagaaggaaattgctttaatggaagtaaagatgaggcgcctttgtgagcnactagatgagatcattgtacggacaaagggaaaatgcagagaagaagctgacnctcacatatgaaganatggaagcagaacgagaagggaagaagtgcaagctgntagtgaaagtgatgatgaagaccaacaaaatctacaatcctcttaagttgnccgatggggtggggcggc

SEQ ID NO: 390795 - DNA, 524 bp, Oryza sativa
ccacgcgtccgcccacgcgtccggcggaacctgccgttcaacatctcgagcgaggagatgtacgacatcttcggcaagtacggcgcgatccggcagatccggctggggaacgccaaggacaccaggggcacggccttcgtcgtctacgaggacatctacgacgccaagaacgccgtcgaccacctctccggcttcaacgtcgccaaccgctacctcatcgtgctctactaccagccggccaagatgtccaagaagtcggacgtcaaagaagaaggaggaggagatcaccaggctgcaggagaagtatggcctcggctccaagacgccttcatccgcccccgacgcgtaggattctcatcagaaatcagttcttcagctagtacatgtatttaagaatcgggaattgcttattcaatcttgcagtttgtgctcgtgtgttgtctgtgcaatagtttcctatcaatgaaaatcacacagcgggatgtactttgactgaaagaacatatgcaatggtgactttgact

SEQ ID NO: 390796 - DNA, 1309 bp, Oryza sativa
  unsure (1)..(1309): unsure at all n locations
tcccagtttcccccaaagctcctttcccagagaccccaaaccaaagcagcttgcttgcttgcttgattgtttgttgcttcttgagcccctctcctccttgcccaagtctgtgtttttgtggcagacttcagcataagggtgaagcaaagcatagggtctggttttgggttcttgacagaagtcatgtttcatggtggcaggcctttgtccctcaggggctctctcaaggcgcttgaagctgatatccaccatgccaacaccctggcgcatgctatacacagggcctatgggggtgcctgtgtgcagatgaggctgtcttacagctccatggctccaatcatccttaacctcatccagtggatggattgcagctgctccctttcatataccctccctagttacctaggtctccttgaggttcttgtgtacaaggtatatgttgatgaggatgcctctatatccaccaacattgaaaggagagcatgcctcatggaattctatgctgtaatatatccattcttgcaacaactcgaggggaatttgatggagaaagactgcaaccagaaaggatggtgcaaggaggcggcctccggtggcggcggccggaagctttacgccgacgataaggacgacgagagggaagatgagtgcggcattttgcttggagacttgcaccaagatggtccttccaaattgcaaccatgccatgtgcatcaactgttatcgagactggtacacaagatctcagtcatgcccgttctgccgcgggagcctgaagagagtccgatcaagggacctctgggtgctcaccggagacgacgacgtgatcgacaccgtgacgctggagaaggagaatgtgaggcacttccacagcttcatcgacagcctgcccctcatagtccctgacaacctcttgctggtgtactacgactacctagtctgacgaagctcagctctcctcttctgaaagatattgagattcagagttcagtacgtgttccgggcagccgaccatcctctgcagattgagtctggctagcgaaatgccatgccgtcaatggcgaagacgacgacaccattgctccttattagggctgggctctgcgtaatcgcattgtttgttgtaataagtgtatatacagaattaaaaagagatattggggaagatggttttctcatgtttaactacttgtttggcacttctgctctggcaaattgccaaatgattcagaaaagggacaggtgctgggtgtttattgacctgcaccaactgtcgatttatttgcaaaaaaaaaaaaaaannnnnnnn

SEQ ID NO: 390797 - DNA, 790 bp, Oryza sativa
  unsure (1)..(790): unsure at all n locations
tcgcatcgtcaccacctcgagtaaatcaaccttctgtgtcgccatagagtctcaacctgcacgggcgtcggcatctcgacgcgctncccccgagcgaagcagagatggatacatcaggacctgcagcattcgtcaatggagagattctgaagatgtctcgtcggccgaagagtgcgcacggtggtccacgcccagcgcgaggaaggcgggttgcttattcgggcagtccaccgatggtcatcagctaaccatcaaaggggcctccggtgcccctatgtcgcactatgtggagattattgggatcgctgaacccaatcaggccatccgggctgaagtttgcacagattttggtgaaaacttcgatcctgcaccattcaatggactgtgcaagcttgcgaatggccagatgaaggatttgttcctgtagaggtcggcatcacatacaagacattctgccaacaaagcatgtctcatgttcatgatttctctagctttaagatccgtccaactgtttttgtcagtcatctcagtataatcaagctacttagggtcagtattggtgcttattaagacatattaaccttaagctatgtgaggacaagcgtgtgcttttgttgctgaagagcttgtggtgtttgctccttctaagcaaagcaaaccaaagcgttgtgctgcattgttactgtcgcttgcatttggatccttgaaagctgtgtttcttgttatgctctccggtgcatcttgatgaagtgaactagtatgatgctttctgatgaaaaaaaaaaaaaaa

SEQ ID NO: 390798 - DNA, 779 bp, Oryza sativa
  unsure (1)..(779): unsure at all n locations
gatgaaaacgttggcactcngctgaaggaaaagtatggggacaaaatgacaaagatgcataggtatgatgatgaggcatatgctatttatnatgaactcttttcctatgcctgccccaagttcattactgcgtcgcctccagttctacgagagccatacacaaactacaaccaggatgcttatcgtcttcagttgaaactatttctttatgaagtgaaacaacaacagtngctctctggtattcgaagctatctcaagttgtattcaacgataacaattggtaaacttgccaaatacatggatgtggatgaggttacactaaggacaattcttatgacatacaagcacaaaatgcattcaatcgacagtgacggaaaggtcatatccagtgcagactttgacttctatattgatgaggacattattcatgttgttgaatccaagttaaccaagaaccatggtgattactttttgagacagattttgaagtttgaggagatgattacgcagctggataaagtacaatttgactgaacctgctatcatcagggctgaagctctcctttgagttacagtgggacgcgctgttggtgatggatagtaatgataaatttttgtgccatccttttttgatacattgttgacatgagttaaatcctcgctaaaaagtactctaggtgctaactatcgcatccccttgtcatggcatgttctggtttgaagaatgccacctttaaattgttcttgtcttaaaaaaaccaaaaaaaaaaaaaaaacaa

SEQ ID NO: 390799 - DNA, 1242 bp, Oryza sativa
  unsure (1)..(1242): unsure at all n locations
gngaacgggacntctgnggtggtcagtgcaactacagggttcctgtttcacctgcctttggtgccccttcaggcatgaccagtcctcaactccgaacctcactcggtggatttgagtttcagccttccaaggtatgccccagaaacttcatcatctttgatcaaactgatgacaaagggcgcatcatgtgtcatcctgcattggtgagcaagctaaacccttcagccaccaatgctttcccttcctatcccgagccaatttgcagaagttccggccaagataacggaaacctggaagaagtttcctcatctttcaaggaggatacaagagagattgatgcactgctaagcttctgatgaagaaagcgatgaaggatgatgtcaagagtactgggcgtantccgggactgcttcgagagtggattcccttggattcatcttcaccaccaaggtctaggaaaatgcatcattcttctagcccagagttcagtcttccatggatccatggacactgntactcatgagaggatgagaaatatggtcacagttcttaggggaataatccctggtggagancaattggatacagcctctgtcattgaagaagctgttagatagctgaagtttctcaagatggaggcgaagaaacttggcgtggaggtttcggataactagaactggcaactggtacagtggcgatactaaagctcacacataaataaaatctgaaggcatcaatgtgtgtatatatggtctttggtaaggcccttatcatcattgttacttgattgactttgtgtgggtgtggaaggtaaggcaggcagccagcttttgcttctttctgcaggcctcaaaagaggtattgtttgtgggattctgatgcttgatgtctggtagcatggtgttgctgcgctgtgagctttccctccctcatcatggtgtggcactatggttagatcgtcagacgaagttctggatgatgcattatgttttcaggcttacctttgccttttgtgacttaagcacctcagctctacctatcctatggtcagatcaccgtgctttgctctttttcaagctctgcttatatttgttgcactacttaaataatgtacatacttggcttgttaaattgtagtattgtgtaccgaacaagatcatgtcattgtgaactaaattacgatatgaaataatgtactttggatttatcatactatttgtcaagaggaatctgtctcatttt

SEQ ID NO: 390800 - DNA, 755 bp, Oryza sativa
ccacgcgtccggcaacccacacatctccattgcgccaaggaagaagaaaccctccccctccctctccccaatccaatccaatccaatccggcgagtcgcgtgagtttccgctcccctcttccgtcgattcggcatcgggttcgccgatcaggggggcttccttgtccgattggggggttgattcgtgtttttgctcgtgttctccaggaccagctcagtctctcgaaggagcgccatggccaagagctcgttcaagctggaccacacgctcgagaggaggcaggctgaggctaaccgtatcagagaaaagtacagtgacagatttcctgtgattgttgagaaagctgaaagaagtgatattcctgacatcgacaagaaaaagtacctggtccctgctgatcttaccgttgggcagtttgtctatgttgttcggaagcggatcaagctcagtcctgagaaagcaatcttcatctttgtgaagaatactcttccaccaacagctgctctgatgtccgcaatttacgaggagaacaaggatgaggatgggttcctctacatgacctacagtggcgagaacacctttgggctgctctaggcgcggcagcaatatcgctctcaactcctgtaaataagacttgccaaacaagtgtatattctttgcttacctcgtggcaaatctttaaactctaatagtagtaatgccaagatcctctcagttgttctgaacatatatacgctgcttgataataaacaac

SEQ ID NO: 390801 - DNA, 665 bp, Oryza sativa
gcataagctacacgcactaagtacagacaagagatcgacaaacataatctaattaatcaaaatggcttcttccaagcctctccttcttgggcttctcctgtccatcacttgcctcttgcaggtcctactggcggcggcgaaccctcagccgccgccgccgccgtcgtgcgacaagtccgacaaggagctgaggttcatgttctcgcagtggatggccaagtacgcgaagacttactcgtgcccggaggagcaggagaagcggtaccaggtgtggaagggcaacaccaacttcatcggcgcgttccgcagccagacccagctctcctccggcgtcggcgccttcgcgccgcagaccgtcaccgactccttcgtcggcatgaacctcttcggcgacctcgcctccggtgagttcgtgcgccagttcaccgggttcaacgccaccgggttcgtggctcccccgcccagcccgagcaccgatcccgccgcgctcgtggctgccgtgctgcgtcgactggcgctccagcggcgcacgtcaccggcgtcaagctccagggctcctgcgcgtcgtgtggtgcgttccggaggatggcagccatcgagggcctgccaggatcaagaccggcatctggtgtggctgccgagcagggactggtggactgcgacac

SEQ ID NO: 390802 - DNA, 649 bp, Oryza sativa
ccacgcgtccgatcgcggtcagcgaggtcttcgggcattaccagcagaaattgattcatgtttgcatggatgctgaaccaaatgtggattgagccctcttggcgccatgccatgccatttgccaattgccatgtgggagggaggccctctcctggatggacaatatccgaagctgaaagagaccgagtgcccccactggtctctactactctttgtagatgtcaacgtctagcttgtgcttctccatttttgtctggtgtgaagctttttttttttctttctacaggatgtatcccccctgcatttttgtctggtgtgtaatctttttctccgggatgtatgtcgcctgcgaatcttgatgctggacagagccgcgttgcgccgtatcctacaaaagacgccgatgattagcattgctgatgtggcatctgtacggagaacctgataatactacttcaaagggataggcattacggtgttgtattgtactagtaggtgaggacgcttggcaccggcaatgcttttctgtaagaatatatatatctgtacattttttattgctctttctcgctcaggctgcaaaaacagaaatttggaagttgtagcacatatgtatcgacttaaaacatatttaggtttggttttgagg

SEQ ID NO: 390803 - DNA, 620 bp, Oryza sativa
  unsure (1)..(620): unsure at all n locations
aatggagaagagcagcaccgccgcgggagggaggagcagcacgccgccgncgccgatgtacacggacgagttcgcgctcgaggggaagaagcccgtcaagaaccccttcgtccccatcggtgcattggtcactgctggtgttctgacggccggcctgatcagcttccgaatatggccaactcctaaactgggtccagaaaactgatgagggctccgtgtggtccgctcaaggagccgacggttgctctggatgatccggcagtgccctactactacggtgatcaaatcaagctgttcaagaaaggggtcaagtcctttgaagacaaagtacagggaatctttcatatctatacttaggttttggggcaaagattacggctgttcattgttcctccagccattggggtttaaccgtgttggtttcgcctggcacgtggtagctaacaaaaacaagatcagatttggatttgcgcaattactaggctttgaataaaaagcttttctttcgtcgactcgacaccaagttatgcattgtattggaacacagcactgttaatcgagcgaatgggtaaaatacatacacagtgcagacctgtggcttgaaaaaaaaaaaaaaaaaa

SEQ ID NO: 390804 - DNA, 587 bp, Oryza sativa
ctcgagggggtaatcacaaaattgcgcgagacaaaggacctgcgcatcaatgaacccattctctacgtcaagatgcaaatcgctgcgattaacctggagaagggaaatcagaaggagtgcaagaaacttttggacgaaggaaaatctactctagatagcatgactgatgttgatcccacagttcatgctagcctctactggatatcatctcagtaccataaggctcgccaagaatttgctgagttctacaagaatgcccttctgtatctggcttacactactgtagagtcactctctgagtctttcaaactggatttggcatttgatctctcccttgcagccttgcttggtgataacatctacaactttggggaattgttagctcacccgattatcaacagtcttattgggaaccaaggtggagtgggtctatcatatgttacaagcattcaacaccggcaacctagctctctaccaagaactatgtagggtccacactgctgctctcagtgctcagccagcttttgtgcagaatgaacgggaactgctggagagatcaacattctatgtctgatggagtaatcttt

SEQ ID NO: 390805 - DNA, 765 bp, Oryza sativa
ccacgcgtccgcaatttcaatatttccgtgccatctatttgttgggttggattgtcatcctcagacatgataaagttgaatttgtctgagaccaactactcacgtttgtctcgcgaggacaaaactatgttgaagaacctttggcaggacgatttgtccgatgtatggaaacgcagaatcgaagaaatgataagttttgacaagaaggcctcttttgaagctattcatagtttggggtttgattattttgcaaccaatttgcttccggatatgattaacaaagtacgagaaggctatgttcaggttcaagagaaaaaagagcctcaagacactgaagccagtgaggactgatttggaggactctaatgcagctagagattcagatccataagtttctacaagtaaaagttggagcagcagattggaactgcatgttgatttttgtggatgctcaagcttcactcgtatgtttggcttctgataagtctgtaatagcttagcagcacaattattatagttgtcttctaggtgatcgatctcctaaatacttgcaccactattattgtagttgtcttttatgtgatcgatctcctaagtacctttctgtctgtaatagtttagcaacaccattattatagtactagttatcgtctaggtgatcgatctctcctaagtgcttgcactattgttactgaccttgtcttctagcactattggtactgcagttgttttttcgctgatcgaacttctaaaaaaaaaaaaaaa

SEQ ID NO: 390806 - DNA, 717 bp, Oryza sativa
  unsure (1)..(717): unsure at all n locations
ccacgcgaccccatcaccccccaacaacaagagatcatcgaagccccaacaagtcgcatgacatccatggcgacgccgccgcccaagaccctcctcctgctcgtcctcgcgctatccgtcatcctcgtctcggccaccgcgttccaccaccaccaccaccacgacggaggagccgaagctggaggaggaggaggagggggaggcgggttcttcgaggtgccgtggttcggcccgccggggggaggcgggtggggggcgtggggagccggctacgggggcgccggaggacacgagatggcgcggccgtcgacggtgtgcatggagaagggcgcctgctacaagaagcggctcaccttgcccggaaaagtgcttcaagtccttcagcttcaaggacaagcacggcggcggcggcggcggcggcggcgggtgcagcttcgattgcaacaagtgcgagggccacctgctaattaatcaaaccgaatgatccatggatggcgaagaatcgatggccctctctactgaaactgatggatgtgtatggtatggggtgttgaattaatcgtcagttattagagttttgttaattagctacttactgaatggaattggaatgtaatgaaatatattttggttaagctgcgagagtcttgtaagtattccaggtgtgtgtgttggtgttctttaataataatgattaantaaaacgagaaggaantt

SEQ ID NO: 390807 - DNA, 1377 bp, Oryza sativa
  unsure (1)..(1377): unsure at all n locations
gagcntcngncngntncncgcngngngnatgtcgcgtatatcgaagcacaatcgctctctctctctctccctccccgattcgattcaattcgcgacgcctccgtgaaattctccaaagccagcttgccctgtagccgcgtgctccggccatggcgttcttcaggggcctgaccgcggtgtcgaggcttcgatcccgcgtggcacaggaggccaccacgcttggtggtgtgcgatggctgcagatgcagagcgcatctgatcttgatctcaagtcccagctgcaggaattgattcctgaacaacaggaccgcttaaagaaacttaaatcggagcatggaaaggtccaacttggaaatataacagtcgatatggtccttggtgggatgagagggatgactggaatgctttgggaaacatcattgcttgacccggatgagggtattcgttttaggggtctctcgattccagagtgccagaaagtgctgccgacagcagttaaagatggggagcctttgcctgagggtctactttggcttcttttgaccggaaaggtgccaaccaaagagcaagttgatgctctatcaaaggaattggctagtcgttcgagtgttccaggtcatgtgtatgaggcaatcgatgctcttcctgtaactgctcatccgatgacccagtttaccacaggagtgatggcacttcaggtggagagtgagtttcaaaaagcctatgacaaaggaatgtcaaaatcaaagttctgggagcctacctatgaagattgcttaaatttgatagctcgccttccagcagtggcttcatatgtttaccggaggatattcaagggagggaaaactatagcagctgataatgcactggactatgcagcaaacttttcacacatgcttgggtttgatgatcccaaaatgctcgagttgatgcgactatatgtgacaatccacactgatcatgaaggtggaaacgtcagtgctcatactgcacatctggttggaagtgctctgtcagacccttatctttcttttgcagctgcactgaatggtttagctggaccgttgcacggcctggctaatcaggaagtgctgttgtggatcaaatctgtaataggtgagactggtagtgacgttacaactgatcaactcaaagagtatgtgtggaagacactaaaaagtggaaaggttgttcctggctctggtcatggagttctacgtaagaccgatccacggtatacatgtcagagggagtttgctttgaagtacttgcctgaggatccacttttccaactggtctccaagttgtatgatgttgcgcctactatcctcactgagcttggcaaggtcaaaaacccatggcctaatgttgatgctc

SEQ ID NO: 390808 - DNA, 1210 bp, Oryza sativa
  unsure (1)..(1210): unsure at all n locations
gtcacgtgtttcctccttcccctcctcgatttaaccgccccatctcgagtccccccatcacagcttccactccacgaaaaccctctgcctccttcgctcgctgcaccctcgtctcggcgatccatccatggctgccaggaagttcttcgtcggcggcaactggaaatgcaatgggacaggggaggacgtgaagaagatcgtcaccgtcctcaacgaggccgaggtgccctccgaggacgtcgtcgaggtggtggtgagcccgccgttcgtgttcctgccgcagtgaagggtttgctccggccggacttctccgtcgccgcgcagaattgctgggtgcgcaagggcggcgccttcactggcgagatcagtgccgagatgttggtgaacctgcaggtgccttgggtgattctgggacactctgagcggagagcgctgatgggcgaatcaagtgattttgttgctgacaaaattgcgtacgcactttcccaaggtatcaaggtaattgcttgcattggtgagacccttgaacagagagaagcaggaacaacgatggaagttgttgcagcgcaaactaaagctattgcagagaagatatccgattggaccaatgttgttttggcatatgaaccagtttgggccattggaaccggcaaggttgcaacccctgctcaggctcaggaggttcatgatggtctgagaaagtggcttgtgactaatgttagtcctgcagttgctgaatcaaccaggattatttacagaggctccgtaaatggagcaaactgcaaagaacttgctgctaaacctgatgttgatggattccttgttggaggagcttcattgaagcctgaatttgtggacatcatcaagtctgctaccgtcaagtcttctgcttagtgttctgggttgcaaccagatgatcgtaggagttaatgctgccaattttaagttatgacatgtttgaccagcttgctttgttatatctcgaagtcagtgaactccatatcgttccatagagcatgcagccacctgtggttgctttttttctttttgactttttctcccgagaggatcagatgaactgaaagtgccgttaatgtctgtattatcagaagtttgttgatggcttgatgctataatagttgaacctgatacttcctgagtgaagtactgtcctttgcatgtttaaaaaaaaaaaaaaaannnnnnnnnn

SEQ ID NO: 390809 - DNA, 896 bp, Oryza sativa
tccggattcccggtcgacccacgcgtgcggcttaatcaatcacctcatcacacactcttagctaagctaagctaagctaagcttgagctaatacaagagcaaatgcatggcggtcgcgagaggagttgcactggccgtcagtgctcgccgcggcggcggcgatcctcgcggcgagccccgtcgcggcgcatggcggcggcggcggcggcggcagcggcagctgcatgacggagataatcagcctggcgtcgtgcctgggctacatgtccgggaactcgtccgcgccgaagccgtcgtgctgcacggcgctgtcgagcgtggtgacgtccaaaccggcgtgcctctgcgccgtgctcggcggcggcgcctcctcgctcggcgtcaccatcaacaacacccgcgccctcgagctccccgccgcctgcaacgtcaagacccctccggcgagccagtgcagcactgtcggcgtcccgatgccatctccggcgacgccggcgacaccggcggcaccggcggtgccaagcgagactccggcgggaaccggcgggtcgaaggcgactccgacgacggcgaccaccaccaccgggcagagtgcttccggcgggagcgtcggcaaggcggcgtccatggcgaccgtcgtcggttcagtggcgtttgcactgatccatgtttgattaatttctgcatgggttaatttaagccgctcgatttggttgtgtccacgtgtccctaatcggctttaatcatggtggtgttgcgaattttttacactattttaattgtattgagtgtgtgttgagtgtgccatgaatttcttgatgtatttttcttaattggtcttgattgtgtattcattatgtcatattatttatgagaacatattgaggagagttcaa

SEQ ID NO: 390810 - DNA, 946 bp, Oryza sativa
  unsure (1)..(946): unsure at all n locations
tgcggagcagctcgtgctcgacctctgcgaccccgagctgcgggagaacgccctcctcgacctctccaagaagcgagagatttttcaggatcttgctccactcctgtggcactcttatggaacaattgctgcactactccaggagattgtgtcaatctatccatcactttcacccccaacattatctccaggggcttcaaaccgtgtctgcaatgcacttgcacttcttcagtgtgttgcctcacacagtgacacaaggattcctttcttgaatgctcacatcccactgtatctgtaccctttcttgaatactactagcaagacaaggccttttgagtacttgaggcttaccagcttgggtgtcattggcgcacttgtgaaggttgatgattctgaagtcattgggtttctgctgcaaactgaaataattcctctgtgtctccgtactatggaccggggcagtgaactttcgaaaacgggtgccacctttattgttcaaaagattctgcttgatgatgttgggcttcgctacatatgtgctactgctgaacgtttctttgccgtagccagtgttctatcacagatggttcacgcacttgctgatcaaccttctccaagactgctgaagcacataattcgctgctacctcaggctgtcagaaaattccagggcatgtaccgcgctgaacagctgcctccccaacgcgctgaaagatggaaccctcaacaacttcctccaggatgatcatgtcacaaggcgttggctccagcagctgctgcacaacatgactatcggccggcatgggaggagctcctcatggaggccttgatcacatcatgggggatgtgatcatctgaaacgaagctgcgctggttgcaactcatcatatgcctgaagtcaggactcaggactagtccatctgtagttagcctaccaaaaggnttat

SEQ ID NO: 390811 - DNA, 756 bp, Oryza sativa
cccgcccaacccaaattttttgtcacccagcgccgcggcgcccccggttgctgacttgccgcgggaaggaggatgagcaggcggtggagccggacgatctacgtggggaatctccctggtgacatcagggagagggaggtggaggatctcttctacaagtatggccgaattgttgatattgacttgaagatccctccgaggccaccaggctatgcttttgtagagtttgaagatcctcgtgatgctgaagaagcatgtgctggcagggatggttataactttgatggacatcggctaagggttgaacctgctcacggtgggagagggaatggtggttcctcctttgaccgccccagcaactttggtggtggaggacgccgtggtgtgtccaggcactcagaataccgtgttctggttactggtttgccttcttctgcatcatggcaagatttaaaggaccatatgccgcaaggctggtgatgtttgtttctcagaagtgtatcgcgagggcggcggtactgtagggattgtggactacacaaactatgatgacatgaaatatgctataaagaaacttgatgacagtgaattcaggaatgccttttctaaaggtcacataagggtgaaggaatatgatggcaagcgcgcccgctcctattcacgtagccgaagcccaagtcgtagccgaagcaaaagcaggagtctaaagtaatctcctagaactcgcgcgtcagcatcccgatctcgatctcgatc

SEQ ID NO: 390812 - DNA, 577 bp, Oryza sativa
ttgaaaacccaggtaattacgaactagggcttctccagcccggcgacgcgggggaattttacagataagccctcggattccttccccctattctccgctcctcgcgtcgtcgtcctccgagagggggaggagaaggcgagaaggggctccggtggtgggagagggagaccgccattgccgctacttccgagttcagattggggaagatggttgtccaggagttcaccgttgatctgaacaagcctctcgttttccaggttggccatcttgaggaacgttatcaggaatgggttcatcaacctatcgtgagcaaggaaggtccacgctttttcggaaatgatgtcctggagttcttgacgcgcacaaagtggtttgctgtgccaaccatatggctgcctgtcgtctgctggttgcttgtgaaatctattcggatgggtcatactattcacgaagttggtctaatggccctatttggaatatgcaattggacattgatcgagtatactttgcaccgatttctatttcacaattggaccaaacctattgggcaacacagcacatacctttttcatggttg

SEQ ID NO: 390813 - DNA, 543 bp, Oryza sativa
tcgatcagttgctcctgcaggagtaggatatgcaggtactaaccaaggtacaggaggtccagcggctgtacctccacccgcttctaataataaagcaccagccacccaacctggtgcaaatgaagtctatctggtgtgggatgatgaagcaatgtcaatggaggaaagaagattgtcgctacccaagtatcaggtgcatgatgaaactagccaggtaagttctgatttttataattctatatctgtaatattaatgatatgtgaaaaaaaccaagttgaagttcatggggatgctctgaactggaatattgggtaagtgttcattctagggtatagagtaaagtaaaaattttaggcacttatgaattgcatgatacgcctttgtgttctaaaattgggtttccatccctttagtttgtgcgtcagaaatttcattttgtttctgttccaattggtcctgtattaccttagtattgctttcaattacatttgtagacccttcactgtgctttgattgcttgtgcataaagagtaaatacagca

SEQ ID NO: 390814 - DNA, 763 bp, Oryza sativa
ctgaagatttatgaagatgtgttcacaacttcagagctcatgaaggttgctgatttcatcaatgaaattcgtcaggctggcagaaatggagagctttcaggtgaaaccttcatattcttcaacaagcagattaaagggaacaagagggagatcattcagcttggcgtcccactatttcagcccaccacagaggaatctaattgtcacatagaagcaatcccccttgtcctccaggctgtcattgatcatcttgttctttggcgtttaataccagaaagcaggaaacctaacagtgtcatcatcaacttcttcgatgaggatgagcactcgcagccctacttcaagcctcctcacctggacaacccaatctccactctcctgctgtccgagactacgatggcatttggaaggtcacttgtcactgacagcaatggcaactacaagggaccccttacgctctcactgaagcaagggtcactcctggtgatgcgcgggaacagcgcggacatggctcgccacgtcgtgtgcccatcgtccaaccgccgcgtgagcatcacgttcgtgcgcgtgaggccgtcgacgccggtggacctcagcccgctcccgtcgcccaccaaggccatgacgctgtggcaggcgccgccgccgcagcagcagcagacgatcccggcgcccggcatgcagcagaagcccgaagaaacgcggcgccatcattcggctacgggtccggcgccgcacgccgtgctggcgcctgcgtggggca

SEQ ID NO: 390815 - DNA, 956 bp, Oryza sativa
  unsure (1)..(956): unsure at all n locations
anctgctaatgaaggggcaaagaactcctcagctcgtnattctacaaattcaaccacacccagacgcaagattagttccagtnataacaacttaaagactctnaggacccctccatgtgcattgcctggtattggcttgcatttnantgcccttgccacagtgccaaaggataaantggttccccataatgacattcaatcctctttgantcaagccagcantgttccgtctgctgttggttcttctccaccaacagatgatccacatactataaatgatgactcctcccagacagccgtggttgcatatgttggtgaatcgagtcagggtagtcccaagaagaaaagacacaagttcgacaatggtgatggcacgtcgtgcaagcgttgtagctgtaagaagtcaaaatgcttgaagctgtactgtgagtgttttcatgctggtgtcttttgttcagaaccttgttcgtgtcaaggctgtctgaatatgcctagcaacatggaaacagttctatcgactcgagagcagattgagtctcgtaatccacttgcatttgctcctaaagtaattcgcactgagcctggtcaggaattagctgatgactctaacaaaactcctgcttcttctcgtcacaaaagaggctgcaattgtaagaagtcatcgtgtttgaaaaaatactgcgaatgttatcagggtggtgttggatgctctgtgagttgccgatgngagggttgtaagaatgcttttgggaggagggagggagttgcactgttaggcatagaggaagctaagcgtggatgcgaagaaaaggatggaggcgtgaaggaagaaaccactgataatgataagcagcttgttatctatcaagatagtatcaaccttactcctnctgagagtgtgctggcaacaccttcagttgtggattacagncccctggttgctcttccacctttat

SEQ ID NO: 390816 - DNA, 542 bp, Oryza sativa
ccacgcgtccggagggaatcatccctaactgacagagggtaacagcagttgatgatgcaggcttctcgagaatttcagtatctaatttcttggaacaaatttctctaaaaaagctacatagctcaattatagcctcacaaacatcagcaggcagaactccacgaatagaaaatggaagcatgcaggacgaaataagatcttcccatcaccagttggaggtgcatgaagttcaggtcgtattttcatgagttccaaatcaaaccgggatttaatattgtcctttttcttcccatccagatttaacaaggtcaaaatggtttcccaagttcgtccatccgtgaaccagatggagacttcggatgatgctgctcgacaagtcataaccaatactaggaatgagggacggatgggaccaaccggaaacacacaggtctcaaacgtaggataggtaggggtctcaccattaatggaacacttgcaaaactgagaagcaggggtgtgccactagacattcaatttgctgcacagtttggaaaagtcta

SEQ ID NO: 390817 - DNA, 835 bp, Oryza sativa
gcacaaaccgcgtcttcttctccctctctacgcacatgcatcctcctagagagggagcgcgcgcaaggaggaggaacaagggctcctcggatcgggaccagctgaggatttgaacaagtcagcttgtcgccaccatggttcttgattcattatcatctcctcacaggaggtcacagaacacattttttctatcatccccaaagaagcttcaatcatcgaaggatgatgttggcagttggtctgcactggttgagcggcatcgcttcctcttgacaacactagtggttctggtctttctgtgcaccatctatctgtactttgcaggtaccttgggggcacctgatgcttgctctggattagcgggcactgaaaaggctgtatgtcgggcaaaatctgctcttcgacatggaaaattgaaatttttctagcgctgtcgtgcatactctcgaagaccaagttactgaggcttacaatgcgcccttcaggtcacccacagcttattcttcatacattgaatctgtatattttgtggtggatgtattgctttgtattcatgttgtactttgttgagagacctgctattcaatagttgcaacaaatctgctagtgatagagagaatttatatgttgtgtaaacggtacaaggtaggtcatcatattattttttgtcatggtgtactaaaaacaccatgccattactaatccatccaggagaccctgatactgtctccatcctggcatactgtaattcatttgaaactgcatggtactatcaagtgttagtagtgattaccacgatataataaaaatatcacctgatattatatatactatt

SEQ ID NO: 390818 - DNA, 210 bp, Oryza sativa
ccacgcgtccgtgttggtcctaggtagatttcttgttcttgatctgctttgtttgagttccaatcgtaatcgagtataaatgtgtactttcgtgtaaagaaaaggggattagagagggccatcataatgtaaagatggctgctttgttcctgtgctcttttttgttctcctgcatttggtatatatatctcatcaattttttgttcgtcc

SEQ ID NO: 390819 - DNA, 753 bp, Oryza sativa
  unsure (1)..(753): unsure at all n locations
aagaaagccaagaaccgatcagctttggtgttcgatcgatcaagacgaggcggcggcggggctgatcgagatggcggcgccgccggcgagggtcggtgagcgtggcggacagggcgctgcgaggggtggcggacctgatcaagctgctgccgagcggcacggtgttcctcttccagttcctcagcccgctcgtcaccaacaacggccactgcgccgccgcctacagcagggtcctcagcgccgccctcctcgcgctctgcggcgccttctgcgccttctcctccttcaccgacagctacgtcggctccgacggccgcgtctactacggcgtcgtcaccgccagggggctccgcacgttcgccgccgacccggacgccgacgcgcgggacctgtccgggtacaggctccgcgccggggacttcgtccacgccgcgctctcgctcctcgtcttcgccaccatcgccctcctcgacgccgacaccgtggcgtgcctttacccggcgctcgaggtcagcgagcgcaccatgatggccgtgctcccacccgtcgtcggcggcgtcgcagctacgccttcatggtgttccccaacaaccgccatggcatcggctaccagcccacccgcgccaccgaggacttcgagcacaagcactagatcgtngtcgagagagacttaaattattaattaatttgggtgttttaattaattgatttcgattcatcaaatcttaatttaaacattttatgtgtgtccgt

SEQ ID NO: 390820 - DNA, 431 bp, Oryza sativa
aggagcgcgtaggggaaagcggcggcggcggtggcgacgcagacgcgactgggagtcgacggcgcgacacgacgcggagctctccccggcggcggtgctctctcctccggcgaccgccccctccgctggccaccttctcaccggtgactaggaaacaagcttttctctgttggatatacctcttctcttgttggaatggaggccaaggttttcaggtttctgaagcttgtcggagttggcttcaaagcaaggacagagcgtgaaggccgtgagttgtttctgaaacttgggttacaagccatgaggtgcaagttcactgcttccacctgcttgttcgtgtctttctgcttcaaaacccaacttaattttgcttgtacttggtatccgacaaagaatcggggtgcacaactttgcgggcgctgttcggaact

SEQ ID NO: 390821 - DNA, 695 bp, Oryza sativa
  unsure (1)..(695): unsure at all n locations
tcgcatgggccttccgcgccaaccaacaccatgcagcactctcagccgctcgacccctccccacctgctcaccacgccgccacctcaccgcccacaacctcacccccaccattattacccctggctctcgctgctcttcgccgccgcttgtggtgccatgctcacattcttcctactcttcgtctggtactccctgctggccacgcgccgccctgtcgcaccagtcaccacctccgattccgacgtcgtctatgagaagattgtgcttgtcggagccaaggacgacgacgcccccgcagccactactccgtctccagatgtagctggtaacaacaactagtctctagtcttctttagctgtgcgcctgtgcctctgttaattattcatcacagcacagggagtatttcctcttttaattatgccctctcccagtcccagttcgagtgtgtcatgtgtgagtgctgtctgtaagtagtagtactagttaagcgtggtttggtggaaaatctgcagattttgcgggcaaatctaacaccgcaaactctgcagtttctcctcagattattagaggttcaattcaatcctgtttcatccactatcttgtactcctaactcccaatctgtcatccactacctactgctgctattcttttcnnnnnnnnnnnnnnnnnnnnnnnnnnnnnnnnnnnnnnnn

SEQ ID NO: 390822 - DNA, 769 bp, Oryza sativa
  unsure (1)..(769): unsure at all n locations
ctnnngntctactntttnttcngncctnantacttncnttttcncntctcttccntttagtctctttcncttcnncgtctntnttnntnatnntnntctcnttngtttntncnnanntcnncntcnntttctaactncctctcgncctnttgtccgcnccttantcannacttcncctntngntncnnattggntacccggncccccccctttgnnntccncctacngcntccgncttccctgcttnncncacncgcccnccttttctctcntccnntcacccacctcccggttcccgacgtcgcctatgagaagattgtgcttgtcggacccaaggacgacgacgcccccgcagccactactccgtctccagatgtagctggtaacaacaactagtctcctagtcttctttagctgtgcgcctgtgcctctgttaattattcatcacagcacaggggagtatttcctcttttaattatgccctctcccagtcccagttcgagtgtgtcatgtgtgagtgctgtctgtaagtagtagtactagttaagcgtggtttggtggaaaatctgcagattttgcgggcaaatctaacaccgcaaactctgcagtttctcctcagattattagaggttcaattcaatcctgtttcatccaaaaaaaaaaaaaaaaaaaaaaaaaaaaaaaaaaaaaaaaaaaaaaaaaaaaaccnccagggggggcccggtacccaatnccccctatantgantcntnttacaatncncnggccg

SEQ ID NO: 390823 - DNA, 397 bp, Oryza sativa
ctcatgagcatcgccgaccgtctcctccggaacgatctcatcctaatttgtgttgattacaggatccccaggtggataaggcgaaggcgagcttcgacttgcggcaaccagtcaaggatctgcggaagaaggtgcgcaggggttttctgaaggggaggcttcagtcatcgcagcagccgcagcagcagcaacatcagaagcagcagaaggcggcgcagctggtgctatagcaaacaagattagtgagcgagatcagatgggggcattggggagcctagattaatccttattttctgcttcagatttgtacaggaaaaaaaactatttattcggagcaataataagagagtaattgggggtggcctaattagcaaaatcccatttgccaatcaattcc

SEQ ID NO: 390824 - DNA, 1089 bp, Oryza sativa
ttcctgtcaaacaccaccctatgacaagtgggtcccactcgaaccaaccgtacggccccccacccaaacccgctcccccctcgctccgaaaatatccacctctctagatctttctcgtcgcaaacgcccttccgcccccgcctcgccgcgcccattccaccacctttccgaaccttccactcccttccagactccacccccacgtcacccctatttaaacccctcctcccaccgagcaatcaagcgacaagatcgagaagccacaaaccccagcgcgatccgaggtagaagaagaagaagaagaagaagaagaagaggcgatcgagagatggagagcgccatgttcgggctggagacgccgctgatgacggcgctgcagcacctgctcgacatccccgacggcgagggcggcgccgccgggaagcagggcgcgaccggtggcccgacgcgtgcgtacgtgcgcgacgcccgcgccatggcggcgacccccgccgacgtgaaggatctgcccggggcgtacgcgttcgtggtggacatgcctgggctcaagtcctccgacatcaaggtgcaggtggaggaggagaggctgctggtgatcagcggggagcggcggcgcggcggcggggaggaggagaaggaggagtcgtgcaagtacctgcggatggagcggcggatgggcaagttcatgcgcaagttcgtgctccccgacaacgccgacgtcgacaagatctccgccgtgtgccaggacggcgtgctcaccgtcaccgtcgagaagctcccgccgccggagcccaagaagcccaagaccatcgaggtcaaggtcgcgtgatgagattccgcatctctctgcatctgcgtcgctgcgtggatcaaagaatcgaagcttgagttgagtgagttgtgactagtagtatgagtagagtgttcatctttatcgtttgctacgtgagaatgtgaggacatggtggtctgtatgccgtatgcgatgtgatgatgatggatggtttgatgtttggtaatggaaatggggatgttctgctgcttatctgaataaatatactctgcatcttttgaaaaaaaaaaaaaaaa

SEQ ID NO: 390825 - DNA, 458 bp, Oryza sativa
ccacgcgtccgcccacgcgtccggcatctttgaatttccccagtgaaagtgtgctacaacctttagcatcacaccatttttaatcataacagtcgtgaaatatggtataaatggaagctaataagagtctttcacggagatcatgattgacatgacacatggtttggatgttcaatagagagagagggaactgctaatctggtgcctgactgctggctcagtatcagtactttttagcagatggctcactatcagcactccgtatcatatcctatatgatccccatgtatcaaatatcattatttgtcatcgcattgatgttttcccaagcatataattagtctgttactgtggaaagggacaaggtaaaattctctatatataggtaaatttgcatcttaataaggcgtaatggaacttttaaaactcaagaggaacaggggtacctcacaatttta

SEQ ID NO: 390826 - DNA, 1429 bp, Oryza sativa
  unsure (1)..(1429): unsure at all n locations
gtaaaaagatgaaaaaaaaaaagaaaaaggaaaaagaaaaaaggaaaatcttcaccgaagcaatggcggcggcggcggaggcggaggaggaggtgcggcaggaggtggaggcggtggcgtcggtgtacggcgacgactgccgcgtggtgcgcgctttccctccccacctcgtcgtccacgtccgcccccgcaccgccgacgactcctcgcagcagttcgtggagctatttcttggaattaaagcatcttctcagtatccaaaagcacctcctcatgtttatgccgtggaaagtaagggccttgatgagaatcgacaggtgtatcttattagcagcatccagaacaaggcaagagaactttcctgctacccgatgcttgtgacgctgtgtgaggaagctntggagatgctctcaaatatgaatcatccagctggggattgcccactttgtctatatcctttagtcaaagagaatgatggttctgctttgccatttatgaagttgatgtcgtgctaccactgcttccacagtgactgcattatgagatggtgggaatggctacagaatgatgatactgactcgaagaagagtagtacagcagcaactactgaagttattcatgcttctgaaggattggatttgtccagctcagctaagcatcacaatgtaagtcagcacaaaggactatgtccagtttgccgcaaagtgtttgatgagaaggatattgagcatgttcgtgatctgctaggtgcaaatacttctcaactggcatctttatcgattgatctggacgaagatgaaaaagaagtacttcattctgagtcagagaagatccgtcaagaaaagttcgcatcgctgttcaatctacaacaagaacgaaatggcctgattgaaccaaagaaagacctttccatacagcctggaatgtacatccctcgtcctcccagcgcgcctactgcttccgaaggagacaccgttgatgattcttgtgaagacaccacaacttcaacctcaggaacggagccactcaaccagacaaacagcactggtggtaccaccaagcacaacagcagttcaggtcatcgaaggagacatcgatctcatgcttcaagaagacaaccacatgggcaagggcaacctgctaggcaacaatggcagaggaaaggcggagacacttcacaccaatagcaggaaaggttgtgggaggtttgttttttgtcggttataatcgcaagcctggtaccaattctatgtttcatgcctcactatcagacggctcataacatggcagaattatccaatgctgttgttatgactaagagtatattatagttttaaactcggttcatgtcactgctgcgaaactgaagctactagccactgtatacacatcaatttgactttgcnnnnnnnnnnnnnnnnnnnnnnnn

SEQ ID NO: 390827 - DNA, 451 bp, Oryza sativa
ccacgcgtccgcccacgcgtccgggtcgctgagtttctccagacacatgatctagatctgatctgcagggctcaccaggttgtggaggatggctatgaattctttgctaagcgccagcttgtaaccatattctctgcacccaactattgtggcgagtttgacaatgcgggggcgatgatgagcattgatgattctcttacatgctcattccagatccttaagccttctgataagaaaggaaaagcaggaaccggaaatatgtcaaaacctggaactccaccaaggaagataaaaattaatattatttaggcagattcccactaatgtgaactgagaaattgtgatggagtactcctccaaacttgttattggaagatttttggtgcgcatgacactgttgaaaaatgtcgacctgcgtaccttttgtgtttttcatataagatgccgtccg

SEQ ID NO: 390828 - DNA, 461 bp, Oryza sativa
tcctgctgctactgctgctgatctcgtattgggggtcacttgttcttcttcttttactgaccttgttgaattgaacgcaacaattttcttggtcggaatccaggagggagaggattagagcaaggagcagcgtcctgaggcgtgaaggacccacctttgctgctgttcttggagcttccctgcacgaaatggcccataaaggagttcctaaatttggaagctgggaggatgaagaccgtggtgaacacctctacacacagtatttcgaaaatgcccgcaagggtacaatctccagggaggtctgttaatccaaacaatcatcatggagatactgaagcactctctaaggcctctcccctgcacgctggatctgatccagccatgagaaagcccaaggatgacagacgctcaaaccgagaaggtgatcttcgtcagcacgaaaccactgttcgaaaaccata

SEQ ID NO: 390829 - DNA, 542 bp, Oryza sativa
  unsure (1)..(542): unsure at all n locations
cccnnangcnnnnntcggacgggccccctcgaggtcgacccacgcgtccgataattcgcacagtagcaggacagtcgccgcctccatcaatggcgaaaccgacggtggtggtgctgcccgtgtggggcgccggccacttcatgcccatgatcgaggccggcaagcggctgctccgcggcagggcgggcgcgctgtcggtcaccgtgctcctcatgccagcgccgacgccggatgcggcggtcgacatcgcggcccaggtgaagcgcgaggaggcctccggcgccgacgacatcagcttccggcacctccccgccgtcgacatgccgaccggccacaccggcgtcgaggagtggatctcccgcatacttgcggagccacgcgcccaacgtgtgggccgccatcgccgggctcgacttgccccgtggccgcgctcgtcaccgacatcttctgcaacgccggcgctcgaggtgtcccgggagcttcgcgtgccgggctacgtgtacttcccctgcagcgcgttgatgctggcgctgctgctgcgc

SEQ ID NO: 390830 - DNA, 830 bp, Oryza sativa
tcgacccacgcgtccgcaacaaggcaaaatgtgttccataaggagctttgcttttgtgctggtattagcattttcagttgcagtcgcggagagcagagattcatttaatgtattggctcataaaagctttccccttgaaaacaagaagacagggttaacttcagccaatggaaagctgtgtcaactatgcgagcagtactcaacggaagcactgttctacctccaacaaaatgaaacccaaactgagattcttagcatcctccaccatgcatgcgcaaacgttggacctctaaaacagcagtgcatcactctggttgactactacattccccttttcttcttggaggtttcgatggtaacacctgaaaagttctgtgaatcagtgcatctctgcagaaagggaacgatgcttcgcctaccatctcgaggagatacatgcggcatatgccatcatgttcttgttgaagttcttatcatgctaaaggatcctgacatgcagcttggagatagtcgagatatttctcaaagcatgcagcaaggcagataattatgtacagcagcgcaagaagatggtccttgaatatacccctttgattctggtgaaatctcagaagtttcttgagacgacagacgtctgctctacaattcatgcatgcaaaacggggacacaagcatctgcagaaaccatgcttctgtctgccgcatcgtgaaaacaatgcaaatcaagaaattgctacttatttcccaagagattgaaccggtaatgaaattgaagatcagatgcctgtgggaattctttactctattgctgaaacagtattgagtgaggc

SEQ ID NO: 390831 - DNA, 464 bp, Oryza sativa
  unsure (1)..(464): unsure at all n locations
gaaaattacatgctcagacaaaaacaaaccagaaacgatttattcacatacatagctcgaaatgttcaaattttgaatgaagcaagtagttgtttctcgatatttttcccccttgactgtccagaagttgcttacatataaaagcacaagaacacattctgattcatacaaagcagccgcacagcgtgcagcagaagcatcgttcgaatccaaccgatggcgaacgaccggtggtgttgctgcccgtgtggggcgccggccacttcatgcccatgatcgaggccggcaagcgggctgctccgcggcaaggcgggcgcgctgtcggtcaccgtgctcctcatgccggcgccgatgccggatgcgcgggtccgacatcgcggcccaggtnagcgcgagaggcctccgcgccgacgncataagttccgnaacttcccgccgtcncatgccgccntcaaacgcatcga

SEQ ID NO: 390832 - DNA, 982 bp, Oryza sativa
  unsure (1)..(982): unsure at all n locations
gaactgtgtgaccagtcgaggaccaggaacggtcatggagtattctgttgttttggtcgaacaattatatggcaaagaaaaagctgatgaagttgctggtccaatggtcatgcgcccccagcatggtgtggagttctcattgaaagagttgaattcaactagttggaatgttggtgaaacacctcagattcttgtaccaattgctaatgggacagaggagatggaagcaactatgataatcgacatcctcagaagggcgaaagcaaatgttgtcgttgcgtccttggaggaaactttggagattgttgcatccaggaaagtgaagatggttgctgatgttctgttggatgatgctcttaagcagcaatatgatctcattttgttaccaggtggtcttggtggtgcccaagcatatgcaaagtcagataaactgattggtctgatcacgacgcaagctgaggcaaacaagctatatggagctatatgtgcctcgccagcaatcgcccttgaaccacatggcctgctgaagggaaagaaggctacatcctttcctggtatgtggaacaagctctcggaccaaagcgaatgcaagaacagggttgtcgttgatggcaacctaatcaccagccaaggtccaggcacatccatggagttctctctcgccatcgtggagaagctgtttggtcgggagagggccgtcgagctcgccaaaaccatggtcttcatgtgagttgtgttgttacatactacgtgtaagacaacaccatagtcagactctgaatatgaggcatccttttgctcgtagctggtgtggtggaaagcacttcgtaatccttttttttggctttctcttccacaataacacgacgtcttgttatgtgtacaaccgtacaaatgcaataaaaagagatggatattgcaccnnnnnnnnnnnnnnnnnnnnnnnnnnnnnnnnnnnnnnnnnnnnnnnnnnnnnnnnnnn

SEQ ID NO: 390833 - DNA, 789 bp, Oryza sativa
  unsure (1)..(789): unsure at all n locations
ccacgcgtccggattatatgtcccgccgttcttatcttgaccaagtacctactgataggtactctagtaggggtacactacaattaggcctctcgagagctgggaatagtaatgtgcaacaattaggaatcaccagagctggaaattccaatgcttatgattataccgaggccgctgagcagatccatggacgtgaggattaccgaagactgtcaggtctcactgggtatccaggtggctccgtcgaatttcggattccaaatagttatctggaatctgtcattggagctggtggtgtcaatctagctgagatccgtcagatctctggcgcgagagtgaagttgcacgaagcccatcccggttcttccgagtccattgtggagatccagggcattccggatcaagtgaaagccgcacagagccttctgcaaggcttcatcggcgcaagcagcaacagcaggcaggcgccccagtcctctcgcatggcccattatttttagtaagctggaggacattcgcaacaggggggtcactgcacagctgagtttgttcttcagttcaactgcagaaaattgcggatcggttgccatagttgctagaacggtacatagatgccacctaactgtagtgagcggcataactttcatattgtgtttatcgactatctagttgattttagcggcaaaagctgtactgcccaatgttgnctctccttttgttcatggattcagacttgtgacttgattacttgtagtccttcatggatcagactggagtaaaaaaggaaga

SEQ ID NO: 390834 - DNA, 706 bp, Oryza sativa
ccacgcgtccgcgttgaaaagctccgctctgagaatgatgccattattttggcctgtggagctacaaagccaaaagatctccctattcctggacgggagttggcaggcatccatttcgctatggaatttcttcatgccaataccaaaagtttacttgacagcaacttggaggatggtaactacatatcagcccaagggagaaaggtggttgtcattggtggtggagacacaggcacagattgcattgggacatccattaggcatggttgcaccaaccttgtaaatcttgaacttttgccagagccaccaagaaagagggcacctgacaacccctggccccagtggcccaggatcttccgtgttgattatgggcaccaggaagcaactagcaagtttggaaaagatcccagaagttacaaagtcctgacgaagcgatttatcggagatgagaatggaaatgtgaagggcccttgaggtaatacgtgttgaatggggaaaggtgaacggaaggttccaattcaaggaaagttgaaaggatcagaaagaaattattgaggccgatcttgtcctcttagctatgggattcctgggtcccgaagcgactgttgctaacaagctgggtctagaacaagacatgaggtcaaacttcaaagctcaatttgaaaacttgcgaccaatgtggaaggtgtatttgctgctggagact

SEQ ID NO: 390835 - DNA, 948 bp, Oryza sativa
  unsure (1)..(948): unsure at all n locations
cccactcctcctcgcccgcatccggaaccctagctaagcttcgatggcgatggcggcggcctggtccccggcgctcgcggcggttttgctggcggcggccgtggcgtcggcgtccaactcggagggggacgcgctgtacgcgctgcggcgcgcgctggcggacccccggggcgtgctccagagctgggacccgaccctcgtcaacccctgcacctggttccacgtcacctgcgaccgcgccggccgcgtcacccgcctagacttgggtaactcaaatttgtcaggccatcttgctcctgaactgggacaccttgagcatctccaatatctagagctgtacaaaaacaatattcagggcactatcccagctgagctcgggagtctgaagaaccttattagcttggatctgtataacaacaacattactggaaccataccgaaagaacttggcaagctgagttccttagtattcttgcggcttaatgacaacagtttaaacggtccaatcccgagggatctggcaaaaatatctagtctcaaagtgatagatgtctcgaacaatgatctttgcggcacgattcctactagcgggccttttgagcatatacccctgaacaactttgacaaaaatccaaggttggaggggcccgagttgcaagggcttgcaacatatgacacaaactgctgaacgtgccaatcagtccctgtcgctcgtgtgatatagatcaatagcaaattagctttatcggagtacctggtaaatgtgcaagcttggttgctttgcttgtacgagatactgcaagtaaagactaggctgcagctcaacccttgtagtgtagataatatttatcgcaagcctgaggccctcttgactgataatacctggtaatgtatggttgctttgatgaactaagtcttgatatttattaccagncntgatttnagtgc

SEQ ID NO: 390836 - DNA, 685 bp, Oryza sativa
  unsure (1)..(685): unsure at all n locations
cggggcgaataaccggggggcccaccccgcgtgcgaacttttgactgcgactatatggcggcgggcctgggtaggatccagcatactggctgcttctgggcatcattctggcctttggagaccagctgaacttgagtcatgggatgacgatctgaaagttggccaggttgttctccaagatgaccgcagctctgcaaggcttcccagtgattctctttcaatctcagaatatgctgatgagagcgatgaagatggtgaaggaagctcaagtgatgaaggatctgattttaccgcccacgcggcccaagaggatgaatctgttcatcagggtctaggccttttggaatccaaaaatttaagtggtgttcagacagagactgcgatctttgcaaagtgggagcaccataccaggggcgttgcctccaaaatgatggcaaaaatggggtaccgagagggaatgggtctaggtgtttctggacaaggcatgcttgatccaatcccagttaaggtactacccccaaagcaatctcttgatcacgctgtggctgcaagtgaggttaatgatagtgtaggccctggaaaaaaacgcagtcggngtgggaaaagaaagcgtgagaagaagtttgctgaacaggcaagggctgctaaagctgaagaagaagagaggtctgtcttcagctttatc

SEQ ID NO: 390837 - DNA, 497 bp, Oryza sativa
ccacgcgtccggacggcacccctgtgaaggtgtttgtggagaactacttcggcttcaagcacagctggttgggctgggtggccaccgaggtcgctgccttcgctttcctcttcgcttccttggttggcttcgctatcatgaagttcaactttccagaagagatgatgatgacaagggatattacatttcattgagttgcaaacgctacctgaaatttgtgcatatcattggatctaaagaatttttttttgttgccattagaatattgtaaatcataccagcctttcccccttatttttatagaaagattgtactactgttacacctagtaattttgttattagtacccttctttttatagaaagatggtactacttttatttttaatttttatatggggttgtctagtgttcagttgactgaactcacattttgctcgatgtaaatgaagaacagttatggtgttcgtcaaaaaaaaaaaaaaaaaaaaaatgcag

SEQ ID NO: 390838 - DNA, 840 bp, Oryza sativa
  unsure (1)..(840): unsure at all n locations
tgttaaactggtcagctttggaacagtccattgtacgactggaaagctatggaagcaggtggatttgaatggtggataaaaaggattaatcgtgcccttgatttgtatgatgagttccgtatagaccatttccgggggcttgcaggtttttgggcagttccttctgagtcaaaagtagcgctggttggaagctggagggctggaccgaggaatgcattttttgatgcattattcaaagctgtcggtagaataaacataatagcagaagacctgggggtgataacagaagatgttgttgacctaaggaagtctattgaggctcctggaatggcagttcttcagtttgcttttggcggtggttctgacaatccacacttgccccataaccatgaatttgatcaagtagtatacaccggaacacacgacaatgacacgggtattggttggtggcaaactttaccagaggatgagaagcagacctgtggtcaaggatctgcctgcggctaataggactgaaatctcatgggcactggtcactgctgccctctctccagttgcaaggacatccatggtaaccatgcaggacattcttggcctcgacagttctgctagaatgaatactccngctacacagaaagggnactggngatggnggatgccgagctctgtcagcttcgacagcctcagccctgaagcggcgaagctgaaggaattgcttggactgtacaaccggctctaaatatatttcagcgctcgttttctgtcgcttgaacttacagaaatctgtcataaaaataattgagcnatgcaaacattttggctgcaaaaaaaaaaaaaaaa

SEQ ID NO: 390839 - DNA, 387 bp, Oryza sativa
  unsure (1)..(387): unsure at all n locations
ccacgcgtccggaacgttggtaattaagtgcagcgagacgtcggattaccggcgctggatccccctcgccgactcgaggttcgcagaagccgttgaattcatggatgctcctccccggatggaaatccgtagcaagatagacagcatggtgctgaccccaaactcgacttacgctgcgttcatggtgttcaagatagccgatgggttgtacgagctggacacttcaccacacgatgcgacggtcagcatcggagagaatgaatcgagacgcgaggttgccttcacaggaaggtaccctgagagaagagctgacggctggatggaggtggagctgngtgagttcttcaacgaggatggtgaggttggagcgctgtacatgagatggtg

SEQ ID NO: 390840 - DNA, 477 bp, Oryza sativa
  unsure (1)..(477): unsure at all n locations
caaacagatggatttcggtgcttngagaaagcggcagtggaaactggcaatgacgctgggccatggtctctgtgcagcgtgacccaggtggaggagaccaagatcgtgctgcgcatggcgcccatcttcgtggccgctgttctcagctacatcccggtgccgctgctcctcagcctcaccgtgcagcagggcaacaccatggacaccaggctcggcgcagtccacatctcgccggcgacgctgttcctcatcccgaccgtcttccagatggtcaatcctcatcatctacgaccgcgccaatcgtgccgccgctgcgcaggctcacgggctacgtcggtggagtcacccacctccagcggatcggcatcgggttcgtcgctactatcgttgccaccgcaatcgccgcggtggtggagacgaggaagaagatgaccgccgaggagagcgggctagaggacgccaccactgggatcccgc

SEQ ID NO: 390841 - DNA, 569 bp, Oryza sativa
  unsure (1)..(569): unsure at all n locations
ccacgcgtccggctacatttagttgttagcatgtctttatattccaaaatgcttttaagatttcttttgataaatcacttgttgatgatttatattcttatcagccatcgtccatgatctccaaactaaatgaggagaatagggttgctattcagcaaaaccagaagttacgacatgagctggagctcctacggaaagaaagcagcaaaagcagtggcggtttctccctcaccttcttggccatcgttggtcttctcggcatcatcgtgggctacatcctcaagaagacatagaagaggtagaggttcccaacaaaagttatactcccaggaaaggatacccctcatattggtatgccgcgcatcgtgtttttttccctcctaaaaggagcacctgtcctaacttgtaacaacaatactcctcctagatgccatggtttgtgtacattatggtggtttnttagttcgctgcggtttttttttttttttacattgactaggcttgatttttaagagttttaactggtgcaactgtttgacattctcnatnnnnnnnnnnnnnnnnnnnnn

SEQ ID NO: 390842 - DNA, 707 bp, Oryza sativa
  unsure (1)..(707): unsure at all n locations
ctgcagatcgagtcgcatcgcgggcgagagagagagagagagagagagagagagagagagagagagaagacccggacgcggcggcgcacggcggcagccggagaagagcggggcgtggcggcaggcagcagctcgcgggcgtctcctccagtcttgctaacctcgccgcatggggatcggccacgtgctcggcgtcctcggcggcgccctcctcgcccacgccgcctacgccaccatccagtatcgcgccgtgctgaagatcacggaggaggagttctcgagtccgcctatggatgtgatgatgcaattgctcctggggttggccttatgcatgtgggcaggtcttgctgttccagcgaagttcctttcagtgctccctcactctgaggagaataggattgtttcactcccggctaacctggacttcatgatcttcaaccaccgcggaagggcgctaccttcagacccagacttgaagctgaagacatgattgaacatttacagtttctgttatttaccacagtaggatgatccatccagttattttttttgtgtcactcattgttgagggggagaaacatttccaagaacttaacgtctactatgtgtaactcaagtttttgtgtcacctgaattctatatctgtataccactcaatcttgtgccagtccatgtgaattaccngttattcaaaaaaaaaaaaaaaa

SEQ ID NO: 390843 - DNA, 465 bp, Oryza sativa
ccacgcgtccgggtggaacaggggatgttgccttccgtgcgctcgagagaatcaatagcgtgagccatagagctatgcagggtactcttactgatattgaagaagaaacacaaatctatgtttgtgacattaatccaaatatgctgaatgttggaaagaaacgtgcttcagaaagaggatacaaagaaggccattgccttagctggatacaaggagatgctgaagctctgagttttgaggatggatctatggatggctatactattgcgtttgggatcagaaatgtgacacacattgaaaaagctctatcagaagcttatagagtcctaaagcgagggggaaggttcctatgcttggaattgagtcatggtgatgttccgctttttaaagagatttatgatgtttattcattttctgggattccggctgtgggagaactagtgggccgggatcgccagtcatacc

SEQ ID NO: 390844 - DNA, 871 bp, Oryza sativa
caggagagagaaagagagagagacccataccaatgccaagaacaagaaatcagagagcccaagcaaaaaatccaatccgaatcccctccaaaaacccaccaaacaatctcctccatctccaagaacaagaacaagagagcatcctagaacattaggggataaaggaggaggagaagaagaccaagaaaaggtactacctttcatctctccctcccccccaaatacacactggtcgcaaaacgagaggccgcctcagccttctccaatcccctcttacggagagcaaagcaagcaagatttttcttcgatctctgctcgagtttcttgctgtgaagtctgttcttttttcttaactgttactgctcgtgcgtttttgagaagtttcgagaggagagggaggagagttcaagaactttggggagaaggggatggttccggtgttgctggacgacatcatccggaggcttatcgaggtgaagaatctgaagccggggaagaacgcgcagctttcggagtcggagattaaagcagctctgcgcaacctccaaggaggatctttcctgaatcaagcccaacctgcttcgagctcgaggcccccatcaaaatctgcggtgatgttcatggacagtattctgatctcctgaggctgtttgattatggtgggtatccacctcagtccaactatctcttcttgggcgattatgtggaccggggaaagcaaagccttgagacgatatgccttcttttggcttataagatcaagtaccctgaaaacttcttcctactcagaggcaaccatgaatgtgcatcggtcaaccgcatctatggattttatgacgagtgcaagcgcagattcagtgtaaaacttctg

SEQ ID NO: 390845 - DNA, 398 bp, Oryza sativa
tcgctgacgcgtggggaaagagagagagacccataccaatgccaagaacaagaaatcagagagcccaagcaaaaaatccaatccgaatcccctccaaaaacccaccaaacaatctcctccatctccaagaacaagaacaagagagcatcctagaacattaggggataaaggaggaggagaagaagaccaagaaaagtttcgagaggagagggaggagagttcaagaacttggagagaaggggatggatccggtgttgctggacgacatcatccggaggcttatcgaggtgaagaatctgaagccggggaaggaacgcgcacttttcggagtcggagattaagcagctctgcgcaacctccaaggagatcttcctgaatcagcccaacctgctcgagct

SEQ ID NO: 390846 - DNA, 448 bp, Oryza sativa
ccacgcgtccgacaaaccacacgcaacgcaagcacgcggcggcggcgtctcctctccacgaaaaccctagcccgcgccgcatccccaacctcctcctcctcctccccgccgccgccgcccgatcgccgcgtcctccgctccgcaccctcccccgcagatcggcggcggcctgtgcccgcgggggtcgcgcggggcccgcgtgtttcccagattcagatttccccggcggtgagcggattcgggaggttttttaggggggttgattatggtgggaggagggaggaggggcgccgcggcggaggaggtgaagctcagcaccggcaacgtgttcgccgcgctcgagacgctcaagaagaagaagaagggcggggacaaggccaaggacgactacttcgccaccaccgctccccctcgccccgtctggggcaccggccattgcgacgatggg

SEQ ID NO: 390847 - DNA, 1011 bp, Oryza sativa
ccacgcgtccgcttttcttctcctcctcctccgcaaccagatcaaaccctagatcagatctcatccccccaccttcgtcatcccatacgaggaggttattatggattcttcgtcttcatcgtcgtccacccaggcgcagagccagccggattttgattacctctttaagctgctcctcatcggcgactcgggcgtcggcaagagcagtctcctcctccgcttcacctccgactctttcgaggatctctcgcccaccataggtgtcgacttcaaggtcaagatggttaacaccggtggcaaaaaactcaagcttgccatctgggacacagctggacaggagcgatttagaaccttgaccagctcatactacagaggtgcacagggtattattatggtgtacgatgtcactcgacgggaaacattcaccaatctttctgacatatgggctaaggaaattgacctctattctacaaaccaggattgtattaagatgcttgtcggaaacaaagttgacaaggaaagtgagagagctgtgacaaaaaaagagggcattgaatttgccagggaatacgggtgtttatttctagaatgcagtgctaaaaccaaagtgaatgttgaacaatgctttgaggaactcgtcctgaagatattggacacaccaagcctcttggctgatgcttcctcaggtgcgaagaagaacatcttcaagcagaagccgccagaagccgatgctgccgctagcagctgctgttaacatgctggtgatgctaatctgggctctttgttgatgaaatattggttgctgaaagtgataagcttggtttgtgtcgatttgtttttgctttctgtatatttccatgttgaaccgcccaccccaatgatgcatacaaaaaaaacatataatctccattacgtcagcagctatataatgtattaagttcaatttactgaatatctacgaaaggatgtttcctcttttattgttagtgttgttcaaaaaaaaaaaaaaaa

SEQ ID NO: 390848 - DNA, 574 bp, Oryza sativa
  unsure (1)..(574): unsure at all n locations
ccggccggcggccgccgcgccgttgccctcgtcgcccgacttncccggccatcaaggcccgtcggggctcaaacaaccactggggtcgacgtctgcgtcatggcgctcctcctcgtcggctaccgcgtcatcgcctacctcgccttggaccgcctcaagccaaggtgaagctcgccgtcgccatcgccatcgccggcggcgtcagctatccaagtatccatctagctagagctgctgatccatccaagacaagaccaaggagggtcatttaatgattacccctggaaaattaaggttcatttcttcttaattttcgtggatgcaggctgctgcttctacccagagagtttatagcttaatcgagtgattaattaatgaagagagttaattaattaagtataagagagcagagatgagatgatgacatgttccatcatgtaataataactagtgctagtaaagggagttggaaccctcaaccctgtacaatacaagaacactatacaaaccctgcagcagctgcagcttggctctgaccagcaatttttttcatgccactgctgattcagttaac

SEQ ID NO: 390849 - DNA, 866 bp, Oryza sativa
  unsure (1)..(866): unsure at all n locations
ttcttgatcctgatgaaattgaagaagagcagctttagagggaccgtaagaatattataaacatggatttccagaactttgtgaacaaggttaatgatcactggtcgcagccacaattcaaggggctggatcttgagtttgatgtccctcttagagagcttggattccatggtgttccatataaagcttcagctttcatcattccaacttcgacttgtttggttgaactaatagagacacccttcctggtggtgaccctgagtgagatagagattgttaatttggagagggtgggctttgggacaaagaactttgacatggctatcgtgttcaaggatttcaagaaggatgttcttcgcattgattccataccatcaacatcacttgatgcaataaaggagtggcttgacacgactgacctcaagtactatgagagcaggctgaaccttaactggcgtcctattctgaaaactatcatcgatgatcctcagaaattcattgatgacggtggctgggaattcttgaatatggaagcaagtgattcagacacagaggaaacagaggaatctgatcagggctacgagccttctgatgctgagcctgagtctgaatcagaagatgaagattctgacagcgagtccttggtggaatcagatgaggatgatgaggacgattctgaagaagactctgaggaagagaagggtaagacctgngaggagctggaacgggaggcaagcaatgcagacagggagaatggtgcggagtcggacagcgaagaagagaggaggcggcgcaaggtgaagaccttcagcaagtcccgtccaccaccggagcgcagcagcttcaagggaggaccctcaaagaag

SEQ ID NO: 390850 - DNA, 935 bp, Oryza sativa
  unsure (1)..(935): unsure at all n locations
cggacgcgtgggggccggcacccggcaggcagagcctacacaccaggccgccctcctcctcctcctccccggccgccggtacctgaggggaagaagcttcgcagctcgggctctcacgccctgaggcgtccggagttcgatgtccgtttgcatctcatggatccgcatcacctgaaccgccccaccgccgatgacgctgccgccgccgacgacgactgggataatgatggctttgtgataccaagcttgagtgttgaagaatctgatcttggtgattgggaagctgcacaggtttctcgtcctcaaccacctccaaaggctaccaaggataccgagaagatatatcttggaccgcacggcgcaccgccatctcgagcaaagaagcaagaggacactgcagcagctgccactgggtaccgcgacaagagcaaggtgaaggaagctgatcaaaaggtgcttggaactggccgggacaacaaagggggcaataacttcaaccgctacaacaatgctggccaccatgtcaaggaaccctacaagagatccacttgaccttctcctctccactgaggcttgctccctgtgaaacttttctctctcctatatcaacacagcttgacgaagccaaatttacgcgatttgtcggtgtgatggatatcattgctggaattaggacaacctatcttgcagcggcatgtatacctgaactgtggccatgtacgtaccgtctgtttgctactctgggctggagcaatgcgtttgctgattttctttcgaatggaaaaatatgtgttgttccggatgtcgccgccactacaggtatctggagcattacaaagcagatccatgtctattccgtttgtcattgccatgattaatgtgcctaatacatcatcgtcgtcatctctagcattgtcncanaaaaaaaaatatat

SEQ ID NO: 390851 - DNA, 632 bp, Oryza sativa
ggtcgacccacgcgtccggttctgcagtctgctggtctgaacttaaaacagatatacacaaggtcactgattgctgcgttctgtttccatgcataccaacaggtgtcgtacatgatcctggcaagagtgtcccctgttactcactcggtgggtaactgtgtcaagcgagtggtggtcattgtgacatccgttctgttcttccgcacccctgtttcgcctatcaactctctgggaaccggagtcgctcttgccggagttttcctgtactcacaattgaagcggcttaaacccaagcccaagactgcctgattgtgtcttggtatctatcgtgaagaaccgtagaagcattgccacacgccatcggaatgagtgccttagcttagaatgatccttggagaagctccatccagtgaactgatgctgctgtgtgtatcgtttgtagttgagttactagcgtgctaatcgtggcaaggtttttgtgtcttctttaccaccttatgcttgaacagtcaattattttgttgtatcaataaatttcgtgcaatataacgttatattatctctgtttctttatggaagtattactatccttgtattataaattaaaaagtaaatttcataaaactatagat

SEQ ID NO: 390852 - DNA, 828 bp, Oryza sativa
gcaaaccatatcagaagaggggaagctgatgttatgctctgtggtggttctgatgcaccactcatcccaattggattaggaggttttgtggcttgcagagcactttcacagagaaacagtgacccaactaaagcttcccggccatgcgatgtggaccgtgacggttttgttatgggggcggacgcgtgggttcttgtgttggaagaacttgaacacgccaagcaaagaggtgcaaaaatatatgctgaatttctaggtggaagcttcacgtgtgatgcataccacatgactgagccacatcctgaaggaagagggattattctttgtatagaaaaggcactggctgattcaggagtagcaagggaagaaatcaactatgtcaatgctcacgcaacgtctacacagtcaggtgatttgaaggagtatgaagctattgtccgctgctttggccagaaccctcagctaagggtgaactcaacaaaatcaatgactggacatctaataggtgcagctggtggaatagaagctgttgctgctattcaagctataagaactggctgggtccatccgaatctgaatttggagaacccagagaaaatagtggatgtgggcgtgctggtcgggtcgcagaaggagagatgcaaagtgaatgtggcactgtcaaactcatttggatttggtgggcacaactcataaattctgtttgcacccttcaagtgaacttcgcctacgattatcgcttgctccctcaaattttcaaccgcgccatgggacccggaaccgcgtttagaaaactagcaagcaagtgaattcatggcttacacatgc

SEQ ID NO: 390853 - DNA, 443 bp, Oryza sativa
  unsure (1)..(443): unsure at all n locations
gggcactgttcatcttcaacctcttgcagccgaactgagaccgagtgggctcggtttttcccctccaaatccggccttttctcttctgttttcctaaaattagttgaggggaaatcatctccaccttatcctctccctttcccctaaagtctcggagattaattttgcctggataaaccaaatcgaattcgttttcgagtttatctctccaaactaaccgtcggattttccggctcaaatcctcttgtttggagtccgatctctctagtccaagcctatataaagcatccccttgacgtcctcttccgtttgccccaagtcccaagccgagccgtcgcccgtagagccgccgccgccttgctctagccgccgtcgtcgccggcgatcctccggtcgngtcggccgcctctagcatcgtcggcaatgccgtccgtggctccgta

SEQ ID NO: 390854 - DNA, 586 bp, Oryza sativa
  unsure (1)..(586): unsure at all n locations
cacccttgcccacaaaagagcccatggcgtacgcgngtctcaagctacggtgtctaccagaaccatcaagtccctgtcatcttcaacgccttcctcttctccgacaagatggccgccctcgaggtggagctcgggacggtgaacggcgagaagatcgcgtcccggaacgactggccgcacgccaccctgtggaccgccccaggcgttgcgccgaaggaggcaaacacgctgccgcagctagtcacggaagggaaggcgaagcgggtggccatagaccctcccatcaccatatcaggagtgctggacttctactgaccgaccaccctcttttttctttattttctggtggcctagaggttgaacattactaacaagtggtaacggcgatagctttgtagatgcatcgagttggagggctcttgttttttcggggattacaggacaggtcgaggtattgttttttatgtttgaatttggtgaaaaatgaaatataggagtatatgctgcagtataaataaaattatttaactgctgtctacgggcnnnnnnnnnnnnnnnnnnnnnnnnnnnnnnnnnnnnnnnnnnn

SEQ ID NO: 390855 - DNA, 380 bp, Oryza sativa
cacgcgtccgcagttcagcttttcgtcacccctgtagtgaccagaaataccttttagccaaagttagcttctcccgtagaatgctattgctgccccttatattctttcctgcttaatcaaacttcccaacaaacatatttgcatttcattgacttcacctgtgctatgacgctcttttatcggcacgaggagcctagagtatctaatactgttcggcattttgcacttctgagaagttttcccttctttttgcaccaagtgatgtcaagaacaacgtttgtacaactggaatacaaatgctgcaattggtggaggcaataaaatttttgggaaactgtttagaccaatatataaaaatttataaatatttacattaattt

SEQ ID NO: 390856 - DNA, 430 bp, Oryza sativa
ggatcttgtaaagggtaaagatacattgatgccattggttgattttcaagagaagaaatgtacaggatggaggcagctgaagattttgccatctggagtggtgaaatatctcagaaatacatgctatgaacatttggcaaccttagaatcagatatctttgctagtttgatacaacatatccttgtaggtgattgttgatggtgcatgcagtttgttgaaacctttgttttttttcggtttgtaagacttctggtgcattatcagaagaaccagttgctatatgggttgtaacctttgtgctatatgggttgttgttattgtggttaaaaaaaaaaaataataaagaacattaataaacgcatattaataactatttaagaagaagatctgtaatatatcttaaaaaaatgtagggcgcatcctttgtat

SEQ ID NO: 390857 - DNA, 420 bp, Oryza sativa
ccacgcgtccggcctcacgcggcggagagagagagagagggtgaatttgctagcgagatgccggaagccgaggccgcggcggtggtcaccggaggcggcagccgcgaccgccggccccgccgactacgagcgcttcatcaccctcttctccccggaggcccgcctctgccaactcgactacgcgttcaacgccgtgaagctggccgggatcacctccgtcggcgtgcgcggcgacgactccgtctacgtcctcacccatcggaaggaggacaagttgcacgacccgacgaccatcacgaacctgttcgcgatcaccgaccggattgggctgctcggcaccgggatgccaggtgatggaagggcaatagctcaggaggcaaggaacgcagctgccgagtttcgcttcaagggggatataaa

SEQ ID NO: 390858 - DNA, 480 bp, Oryza sativa
gcctgttcggttcttcctcctcatcttggagaggaaccccaagaggcgagcctcccggcgccgcccacggcgccccgcatcccacgagagggccttggaagaagaggaagcagcggcaacccccgcagccgaccgaccccccctgtagagcgcattcactggtttagattggaattggatggcatccggaggaggcatcgcccgcgcccgcctcgccgaggagcgcaaggcgtggcgcaagaaccacccccatggcttcgtggccaagccggagaccctgccggatgggtccgtcaacctcatggtctggcgatgcatcatccccggcaaagaagggactgattgggagggtggatatttcccacttactatgcaattcactgaagactatccaaccaacgctccttcttgcaagttcccatcgggtttcttccacatcaatgtctatgactctgggggcagtatgcctatcaatcctga

SEQ ID NO: 390859 - DNA, 633 bp, Oryza sativa
tcgtttaaactaaatgttgagccagataagagaccagaggtgatgggtttggttgacatcttcagagcaaaggtggttgacctttctgaccacacactaactattgaggtaactggagatccccgaaaaattgttgctgtacagaggaacctaagcaaatttggaatcaaagaaattgccagaactggcaagatagctttgcggcgtgagaaaatgggagaaagtgctcctttttggcggttctctgcagcttcctatcctgatcttgaagtggcaatgccatcaaaatctcatgtcaacactgcgatgaaaacagctaaccagaattctgaagaatcttcacaaggtgatgtctatccagtggagtcatatgaaaacttcacaacaaatcaaattcttgatgctcattggggtgtcatggctgacggtgatccaacagggctttgttcacattctttgtccattttggtgaatgatttccctggagttctcaatgttgtaacaggtgttttctcccgaagaggctacaatattcagaagtctggctgttggcccagctgaaaaagaaggcacttctcggatcactactggtgtccctggaactgatgagtctattgccaagctagtacacca

SEQ ID NO: 390860 - DNA, 542 bp, Oryza sativa
ccacgcgtccgactggtgcgaaatagctaataattaagagacgatacaggcgctaacacacatggagatgaaaaatccattggcagtagggctgttggctctgctggtggcagccatggcggtgacggcggcggcgcacgacgacgacgacgtgccattcaccgacgaggacctggagtcggagcagagcatgtggaatctgtacgataggtggcgcgccgtgtacgcctcgtcgtcgtcgcacctcggcggcgacatcgagagcaggttcgaggcgttcaaggcgaacgccaggtatgtcagcgagttcaacaagaaggaaggtatgacctacgagctcgggctcaacaagttcgccgacatgacgctcgaggagttcgtcgcaaagtacgccggcgccaaggttgacgccgccgccgccttggcttccgttccggaggccgaggaggaggtggtcggcgatgtccctgccgcttgagactggagacagcacggagttgtcactcctgtcaaggatcaaggctcgtgcgggagcttgctgg

SEQ ID NO: 390861 - DNA, 534 bp, Oryza sativa
cggacgcgtgggcggacgcgtggggatctggcaaaggacaggctggctctgcagaggttacgtgaagctgctgagaaggctaaaattgaactctcatcgactgcccagaccgagattaaccttccattcatcacagctgatgcttctggagctaaacatttgaacattacacttacaagatcaaagtttgaatctttggtgaatagcctcatcgagaggaccagagagccatgcatgaattgcttgaaggatgctggtataactaccaaggaggttgatgaggtccttcttgttggtggaatgacaagagttccaaaagtgcaggaaattgtttcagagatttttggcaagtccccaagcaaaggggtcaacccagatgaagctgtagccatgggtgcagccatacagggtggtattctccgtggagatgtaaaggagctgcttcttcttgatgtgacccccctttcacttggtatcgagactcttggtggtatcttcaccagactgattaaccggaacactacaatccccacg

SEQ ID NO: 390862 - DNA, 562 bp, Oryza sativa
cggtcgaccacgcgtccggccggagcctgtggaggcgcaaatcgcagccgcggccgccgggaaggaccccaccttttcggccgtggcatgaatgggtcgagacagaacattgtgatgcctggaaggtatatatacacgcagaggctgaaaggcgccaatgtcaatgatcagataatattaaacaaggtattactggtatcaactagagacaaggcttacattggcatgccagtggtgaccaatgctgctgttcatgcagtggttgaggaacagggacgggatgataaagtgatagtcttcaaatataagaagaagaagaagtcccagacggaaacttggtcacagacagccaaaacacaaggttaagaattaccggcataagtggatacgaggacttccctgctgacccgatacttgagtatgttccagcttaagagcaattgtaagttctgtagttacaaacaactggtagtacattagaatacgagtgctaccttttcttgtctggaagaacagtttttgaacaaaatttgctttgttcatgtgttcgagtgctgccagt

SEQ ID NO: 390863 - DNA, 523 bp, Oryza sativa
  unsure (1)..(523): unsure at all n locations
cttgggaaaggaactagtggataacctgtctgtccttcgcttctcaaatcttgcttttgaacctctatggtcaaggcagtatataaggaatgtgcagctgatattctcagaggatttcggcactgaaggacgaggagggtactttgataggtatggtattatccgtgacataatgcagaatcatcttcttcagatactagccctatttgcaatggaaactcctgttagcttggaggcagaggacataagaaacgaaaaggttaaagttctgcgttccatgaagcccctgcaactggaagatgtggtgataggacagtacaaaagtcatacaaagggtggtaccacataccctggatacactgaagataagacggtgcccaaggatagtgtaaccccaacatttgctgcagctgcacttttcataaataatgctagatgggatggagttccttntcttatgaaagctgggaaggctttacatacaaagggggctgagaatagagtacagttccgacatgttcct

SEQ ID NO: 390864 - DNA, 732 bp, Oryza sativa
tctcttcctgcctagccccaggtcgctgctcggctccgccatgtaccgcgcggccgtcagcctcgcctccaaggctcggcaagccgggagcagcgctcgccaggttggaagcaggcttgccttgagcaggaactatgctgccaaggatatcaagtttggagttgaggcccgtgctttgatgctgaggggtgttgaggagttggcagatgcagtcaaagtgacaatgggtcctaagggacgcaatgcgggtattgagcagagctatggttcaccgaaagtcacaaaggacggtgtgactgttgccaagagcatcgagttcaaggatagagtcaagaatgttggtgcaagccttgtcaagcaggttgctaatgcgaccaatgatactgctggagatggtaccacttgtgctactgtattgactaaagcaatatttactgaggggtgcaagtcatgttgctgctggcatgaatgcaatggatttaaggcgtggtatttcaatggctgttgatgctgttgtaactaacctaaagggcatggctagaatgatcagcacatcagaggaaatagctcaggtgggcacaatatcagcaaatggggaaagggaaattggtgagcttattgcaaaggctatggagaaggttggcaaggaggggtaatcaccattgcggatggtaacaccctttacaatgagccttgaagttgtggaaggcatgaaacttgacagaggctaca

SEQ ID NO: 390865 - DNA, 708 bp, Oryza sativa
ccacgcgtccgcgtcgtctcctcctccgttcgccgtctcctcccccaactcgcgcgccggcggcgagcaagcgaagcggagtccccgtgtagctcccggtttggatcgaccccggcggcggcggcagggatggcgctgaggggcgtttggcagctgcagaagctcgtggtgaactactgcgattggggagggagcagcagggggatcagggcttttatggaggcgcatcttccagcttttaaggaaaagaacccccacttagaggtggtgacagagttagtccgtggacagcatcctaacctgaagggcatttacaaaaatcataatgagcgagttgtttgtgtccgaaatttagcgcccgaggacatactattgcaagctaccaggctaaggaattctctgggcaggaaagtggtgaagctgagaaccagacacgtaacaaagcgccccagtgttcagggaacatggacgacagaactgaagatgtgatcatgtgagttgaccagttgggttctcagacaagctgctgatgttctttgatgtcgtgattgcagaactgttttcatatgcgtgtcaagaattagtcagtgcagctattcgactcacctttttttagtgattacagttcaactttgtctttttgtttcgtccggtatctgataataacatgcaaacttgggtgttccttgttgtaaaaaaaaaaaaaaa

SEQ ID NO: 390866 - DNA, 720 bp, Oryza sativa
  unsure (1)..(720): unsure at all n locations
ccacgcgtccgcggacgcgtgggcggacgcgtgggcggacgcgtgggctgggaaagccaaatataatgcttcaattgattccctagtgtggaagatcaggaagtttcctggacaaactgaggcaaccatgagtgccgaagttgagctgatttctacaatgggggaaaagaaatcatggaacaggccgccaattcagatggaattccaggttcctatgtttactgcttctgggttacgagttcggttccttaaggtgtgggagaagagcggttacaacaccgttgagtgggttcgctacatcacaagggctggatcatatgagataaggtgttagcgatgaagaaaaaagtcccaggtatttggcacggttatttcaaggattcgcggagctttctttctagtacggcgtcatgaatgatcataaagcatgtatattacatatgacaccactttttctttaagctattactttggcaaagggtagagcagagcagacaaattttcctgggttcttgtaatcgttttgacacgggatatctagtatcccctgagtcttgtttgtgtggtagggcatattttcatttgtatatgagaagatggcggtagcgtttgttcttgttgatcaatatacatatactcattggcagtttgtattgctttcttattaaattgatgggtgaattcacttgcaaaaaaaaaaaaaaannnnnnnnnnnnnnn

SEQ ID NO: 390867 - DNA, 599 bp, Oryza sativa
  unsure (1)..(599): unsure at all n locations
ccacgcgtcgcgggctgcaacaatggccacctctcctatgctcttccttgtctccctcctactagtactagtcgccgccgccactggcgacgaggcatcgccgtccgaacgcggcggcgccggcggcgcccgtgctggtcggcgggaggacggagatcagggacgtgggcagcaacaaggcggtgcagtcgctgggccgcttcgccgtcgccgagcacaaccgccgcctccgccacggcggctccggcggccccgccgaccccgtcccggtgaagctcgcgttcgcacgcgtcgtggaggcgcagaagcaggtcgtctccggcgtggcctactacctcaaggtcgccgcgagcgcgagggacccccccgcgcggcgccccgccggcggtcgcaccgggtgttcgacgccgtggtggtggtgaaggcctggctcaaatccaaggagctcgtctccttcacgcctgcttcttctaccaaataatcatgctcaaatatatgtattagtttcactctaattatattaattattactagttggactttactccctccgtctaataaaaaatcaaccctagtacggatgtaaaaaaaaaaaaaan

SEQ ID NO: 390868 - DNA, 437 bp, Oryza sativa
tcccggtcgccacgcgtcgtcacgcgtgttgcggacttgcggttgcttttgttcgtcttctcccggagattcggcgtgttcgtgctgcgaaatccgaactacttctgctgctaagatttctgccgcgtgctaatggcggaggaagggtacaaggttgttcttaacgtgtacgacctcagcaacggcctcgcgcggcagctctccacctccttcctcggcaagccaatcgaggccatctggcatacgggcgtggtggtgtacgggaacgagtacttcttcggcggcgggatccagtcgctggcggcggggaggacgccgtacgggcggccggtgcgggtggtggagatgggcgagacgcacatcccgcgggaggtgttcgaggactacctccgcgacatcttcgccgcggtacacggcggagacttaccggctgctca

SEQ ID NO: 390869 - DNA, 540 bp, Oryza sativa
  unsure (1)..(540): unsure at all n locations
ttttacattatnatcagattaagcagatggagacctttggttatcttctggtttgtgttgtgcctgccatactgttcgtgatgaatatgatatggttttccaagatcttaaggggcctcaagaagacactggccaagaggcattgagtggggcaaggggtatgcatgtacagccacgacaaaccacctatctgtaaattcactcagcaggccagcagcctatagcttctcattagtcacgatggctaatcctggtaatatcagcttggccattaagatccagatttatgattgaatgcccagctttttatgcatggatgatatattaatttgtatatatgttccgctatggctgtatgttcttaatacccatcttctttttctcggtataaatgattatatcttagttttaacttaaacaactatttgccccaatttcagtcacattgtcaacacattgctgtaatttgccatcagctttggccatcattcccaagaatagtttgatcatcnnnnnnnnnnnnnnnnnnnnnnnnnnnnn

SEQ ID NO: 390870 - DNA, 822 bp, Oryza sativa
  unsure (1)..(822): unsure at all n locations
gctatgataagaaaattagatggaaggtttagtaattaaggattgacatagctttgctcagaattttgtcatgggctggctcnatatgatccgcatgtctttagtaagactgagcatgctatacagtgggcatacatatataatgttttacaacctgtttctctgcaggtccttggtgacaaagcttttgagaaatttgggaaatggttcatctcacttcatttttcagatcaactggcaggctcttacaagaaagtcctttctttcaagtttgtactgccagatgcaagcaacatggctgagatgacaagattagttgctctcgtgccatactacattgatttggtggggcgttacaagctcagcaaccatgctcgttccaaaactgaagctgcaagaacaaaagcttcccaggaggctttcagggagcaacagggtctaaggcaggaagcccttcaaaggaagaaggctgagaagaacaaacttatggaagaggcagagcccaaattgagcgccgaggcactccgcaagaaagaggaaaaagaaagggctcgtcagatgaagaagtccatgcccaaaactcttttatgttcttctgggccatcaacttttctttgccatggggggatacaagcgaaaggaaataggctggaatggcgtcaagtttgatttgcccccacgatcgttcattttagttcatctgaatgttgttatgcagcagctcgtttgtaagagaactccatgacttgctgtgtaatgcgtttatagatacgctgccagaaactcaagactagatcacataatttgagttgatttatgagt

SEQ ID NO: 390871 - DNA, 498 bp, Oryza sativa
  unsure (1)..(498): unsure at all n locations
aaaaaaggaaaaaaaaagggctcgtcagatgaagaagtccatgcccaaagttaaaatgctccgttcctagtaacatcaaagatatatcacagcactggctttagctattcagtttgctgattagcttatttgttgcctgcccagactccttttatgttcttctgggccatcaacttttctttgccatggggggatacaagcgaaaggaaataggtgaagataatcttttgctgttgtttcagcttgtcgcttgttgggggattaatttgaaacgctgttttccttgtattaatatacgcaggctggaatggcgtcaagtttgatttgcccccacgatcgttcattttagttcatctgaatgttgttatgcagcagctcgtttgtaagagaactccatgacttgctgtgtaatgcgtttatagatacgctgccagaaactcaagactagatcacataatttgagttgatttatgngtnnnnnnnnnnnnnnnnnnnnnn

SEQ ID NO: 390872 - DNA, 581 bp, Oryza sativa
  unsure (1)..(581): unsure at all n locations
ccacgcgtccgaaacccaaaatcggaggtagctacagccgaatcccccaacagttgtgtgcaatttcttgcttgcttggttttcttttccccccactcggatcgatctcgttgttgtgtgaggctttttgagctttggtcgatggcgtcgatcgtgctgctgctgtcggagctgctcggcggcgagagcaccagcgtaatggcggctgactggtacatgagcggacacagcctccgggagttccggcccgtggcggctgctccggcggcggcggcggcggtggccaagtgcgagcggccggcggcnaaggcagcgggggagaagaagaaggaggagtcgttcgaggatctcgccgccgtgtcccggatcgcggtcgacgtgatgtggccttagagcaatccgtngncgccaactngccggagaagaagaaaaagaaaattctattcttgagttttttttctctatttttctccttttttttggtgcaacgaggnatgtgttgtgtaatgttctttttgagacaagatttgtaaatataacgaaggaattnttggaaaaaaaaaaaaaaaaaaggggggccg

SEQ ID NO: 390873 - DNA, 416 bp, Oryza sativa
ccacgcgtccgcgctcaggtcagctgtacgcacgtaggctggccaagactaagagcatgactcatgacgcgcagcatctcctcacgaggagagcaagccagctacgtcagtcataggaccagacgagatcataggaagagaaaagtgggcggcgccgccgcggccgccgacccgaaccggcccaagaagccggcgtcgtcgttcctgctgttcagcaaggaggcgaggcggcagctggcggaggagcgccccggcgtggcgagctccacgctgaccgcgctcgtgtcggggaagtggaaggagctcggggaggcggagaagcaggcgtggaacggcaaggccgcggaggccatggcggcgtacaagagggacaatggaggagtacaccaaggcggcggccagcggcggcggcggcg

SEQ ID NO: 390874 - DNA, 550 bp, Oryza sativa
  unsure (1)..(550): unsure at all n locations
ccacgcgtccggcatcacctcacatcaaaagaaacacagtagccttccagaacacacaaaaacaacagtcacttaccatggcttcttctggttgtcatcttctggttctgctcctggccttctcagccttccattgcagctacgcagctcgtcatcttttggacacagcagctgcagctgcagcaccagaggcagccccagctcagccctccatgccaacagttccaaccacgctgcctccgataccttccatacctgcagtccccaagctgacagtgcccccaatgccatctgttcctatcccaaaggttaccattcccccaacagccgctggcacaattccatctcttccaattccggccattccgaccaccataccaaccattcctacagttcctgttaccctgccaccaatgccctcaatcccaaccactattccatccattcccaccacaatcccgacgacgatccctaccattcccgggttccagatgccaccaatcccattcatgtcctcacctnccaaaaccactagcccctgaagttcttc

SEQ ID NO: 390875 - DNA, 524 bp, Oryza sativa
tgcggagagaaaggaggagaaaagtagtaaagaggaaaggggggagtgagtctcccgagcaacggctctccactactagcccacagctcccaagaatctctgccatttcttgagctggtcgatccatcggggagggagagaggtcgaggaggcggcggaaggggagaggatggggtctggatctttcctcaagctgctggccaacaacttcgacgtcctcgccgggccattagtttcacttgcttatccattatatgcctctgtgagagcaatagaaacaaaatctcctgttgatgatcagcaatggctcacttactgggtgctgtactcgtttatcactttgtttgagcttacttttgctccagtaattgaatggcttcctttttggtcctatgcaaagttgttcttcaactgctggttggtcttaccttgcttccatggtgctgcttatgtttatgatcactttgtgcggccaatgtttgtgaatcgtcaaatagtaaatgtctggtatgttccaagaaaag

SEQ ID NO: 390876 - DNA, 500 bp, Oryza sativa
ctgatcttgtatatgtttgtgacccggttctaggtgatgaagggaaactatatgtccctcaggatttaatatctgtttatcaacagaaggttgtcccagttgctacaatgcttacacctaaccaatttgaagttgaactactcactggtttaaggattacctgtgaagaagatggcttgaaagcttgcaatgcgctacatagtgctggaccgcgaaaggtggtaataactagtgcacttattgaagataagctgctcctcattggaagccacaaaaaagcaaaggaacaaccaccagaacaatttaagattgagatacccaagatacctgcatatttcacgggcactggagatttaacaactgcccttctactaggatggagtaataaataccctgataaccttgagagggcggctgaactggcggtatccagtttgcaggcactcctaaggagaactgtggaagactataaaagagctgggtttgacccctcaccagca

SEQ ID NO: 390877 - DNA, 584 bp, Oryza sativa
  unsure (1)..(584): unsure at all n locations
ccacgcgtccggcgtgggtgaaatgcgagtgggaggaagacgtcgactgctacgagacgctgctggcggcggggatcatctcgcggtccggcactttatccgaggccgaagctcggtacacgcggatgagcctcctcaaggcgcaggacgacttcgacgtgctcctggagaggatcaccgaattcgtcgatgccgaggagcacggcagagctcccggtggctccagctccatgtgagaaatcgtgaattgagagggtgccaagcttcgtctagctggcttcgatgggccctgtcccggaacgatcagccctactatctgattgttcttgggtaagttcatgggtacaataatcaaggggaatgatcagctagacgttgattgttccccgtcaatatttggacgaacaggtagatattgatttgtgtgtattgacaaatgatgtagatatacacaagccattatgtgggtcagtgatcaacatttgaatatgtaattaaatgaatatcatacatgttacatttnctncttnaggnngnnnnnnnnnnnnnnnnnnnnnnnnnnnnnnnnnnnnnnnnnnnnnnnn

SEQ ID NO: 390878 - DNA, 932 bp, Oryza sativa
ccacgcgtccgcgcgtcccttttaaatcaaagtggccttgaacatggtagtccactaacaactggaggattatattcaaatggagcagcagctgatatgaatgggtggacatcagcatttcaatcagaaggttcaccagcttatagctggcgtggaggttctcaaggcagttcctctggactaattgttaagaaaaccatgaaggttgatatcccagtagacaaatatcccacattcaatttcgttggccgcatccttggtcctagaggaaattctttgaagcgagtggaagcaaccaccgactgccgtgtgcttataagaggtcggggaagcattaaagatccagctcgggaggacatgatgcgagggaaaccaggttatgaacatctgaatgaacccctgcacatattggttgaggcagaactgcctgttgaaattattgatacccgtctgatccaagcccgtgatatccttgaagatctgctgaagcctgtggacgagtctcaggacttcttcaagaagcagcagctccgggaactcgccatgctcaatggcaccctccgtgaagaagggatgcaaagatctggctcagcttcccctttccacaacagccttggaatgaagagggcgaagacaagggggtaagtgagcaagtgttcatgatgggaggaccaatcgtctattctgagaccgatgctgaagtatgcctatggggttgccttgctggctgatggcccaaaaacggtctcgcaccgccagcatcggagcggcccgtacttgataataccatatatctggagttgtgtattcctgctaccgcctaccgaggggtctggttatggcaacgtagggtgttgggctatatattgggatgtgcatggtttggtggtagctatgtggcttgtgtattgctatgaactgatatctggggt

SEQ ID NO: 390879 - DNA, 625 bp, Oryza sativa
gaagcctgaacccttgcatgctccagtttctgcactgtgtgagcagaattatttctgaagtctgaacagcagccaagcaaaagaaggcatctgacagtaagatatgaacacctgtgtttcaggtgaatttggctgatgattctgcccctgtgttctgatttattcaagacactagcaactgaatcatcaggtgttggtcgcgaatatcccagtgatggattcatcgagttctttcgtgctcgtggtgctgattctccaagctgtcgtgatcggtttgctcctcactggacgagctacccgttcagcttaagcaaccggaggctactttcatggacagaaatcacgctgctctactctacaaagatcatttcccaacagttggaaacatgacgtttccaacatctcatcaactgcaaaatgatccaaattacaagcctctagatagttcatcccaccctgccgaggcttctgcaaataaaggatcaagcaaaggattcaagaaggggctgtatatagttgtgattccagtggctggtttgattatgcttgctggcatggcatggatgttcttgccatgccgcaagaaatccggtgcgactattggcccttggaggactggactcag

SEQ ID NO: 390880 - DNA, 546 bp, Oryza sativa
ccacgcgtccggcaaccgcactgccagcaaggcatctactcttgatgataaccaaggcctaggatgcattgctctgcagtacattaaagcatacgagggtcagtgcaaccaagtcggtgaaagcaagaagcctccggagaccagcttcgctgaaacatttgccccaaattgtggcgtccaagctgcaacactcaccaagatcaccgggaggcttctggcttgccagtctaactatgcgaccccagaccaggcgttcaacttcctggttaatgatgcgaagagcattcaggtactgcacagcaagaaccacacggaggtgggagcagctgtcagtggcacttctggcggcgggccgtacttctggtgtgtcttgttcagcagcgggaagccaaccaccagcttcaaggtagatggtggagtgcccaagtctgtccgtccaggatgcttcagtggcaacaacgacgatttgcatggggtgccaatgctgcagtttcgatcgggtgcaggtacatgggagactggtggctgcactacttttttccgggg

SEQ ID NO: 390881 - DNA, 729 bp, Oryza sativa
  unsure (1)..(729): unsure at all n locations
ggtggatgaacaacgaagacatcaaagtcaggaggccaaattcaacttcttggtcagatcacgacgaggtgccaaggatcgagacctatggccgtgtgttcaagacttggtcgacctggctggaacagaatgttgatcctgccaggacttcggtgttcttcatgacaatttctcctcttcacaacagcccagcacaatgggggaacccgaacgggatcaaatgcgtaaaggagacacttccagtcctcaactacaccaagccactggatctcaaccacgacatgcggatgtacgacctggtagcaaaagttgctaaaaacatgaaggaatgttccagtgtcgttgatcgacatcacaaggatggtcagattacaggaaggatgcccacacatcattgtatttccatccgtcagggtaaactgttgacaccggagcagaaggctgacccacagaagtacgctgactgcatccattggtgccttcctggggtaccagacgtctggaaccagatactttacaccaggatcctctccaaatccttccctccatccncacatccncctctccctccacaatgagaagcanggagcatganttttttttgccccatcgtatactatataggaaatgtaccattactattcaattnttttggtagtttggtgaagaaaatcaagctatagagagaaaaaggatggagtgggcttgttactgatggcatgtaaaatc

SEQ ID NO: 390882 - DNA, 623 bp, Oryza sativa
ccacgcgtccgaagaaaagctcgactcgagctcgccgcgattgaatcgcgcatgggcacggcggcgggcgacgcggcggagcagccaccggcggcgccggaggcgaagagggcggcggctccacggacgctggtgttcacgtacggcacgctgaagaggggcttctccaaccacggcctcctccaggacctggcccgggacggcgacgcctccttcgtgggcgccgccaccaccgcgccgcgcctcccgctcgtctgcgggccctaccgcgtccccttcctcctcaacctccccggcgccggacaccgcgtctccggcgagctctacgccgtcacgccgcgcgggctcgaccgcctcgacgagctggagggcgtctcccgcgcgcactacgagcgcctccccatctccgtcctcctcgccgagggcgcccaggtcgacgccgtcccctactacgcgcaccgcggctacgccgacgacctgtgggcgcgcagcggcaagaaggggtacccggagtactcgccggccgtcgccgacggctacatccgccgcaaggatcggccgcagcagctcaccttcgtggagccagattcgggtgttcgtctcatccgagtcatcggagaacc

SEQ ID NO: 390883 - DNA, 494 bp, Oryza sativa
ctctttttcgcctcctccacacacgagcgcgtcccccgacgccgcgccgagatctagggttgggcgcgcgcgacgccccccccccgcggcgaggaggatgagcagcccccatggcggcctcgacgaccagatcgagcgcctcatgcagtgcaagcccctccccgagcccgaggtcagagcactttgcgagaaggcaaaagagatattgatggaggagagcaacgttcaacctgtaaagagtcctgttacaatatgtggtgatattcatgggcagtttcatgaccttgcagaactggtccgaatcggtggaaagtgcccagatacaaactacttgtttatgggagattacgtggatcgtggttattattctgttgaaactgtcacgcttttggtggctttaaaggttcgttatccctcagcgaattactattctcagaggaaaccacgaaagtcgacagatcactcaagtttatggattctatgaccagtgctta

SEQ ID NO: 390884 - DNA, 850 bp, Oryza sativa
  unsure (1)..(850): unsure at all n locations
ccagcgtccngagtgttaagacttgactcatcagttatcggtttgtccaagtttttggacaagtaactctattagcttggagtgtggcatacaacaagtacttcaaaacaacacctgcacagaaggttttatcagttctgcagtttcttacagcactcgtaatgctgtcagatgtactatttgttgagggaatatacagaaacttcggaataccggattccatgtacacaattgttttctcagggttgttggagggtcttatgttgttcaaggtgctgcccttcagtgttcttgttgcaaaactttgcccttctgggtgtgagggatcacttatggcttttgtcatgtctgcacttgccctcgcaactatcatcagcggttatcttggggttgcacttgctgaattcatgggagtatctggaggtgatttctcagcgctgccgacttgtctgttgattgaggctgcatgcacaatgctaccactctttttctcctcattgataaaagagaggagagaaaaggagaagaaagaagaatagaattcacctataggattcgatgaggttgtactggtgctcgttatactttacagtcatctttgggatcatatggatttgccgatagttcggtttcataatcagaacatagctggtggacacaatttaaaagactaggttcctcgagaggttttcagtggttgtcgagaatcatgttcagtgtagatggcatatttgtacctatatttgtgttaccattcttctatagatcaagtcttgtttcatgtaactagtattctttttgtgtatgctaatctgttttttgtagatgaaacaatataaatgttttgtgc

SEQ ID NO: 390885 - DNA, 517 bp, Oryza sativa
ccacgcgtccgacgcgacaaggcgagacgacgcgcacgcgacacacagccagcggaagcagcagcaggacgacgaggaggaggaggagatagcttagatcccgctcgcctctgatccccccggatccgatccgagatcctccacccatggcgtccggccggtgctgcacgttcctcgagatcctgctcgccatcatcctcccgcccctcggcgtcttcctccgcttcggatgctgcagcatggagttctgcatctgcttgcttctcaccatccttggctatgtccctggcatcatctacgcagtctatgtgcttgttgctcttgactcagaccagtaccagagggaatatcatacccttgcttaggcagtccacttcaattctgtcgaaacctatgctctatccagaacagccaagttctgcttgttgaattggtatctggtaacttcgtcttgggttttttgatatggcgttgtgaatcttgtgattataaagaggaacagtggttcgatcaagga

SEQ ID NO: 390886 - DNA, 974 bp, Oryza sativa
  unsure (1)..(974): unsure at all n locations
gatcgtggaacttaatgatgagaggaactggagaaatgggctgagagttcgattattgaatacttgcatgacaaagggaggcaaagggaaaaagggtggccatgatatcaatgatggacatggtgtagaggatgatgtctccacttctaaccaatcaaatgagaaacatggagaagaagcactgcaaacaccagatgcacagggagagcaattgcctgatgagagcgctggggatatgggacgagggcgtggcaaaggccgtggccgtggaggtagaggccgagggcgtggctaccactaccacaacaacaatcaacagagctaccacaaccatcagcagcataatcatcagaatagcaacaaccggaacgcccgcccatccagttggaacgccgccattccaaccatcctgccaagaacgacgcagcaacagcaggcacagccacagccacagccacagccacagccacagccaccagcaggagcaaacaagcagcctccagggccacgcatgcctgacggaacacgcgggttcgccatgggcagagggaagccgcaaacatctacgacgacacccagcgcatcatccggtagcgaaccttgaaactcgaaacacgcaatgttgctgttggtcatgttgatagaaagagatgcggttgagagacttgtcttttttacaagtctgtccttggaagcgtgcccccttttgttgtttgttctatatatacacgtttttctgccgtgtgctgttgttgtgtagtactacttctgaaacaggtagagccccccccgtttgtgtgactcggtgtgagtgagtgacctgagtgtgctccctgtcactttgcagctctgtttttttttttttttaccatttttgccgccctgactgtaagattgtagtagtaaaagttgattccagaaagataggggaggagaacatagtaaaatgtgatgatgtttcttgtnnnnnnnnn

SEQ ID NO: 390887 - DNA, 574 bp, Oryza sativa
ccacgcgtccgagggacaagtatctggcgtacaagtccctcaagaagctaatcaagaacctgccccccgatggagatccccctcccgtcgccgcggcggcggaggtgcctgcgggagatggggatggggatgggggcatcgccctggggaactggttcgccagggtcctcgacatggagctccagaagctcaacgacttctacatcgagagggaggagtggtacgtcatccgcctccaggtgctcaaagaaagaattgaacgtgtcaaagctaacaagaatggggctcttacatctaacagcgaattcactgaagagatgttagagatacgcaaagcttttgtcatcatccatggggagatgattcttctgcaaacctatagctccctaaattttgccggacttgtgaagatacctgtaaaaatatgacaagagaacaggtggtttgctcagcctacctttcactcaacgtgctctacaccaaccatttttcacaacggaacctttaacaaggcttgttcgagaatgttagagtaatcttgagctactgttttctatttgaacaaacagacttg

SEQ ID NO: 390888 - DNA, 547 bp, Oryza sativa
ccacgcgtccgggcccctaaggatgatcttgtttttcttcggattgtttctcttcctaaaggacgcaaacttttgtcacggtaccttcgacttcttacccctggaagcgagttgacccgtatagtatgcatggctatttttcgacatctgaggtacttgtttgggggtttaccatcagattctagtgcagcagaaacaacagttgctcttgcaaagactgtttcatcttgtgtgctccatatggaactaggtgctcttagtgcttgccttgctgctgtcgtatgttcatctgagcagccacctctgcgtcctcttgctagctctgctggtgatggggcttctcttattattaaatcagtactggaccgagcaaccgagttgctgactgaccaccatgctgcagccagctatacagtgtcaaaccgaactctctggcaggcatcatttgatgctttctttggactcctgacaaaatactgcctcaggaagtatgaaagtattaagcagatgtctgtcatgcagtcaccatgctctgtaactggatctg

SEQ ID NO: 390889 - DNA, 707 bp, Oryza sativa
  unsure (1)..(707): unsure at all n locations
ccacgcgtcccctcccacccatctcgtcttcgtctcccctctccttccccccacgccgcctcgagaaagaggagaaatcgagagcgcggcggccgaagatgccggcgacgccgacgatcatcggcgccctcctgggcctcggcacccagatgtactccaacgccctccgcaagctcccctacatgcgccatccctgggagcatgtggtgggaatgggcctgggtgcggtgttcgtcaaccagctggtgaagtgggatgagaagctcaaggaggatctcgacaagatgcttgagcgtgcaaagcaagccaacgagcggcgttactttgatgatgatgatgattagctattttcatattggtttgtcagccaccagactcttttttttcagtttgtatggtctgtacacatggtttggaccatccatctgtagtcgccgtatcaacacccggctcgcaatttcaactgcggtgctgtaataaactgttgttttcacaaaggatgtgatattttgcttgtatgagaaaccaattatcgaactcggctctgatggtataccttccctgatgcaaagtcattgtttagtaccaacggtagcgcttttacaaagttagaatttctgcttacccatatgttgtgaggttctagtgatgtgatatgtcaccttgctcgttcattccttttcttcnnnnnnnnnnnnnnnnnnnnn

SEQ ID NO: 390890 - DNA, 512 bp, Oryza sativa
ccacgcgtccgagcatttgttggtgtacgggatgacattgccacttctcaagttaaactcttcggtgatcaactccgggatttagagaagcatcttccactggacaacatttacaaatccgacaatgtatctgctgctccaattcgcgttatcaatcttctgtacaactctggggatgtgaaaggcccacaaactattgcttttaatttgcccgatgatgagcggattgtgaatgaacgagggacctcgatggttatgcttaagaacatttcagaagctaagtttaagcatatcttaaagcctatagctaatgcttgcatcagagaggaacaggaagattatgttgattttgagcctgattatacacatattgtttgccatgaatgctgccatggaattggtcctcattccataacccttccaactggtaaaagatccacagttagaatggaacttcaagaatttcattcagcattggaggaggccaaagctgatatagttggtctatgggc

SEQ ID NO: 390891 - DNA, 630 bp, Oryza sativa
ccacgcgtccggcatgatctgcggtcacggttgagcatcattccccaggaccctacgttgtttgagggtactatcagaatgaatcttgatcctcttgaagaatgtactgatcaggaaatttgggaggcactagaaaagtgtcagctcggagaggtcattcggtccaaggatgaaaagctggacagtccagtactggagaatggagataactggagtgtgggacaacgccagcttattgcattgggtagggccctgctgaaacaggcaaaaattttggtgcttgacgaggcaacagcatcagttgacacagctacggacaatcttattcaaaagattattcgcagtgaattcaaggattgcacggtctgcaccattgcacaccgtatcccgacggttattgatagtgacctagtcctggtgcttagtgatggtaaaattgcagagtttgacacaccccagaggctcttggaggacaagtcctccatgttcatgcagctagtttctgaatactcaactcggtcaagctgtttatagagaggcttagcttaaaatcccccacaccaagtaggaacagggaggtaggatagccacatctgccagtggactcacaccatagaagtacctacatca

SEQ ID NO: 390892 - DNA, 915 bp, Oryza sativa
ccacgcgtccgcccacgcgtccgaacggattcactgtgtcaaacctccgatctctgcaatggcagcaacggcgcagggcggcggcggggcggtgtccgtgcagcacgtggcgagggcgtcgtcggacgagctcctgcgcaagttcgccgacccggacgcgcacgccaagcagatcacgccgccgcggcgcagcctcgcgctgcggcggaagcggtcgtccaggagggtggcgtcggggctcttccgcgagggatttggagtcggggccggagctcgcggcggcccaagcggaggcggagcatcggcgggtccaccgagtggaaggccgggctgctgctgccgacggaccaccacggcctccgcccgcaagggatccgccgcgagccactcccaccggggcggggccgcgcgcctcgatgacgccgcccggatcgggcctcctcctcgccgcgttggagcggacatggaggaagacggtggcgggggcgtcgaagatgttcgtggagaggcaccgcaccaaccacgtgctgctcatcagcgacatggtctgagctctgaactctaaactgaagcctctgccatgacaggtggccgagctgtgactgattcttctctcgtcatcgagctctcctgctcgggttggttaattggtttccttcgaattgaattcgtttatgactgatcgattctacagtttagctagaataaaatggcagaaaagaacaacacaaaattgaactagctgtgtagttcaggtagagtaggttctttgactcctgcctctgtgtttgcttttattcactcgttgtttctttatactcggttgaatcatcgtctcggcgaccacgttgtaaattcaagtttgcaatatcaataccagtgctgttcttctcagagaaaaaaaaaaaaaaaaaa

SEQ ID NO: 390893 - DNA, 556 bp, Oryza sativa
  unsure (1)..(556): unsure at all n locations
cggacgngcngngnacncgatgggngccgtggagggggnanacggagaacactctctcgaaccctccctcgcctgctacagtaaaattcccctttctcgacccctcttcctcctcgattccggcggcctcgtcgccggttgacgggagggagaggggtcgtccccctcccctagtttagtatagtagtcgggctagtctcgttaggtcgggtttttcccgtttctcgtttctatggcgatggaagttgaagacggtggcggtggcgcgattgaggccggtgacggtggaggcgacaaggttggcgacggcggcggcgcggatccggttcgcggcagcggcggcggcgcggatccaatctgcggcgacggcggtggcgcggaccagctccgcggcaacggcggcggctcgaacgcggcccgtggcgacggcggcggcgcggatccagtccgcggcggcgccggcggctcggacgctgcccgtggcgacggcggcggcgcggatccagttccggggggtgccggcggctcggacgctgtccgtggctactgctgtggc

SEQ ID NO: 390894 - DNA, 303 bp, Oryza sativa
ccacgcgtccgggagcatctcagtaagttgcaggtgctctaattccactgtccatcgcataccattttgcgtgtgtgcgtgttctacatgtacgtatacatacgaaaagctgtaacctcatctcttatagagtgtgaatttggtgggccggtaatgggttatttcagttatcggcttaccctcaacctcaagtgtgcgttcattgattgctacataaaaaagggttggtgttacagacttgtgtattgttgctcatgggcatgaagtttctttgaagatcaaaaatgcaaaattattacggtc

SEQ ID NO: 390895 - DNA, 879 bp, Oryza sativa
gctcgtcagcaccaccgtgctctacccgctcgacacctgcaagaccaagttccaggccgagctccagacgcagccgggcgcgcacaagtacaggaatctttcagatgtcttttgggaagctgttcagaaaagacaaattctatccctatatcagggccttaagacaaagaacatccaatctttcatttcacaattcgtttacttttatggctatagctactttaaaagactctacttggagaagagtggagcaaagtctatcggcacaaaagcgaacttgttagttgcagctgctgctggtgcttgcacagttgttgttactcagccactagatacagcatcttctaggaatgcaaacaaggtgcctttgggaagtccaaagggctgcggggcaactcttgccgaaggctctgggcttgaggcatttgatggcttgggaatttctcttatactaacgtgtaatccttctattcagtatactgtatttgatcagctcaagcagaagctaattcagagacagagacgtaaaaatgcagaagcagggggtggttcttcaccagttgctctttctgctttctcagcatttctccttggtgccatctcaaaaagtgttgctacaatattaacctacccactaatcaggtgcaaggtcatgattcaggctgcagaccctgatgaggatgatgacgatgaatctgaaaggccaggaaaatcaaaatctcccaaaacaatgttgggcgctttgcatgccatgtggagcaaggaaggcatcccaggcttcttcaaagggatacatgctcagatactcaagactgtcctgagttctgcattgctgctgatgataaaggagaagatttcaagatttacttggatttcact

SEQ ID NO: 390896 - DNA, 658 bp, Oryza sativa
ccacgcgtccggttaatcacaagggaggatttggtggtgaaggccaagggattggcattgcagggggctgagatcgcaaaaagtctgctgtctagcagcacatcggtgctcggtggtagtgccaatctgatgttatccattactctccacattgtctctggtgcagctgaggtgctcaattttgtgtcacagttgatggttttcttgtgggtgctgtactacctcatcactgtagagggaggtggggctacagagcaggtcattgatcttttgccattgtcaaaacaagttaaggatcgatgcgtcgaggtcatcgaccatgccattagtagtgtcttgttagccactgccaagattgccattttccagggatgcctgacatggctgttgttcaagctcttcaaggtgcattttgtgtacacatcaactgtgtttgcaatcatcagtgcacttctgccaatactcccaccatggttgtcctcgatatttgccgcagacagctgctcatggaagggagatatgtgctcgctattgtggtgacagtggttcatctcataatcatggattatggaactacagtcattcaggagggatatacccggggtacaatgggatatctcactgggccttagcataattggtgggcatgggcattgtt

SEQ ID NO: 390897 - DNA, 758 bp, Oryza sativa
cccacgcgtccgtgttcatctgcgccacgacacgacacgacacgacacgagacgagagaggagtcggcaatggcggaggggtcgcggtcgccgctgaggtcgttcgtggaggtggcgccggggtcgcacttccccatccagaacctccccttcggggtcttccgccgcaggggctcgccggagccggagccgccgcgcccggccgtcgccatcggggacttcgcgctcgacctcgccgccgtctccgacgcgggcctcttccacgggcccctcctctccgcctccccctgcttccgccaggaaacgctcaacatgttcctggggatggggcgtccggcctggaaggaggcgcgcgccacgctgcagaagatcctctcagctgatgagccggttttgcgtgacaacgaggccttgaagaagaagtgccttgttcccatgagcgacacagagatgcttctgccaatcacggtaggagactacaccgacttcttttgttctgtgcaccatgcaaggaattgtgggttcatcttccgtgggccacagaccccagtcaacccaaattggtttcagcttccagtaggttatcatggtcgtgcatcctctgtgattgtatctggaacagacatcattcgacccaaagggcaaggccatccaacagggagattctcgaccttattttggtccttctaagaaagcttgattttgaacttgagatggcagccattgttggaccaggggatgaatttgggaaactatcg

SEQ ID NO: 390898 - DNA, 642 bp, Oryza sativa
ccacgcgtccgcttaatgcctaacacaatctgcacatcacttcttttgtcacttagatggcacctgacattgactggggtaaaaatattcgagtagtactggatattggatgcaagagtgctggctttggtgtcgctctacttgagaaggatgtgataacactatctttaggtcttacgtatgatcaaactgaccttgcacaagttgcccttgaacgtggcatccctgcaacagttggcagtcttggatcaaaaaggttacccttccctagtggtgcatttgatgctatccactgtggtgattgcaacataccatggcattctaatggtggaaagcttctcctagagataaataggatccttcgtccaggaggatacttcattatatcaagcaaacatggtgaccttgagagcgaagaaggaatatcagcttcaatgactgctatatgttggaatgtaatagcttacaacagtgatgatgtcagtgaagctggagtgaagatattccaacgaccaccttccaatgatgaatatgatctgagagcaaaaaaagatccaccattttgtaaggaagaccagaccaaaactcctgcaggtatactctgatcagacattgcctgcataaagctcctgtggcattgaa

SEQ ID NO: 390899 - DNA, 535 bp, Oryza sativa
cacaagcttcttccctccttccttcgtcttcccccttctccacttcccccattccattccattccattcctttcctttctctctcctccccctcgcgccattaaggctccagagctttctccctcttcacttgggggggactggaagaagaggaggagctcggctcgaggccccaagaatcgagttcgtcggaggcggcggatgccggagaggtccgagctggggcggcagctcccgctgagagggcccctcaaggcactggaggccgacatccaccatgccaacaccatggctaatgctatccagaggaactatggtggagcatgtgtgcagatgaggttgtcgtgcagctcactggcgccattctttctttacctcatccagtggctggattgtggctgctgttatgctcttcccagttatctaggcctttttcacattctcatttgcaagggttatgcagatggagatagctcagtatcaacgtatgaaaggcgtgcaagccttagagaattctatgcgatcatctacccta

SEQ ID NO: 390900 - DNA, 720 bp, Oryza sativa
gtccgtatattgcgttaatgcggttatatttcaaaggttggcgttgcaattgctgtgagatatgctttgtcaaggagagccttttcagttacaccggatggtcctgaaatgctgttacttgattatcccagtcaccagcgacgccttctaccactgctagcaaaagcatgtctgatgagcagtgctggtaattttatgaaaaggatgtatgtgaagaggactcctgaacttaacaaatctatacacatttactctagtgctcttaaagctacacttacctggcagaatatgaccacacttcaggagtgccgtgaagcttgtggtggccaaggtttgaagacagagaatcgcataggaattttcaaagctgaatttgatgtccagtctacatttgagggcgacaataatgttctaatgcagcaggtaagcaaagccctttatgctgaatttttgacagcaaaaaggaagaatcaaccattcaagggattgggcttggaacacttgaatggtccttgccctgttattcctgattatctgacaagtggcacactaagaagctccagtttccagatggacttgctctgcttgagggagcgagatttactgaaacgattcaccaacggggtttctaactatctggcacaaggagaaaacagagagaaggctttgatgctgagctaccaactcgctgaagacttagctagagcatttactgagcgc

SEQ ID NO: 390901 - DNA, 730 bp, Oryza sativa
  unsure (1)..(730): unsure at all n locations
actatttaccccacttgccgaaaagggggatttcctncaagccgtttaagttggttaacccnaggtttttcccagtcacgacnttttaaaacnncgccctntgancgcccntaatacgactcactntaggccgaattggttaccggcccccccttcgaggtcatccctcgctcccggaggaaggggaagaactccggagggggaggaggaggaggagcaccgatgacgcgggggaagcagaagatcgatgcgcacggcggaacgcggagaagaaccagaagtcgaaggggtcccagctcgaggcccgcgccgtcggcctcaaggtcatctgccccatctgcaaggttcaactggccaatgagaaacaattgattgatcactatggatcaaagcatcccaaggaaaaaccccctagcccatcagaataatttgtgttggccctgatgcagaaacataagttctgcttgctctgtccgcgagattgttcgatctgccccatacttggacctcaactgaagttttactctacaatgtatgcatttcctcttgtttctggctagagccgtcataagcttgtgctttctatgagaagtatatcttttgatatcataatgccgaatcccgaatgtatatcccaactgcatgtggtacattatcggataagagggtgttgaattgtcaataaagcttatgaaaagtttgacaaaaaaaaaaaannnnnnnnnnnnnn

SEQ ID NO: 390902 - DNA, 638 bp, Oryza sativa
  unsure (1)..(638): unsure at all n locations
gggccctggacaaatcgaaaccaggcatagagcagaacctagttgactgggccaaaccccacttgggcgacaagcgtaggctgtaccgtgtcatggatacaaagctgggaggccaatatccgaagaaaggcgcccacgccattgcgaacatcgccttgcaatgcatctgcaatgatgccaagatgcgcccgcggatgtctgaggtcttggaagagctggagcagctgcaggactccaaatataatatggcttcaccacaggttgacatccggagaacctcaaacgccgtccctaagtcgccgatgagaatccagccatcgccacggcgctcacttggagcagcagcatccccattgccaggatataggactgccaaagtgcactagaagtgcaacatagaagaggtcttttatctgcacggctgtatagtttgttatgtaagcagtgtttttttgtcctttttttctcgaggaactttctgtttctagtgatatttcttttatctgtgtgacacgagaatctgacgtccattataatgtaaattgtttgccgagataatgggtgccgaattctggtgcctgggttgctgctatgatactccctttgcatttcttctcnnnnnnnnnnnnnnnnnnnnn

SEQ ID NO: 390903 - DNA, 621 bp, Oryza sativa
ccacgcgtccgcggacgcgtgggcagagacgcattgtgttttttcctagatgaagagcaaggccaagatattggttttgtacagtatcctcagaattttgaaaatgtggtgcacaatgacatctatggccacccaatcaatgttgtcaacgagttggatcatccttgcttggatggttggggtggaatgtgttactatggcactggatgcttccatcggagagaggccctatgtggacgaatctatagtcaagaatataaggaagattggactagggtagcagggagaacagaagatgctaatgagttggaagaaatgggcaggtcacttgtgacttgcacatatgagcataacaccatctggggaattgagaagggggttaggtatgggtgcccactggaggatgtaactacaggattacaaatccaatgccgtggatggagatcagtgtactacaaccccaaaagaaagggattcttaggcatgacacccacctcactaggccagatcctggtcctgtacaagagatggacagaagggttcctccaaatatccctctcacggtacagccccttcttattaggtcatgggaagatcaagctgggtcttcaaatgggctac

SEQ ID NO: 390904 - DNA, 639 bp, Oryza sativa
acaatacaagagatgattaagggaagggaatcctcctcctcttcaataaaaaggaagggcagagtgcagagagaaaggagatcccctgatccctcttcctcgccggcggcaatcgctcgccggagtcaaggtaggatgatggcggcggcggggctggagtcggcgtgggagtacctcatcacgcatttcagcgagttccagctggcctccatcggcaccttcctcctccacgagagcgtcttcttcctctccggcctcccctctctcctcttcgagcgcctcggcctcttctccaagtacaagatccagaagaagagcaatacacccgattaccagaacagatgtgtagtgcgtctcgttctctaccatgtctgcgtcaatctccctctcaccattttatcatatcgcaccttcaaattcatgggcttgaggagcacccttccgctgcctcactggacagttgtcgtctcccaagtgctcttcttttttgtgcttgaggatttcatattctactgggggcatagggcactgcataccacatggctgtaccagcatgttcacagcgttcaccatgaatatgccacaccctttggtctaacatctgaatatgctcaccctgctgagattctattcttgggc

SEQ ID NO: 390905 - DNA, 1071 bp, Oryza sativa
  unsure (1)..(1071): unsure at all n locations
gcgggtcagctccccgcctgctccctcctccgggtgcctgtcctgtctcgccaccgccatcgtcttcgcctccccgcctgccaaccgccccacgttgcggggagacagctcggcgcgggcggcgatcatggcggcggcggaggtgtactcgccgacggcggcggcggcggcgcagcagcagcagcgggggaaggtggcggcgcaggcgtggcaggcggtggggggaggatcgggttcctcctccagggcctgctccagatcctgcggggcaccccatcctgcgcccagctcctctccttcggcgggttccgctacccgctcctctccgggccggccgactccgagcagtcgccgtcggtggccttcatgccgctccgctccgagctcccggccgacacggcccctgcgccgacgcccccgccggaatccctgcagcgcctcacggttgcgcttgatgtggatgaaactgtagtttctgcatatgaatcatccagtcttccagctattgtacgcacccaagctgttgaagctggattacattgctttgacatggagtgcatatccactgagaaggatgttgaagggccgaacaaagtgaatcatgtcaccgtttttgaacgtcctggtttgcacgagttcttgcagacaactagtgaatttgcagatcttattctctttacagcaggtttggaaggttatgcaagacctttagttgacagaatagatgtccataatagattcaaactccgtctatatcgtccatcaactgttactacggaatacagagaacatgtcaaagatctttcttgcgtgtcaaaagatttctgcagagttgtcattgttgacaacaacccattcagtttcatattgcaacctttgaatggaataccctgtgttccattttcagctggacaacataatgataatcagctcatggaagttatatttccacttctgaagcatctctctatccagagagatgttagaccagcactatacgaaagatntcatatgcctgaatggttccaaaaacatggcatcctccaaactgatcaagcagtgtaaaatttg

SEQ ID NO: 390906 - DNA, 645 bp, Oryza sativa
ccacgcgtccgctgagtttttcaacaggcctattaccaactatggtgagatgcttaccatatttggtaagtacccatggctataggaaattttgccaaaggactcaaagctcagttctaggcactgaagatgtcgagggtacagagatggaagtgaatggaagatgctcccacaatagatcatgatgagagatcatcggctagcaagcccaagagacaaaagacatatgcacatgacgatgatggtttggttggtgcatttgacagagctagtgacaaactagcaaatgccataataaggtctagcacagttgggaatgaactacctgatgatctatgggacaacttgaatagccttccaggttttgagcaacatcacatctctttctactatcactatttggttgctaatccacatattgctagagctttcaacggtcttccatttgcgaacaaacttgattgggttgctatgtacatcagcgagaagtttcccggtgctatgtaggataccatcttcatggaaagattggttatttcactattatgaactatttgtaccctctcattttgtattgtgtgtgcaccgttaatttgggctatgtgtaagacttcatgcaattatctactaaaaaaaaaaaaaaaa

SEQ ID NO: 390907 - DNA, 550 bp, Oryza sativa
  unsure (1)..(550): unsure at all n locations
ccacgcgtccgggaccacgaggacccgtcgtctccggggaaggaggacgtctgcaaaggcaaggggtgctgcgactggtccggcggcgactgcaagcactactgcgacggatacgacgacaaatcctgctgcgacgactggtccggcgactgccacaagtgctgctccaagtagcccggcccgccgtatatacgtcgatatcgccgtacgccgtactatgtgtgtatacgactgtatacgcaacacaagctcgatcgtagtattgcttattgcactcttcgtcgtcatcaataaattaaggcacgcgtgtcagcgtgtgtacgcggtgccgacgtgcgtttgtacgtacgtgtacggcttgctaggccatgagtgtgagctctttccaaaggctacatgtactatgcgccagtcgatggcttataatattgtaataacataagttgtgcgtgagtgtaacatgatataatataataataataatatgatgtgcgtgtatgtttgaacgtgaataatnnnnnnnnnnnnnnnnnnnnnnnnnnnnnnnnnn

SEQ ID NO: 390908 - DNA, 538 bp, Oryza sativa
cgcgtgagcaccgacgacccaacaacacaagacggggcgagcgacgagacgacctaaccccaaagcgaaaaaagttgctgcatccttagcgcgcaagcgaaagcgatgagggagctcgcgcgcgcgcgaggtgatcgatggatcgaccccaggtagttaccgagaactatgccaatcctgtgacgtgcctctttcatgtgctcttcaaggctggggcgctggtgttctacatcttgttttcgctcttcgtgaagagcttcgtcatcatattcgtcatcaccgtgttcctggcggcgctcgacttctgggtggtgaagaatgtgagtggcaggatattggtcgggatgcggtggtggaatgagatcgacgacgagggcaacagcgtgtgggaagtttgagtgcctcgatggggaggctcttgctcggatgaacaaaaaggactcgtggctgttctggtggactctttacttgactgctgctgcatggatcatccttgggatagttttacttatgagacttgaagctgactaccttcttg

SEQ ID NO: 390909 - DNA, 984 bp, Oryza sativa
tacatcagttattgttccatggctccgggagaactatggttgtgaagttgtctgtttcactgctgatgttggccagggtgacattgaattggaagggctagagaagaaggcaaaagctagtggtgcaagccagcttgttgtgaaggacttgaaagaagagttcgttagtgaatacatttacccctgcttgcgtgctggtgcagtttatgaaagaaagtatctgctggggacttcaatggctaggcctgttattgccaaggcaatggttgatgttgcaaaggaagttggtgcagatgcagttgctcatggatgcactggaaaaggcaatgatcaggttcgttttgagcttacattctatgctttaaaccctgagcttaaagtggtggcaccttggagggagtgggatatcacaggacgtgaagatgctattgagtatgcaaagaaacacaatgtgccaattcctgttacaaagaaatcaatatacagccgtgatcgaaatttgtggcaccttagccatgagggtgacattttggaagatccagcaaatgagccaaaggaagatatgtatatgatgtcagttgcaccagaaaatgcaccttcaaaacctgagtatttggagattggtattattgcaggtgttcctgtttccatcaatggaaaagatctctcaccagcatctctccttgccaagctcaatgaaatcggtggaaagcatgggtattgggcgcattgatatggtggaaaaccgcctcgtaggcatgaagtcccgtggtgtatacgagacccccggtggcaccatcatggcagctgctgtcccgtgagctcgaattccttgacttttgacagggagacaatgcagtggaaggacatgcttgccctcaagtacgccgagctggtctacgctggccgttggttcgacccgctccgacaatccattgatgcgttcatggagaacattaccgcgacaacaaccggctccgtgac

SEQ ID NO: 390910 - DNA, 899 bp, Oryza sativa
ccacgcgtccggattttctgccgctgcattcgcatcaccttctcccagtctgtgccctgtgctagtgtgctactctctctactgagctctctcgcctttccgcgttcgacattctcttccagctttgtctcacgctcgcaactggttttcccggttatttcgggatccggattgcacggtgttcgggctgtttcgtcaaccatggggaagtctccggcgaagtggatcaagtctgtgctcctcgggaagaaatcagccaagtccaactctaccaaggccaaggatttggcgaaggctgcaaataacaagcctgtgctttctgaggatccccctgtgatttctgagccagctcttgttaattctcacaacgatggaaatgctgaaaattgcaagttaccaaacggagttgcagttgaagccatgggtcaaggagtggagaaccaaaacattgttggctccaaggcaccaactagtccagagaaactaagcgaagagctagctgcagtgaaggcacaagcggcctttcgaggttacctggcacgtatggcattccgtgcattaaaaggtatcataagactccaggcactgatccgaggacatcttgtaaggagacaagctgcatcaacccttcgtgtgacatggttgatcgcgaaacttcaagctttagttcgtggaagaaatgttagactctccggtgcttccattcaatttgttgtgaagtcccgccaacataagtttctgagtgataaaccatcgtacgcttgcaaagagatggtttcttcaaacgcatatgttcgaaagcttctatcttcatcaattgggttagaagctcttcactctcagtatgacaagagggaccccaattcattgtacaactggttggaaagaccgactataag

SEQ ID NO: 390911 - DNA, 950 bp, Oryza sativa
  unsure (1)..(950): unsure at all n locations
ccacgcgtccgcggacgcgtgggagaagccactgagagcttgagaacaccatgtcttcctcggttcttctcttcctcgtggcgctgctgctctcgtgcagcaccatgggcaacgctgcacgacgcctggaggtggagtacccggcggcgcaccccgccgtgccggagcttcccaagcctgagctgccgccgcaccccgtcgtgccggagctgccaaagcacgaagaaccaccgccacacccacaccccgccgtgccggagcttccgaagcctgaactgccgccgccgcaccccgccgtgccggagctgcccaagcacgaagagccaccgcaccccgtcgtgccggagctgccaaagcccgaggtgcctcaccctgccgtgccggagttgccgaaacacgaagagccaccacaccccgtcgtgccggagttgccgaaacacgaagagccaccgcaccccgtcgtgccggagctgccgaagcccgaggtgcctcaccctgctgtgccggagttgccgaaacacgaagagccaccacaccccgtcgtgccggagttgccaaagcctgaggtgccacaccctgtggtgccggagttgccgaagcccgaggtgccgcatcccaccgtgccagagcatgaacagccgcccaagcctgagagccattatcccgagaagccatgatcgatccagagatcgatcgatcggccggtcgtatcgtatcctgaaattactacgtgttgctgtatgtgtgtatgttcatgtgtaagctttgatcgatgtttgcctaagatattttcagtgatgatctagctagctgtgtgagtgtgtgagatgatgtacgttgtntgtggtgtttgttttggggcagctttctttgttcttggatgagttattgtgttatcgtatgtgctgatttatgtgtgtgcacacacgatctacacttgtatcatacat

SEQ ID NO: 390912 - DNA, 661 bp, Oryza sativa
ccacgcgtccgcagggagctcaggaagtccaatgggactcactcctacatgttcgcgcgcaaattcgcgcccgattgcctcaagccactgatggagatcgccgactccgtcatcctgcgagactagatgaatgatgctgtgtttgcaagagatgaatgcaatgagggctgagatgtgatgaacaagcataagctgatccatccatacccttgcagattctccagagagtacaaaccaggaccaagccttggtttgctttgttttcttcaactgcactcgtcaaaaagatggtgcttctcgagagagcatgatggttggtgttggtggcaaaagggccccagctgcctcctatgtgagtatttttctctgtatcttttgttttccctttcgaatttgagctcaagtggtggccaaaatcagcagggcacaaggttgttggcacgtaattagagtagtagttagcatgatcatcctatgtattacatggaggaaaatctgtcgatacatgcagtgatggtttgtagtgtatgtttatatacaatatgtcaatatcaagccctttttttcgtccgaaatgtatcgtttgtatcatggaaaacctatcttgtgtttgaagtcatattctgccattaggtggttactgctaaaaaaaaaaaaaaca

SEQ ID NO: 390913 - DNA, 651 bp, Oryza sativa
  unsure (1)..(651): unsure at all n locations
gcgaagtatccaaaccgagccaaaattttgatcgatcgatcggccggccggtgtctttgttgaggcgtgcaaggctcgtgctttcgccgagagggattaattagccgcgcctccagcatctccggcctccatagagatcccagcttataattaaagctgtcaagagtcgttttggttgttaggcttaaagttaactactgctggctagctaggactaagagatccgagggagcagacatggctgctgctacttcgaccatgtccctgcttcctcccatcacccagcagcagcggtggcacgccgccgactccctcgtcgtcctcgcctcccgctgccacaactctcgccgccgccgccgctgccgctacgtcgtgccgagggcgaggctgttcgggccggcgatcttcgaggcgtcgaagctgaaggtgctgttcctgggggtggacgaggagaagcaccagcacccggggaagctgccgcggacgtacacgcttgacgcacagcgacgttgacggcgaggcttgacgctggcggtgtcgcacaccatcaaccgggcgcagctgcagggggtggtacaacaagcttcanggtgacgaggtggttgctgagtggaagaaggtncagggcacatgttgtttacgtccatttca

SEQ ID NO: 390914 - DNA, 610 bp, Oryza sativa
  unsure (1)..(610): unsure at all n locations
cacgcgtccgatttccagcaatatgaacccagcaccaatcttattctaccaagctatctccttccatacgccgcagcttcaagcggaccggttcgcagtggcagcaacgggctaaactttgcggtgaacgcgctcctatccataaacgtggtggtggctctcctcgtcgccttgatcctcgacaacacggtgccaggcagcaggcaggagcgcggngtgtacatctggtcagatccaaactcgctggagatggaccctgcgtcgctggagccgtaccggttgcctgagaagatctcatgctggttcagatgggcaaagtgtgtcggcatctaacaacaaaaacaacaacaggaggaatgaccccccaactgcacattgcgtgccggaggtgaaaggttctatttattctattgcaccctgctggtgtagggatcatatggaagagagagttaatatatacggatgctatttagataggaccatgttgattctgctagctcccgaggatgtctgagcatactaccacttataagttgtaaatgtagtcgttttgttaggaatgattacctatgtattgacaggtctctacgtgaaaagaacttctccgatt

SEQ ID NO: 390915 - DNA, 539 bp, Oryza sativa
cttggcgccatctgttcccgcctcatctcccctctatttaaccaccattgccgcctccgccgcttcccccaaatccactcacctcctccaccgttcgtccccttctcgcgccaccaccgcctgccgccgagagctctctcagccgtcgccatggccaccgctaccaacggcaacgcctccgccgccgccgccgccgctgactccgccgtccaggagcccccgcacaagatcgccaaggttgctcccttgctcaaggtcaagaagctctccgagaacgccgtcctgccgtcccgcggctccggcctcgccggcggctacgacctgtcgagcgcggcggaggtcgtcgtgccggccagggggaaggccatggtgcccaccgaccttagcatcgccatcccggagggcacctacgcgcgcgttgcggcgaggtctgggctggcgttgaagcactcgatcgacgtaagccgccgggggatcgacgccgactaccgtggcccggtaggggtcattctctttaaccacttcgacaccgactttcg

SEQ ID NO: 390916 - DNA, 574 bp, Oryza sativa
  unsure (1)..(574): unsure at all n locations
gtcgacccacgcgtccggctcagtgtcaaccaccacaaccacaagcaagcaagccatacacatcaagaaggcgtctgcgtgcgaggaaatcatccggtttttcaagctaaaagcgtgaagatgagctcgtcgtcgttgagcaagaaggcgtcgtcgttcgtggtgacggcgagcatgagcgcggtggaggcgctcaaggaccaggcggggctgtgccggtgggactacgcgctccggtcgctgtaccagcgcgccgccgccgccaagcaggtcaccggccgcgccgtcccggtgtcgctgtcgtcgcagaccggcggcgcggcggcgtcctcctctcccgccgccgcgtgcggcagggccgccaggtcgaagaggtcggaggaggagaagatgcagaaggcgtatcacctcgtctgctggggacctaattaaaatctgttcttcaaattcgtgatttcgtgtagtagttttttcgtttgcaatttgtccacccctcattttctggtgtgtaaatcgagccaatacctgcagggatttttgtattttgatccgttttcatgtactactacttccn

SEQ ID NO: 390917 - DNA, 661 bp, Oryza sativa
  unsure (1)..(661): unsure at all n locations
ggagcaagaaaagccacgaagctccgggcgaacgaggacgagccggagcagcagcaccccgcccgtcgcgcgcaatggcgatccccaaggtggacctgcgagggctcgagccggggacgccggggtgggaggcggcccgggccggggtgaccgcttccatggtgtcgcacggctgcttcgtggtcgcgcacggcggcttcgggccggagctccgggaggcgctcttctcccgcgccgcgcgcgagcttgttcgcgctcccggcggaggccaagcggcggaacgtctccacggtggggccttacaggggctacatcaccaacacccccgggattgaacttgggagagcctttccacgtcggcgccgccgccgacgccggccgcgtcccggagttcgccggcctcctctggcctgatggcaaccccgagttctgtgacacgatcgtgtcgttcgccaagaagatgacggagctcgagcgggcggtggagaggatgaccctggaggggcctcggcgtcgggaggaccacatcgnctcgcaccctgacgcgcacgacggacgcgtccgcttgtcccgctacggcccgccgncggacgccgcgagcgccatgtncaatggggagcaccgggacgacaccggatcaccatcatcgtgcaagcacgag

SEQ ID NO: 390918 - DNA, 603 bp, Oryza sativa
  unsure (1)..(603): unsure at all n locations
ccacgcgtccggcctgatatttttgcattcggagtggtcatgttggagactgtcgctgggagaccaaacaccgacaactccctcgaggaaagcaagatctgtctccttgaatgggcatggggcctgtatgaaatggatcaagcacttggaattgttgacccaagtctcaaggaatttgacaaggatgaagcttttagagtcatatatgtngcacttgtctgcactcagggctctncgcaccagcgaccgccaatgtcgaaggtcgtgacaatgttgacttgagatgtcgatgtggctaaggtggtcaccaagccaagctacatcactgagtggcaagcttaggggtggtgggtacagcagcaacaccactagcagctacgcatggtctagcaaccctaagttgagtaggcaaaaagagatcactgaagtttctctccaggtgaggtgaatttaatgtagaaaatctatgggccatcaaaattggtttcaaatgacgatattgtaactccttttttttacataattttgtaattttgtgccgatgtaagctattgcaaacaatgcaattacttatcctgaatctttcctggtaacaaaagacgg

SEQ ID NO: 390919 - DNA, 761 bp, Oryza sativa
aaagtgccaaacgatcgatcgatctctgcagtctgcagattagcccaccacctccagcatcgggtccacgaatgcacaccctgtcaacttccactccacccgctttttctttcccttctccccgccaccttcacaatctcaaccttttcctctccctctctctctctctctctgatctcgtcggcgccgtgttcatcaatggcggacttgggcccaagacgataccggagaacaccaagactggtctcaagttacccatatacgtcaagaacatccacaaaggcaagcatggaagcgattcaggcgtgtatgatgcgaatggaaggtttgtcccagaaaagttcgaggaaatattcaagaagcatgctcacaccaggcctgatgccctaacagacaaagagctgaaggagttgctccaatcaaacagggagcctaaagatttcaaaggatggttgggtggcttcacagagtggaaagtattgtactacctctgcaaagccaaggatggatttcttcacaaggatactgtcagggcagtctatgatggaagcctatttgcaaagatggagcaagagaagcagtctgctaagaagaaatgataagaccatactgggtgctgtaattatctgttattgttgcaggtgattgtaaattacggtgtgggtgtgaatccaaaattattgctgtagtttgattgcgcgtgtttgttgacccgttcctgtaacaagaagctatttgtgaagttattggaagtgtttgtc

SEQ ID NO: 390920 - DNA, 576 bp, Oryza sativa
  unsure (1)..(576): unsure at all n locations
ccacgcgtccgaccaccatcagccaaagtgccaaacgatcgatcgatctctgcagtctgcagattagcccaccacctccagcatcgggtccacgaatgcacaccctgtcaactccactccacccgcttttctttccctctccccgccaccttcacatctcaacctttcctctccctctctctctctctctctgatctcgtcgttctccatggcctccaaacccgcggacgttacggctacaggtggcggcggcgtcgccgtcgtccgtgacaacaacaacaacgccggcggcggcgaggcggaggtgtaccgctccgagctgacgccgctgcagaagcacgtcgccttcttcgaccgcaacaaggacggcatcatctacccctccgagacctaccaagggttccgcgcaatcggggcaggagtcgtgctgtccgccgtcggcgccgtgttcatcaatggcggacttgggcccaagacgataccggagaacaccaagactggtctcaagttacccatatacgtcaagaacatccacaaaggcaagcatggaagcgattaggncgtgtatgatgcgat

SEQ ID NO: 390921 - DNA, 562 bp, Oryza sativa
  unsure (1)..(562): unsure at all n locations
gcgccgggcgatcaactccggcgacatgggcaccgtcaccaccgccgatccgcacgcctccttcctcgccgacaagggcgcagnggtgttcgtcgccggccaccgcggcctcgtcggctccgcatcctccgccacctcgtctccctcggcttcaccaacgtggtcgtccgcacccacgccgagctcgacctcacccgccagtccgacgtcgaggccttcttcgccgccgagctcccccgctacgtcgtcctcgccgccgccaaggtcggcggcatccacgccaactccaccttcccggccgacttcatcgccgccaacctccagatccagaccaacgtcgtcgacgccgcgctcaaatgcggctccgtccgcaagctcctcttcctcggctcctcctgcatctaccccaagttcgcgccgcagccgatcccggagaactccctcctctgcggccccctcgagcccaccaacgagtggtacgccgtcgccaagatcgccggaatcaagatgtgccaggcttaccgcattcagcacggcttcgacgccatctcggccatgccca

SEQ ID NO: 390922 - DNA, 593 bp, Oryza sativa
gagaaacttatcaggcgctaccaagggagagaggtttgaagtttgcccatcatgattgtgacatttttatgttagtgccataatttctagtgaatgttgtccccctatgttgattgtgctagtgtgttggtgtagtctttgtggatccatcgtaggttcctctcacaatggtggatgaagttcttgctcagcagtgaggaaacagagtgtgctgcaggcacatcgctggtggatctcttcctagtccaggagatatacctcctgtcagactgcctgaatgcccctgcccgatgaatttggtgaggcatgtgtccaatctgagcttgcagccctctacattctctggatatcaaagcaagttccggctgtgaaactaaagcttggaggaaaggctacattcgttggggagcctggaggatgtgttagcaagggcctgcccggagagaagtagattgtggacgcatttgatagcttgactattgaaagcagaacaaggacatgcattgtagcaatatgtggtactcatatccaacggaaaacgacgcttggaatacaaccatttctgaggcgactagacattttgcacgactcct

SEQ ID NO: 390923 - DNA, 585 bp, Oryza sativa
  unsure (1)..(585): unsure at all n locations
ggggttaaangctttaggaccccggngggccccccccngggggtttngtttccnggnggcccccggaanttttttccnnacccggggggttttggaanttcnggnagggnngagccgttgttnacngcgcagccgggtttttgtccccccanttnttttccaacccntttttcgagaagcggcgcccggcgctggtggatgcccccggtgcaggcggttggtgacgggccccgctntttttttttcatcgaggtgctgcataggttgttcgggtacgagccgacgccggggttctacaagcgcgtccaggccgggggcgcggcgatgcacaacgggccgccggcaccggcgccggcgccggagaagaaggaggaggaggagaaggagaacgtgagcaaggcgacgcaggaggagagcgccgagaaggattcgtaggtgttttcgagggagagtgtgacagacaggagaggcagagctcgggatgttatgaacttgtaatagcttgttcatgtatagtagtagtataataataatactaagaaaataaatgagtttaattttacaaaaaaaaaaaaaaaatatnnn

SEQ ID NO: 390924 - DNA, 559 bp, Oryza sativa
  unsure (1)..(559): unsure at all n locations
ttcgcaacatgaagtaaattaaaggatatcattagtgaaggtgtctcatgggaacttgttcggatttcaagggattgttctcgtgaggacataaggatgctagcgtaccggacattgacttccagccccactcttcaatcagagatgagaagatggcgcatagaatgctgataaccgactatttgctgctggttcactgcttggttttacattccgccctcacaatcaaggtgccattgcgccaagagctggcaatcaggcatataggtcatgatttacccaatttttgcaagcgtatgggaacctgagttttcatctcgacaggtcccctgtctcctcaagagttttatatttntcgtgtgctggctgctgagaangtgaaagtctgggttgcaattgatttattcattatgggtaggggttcgtattttacgtngtttgtaaaaaatgttgtaaaaatatcagcaaggccaaaaatgagagctgtatcacttagagaccgagagacagcagataggtgtagatttggccatgaatcataatacttgtattcattata

SEQ ID NO: 390925 - DNA, 851 bp, Oryza sativa
gccgccgcgtacttgcccggatcaagcagagcagagcagcggcaaagcaagtgatctctttagctcggatcatctctgcatttgcatttgcagctgctcgtcacggcaatggcatccaccaacagctggacccacgagatcgagtcgccggtggccgcgccgcgcctgttccgcgccgccgtcatggactggcacacccttgcccccaagatcgcctcccacatcgtcgccagcgcccaccccgtcgacggcgacggcagcgtcggcagcgtcaggcagttcaacttcacctcagccatgccattcagccacatgaaggagaggctggagttcctggacgtggacaagtgcgagtgcaagtcgacgctggtggagggcggcggcatcggcaaggcgatcgagacggcgacgtcgcacatcaaggtggagccggcggcgaacggcgggagcgtcgtgaaggtggagtccacgtacaagctccttccccggagtggaggtgaaggacgagatcaccaaggctaaggagtccctcaccggcatcttcaagaccgccgaggcctacctcatcgccaacccggacgcttacaactaaatcgtcatcatgcctatgcccccaaaatatgtttgataatatttgatctttgcgagtgtgtatgatcgaaataaagctgcttccaagcagtgattgagaagtgagcagcgagaagcttggtgtgtggtttggttgctgtcggagaatggttttgtttgacatgatgctgtcaacaccggctatgttatgtatctatctagcatctacctgttggttttgcgtgggaataaaaacatactataaaagataatgagctcgg

SEQ ID NO: 390926 - DNA, 645 bp, Oryza sativa
  unsure (1)..(645): unsure at all n locations
ccacgcgtccgcccacgcgtccggattaaatcaaccaaaggtgcccaaaccagaagaggatcctctatggggttctatagctgctccagcacccaaaaatgcatcgaagtcttcagacatcaaaccttcaacgtcgcacaatgatgacgatgacctctggggttcgatagctgcacctccaccgaaatcagctgggaagcccttgaagccaccagcagcagcaaacagtgacgatttatgggggtgccatcgctgccacccccaccatcaaccaaagctagacctctagcttcatcaggttaggggtcgaggaacaaagccagctcagccaaagcttggcgcacaaagaataggcaggacgtcttcaactgggatgtgaagcgccatcgtcatacaagtgttgtacaaggatgaatttttcttttctttttttttctttcgctttctgtcgagaatattcccattttgtaaactagcccaatcatttatatggacatgattatgcccaatgtattatttcacaattgtgtattacgatagcttcaggatatatgtacatcacaggagtgaccttcaattgttttcatcaatatattggttttgcnttttgttntnnnnnnnnnnnnnnnnnnnnnnnnnnnnnnn

SEQ ID NO: 390927 - DNA, 718 bp, Oryza sativa
ccacgcgtccggaagaagatgatgacaaggttagtgatcatgatgttgaggggggagaagaggattttgattgcagtgagcctgggagcttgcataggtgcagctggatcaccaagaacagtgatgaggcgtacgttcagtttcacgacgagtgctggggtgtcccagtgtacaacgacaaccgtctgttcgagctgcttgcgttgtcaggcatgctcatcgaccacaactggactgagatactcaagagaagagacatgtacagggaagcgttcgcggacttcgatcccagcacggtggcgaagatggacgagaacgacgtcgcggagatcagcggcaacaaggagctcaagctggccgagtgcagggtccggtgcatcatcgagaacgccaaatgcattcagaaggtggcgaaggagtttgggtcgttcagcggatacatatgggggcacgtgaaccaccggccgacggtggggaggtacaagcaccacaagtacatcccgttccggacgcccaagtcagaggcggtgagcaaggacctcgtccgccgcggcttccgcctcgttggccccgtcatcgtctactccttcatgcaggcctccggcatcgtcatcgaccacctcgtcgactgcttccgcttccctgaatgccgaccacctcgaccgaccgctacctggggcattaccaacgtcgctgcctaatgcacaaaaaaaaaaaa

SEQ ID NO: 390928 - DNA, 654 bp, Oryza sativa
gagagagaagaggaagcaagcggcggcggcggcggcggcgatggcgacgtcggcggggttcctggcgcggcgggcggcgcagaaggagagggtgcggctgctctaccgccgcgccctcaaggacaccctcaactgggccgtccaccgccacctcttctaccaggacgcgtcggatctcagggagaagttcgaggcgaacagagatgtggacaacccggatgtgatcgataggcttatcgatgatgcggaagcgcagtacaggaatttccagcatcccgatccctacattgtcccatgggctcctggtggcagtaaattcacaagaaaccctcctccacctaaagggatcgagattatctacaactatggaaaagaagactgatgaacaggagccctgctgcatctaggagcagaacttagcacctccagggtgcaaacaacttaatttccctttttccagttgataacgtgcaatcgacatgttgtatgatcaataagaacgaagccactggtctgtcacccttttgtttcgtttttccatcagctagtgcattgttgttacatacacatcgctatgcctatgcatcatttatctttcagtcaagcataaactgcttaatgtgttacgttcgattgatccatccaacctacttg

SEQ ID NO: 390929 - DNA, 580 bp, Oryza sativa
  unsure (1)..(580): unsure at all n locations
ccacgcgtccgtggagcactagaaaatgtcaaggaaactttgaaggaactagtgatgcttccgttgcaaaggcccgaattgttctccaaaggacaacttatgaagccatgtaagggaatattgctttttggcccacctggtacggggaagaccatgcttgctaaagctgttgcaacagaggctggcgccaattttatcaacatatcaatgtctagtattgcttcaaagtggtttggcgagggtgagaaatatgtcaaagctgtgttttcacttgcaagcaaaattgctcctagtgtcatttttgtggatgaggttgatggcatgctgggtagaagggagaacccaggggaacatgaagctatgcgcaagatgataaatgagtttatggtaaattgggaatggtctgagaacaaaagataaagaacgcgtattagtacttgctgnccaccaatagaccattttgatcttgatgaagctgttgttaggaggctccccaggaggttganggtgaattgccagatgcatccaataagaaaaaagattcttaatcgttaatactgggncaaagaagattttgggc

SEQ ID NO: 390930 - DNA, 465 bp, Oryza sativa
ttcagagtttcagacaccaagagcatcttgtaccacctacgcagagttttgtttgcttgcttgtttgcttgtcagtgtccagaatggcagcgagggtggcgtggatcggcgcggcggcggcggtggtggtggtggcgctgatggccggtggcgcggcggcgcagcccgccgtcgtccgacaagcgggtgcacgcagacgctgctgagcatgtcgccgtgcctcaactacctgaccgggaacgagacggcgccgtcggcgtcgtgctgcggcaagctgggcgaggtggtgaagtcgcagccggagtgcctgtgcgtcgcgctcaacgccgacacggcggcgctcggcctcagcatcaaccgcacccgcgcgctcggcctccccgacgcctgcaaggtccagacgccgccggtcagcaactgcaagagtggcgctgctgctcctactgcgggacagacgccgacgac

SEQ ID NO: 390931 - DNA, 494 bp, Oryza sativa
ccacgcgtccgttctccttgaatcttgcctccaaaaactcttgccacttagcattcacaatgctcaccacatcatcacatagcaggcaccaccatgcatttgagaggagccccaaccacagcatgatgaagaacatagcagacaggaacaagcatgatcttcttcagagtgccatgaaccatgcagcaagcaagtacatgcagaggatctaccctctggggatccagaggagcagctccaacctcacactctcatcactctccctgtcacagaactccaatgattcttcactcagcagctcaaactctagctgggagcccaaggtgcccctgctgtatggtggcacatttagcccctggggtgatgtgcttgtgtccctggagaggaggagggaagaagatgatgacaaggttagtgatcatgatgttgaggggggagaagaggattttgattgcagtgggcccgggtgctcacgctacatgcagctggatcac

SEQ ID NO: 390932 - DNA, 519 bp, Oryza sativa
  unsure (1)..(519): unsure at all n locations
ccacgcgtccgaaacctagctagccagtaagtccacaatggcaggcactaaacttgtagctctcgcatttattgttcttttgagcattgggttagccaatgccgcgagagtagctagatactcgaatgctgaaggaaatggctcgggacagggcgggggtgtcggatacgtgaatggtggtggctcggggtctggaagtggtgctggggctgcacagagcggctcaaatggtgcccacgctactgctggaggtggaggtggaggtggtggcaatagccaatacggtggatatggggcgggtggtggatcccgcgttggttcaagctctagtcagtatgctaccgggtattattctggttatggtggttactctagcgctggaggtaacngtggaaggtggtggtggaagacaagcttgnggtaacctggggatctagtggttctggtgatggcagtggtgcttgctctggctctagttcggccaacacatactatggtggaccgagttacgcgaatgct

SEQ ID NO: 390933 - DNA, 358 bp, Oryza sativa
agaagaacaagacgaacacgctctcttccaaagctgaaagcatgggttcgactcgcctcctcgtactgctcgccgccgcttccctcctcctcgccaccgccgtcccggcagccagagcacaggaagagactgatcacgaggaggagttcacgtacatcagcggcgaccagaaggggcccgagcactggggcaagctgaagccggagtgggcgcagtgcggcgccggcgagatgcagtcgccgatcgacctctcccacgagcgggtcaagctggtgcgcgacctcggctacctcgacgacttctaccgcgccgccgaggccttcatcgtcaaccgcggccacgacatcatggtcaggtt

SEQ ID NO: 390934 - DNA, 697 bp, Oryza sativa
  unsure (1)..(697): unsure at all n locations
cttgnattacttttgacagggtgattccaaaagcactcatgcccaccgagatatcaggtgcaagtgttggagaagtgaaaattgtgtctgacatgcatgagaggaaagctgagatggcacgccaatccgatgccttcatcgctcttcctggagggtatggaacaatggaggagttgttagagatgataacttggtcacaacttggaattcatgacaaaccagttgggttgctgaatgtggacggttactatgatccgttgcttgcgctatttgataaggctgcggcagaacgatttattaaggccgattgcagacaaataattgtttcggcaccgactgcgcatgagctgctgagaaagatggagcaatacactcgttcacaccacgaggtagcgccacgtacaagctgggagatgtcagacctcgcttatggaaaggcaccagaggaatcgtagcataatctgccaatgtgacattgtctctgaaggagaattgcagctgctccttttatctgccattttggttaccttatcgtgttacctgtccagtcaacttcatccggtgaagaagatgcataagaaaatatgtacctaccctacgatttcctgtgggggaatgaacgcatggatatagtcccgataatatttcctgccttacataaattaagaggcatttgagcaacagaatccgcgtgttt

SEQ ID NO: 390935 - DNA, 582 bp, Oryza sativa
taataaatctgttgcataagccctctccctgcttccgccttgttcaataatcaatatactcttctcctcgatctcttctcttgtccatctccaataattctccatgtacgccgccatgtacccggagaccttcggcttctctgcttacccccagcagcagcagccgccgcccgacgccgcctcctgcatctacaccaccgccttgccgctcatcgccgacccgcctgacatcctcggaaacatggcacaaccatcctttctatcagagtatgaccttggaggggaaggggacctgttcaaagctcctgaacccatcattgaagaaccagtgcttagccttgatccagttgcagcagccatttcgatgatgtctggcagtgagaacgtaatggatgaaactatagaggttgcagatatcagcgacattcagaatgactctcttttaagcgaagtattatacgagtgcgagaaggaactcatggagaagtccgcaatcgaagagactatttctgaactgctggacgtcaagattcctatgctgcaagtggaagagttccctagggaaacccaagtacaactacc

SEQ ID NO: 390936 - DNA, 799 bp, Oryza sativa
  unsure (1)..(799): unsure at all n locations
tttcaccgcggcgtctctctctctctctcctcccccacccccaaccaccacttcctccatcaccaaagcgccgctccctcgccgtcgccgccacctccgccgccgccgccggtgccggtcgtcgaggcgggaggactcctccccgcgcgccgcgctcgatccgtccgctccccagtacgcccgagggcagtgatactctgctgcttagttgggtgcagtgtgcactacaagtctacaacaatggagcttgacagtctaagagaggcgtttgatcgagttattgaaaaacgggcttcctcttctgctaaagctcaggaagttattgatcagatagtgagtgaagttgagcaggcaatcacgaagatgcagatgatgaatacagattccatgggtactgctgaccattcatccatcctggcagaattgaaagccaagttgaatgaattggcgccactaaatcaactagaaggttgtcaaaaggaattgaatgttgcacttagcaaatatctcaagctgctcgagaagtctttcagtccagacatatcgaaagcatatcgaaatgtggattttgaggccagtactataaacagcataatagcaaatcatttctaccgccagggcctttttgatcttggagactcatttgtccgtgagtgtggtgaatcagatggggcacacttgaaactacaattccaagagatgtattcaattcttgaagcaatgcaagttagaaacctncaacctgctctcagttgggctgccaagaaccatgatcagcttttgcagaatggttcaaatg

SEQ ID NO: 390937 - DNA, 680 bp, Oryza sativa
  unsure (1)..(680): unsure at all n locations
cgcgtgcgcttaacccaacccaacccaaacaccaccatgagcagggggaggagcaggctgagctggctgtggagggcgccggcgagggcgctggggagggcgcgggacatgtacgtgcggnggatgacggngtgcgcgcgctgcgtgccggcggacgccgcgttcggctacccggtgttcgtgccgtcctccgccgccgcctcgatgaggagcaacagcttcgggtcggactcgcggttcggcggcggcgccgacgacgacctccgggagctgatccgcgcggcgtcgcanaggcgcgccgcggagcaagagcgggaggcgcgggccgtggccaggagccagagcatggcgtcggggatctccatggcgcggatcgacgaggacgcgccgtgcgaggagttcggcgacgccggcgtgatgcactaccccaggagccagagctgcgtcggcggcgtcggcgggnggatcgctcactgtcacaggaaggtggcggccttggcctgagctgctgcccgccggtcgtgctcgcgacggtgttcatcgccattaatggtcttctctggaggtctagtagccattcaaactttgggattttgcgtttgtaaatatgatttttgttgagaattcgtgagtcgtaattgctatttttgctgctgcnnnnnnnnnnnnnnnnnnnnnnn

SEQ ID NO: 390938 - DNA, 491 bp, Oryza sativa
ccacgcgtccgctcatcgtaaaatttgcagctcgtataggacagtaaacgaagaaaccatcgtcgtacgtcgtccatgtctgacgcccctcccatggccgagaaaccaactatcaaggtggagacgacgccgggagactggaggttcccgtcggccaaccagaccaagcgatgcttcacgtgctacatcgagtacaacaagtgcatagaagccaagggtgaagggtccgacgagtgcaccaagtatgccaagtgctacagatccctctgccccggggaatggatcgagaggtggaaggagcagagggcaaacgggactttcgctgggcctctctgaaacggggacagcgaccgatcgatcgaccatatctctacatatatcgatcggctacagctaataataccaatcaatcctgtatgcaatgtcgtctcgatcgtcagggtgaagcctcgtcgtgacactcctagctagtattatgtacactcatgaca

SEQ ID NO: 390939 - DNA, 654 bp, Oryza sativa
tttaggaatctcttctctatagttattagtattactcctaccacggaggtctatttagcttagctagtgttagcgagctccactgccagatcaagaagaagctagagagagagcagaggagcaagcagatcaagaagaagaagacgaggaagatgcacgccaagacggactcggaggtgacgagcctggcgccatcgtcgccgccgcggtccccgacgtcgcgcggcgggcggccggtgtactacgtgcagagcccgtcgagggactcgcatgacggggagaagacggcgacgtcggttgcactcgacgccggcgctgagccccatggggtcgccgcggcactcggtgggcagggactcctcgtccagccgcttctccggccaccccaagcgcaagggcgacaagtccagctccggccgcaagggcgccccggcggggaaggggtggcaggagatcggcgtgatcgaggaggagggcctcctcgacgacgaggaccagcgcaggggcatccccaagcgctgcaagtacttcctcatcttcgtcctcggcttcgtcgtcctcttctccttcttcgccctcgtcctctggggcgccagccggtcccagaagccacagatagtcatcaagagcatcacgttcgacaacttcataatc

SEQ ID NO: 390940 - DNA, 922 bp, Oryza sativa
  unsure (1)..(922): unsure at all n locations
cacacaagctagacaccatgttcgacgatgtgtctgaatgtgaaattcattgggaagatcttgtgattggtgaaaggattggcttaggttcatatggagaggtgtaccgtgctgattggaatggaacagaagtagctgtcaagaaattcttggatcaagatttctatggtgatgctttggatgaattccggagtgaagtgcggattatgcgtcgactgcgtcatccaaatattgttctcttcatgggtgctgttactcgtcctccaaacttatctattgtatctgagtatcttccaaggggaagcttatataagatccttcaccgtcctaattgccaaattgacgagaagcgtagaattaaaatggccctttgattgtggccaaaggaatgaattgcctccatattagtgtaccaacaattgttcatcgggatcttaaatcaccaaacttgctgggttgacaacaactggaatgtgaaggtttgcgattttggactttcacgcttgaagcacagtacattcttatcatccaaatccactgctggaactccggagtggatggcacctgaggtcttgcggaatgaacaatcaaatgaaaagtgtgatgtttacagctttggtgtcatcttgtgggaattagcaacacttaggatgccatggagtggaatgaatccaatgcaagttgttggggcagtcggcttccaggacaagcggctcgatattcccaaggaaattgatcctctagttgcaaggatcatatgggaatgctggcagaaggatccaaatttgcggccctcgtttgcacagttaaccattgctttgaagactgtccaaaggctagtaaccccttctcaccagtgagncccagagccctcctgtgcctcaagaaatatgggtgaattcttccaccccttggatgttga

SEQ ID NO: 390941 - DNA, 487 bp, Oryza sativa
  unsure (1)..(487): unsure at all n locations
tcacccctcaaggcttccgtgacttgctactttatgttaaggagaactatggcaatcctaccgtctacatcactgaaaatggcgttgatgaattcaacaataagaccttaccactccaagaagccttgaaggatgacgctaggatagaatactaccacaagcacctcctttccctgctaagtgctataagggatggagcaaacgtgaagggatactttgcatggtcgctgcttgataacttcgagtggtcgaacggctacacagttcgatttgggataaacttcgtagattacaatgacggaaggaagagataccccaagaactctgcccattggttcaagaagttcctcctgaaatgataaaaaagcaccattgcactcattgcttttctcattgaataataaaagagtatatgttttgcgtgaatttggtacaagagatggaagtaatccagttaaataataaatccctctcttactgcananna

SEQ ID NO: 390942 - DNA, 605 bp, Oryza sativa
  unsure (1)..(605): unsure at all n locations
cggacntgngngcntccaaacttccttggcacaaaatttataatctatgacacacagccctcttataatggggctgtaatccctcctgttggacggagcagccgaagattcaactccaagaaagtgtctcctaagatgccgtctggtagttataacatagctccggtgacatatgagcttaatgttcttggcaccaggggccctaggcggatgcactgtgtcatgcactccatacctgcctcctcagtcgagcctggtggcattgtccctggccagcccgagcagattgttccccgagctttcgaggagtcatttcgcagcaccacctccttttctaagtcatccatcatggatcggtccatgggatttcagtagttcccgtgatttcagcagtgctcgcttttcagacattgctggaggcaccataaatgggtgatgaagaggggcaaaataaggagaggccactagtgcttcgcaacaaggcccctaaggtgggcatgagcagctccaatgctggtgccttaatttccggtgggcgtgtaaccattgcgtcggtaaagaatttccagttgattgctgcaccagcacaggnctcccgcaagggc

SEQ ID NO: 390943 - DNA, 1121 bp, Oryza sativa
ttcttgttacatacacttcaaggctcctctcagaacaattcaactgagccttctgctagtgcatcagagcgtcgaaggaatgctgcacgaaatgcagtgctcgctaatccaaggattaatgctctttttgaccacttcaagatggccttggattgtttctttgctgtgtggtttgtcgtaggaaatgtgtggatatttggcgggcgttcttctgctgccgatgctccaaacttgtacaggttatgtattgtgttccttacctttagttgtattgggtatgccatgcctttcatcctctgtgcaatgatatgctgctgcctgccctgcatcatatctgttatgggatttagagaagatacaaacaatacaagaggggctacctcagaatccatcaattctcttccaacatacaaattcaaaaccaagaaacgccgtcatagttcaggaaatgaagctgaaggccaagatggtgggatagtagctgcagggactgacaaggagcggtcactatctgctgaggatgctgtttgttgcatctgtcttgcaaagtatgcacacaatgatggagcttcgtgaactttccctgcacacattgtttccacaaaggaatgtgttgataaatggctgaagattaatgcactttgcccattgtgcaaatctgagatagcgagctcatctggaacatctgatactcgtcgctctgaccacacagatattcctgtgcaggagattgaaatgcattagggtgatctgctttctgaggtaatacggcagaatacagttacttgtggtgaccgtgtgcttgtataaagttcaagctttgatatgtggattgtaatgatgcatggggttatttttgttgctgttattttggagaagacagttctcactgtcaacatacacgaggaaatatacaatatctactcgttccatcagagtagtaccctgtgttctgtggagtttgcactagagtactgctactttctagtggaaaagaagtcgaccaggccaatatatctggatgacttcagcaagctttcctattgtactacgcttgcagaaatggcaataactgaaattagaggtggatattgctatcaaaagtggtacgtgcctttgat

SEQ ID NO: 390944 - DNA, 532 bp, Oryza sativa
  unsure (1)..(532): unsure at all n locations
ccacgcgtccggcagatgaagtcgctgatcttgctccccttctagctttctctattttgttgaatagtgttcaaccagtgctctcaggtgtcgctatcggatcgggttggcaaagtgtagttgcctatgttaatgttacatcgtactactttattggtatccctcttggtgcaatactaggctatgtgctaggatttcaagcaaagggtatttggatcggcatgcttcttggaacactagtccagactcttgtgcttctattcatcacacttaggaccgattggaaaaaacaggtagagattactcgagagagattaaacagatggtatatggatgagaacggacgatcacagaattcaataggaaatgcatgatataaaacttctgcacacttgtaaagaattttgatgatttatgaatcaacctgtcaaaatgggattgtgctcggatttaagattttcaaggtttgaactttcaaaaaataatcatcaaggtcacgtatccaccaaaaaaaaannnnnnnnnnnnnnnn

SEQ ID NO: 390945 - DNA, 550 bp, Oryza sativa
ccacgcgtccgacactacaaaccaatcagttaatcccaagtatataatcctaataaaatctcgccgcgacgatgaagatagtgctcaaggtgccgatcacctgcaagaagtgcaaatcctgcatcctgcagatcgtctcaaggaacaaaggttttgtcactagttgcttctcttcctagctttcatcaccccatacaatgcactactgctcatcgccgtcgatggttgttggtggcaggggtcaagtcgctgacgttcgacgacgagaagagcacgctgacggtgatcggggaggtggacgtggtggtgatcgtggacaagctccggcacccgaagaaggggaaggagaagagggaggggtacatggtggaggtgatggcggtgagcgacgagaagaaggaggccgaggagaagaagaagatggacgaggaggagaagaagaagaaggagatggagaaggaggaggaagagatgaagaagaaggagtgcgccgagaagctcaagcagtgcgccgagctgcagcattgctgcatggcgtgccgtctctact

SEQ ID NO: 390946 - DNA, 1548 bp, Oryza sativa
  unsure (1)..(1548): unsure at all n locations
ctctctctctctcccttcgctttctctcttccttcctagggcttcccctcctcggcggcgcatcgcataggcggcggacgaagagctcccggcgatgggcggcgacaaggagaacctcgacctctccgacctcaacgcctcgctgcccgccgccgccgccgctctcagcgccgaggaccgcgccggcctcgtcaatgccctgaaggataagctgcagagcttggcgggtcagcacacggacgtgcttgaggcgctctcccccaatgtcaggaagcgtgtcgaatatttgagggagatccagggccagcatgatgaaatcgagttaaaattctttgaagagagagctgcgcttgaagcgaagtaccagaagctttatgaacccttgtacacaaagaggtataacatagtaaatggagttgttgaggttgatggtggaaatgacgaaccagccagtgaaaatgctgctgaggctaaaggagtcccagatttttggcttactgctatgaaaacaaatgaagtgctttctgaggagatccaagagcgtgacgagcctgctttgaaatatctgaaagatatcaagtgggctagaattgacgatcctaagggtttcaagctggattttttctttgatacgaaccctttcttcaagaactctgtcctaacaaaaacgtaccacatggttgatgaagatgaaccaattttggagaaagcaattgggactgaaattgagtggtatcctggtaaaaacctgacacagaagattctaaaaaagaaacccaagaaaggttcaaagaatgcaaagcctattaccaaaactgaagtctgtgagagcttcttcaactttttcagtcccccgcaagtacccgatgatgatgaggacattgatgaagacactgctgatgagcttcagggtcaaatggaacatgattatgacattgggaccaccataagggataagatcatcccacatgctgtttcctggtttactggtgaggctgtgcaagccgaggattttgacgatatggaggatgatgaagcagatgctgaagacgatgatgaagatgaggaggaggaagaaggaggatgaggatgaagacgaagacgatgaggaagaaaaaaagcaagccaaagaagaagtcggcaggcaaaccgaagctaccatcgaagggcggggcacaaggaggtgctgatcaaccagcagattgcaagcagcagtagaactgttgtggttcacagcgccacgtgagctgtttgttattttgttgatgcagtattttgcgttgaactgcccaggaaattattggttggttgtgcacgggtgaggtttcgttgctggtatatgttacccgtggttttattggcgaagttgtgaggcctgtctggaacatctatattagagtattattatgttttagttatatgtaatcggtttattaagtttgtgtaattatctggaatctgccggtggaacttttactagtattcatttgagccttatggaaaaaaaatgaaatatgtcttatggaaaaaaaaaaaaaaaaannnnnn

SEQ ID NO: 390947 - DNA, 641 bp, Oryza sativa
aagaacctaacatcaccacccccgacgccggccacccctccccgccatcccgcctcctctcgaagcaccgccctcgccgcggcgctgctgctccccgcgcgtccctgcatcctcctgctcccccgcacagccagccccgcctcaacctctgccactgctgcggtgtgcgcttcccgccggcgccgccgggggccaagcgccgaccggtccgccccctccggtccctctggcgcgtcgtcctcctctgcacggaatgcctctccctcgtccgctccgctgcagtttgctcctactgcctctccctcgacaacctcccgcccgaggactcctctgtcacttgccgatgctgcaaccgctgcgtccacccctactgtatcgcaggtgagcatcgcgccgccctaatccagcccatcgatgtggagaatttcatctgcgtcgattgctgcccgaccgtcaagccgggtggaaaaaatgggggcgcctcttccgtgcatatgctgcaggcagtcgccagggagccgaggaagggggatatcgtggctgaatcaaaagagaatgctgtgaggaaagctatggaaatgaagctggctttcaagcgtgcgaaaggaagcgttggtctcttgctgctgtggttagggatc

SEQ ID NO: 390948 - DNA, 820 bp, Oryza sativa
tgcacctctatcgagtgacacacaaagatttatgaatatatgtcttggtgtaccagtaggtcaaggctatggattgacagagacttgtgctggagcagccttttctgaatgggatgacacaagtgtgggccgtgttggtccaccccttccttgttgctatgtcaagctcgtttcatgggaagaaggtggctataaaatttctgattctccaatgccccgaggagaggttgtagttggtggatacagcataacaaaaggttatttcaacaatgaagcaaaaacaaatgaggtctacaaggtagatgagtcgggaatgcgctggttttacactggagatattggccagttccatcctgatgggtgcctcgagatccattgataggaaaaagggtatagtaaaccttccagcatgggggaatatgtgcctcttggcaaggttgaatcagctctaactactagcaattatgtggacagcataatggcatatgctgatccatgtcataattattgtgtggcgttggtagtgccggcgcaccaggccttagagcagtgggctcaaaattctgggatcaactacaaaaactttgatgagctgcgccacaatgatcaagccattaaggaggtccagcaatctctatcaaaggctgcaaaagcagcgaggcttgagacgtttgaaataccagcaaagattgtgttgctgactgaaccatggactccagagtctgggctggtgacagctgcacttaaactgataagggagcaagataagaccaaattcgaagatgatctgggcaagctctatcactgaatcagctatgat

SEQ ID NO: 390949 - DNA, 428 bp, Oryza sativa
  unsure (1)..(428): unsure at all n locations
agacacggcccttccttctcctgaatggtcttcggatcatatagcactcttggcagaattccggtgcaagcctagaatcagacggtgacaccttaggtcgcgaatagatggttaacttcagcacccatgcggtggaacattcttccatggtgtgtgggacttgaggagggatggacgaaagcggatcctcggggaaggaccaccagcaccagcaggcttagggtagtggcctcatgaaagggaggcttgtaatgttgattacctcttacatttccaactcatgatgtttttaagcggccccattgtaatatcactttctatagaaggaaagatctcctgagagagagacatttttatgacagattcagatgccatcatggctaggccatttcaaattttcaatcccttctcttctagtcctnnnnnnn

SEQ ID NO: 390950 - DNA, 718 bp, Oryza sativa
  unsure (1)..(718): unsure at all n locations
ctccaactccgactccaactccgcctcgtcatcgacttcatcgctgaaanctgggactgccttacctcagtgcgtacctcaactcgataggaagtaacttcacacaaggtgctaactttgcaacggccgggtcgtcaatcagaaggcagaacacatctttgttcctctctggtttcagccccatttccttggacgtgcagtcctgggagtttgaacagttcatcaacagaagccagttcgtctattacaacaaaggtggaatctacagggagctcctacccaaggctggaatacttctctcaggcgctctacacattcgatatcggccagaatgacattaccacaggcttctttcataaacatgacctctgaacaagtcatagcttacatccctgatctaatggaaaggctcacgaacataatccagaatgtgtacggtctcggaggaaggtacttctggattcacaacacggggccgatcggctgcctgccttacgccatggtgcaccgccccgacctcgccgtcgtcaaggacgggtccggctgctccgtcgcctacaacgaggtcgcccagctcttcaaccagaggctgaaagaaaccgtgggccaccttcggaagacccacgccgacgccgcgttcaactaccgtcacgtctactccgccaagtacangctgatcagcgacgcccagaagcttcggatggatgacccgatgctg

SEQ ID NO: 390951 - DNA, 1168 bp, Oryza sativa
  unsure (1)..(1168): unsure at all n locations
ccacgcgtccgcccacgcgtccggtcgagtgccaatgtgaattgccagagtcatacgaagcttataggaagcagcagcatcggtggcattctggtccaatgcagctattcagactctgcttaccagacattatcaaatgcaagattgtgttttggaagaaagccaacttgatcttccttttcttccttctccggaagctcatactaccattctactctttcacgctcttctgcatcatcctcccaatgacgatgtttgtgcctgaagccgagcttcctgactgggtcgtatgctacattcctgccctgatgtccttgctccaacatcctgccttctccgaagtctttccctttcatcatcccatacctacttttcgagaacaccatgtccgtgacaaaattcaatgccatgatctctggtctgttccagcttggaaatgcatacgagtgggtggtgaccaagaagtcaggccgatcatcggagggcgacctcatttctttggcacccaaagagttgaaacaccaaaaaactgaaccggcgcctaacctcgacgctattgcaaaggagcagtccgctcctagaaaggacgtaaagaagaagcacaaccggatatacaagaaagagcttgcactctcattgctcctcctaaccgctgcagctcgcagtttgctctcgaaacagggtatacatttctacttcctcctgttccagggcatatctttcttgttagtaggccttgatctcataggcgagcagattgagtaaactgtgaaaagcatgatagatgttaaaaaaacagtgacaatggagggtgctccagggatgttgtgtcgaagctctttggcgatattgaaatgttgcatgacgcaattgtgtcgtccaattgatttatgtcacgacttcacacaacatgatccacaatgtacacgcccaaataggcccctcccccctcggttgtgtagatatagttgttcttggactgtaaatttgcctagttattccaagactatccgattcttttgtaaaccaattttggtgctcatgtggggattttacgttaggaggcaattactgcctgtacgagtgattcggaatccacaatgcccttaattagaagccattcctnccttatgtgtctnnnnnnnnnnnnnnnnnnnnnnnnnnnnnn

SEQ ID NO: 390952 - DNA, 1020 bp, Oryza sativa
tttatgcaagaatttaaggaaactggagataagagatagcccgtttggtgatgctgcactcttggggaattttgctaggtacgagacaatgcgatccctttggatgtcatcttgcaatgtcacgttaaaggggtgccaagtccttgcgtcaaagatgccgatgctcaatgttgaggtcataaatgagcgggatggtagcaatgaaatggaggaaaaccatggagatctgcctaaagtggagaaattatatgtgtaccgcacaactgctggggcgagggatgatgcaccaaattttgttaaaatcctatagagctagctgagagtagcaaggaatcctcttattccataagatggtcggcggaatctgggaggaggccggggccgcggcaacagtggtaagctcttcaagtgtctcctcctctcctttgcagggacaggaaaaaccacgttggtgtgcctcccttatctcggagcatctggcctgggatcatcatccatcatccccccgtttcgccttttagcccgtttggtcataccgacgaggcccttatcctgttgtgcaattctgagcaagctcaggaccaccaccaatccatcatgttagctcgaccttttctctcttcttccctttattattttttcttctttttttaccttgtgtaatatgtagaacccacttccatttgcttttgacatttgccacagcggattgtgctgctgctggttgtaatgcttgttttcaagcctcctgaccgggacgtttcggggacgatgattagtttccttctctttgctcctgtgaatgcagtcagtgcctggaataatttctgcttcatcttccatttcttgttttattaagtatagaaaatattttttgtcagttttgcttgatcttcttttacttacatttctcctaagcatcaataattggagccgcaagatacctgtagtgttgacgtggcagcacgttcggttggtacgtactcgtagtataaaatggaatagtgggtcccacatgtc

SEQ ID NO: 390953 - DNA, 648 bp, Oryza sativa
gccgccgccgatcccccatccatcccgcgaccgagcagggttgcctccgccgcgtcccggatttgtgcttcttttcttgtatgatggatagcaagggcaaagtgaagaaggaaacggatggcctccctcctcgcaagggagggcttaaatttgcacccaaggttcgtcctaagaaagctccaaagatcgtcccgaaaacggagccggctgaggaaagcaaggatgaaaccgtagataaagagctgttgatgaagcttaagacatcgcagagcacacatcccctttgtgagaaaatttaagactgagcaaaaaggaaatgcgtactcaagttgcatttggacacggggaactcgtcgtatgcaagatcatttcccatgcaaagttcagcaggatggatcagcttcaaaattaccaaaagaatatgttgaaccatgggactatacccacagtgactatcctgttactctcccactgaggagaccgtattctggagatcctgaaattcttaatgaagaggagtttggagagtcttctgccaccggagcccaagatggtgaattaaccacagcagaagaacttggactaatgcatcggtcagacaaagcacagttgcttttcttccagatgcctgcatctcttccattacca

SEQ ID NO: 390954 - DNA, 907 bp, Oryza sativa
  unsure (1)..(907): unsure at all n locations
gaaccgcaatgttctagccccattgctttatccacatgctctagccccattgcattatccccttggggtgaacatggctactatcaaggagattctgttggttcttctttatggggtgtccaggacgatgatccagaaacaaatgatgcatcggtatcaatgatagacaagaactcaggattagtagattctcaaccatcagcaaatgatggctcagatgtgggtactgcacggaacactaaccataatactaacttgtccctcaaccatgaaacagcggtacccttgagtagaagttctggagaagcatcaagaaaacacggatttattactgacttgaatgttgctacttcagaggaggcgttagggaacaccaagaactggaatccatatgctggtaatgctaatcggggcagccagcggaatcatcaccgtgacaggtactctcaaataagcgaatcttggcttcttagctcaaactactctaggagtaggtctgatgggatttggcactggtggatcgtcgagatcaacccccaaggggacaaaactcagagggggatatgtaaatttcatgagaatggctactgcaggaagggtgcatcttgtaactacctgcacccctgatctctgcaatagataacgagggtttgcattctttgcccatatcttttgacttttttgtatagcctaattacagtggtagtcaacatagagcctacacaaccttttcttggtttcattcaaccgtagcaaggacggagtatatgtctagctctagcataggaggatgactgaatgtactgcccaagcagattccactcttttggggacacggcctattttcgttttgcttggttcaattgaactgcatctgtgtatccctnnnnnnnnnnnnnnnnnnnnn

SEQ ID NO: 390955 - DNA, 732 bp, Oryza sativa
  unsure (1)..(732): unsure at all n locations
ccacgcgtccgggcaaaggcgcatttagaatgtgaagattcaaaggttaaagaagaactgtatgttgaatcaactgttgttataagagatgacatggttgttaatcctgcctctggagttgagtccatagacatgtctgaaaatctcttggaatctttgatggagcaaagttgtggaactttttacatggatggtacaacagccttagaaggttttctgtctggttcaacgaaggaagaaccgcaatgttctagccccattgctttatccacatgctctagccccattgcattatccccttggggtgaacatggctactatcaaggagattctgttggttcttctttatggggtgtccaggacgatgatccaatcggtaatatttggccattatcctcacaagcaccggctctccagtattcatctgcaggtagcactgctcattttattgatgaagcaactgtcacccatggaaataatggagttgttctaagtagcacgccaggggaggaggtgaatccagaaacaaatgatgcatcggtatcaatgatagacaagaactcagggattagtagattctcaaccatcagcaaatgatggctcagatgtgggtactgcacggaacactaaccataatactaacttgtccctcaaccatgaaacagcggtacccttgagtagaagtctggagaagcatcaagaaaacacggatttattactgacttgaatgtn

SEQ ID NO: 390956 - DNA, 959 bp, Oryza sativa
gtcactgcaagcatcttgctccgatttatgagaagctagcttctgtttataagcaagatgagggtgttgttattgccaatcttgatgctgacaaacacactgccttggcagagaagtatggagtttctggtttccccacattgaaattcttcccaaagggaaacaaagctggtgaagattatgatggcggtcgcgagttggatgacttcgtcaagtttattaatgagaaatgtggaaccagccgtgattcaaagggtcagcttacttcagaggctggcattgtcgaaagcttggctcctcttgtgaaggagttccttggtgcagcaaatgataagcggaaagaagccctctccaaaatggaagaggatgttgcgaagctcactggccctgctgccaagtacggaaagatctatgtgaactctgcaaagaagatcatggagaagggctctgaatacactaagaaggaatctgagaggcttcaacgcatgttggagaagtcgatcagtccttccaaagccgatgaattcgtcatcaagaagaacatcctttcgactttctcctcttaaagggtgtcccacgtaccccgacgagcaattggggtatagtcagtagcgcaatgcctgtctccaagaatggaaaacagaaagaaatgaaaagaaaaggcaatatcgatatcagcaagagatggcaatggaagttcgttagttgggtattctgttgaacaaacatgtatcccactgcccggcatgatcttttttttttctttctgctatttgcttttgtggttacagggattgacatagcaatcagctagtttactcaagaacacaagaggttttgtaaccatcccgtgatgagtgatgacaccgttctacgtttgtcaatccaataatttgataattcagtttacattatttctgtttaccctggtgaaaaaaagcatatgttgcttttgcttt

SEQ ID NO: 390957 - DNA, 426 bp, Oryza sativa
ccacgcgtccgcccacgcgtccgactgatctcaactctggtaaagtttatgggagccctattaagctacaggtcttcacctttgcagaggcttatgatttcgaagatcttgaatctatgatccaagaggttgccagaggattcaaaacaaagataatgcttatatatgtggatactgctgaagaaaagcttgctaaaccattcctgactctctatggactcgaaccagaaaaacctactgtgacagcatttgataccagcaaaggtaccaaatatctgatggaggcagaaattaacgcgaagaacctacaggacttctgcttaagccttctggagggtacacttccgccatacttccgatcagaaccagtaccagaaggaaagggacctattgaaaaggttgttggccgtacatttgattcttcag

SEQ ID NO: 390958 - DNA, 418 bp, Oryza sativa
acatcggcttcaagttctacgacctctccgacgacgtccatggcgtgctcggccagacctaccgctccgactacgtcaacaagctcagcgtcagcgccagcatgccggtcatgggcggcgcaccaagctacgtcgcctccgacatcttctccgccgactgcgccgtcgccaggttcggccaccgcgccggcatcaccatggtcactgccagggccagttaaatttgcttgtatgcttcaagcttgatcgttgacagctcttatcgtgtacccaatcaagcattaatagagctagacactggaataagtttattttcaggttgagggaaacataccagtcatcaatcaatataggactcaaatcatttgatattcgcaccgtctcgtgccggtttgttaatgttaaaaaataatttgat

SEQ ID NO: 390959 - DNA, 1108 bp, Oryza sativa
  unsure (1)..(1108): unsure at all n locations
ggaagctttgctcgtctccttccttccgccgccgccgaagcagaagaggaagaagagagaagaaagaagcattggcgatggctgcggcggagggccccgttctcctcttcccctctacctcgtcgacgtccgcccgggtggaggcggtcgtcgtgttcaacatctgcgacagtacgtgcgccgccccgaccaggcggaggcgtcatcggcaccctcctcggctccgtcctccccgacggcaccgtccatgtccgcaactcctacgtcgtcccccacaacgagtcccccgaccaggttgctctcgacatcgagtaccaccacaacatgtatgcgtcgcaccacaaggtcaaccccaaggaagtcattgttggatggttctcgactggcttcgggtgtttctgggggaagtacgcttatccatgatttttactcaagagaagtacagagccccattcatctcactgttgacactgggttcacaaggggcgatgcttcaatcaaagcctatatctcatccaacctgtctcttggagataggcaccttgctgcgcagttccaagagattccccttgatctgaggatgcttgaagcaggaaaagttggatttgacatcctgaaatctacaattgtggagaagctccccaatgatctggaaggaatggaatcctccatggaaaagctgtatgtccttattgacgagatctacaaatatgttgatgatgtcgtggaggggcgtgtagcaccggacaataaaattgggagattcatctctgatgctgttgcttcaatgcccaaaattgtcaccagctgctttttgacaagcttttcaatgacaggattcaggataatcttgcactggtgtacctgtcaagcatcacaaggacacagattagcatagccgagaagttgaacaccgccgcccaaatcctgtaatttccatgtagttggagcatctgggagtctgacttaaaatgctgttttgtttgtttttcattcgcacgactgaaaaattgggatatgatggcagagtatgcatttttgtacttgttatctgaggcctaaagaaaagaaaccatcatgtttcnnnnnnnnnnnnnnnnnnnnnnnn

SEQ ID NO: 390960 - DNA, 773 bp, Oryza sativa
  unsure (1)..(773): unsure at all n locations
ctcaactactactcctgttcttgctactgcctagctcagctactctgcttgcccccaacctatccaacctactaacattgtagtacactacacacaagcctagcttagcttaggttgcagctgtgtgaggtggggatccagatcagctttgctgttgaagagatccatccatccatatagctagctgtaactacatacagttgttcattcagattcaggcattcagccactgcctgatttaggtgagggaagaagaagaaggttcaagcaactgcacaccagatggtccatctcttgccatgcacccatgctcacttgcccctgcctctcttcttctccatcctcctcctcatcttctccatggaggtggcacattcagatgcaaggaggttgccactgaagcttctagaagttggcaacatcaaggaggagcctgatgaaaccattggagagaagatggagatggagatggaagggaggaggctgataggatcaaggccaccaaggtgtgagagggtgtgcatgtcctgtggccactgtgaggcagtgcaagtgcccattgtgccacaggtgattcagaagacacaaaccaaagctgctgctgctgctgctgccgagcaagaacagcatgtggtggtgagtnctactgccatcagtgctgcagttttcacctacagggtgaatggcctctcaaactacaagccattnagctgggaaatgcaagtttggtggcatcatccttgatccctaatgttcccactcatgggggggnt

SEQ ID NO: 390961 - DNA, 711 bp, Oryza sativa
ccacgcgtccgcccacgcgtccggtcatcaagagcatcacgttcgacaacttcataatccaggcggggacggacgcgtcgctggtgccgacggacatggcgacgaccaactcgacggtgaagctgacgtaccggaacacgggcacgttcttcgggatccacgtgacggcggacccgttcacgctgtcgtacagccagctgacgctggcgtccggcgatctcaacaagttctaccaggcccggagcagccggaggacggtgagcgtgggggtgatggggaacaaggtgccgctgtacggcggagggccgacgctgacggcggggaagggcagcggcagcatggctccggtgccgatgatcctaaggacgacggtgcactcgagggcgtacgtgctgggggcgctggtgaagcccaagttcacacgcgccatcgagtgcaaggtcctcatgaaccccgccaagctcaacaagcccatctccctcgacaagtcctgcatttacctctgaatccatcatattcattcattattatcacctgctcctcggatcacctccattcctgctgcttctttcttcctttctctctacgatctgatctgtgcattcttccttttcttttttcctttttgcggatccaacaacagccataaatatgtatgtactgtatttcccagtcagattcgttattataccaaaaaaaaaaaaaaaaaaa

SEQ ID NO: 390962 - DNA, 592 bp, Oryza sativa
tcgcttgtttcgtttcctctcgcgctcgccccggaaagcctcgagatctctgccctcactcgcgcaaacctcctcctcctccgaagcttcgatcccgacacgcctccgccggcgccgcccgccggaggcgagcccgagatgcggcccaacgtcatcacggaggctgggatttcaactaggttgaatcagtggtggggcagcataccattcattacatccggcgtccgcttgatatgtggagcgatttatctggtgtgcttgttgactggctatgactcctttgccgagatatgcttcttgccttctgtagtagcatcacgctttcaagtgtacaggttctatacatctgttgtatttcatggttctttgcttcatgtgctattcaacatgctggccttggtacccttgggcactgagttggaaagaattatgggatcagtccgtctcttgttcttgatgtttcttcttgctacgactaatgcgatttttcatctcatcattgctttcttggcggcttacaatccgctctatcctctccactttcttgtggatgaatgctccattggctttttctggagttatattctcaatg

SEQ ID NO: 390963 - DNA, 499 bp, Oryza sativa
  unsure (1)..(499): unsure at all n locations
gcgcggcggcctgacgcgggaccgcgcggcggacgcggcgcgcatcgcgcgctgctggaggagggggacgtggtggtgtgcccggaggggacgacgtgccgggagccgtacctgctgcggttctcggcgctgttcgcggagctgacggcgaggatcgtgccggtggcggtggaggcgaggcaggggacgtactatgggtcgacggcgagggggtggaagttcctggacccttacttcttctacatgaacccgcggccggggtacgaggtgacgttcctgccggcgctgaggccggaggagacgtgcgtcgccggcgggaggagcgcggtggaggtagcgaaccacgtgcagagggtgatcnccaaggagctagggttccaatgcaccacgctcaccaggaaggacaagtacatgaagctcgccggcaacgacggccgggtcgccgccgccgccgacaagcccaaggccaattgattagtccatccatctttctaaagat

SEQ ID NO: 390964 - DNA, 541 bp, Oryza sativa
  unsure (1)..(541): unsure at all n locations
cgcgaatccaccggaagcgagcccccgatttctcgacttcgtcggcgaccgaccggggtccagaaccctaaccctaaccctagcgaggaagaaggcggcggcggcggccggaggggggagatggtgtactacgcgctgtactggtgggcggacctggacaacctcaccaacctgcagccccgctacggctgcgacgacccgacctacccctactacttcaagctgcggtgcgagaactgcggggaggtcagcgccaaggcaacctgcgtctccctcggcgaggtcgtcgacctgcccaacggacgcagcaccgctaaccttgtccagaagtgcaagctttgtgggaaggatgcatcgattgtgatgattcctgggcaggggacaccactgactatggagcagacccaaaaaggagatagaacttgtttgatggtctttgactgcaaagctgtgaacctattgatttccttttggtnatggctgggaagctgaatctctggaaaggacttcntttacttgactgctctgaaagcaatttgct

SEQ ID NO: 390965 - DNA, 750 bp, Oryza sativa
  unsure (1)..(750): unsure at all n locations
tgcctccccggcttgatccgcacntcccggtgtacgccggcggttcccaaggccccgccctgagtaccgcaacntcggcgaccacgccgagtgcntcaaggttgaatatgatccccggttgattcagtacaagaaacttctagaggtcttctgggcaagtcatgatccacgagaggtctttgggcaaggaccagatgttggcaaccaatacagatccatcatcttcacaaatggatccgtggaagctagattggctggtcttagcaaagaaaaagaacaagctaaggatcgccgcagtgtcattaccacacagatccaaccaataggtgcattttatccggctgaaccggaacatcagaaatttgagctgaagcgcaagccgtttctcctgcaactgattgggaacctgcccgaggaggagctcctgacctcaacactagctgcaaagttgaatgcatacgctgctgagctctgctccccaaatacccagaacagaataaactccaagattgatgagattgctaagaaaggatggcccatcctaagagacatttagctcggtgttcctgggttttacatattaatatatcattatccaattgtgcatgattttgccgcaaatcttgtccagatgactggttgtggtcattccttggtcgcagcaatcactaattagcgttcatgtcctcctctgctcattttgagatctctctaatagaatctgcatgtatatccaaaaaanaaaaaaaa

SEQ ID NO: 390966 - DNA, 440 bp, Oryza sativa
ccacgcgtccgggctcctacagtctcgagaccagaggagagcaagcctaaggcaaaaaggagccaacctgcactcctgaaaaatgtaataatttcggtgaaaccacaagcgaagaaagcaaagttagatggggaagataagcctcctgcgaaggagcttccttcaaatgggcacagtgcagatcacaagcccccagatgccaccaagggcgtgcttggttctctggtgcagtatgatgatgatgaaagcagtgatggggacgtatgacaactgtaacagagcaacagtctgaggttttgctggctggtgtctggcaaaaatatgttttttcctgttttccctgtgcattaatatccatgattttcttgtagcgtgtgaatttattgtcagcggtgatgataatttgataacgaaaacaatactattgcacgaatacactt

SEQ ID NO: 390967 - DNA, 816 bp, Oryza sativa
aaaagaaagaaaagaaaatctcccgtctctttgtctcctccgctccttgcgccgccgagacgagtcgcggctgaacaggggaggggcggcgatctccatcggggcgagcagagcaggggagaggattcatggtttatcactctagctttgttgatgacaccgggattaccaaagcatgcggctgtcctttgcttccactaaaaactcatataaggggcccagcgccagcattcgatcaagacaaggctgacattgttgatgaagcaattacattcttccgagcaaatgtcttcttcaaaaacttcaatgtgaaaagcccagcagacaagttactgatctatctgacattttacatcaatattgccctgaaaaggctggaagccggccgaacactggctgttgggacaaaggcaatcattaatctgggtttggagaaagttcctgtgcctggggaaccagggtttcccttccctggtcttttcactctaccccaatctcaggaggaagcagaactattgagggatcatctgaagcagataagggaggaaacaagtggaaggttgcttaactgcgcatacagagctaatggtactccaaacaaatggtggttggcttttgcaaagaggaaattcatgaacattgtcattctttgaagtataggtattttccgcgacatgtttgagcaattgagcagcttgtacgaatggcaattgcacttgcgtacttatttctgcgaatactttagagaattaaaggaacgacaatgattctacacctcgattgatggagccaaaggttctaatgaaacaatggata

SEQ ID NO: 390968 - DNA, 473 bp, Oryza sativa
  unsure (1)..(473): unsure at all n locations
ccacgcgtccgggggaacctgttgacgctgncggagcagcaggagctcgactgctccaacaccggcgactgcctcaagggcggggatcctagggcggcactgcagtacatcgtcaagaacggggtcaccttggaccaatgcggcaagcttccctactacccaggttacgaagccaagaagctggcctgcaggacggtggcagggaagccgccgatcgtgaaggtggacgccgtgaagccggttgccaacaccgaggccgccctgctgctcaaagtcttccaacagcccatcttccgtgggaatcgacgccagtgccgacttgcaacactacaaaaaggggggattcaccgggcgttgcaagacggcgcccttgaaccatggcgtggtggtggtgggtttatgggtgaatactaccccggacaagacaaaatactggatcgttaagaactcgtggggcaaaggctggggcgagg

SEQ ID NO: 390969 - DNA, 646 bp, Oryza sativa
ccacgcgtccgaccgggcgttcgagctggtggcgtccaagggcggcatcacggcggagagcgactaccggtacgaggggttccaggggaagtgccgcgtggacgacatgctgttcaaccacgcggcgcgcatcggcgggtaccgcgccgtgccgcccaatgacgagcggcagctggcgacggcggtggcgaggcagccggtgacggtgtacatcgacgcgagcgggccggcgttccagttctacaagtccggggtgttcccggggccgtgcggggcgtcgtcaaaccacgcggtgacgctggtgggttactgccaggacggcgcgtcggggaagaagtactgggtcgccaagaactcgtggggaaagacgtgggggcagcagggctacatcctgctggagaaggacgtcctgcagccgcatggcacgtgcggcctcgccgtctcaccattctaccccaccgtctagccggccatatacatatatcgatcgcagctagccgcatgccggccgtcatcctcagccagttcttcttctttttcctcgccgttagttacaacaagttggaataattaaggaataatgatcgagtagcgtttgcgaggttaactattgaaatgagtgaatggtcctgtttgttcgatgtcc

SEQ ID NO: 390970 - DNA, 498 bp, Oryza sativa
  unsure (1)..(498): unsure at all n locations
ccacgcgtccgcccacgcgtccggtgttattacagagtgaactaaaatggagatggtcattctattgttctgtatttatcatgcggattttgctcgcgcacaaggattttgaaagcatgttcatcttacaagttggagaatattttcctttcatgtccatattatttgccagcaccgtgcacagacaagtcgttgttaacaatggaggttgtccaatcatcacggaactccttttcatgtgatgctacgtggcaagaacacaaattgatatgcaatgttgggtaacataacaaagaacattatgtgagaagatttctctatggttcctagctggatgagctggaattatgtgagaagaatattgtggtcttcgggctgttcgctgctttctgctagagaagtttggaagtatctacagttattttgtggtaaaggagaattgttgggtggtgagttttatgcagcgaangagatcgaacatgacatcctatgaggttt

SEQ ID NO: 390971 - DNA, 770 bp, Oryza sativa
  unsure (1)..(770): unsure at all n locations
ccacgcgtccgggaacgctttctacactccgtaaaaccacttgccaagcatgtacccacagctttacatgaccgagatgaaaagtcctcgcgtatattttatgggaatgattcattttatgtactgttcaggctgcatcagatcttgtacgaaagattactttcggctaagacaaactcatccagtgctgaaaagaaatggagaacttccaaggatacaaacccacctgacctatatgcaaagtttataagtgcactttacaacttgctcgatggttcttcggataataccaagtttgaggatgactgccgttctatcattggtactcagtcctatgttctgtttactttggataaactgtccgataaagttgtgaagcagcttcaagctatagcaacagatgaaatggacaacaagcttctccagctttatttatatgaaaaatcaagatcccctgggaggttctttgatctagtctatcatgaaaatgcacgcgtgctcctccatgaagagagcatataccggtttgaatgttgctcaaatcctacaaaattgtctattcagctgatggaatatggccatgaaaagcctgaagtgactgcagtatcaattgatcccaatttttcctcgtatctttttaacgagtatttgtcgagtatgtcagacagaaaattgtctgagggtgtcttcctggaaaggaataagcggaagcattcaaataacgacgagccttcagatncgttgaaggccatggatggtgtcaaagtcgc

SEQ ID NO: 390972 - DNA, 913 bp, Oryza sativa
ccacgcgtccgcaggatgattgcaatggttctttcggaagaatatgctaagttagatggtgctatggccaagcggctctcgaatttaacatctattcctcacgtcccccgaataaacacatactttccgacatacagtgatgccactatggaccatcatcgccttctcgataggctaaatgtttatggcttgtatgaagtgagagtttctggcgatggcaattgtcagttccgtgcactatcagaccagctatatcgatcacccgattatcacaagcatgttcgaaaggaaatagtgaagcagctcaaggcatgtaactctttgtatgaaggttatgttccaatgaaatataaacattattgcaagaagatgaaaaaatctggtgaatggggcgaccatgtcacattgcaagctgctgctgataagtttgctgcaaaaatatgccttctaacatcattcagagacacatgttttgttgaaattgttccacagtatcaggcaccacagagagaaatttggctaagtttctggtcggaagttcactataactcgctatatgatgctcgagatctccctagcaaatacaagcctaggaagaagcactggttattgttttagtaaccacgcgggagctttgctttggacatggattttattgcttggccttttggcccctcctgatagttggagcttggaaccctgaagagtggaatcctctgtggttctcttccttgaagcgctgaatgggtttgccggatgcactcctcaccgcagtacatacagcattagttatactataatactgaaagaatttgagattgcttccttgtgaatatatacccatagggaaattactgacatccatgttgattgtaaaccatatttgttcattggtatattctgtatacatttt

SEQ ID NO: 390973 - DNA, 976 bp, Oryza sativa
ccacgcgtccgcggacgcgtgggctactgccagtaggactggtgggggattggtgtggataagtggatggaattctctccagcatgccacaaatgcagcattccttgctgttgtttacagtgactacatgctcacatcccgaacagcagcagtgcaatgcagtggaaagtactacagtcctacagatatacgcaattttgctatatcacaggctaattacatcttgggagacaacccaatgaagcttagctacctggttggatatgggagcagctacccacagcaggtacaccacagaggggcgtcgatccccgctgatgcaaagacaggctgcaaaggattccagtatcttcattctacgagcccaaacccaaacgtcgccatgggagccctcgtgggcgggccgttccagaatgacactttcgtcgactctcgggacaatgctgttcagacagagtcaagcacttacaacagcggcaccctcgttggtcttctttctggtctggtcacaacttcctctgtggcgcagtcgttcacctagagctctctcagagtttgggcaatggctttgaccaaccgggaggatatacatgtagccatgtacaatgagagatttttggcgtgaccaaaggcaatgtgccatcagcgaaacgccttcacggtgttcttcgttgttcatcttttgggtgatgggtggttagcagtagtagttcttgtgccatagtgctattgtttatacaaatactgctgcgtagttgcatccggtttgctggtgtactatctgatactacgagtgttgtatttgtaggacggattccatttgttgattctaaaatgatctctggtagcttgtattaatgatctgtaaaatccctcccaagatgaacattgccctaaacatgtgagatcacatggggagagggaagtattaatccagtttgttcagtatgttcatacataaattggacatcttttc

SEQ ID NO: 390974 - DNA, 864 bp, Oryza sativa
ttgattccaagctatatcagagactcttccgttgctgtcatcgtatttgatgttgcaagcagacagtctttcctaaacacttcaaaatggatagaggaagttagaactgagaggggcagtgatgttatcattgtgctggttgggaacaaaactgatcttgttgacaagaggcaagtctccatagaggaaggagagggcaaagcgaaagatctcggtgtgatgttcattgaaaccagtgctaaagctggttttaacattaaggcgttgttccgtaagattgcggctgcacttcctggagtggagaccctctcatcagcaaagcaggaagacatggttgatgtgaacttgaagtcaagcaacgccaactcatcccagtctcaggcacaggctgggggatgcagttgttagcttcagtcccctaacacttactgcttcgcggtctcaaggccccccatgcctctttcaccaaaagcatcagtactgcttgtctgaggggaggagagttaaattgtcgtctcatgccagtgaatccgaccgagtcttcgattcggtcgaacgaaccatttgcattggaaaaagataacgttttatgagtttctaccattttctcagtggcctaaagctagcaacagtgtatagttgggttggcactgtgaacttctatctcttgagttgggtatttaaaagttagtgattgttttaagttcatcctctatatattttcatctcccatcttgtcacagttagcctcagtaatgttttctatggtgtaccgaacatatattggaatttttgtaagcttacaataatctctacatggcagtagccatatgttatcccggttgttttgaccattcccaaaaa

SEQ ID NO: 390975 - DNA, 810 bp, Oryza sativa
  unsure (1)..(810): unsure at all n locations
agaaatctggcgtctcgtcgtctcctccgctcctcctctccttgcgccaacaagccgactcgcgatctccatcgggcaagaagagcagagcagagcaggggaggggatcctgcaggcgcacgcatcgcccatggccaccttcgagctctaccggaggtccaccattggcatgtgcctcactgagacgctcgacgagatggtctccagcggcaccctcagcccggagctcgccattcaagttcttgtccagtttgataagtctatgacggaagccttggagaaccaagtcaagagcaaggtttctatcaagggccacctgcacacttacaggttctgtgacaatgtatggacattcatcttgactgaagcatcattcaagaacgaggagactacagaacaagttggcaaggtgaagattgtggcctgtgattccaaactactcagccaataaattgataactgcgaggtcagggtttgcctggtatttgttagtctcttctgctagacctgctccgcctgaagtgtactgtaccaccacattgtttgtttcataatcaatgtgtgtcaatacaatcgtatgtgctaccagagtatatcacagcagcaactgttttaatttgtatgcttatgtaattgttatgctactgctgtgttgataatgtgatataaatgactaaacgatgagtagttgaaattgtgcggagtcaccctcccccttcctcatttctgaaccctttggttctgtgtgactctttgtatgtaacatgaacaaatacctcctttccngtcnnnnnnnnnnnnnnnnnnnnn

SEQ ID NO: 390976 - DNA, 476 bp, Oryza sativa
gagaaatctggcgtctcgtcgtctcctccgctcctcctctccttgcgccaacaagccgactcgcgatctccatcgggcaagaagagcagagcagagcaggggaggggatcctgcagatctggaagaagctcttaatttcagagccttaacctctcttaatactacaagtaacaacagttttgttgtttgttccccccaccccaaaaagtttaggcgcacgcatcgcccatggccaccttcgagctctaccggaggtccaccattggcatgtgcctcactgagacgctcgacgagatggtctccagcggcaccctcagcccggagctcgccattcaagttcttgtccagtttgataagtctatgacggaagccttggagaaccaagtcaagagcaagggtttctatcaagggccacctggcacacttaccaggttctgtggacaatgtatggacattcatctcgactgaagcatcat

SEQ ID NO: 390977 - DNA, 344 bp, Oryza sativa
  unsure (1)..(344): unsure at all n locations
cccccaggattgcctatttacccgagattgaaattancatcagaacttgtgctgataaggtcccgacgtccttggaagagttggattttgtttgttgtatcacctagaacttcaattcagtgatgctcggcaaaactttttttttgggggtacatgttgagcagattggcagatgatacatttgtaatttttacattgtagcatcacctgagatgcaggtgtacaatttatgctaaaaatgatgctcattatgccttacatattattcatgctcttttttttgagagagagagtaaacttatatatacatactattatattctaatagattattgttcctctta

SEQ ID NO: 390978 - DNA, 564 bp, Oryza sativa
ccacgcgtccgcaatcccttcccggagttagcgccgccggccggaggaggagaagagagagagagaggccgaggttttccggtgaggaggatgggcgagttcgacgactactgggcgcgggcgtacaggggcgactccggggtgccgcactccgacccgcagcggctggtcaccacctggaccggcgccttcgccctcggcgccgccgcctgcgtccaccaccacgcctccgccctcgcctccaacatcaagtccctcccccactactggcaagacatgacaatgatgctcgatcaaaagcgctggaagaagattcttgagaagaagcaacagcaagcttaaggaagtgttgaagctgtaaacaaattgcaacggatagactttttctatttggcattttcttccgtacctttacaacttcacatatgttttcaatacagaactggttgatttgtttaaccttcacccctaatattctccgtaatgcaagtgttgggacgtcttatcagttttcttaggcagcgtgtttttttcaatgatatgcaacataagtctacccttaat

SEQ ID NO: 390979 - DNA, 509 bp, Oryza sativa
ccacgcgtccgcccacgcgtccgggagaaagagagaggcgttggtcggtggccgcccgtcgcttctcctcttccgacgccggcgcggccgagagaaatggcggtggctgcgagggctccgctcggggtggtggcggtggtggccgtgctcgtcgtcggcatcttcatgcccgccgcggcgcaggccccggcgcccgcgcccgtcagcgacggcacatcgatcgacctggggatcgcatacatcctgatgctggtggctcttgtgctcacctacctaatccatccactggatgcttcttctccctacaagcttttctaatcccttgttcttccttcatctggcttggttagggtaaattctacttattatttagccatggcgacgattgttaacattttaggtgagatgttaggaggtttggagtgatttgtctgtccatgatgggggtggtatcaatcagatcgttgtttggtggtgcgattggctgtattggaaaaaaaaaaaaaaaa

SEQ ID NO: 390980 - DNA, 564 bp, Oryza sativa
  unsure (1)..(564): unsure at all n locations
gaacaattcaaaacatcagaattactcagaggcaatcttatttcttgcttaaaggaagcactccatgaacaggagttcaaaatggaacgggccagaagccagattaaggaagttcaatcccgatacaagaaagctgatgacctctgccagaagcttggaatacatgtagaaaggcaggaacaaccgaaccatgggcctaagaactcaggttctgaaatgcatggtagctttggcccagattcagctaatgccagttcttttgagaagggacaatcaagtgcggtgatgtattcccaggagaacggcggtgagcatgagatccccaatggcgttttctcttcacgggccaccaatgataacattgagcagaaactagaagagcactctacgaataagagacagaaactacagaatgatgtgtatgtttcacggnctcaatcggcaccttcgccactgccatctgatgcatttgaacaagcggcgccaccaccctgagcattccccggcaccagagtctacattgcccccttcaccggccacttttgtccaacttcagtccccccg

SEQ ID NO: 390981 - DNA, 399 bp, Oryza sativa
  unsure (1)..(399): unsure at all n locations
aaatttgcaggtgacggagttcacgtgtggcgggttcgtggtggggctcatctcggtgcacaccatcgccgacggcctcggcgccggccagttcatcaacgccgtcgcggactacgcgcgcggcctcgccaagccgcgggtgtcgccggtgtgggcgcgcgacgccatcccggacccgcccaggatgccggcgccgccaccgcggctgcgagctgctcgacctccgctacttcaccgtcgacctcagcccggaccacatcgccaaggtcaagtccgccttcttcgagtccaccggccaccgctgctccgccttcgacgtctgcgtcgccaagacatggcaggcccgcacccgcgcccttttttgggcgccgcgccgccgncggagacgacgaccaggag

SEQ ID NO: 390982 - DNA, 924 bp, Oryza sativa
ccaatctctggtcttccggcaggtccccgaagaaggagcggcggcgatggcggcgcctgtgacggtgtacggtccgatgatctcgccggcggtggcgcgcgtggcggcctgcctcctggagaaggacgtcccgttccaggtcgagccggtcgacatgtccaagggcgagcacaagtccccttccttcctcaagctccagcccttcggccaggtccccgcattcaaagacagcctcaccaccgtcttcgagtcgagggctatttgccgttacatctgtgaccagtacgccgacagcggtaacaagaccctcatgggcaggaaagaagatggggcggttggccgcgctgccattgagaaatggatagaagctgaaggccagagcttcaacccaccgagcttggcaatggcattccagctcgcatttgcgccgttcatgggtaggcccactgacatgcccgtggttgaacaaaatgaagccgaaacttgtgaaggtgctcgatgtttacgagcagtggctgggggagaaccagtattttgcaggtgatgagttctcgctggcggacctggtgcacatgcccaacacagatcttcttgtgcgcaagaccaacaaggcagggttgttcacggagagaaagaatctggcgaggtggtgggatgaggtatcagctcgtccttcatggaagaaggttgttgagttgcagaatgtaccacggccctcatgaggcttcttgttttttcccctctgagcgtcttgtgttagttgcgttaaagattcggtcttgttcagttgtttgtatcatttgacaaaatgtgcaagctcttcctatgggtccctaatattgtgctaccatctgtaccttttagtttggataaggttgaatctattttcaggttctcaagtttacttaaaaaaaaaaaaaaaaa

SEQ ID NO: 390983 - DNA, 466 bp, Oryza sativa
tccgggattcgagcacgcgtccgcgacgcgtgcgggccgatcctcccctcccctctctctcttgttcccccatggcgatcgccaccgagtcgcgctgcgaggaggagaaggcttcgccgcattcgcaggaggtgaagcggtgggtgttgtctgattttgacatcgggaagcccctcgggaggggcaagttcggccatgtttacttagcaagagaaaagagaagtaaccatattgtggctttgaaagtacttttcaagagccaactaaagcagtcccaggtggagcatcagctacgtcgggaagttgagattcagagtcatcttcgtcatcccaacattctacggctgtatgggcatttctatgatcagacccgtgtgtacttgatcttggagtatgccttaaaaggtgaactttataaggagttgcagaggtgcatgcatttttctgacagacgttcagcgactta

SEQ ID NO: 390984 - DNA, 371 bp, Oryza sativa
  unsure (1)..(371): unsure at all n locations
gaaaaaaancatatttttttttnnnggggggggggggggnnnntttttactcaccacctacggcagccggtaccccgtcggcgacgtccttccgcgtgacggggttccacaacgcggcgccgcagttcaggttcgtgcgccgcaagaacgtgctcctctccatcgagtccgacaagaccgacgaggccgagctgcagcgcgccgtggagcgcgcgtcggcgctgctccgcccgcacggcgcgtccgtggtggagtacaccagccaagcgtgcaccaagcgcatcccgggccactacgtcatctactgggagctcctgaccaagggcgccggcgccacggtggtggacgcggacacgctgggcaggtgctgc

SEQ ID NO: 390985 - DNA, 737 bp, Oryza sativa
  unsure (1)..(737): unsure at all n locations
ctatactgaaacttatatttccttttatatttggctttgtatatgtttatgaaatctgaatcacgctgttgaaccctctactataaatgagacctggagcccaaaattccaaagttataagcactctgcaggaaattccaaatctacactcaaatggttctctgcagatagttatacctagctaatttatcatgatggcctctgttttccatctgaattttaggagtccagcattcaaatgatattgtacacttcggatatcccaaggtatttatatnggaagttctgttttccagctgaattctgatgagtcatggttgtcattcaaccaagaagctaaattgctccataacaaggtgagttccttatttccagcatactcatccatgctattgccaaccaactctggtaggtacgagcctttgcaggttggccaggaactcgcgcaaagttgcagcttgtgaaccaaaatggggaacccgatgtgcttgagattaaggttatcagcacgaaggcttgcgcatcctgtgacaaaaccggagatggaaatgaggtactcttctcggggaactcattgctgattccttgcggtggatcatcttgtctcgaggtcgtggagcttcaactccctggaaagaaggtgacgacagcaagggacttctggaatggtttgcgtggtcagaggctgctgaaatcaccatagaagaattaccatgatcatcacagcgtatactacc

SEQ ID NO: 390986 - DNA, 791 bp, Oryza sativa
  unsure (1)..(791): unsure at all n locations
cttaagaatcccaagaagtatgaagagttaggagctaagataccaaaaggtgccttgcttgtgggtcctcctggaacaggcaagactctgcttgccaaagctacagcaggagagtctggtgtgcccttcctgtctatttctggatcagatttcatggaaatgtttgttggggttggaccatccagggtacggaacttattccaagaagctcggcaatgtgctcccagtattatatttattgatgagatcgatgcgattggtcgtgcaagaggccgtggagggttttctggttcaaatgatgagcgtgaaagtactttgaaccagctgcttgtagagatggatgggtttggtacaacttctggtgttgttgttcttgctggtacaaataggcctgatattttagataaagccttgctaaggcctggaagatttgatcgccaaataacaatagacaagccagatataaagggccgtgatcaaatattccgcatatatcttaaaaaacttaaacttgacaatgagccatcattttattcgcaaaggctagcggctttgacacctggatttgcaggagctgacattgccaatgtttgtaatgaagctgctttaattgctgcgagaagtgaggaaactcagattaccatgcaacattttgaatctgcaattgatagaattattggtggtttggagaaggnaaaaccaaggtcatcagcaaaactggagcgccgcactgtttgcttacccatggaatctgggtccatgctgttgctgggatgggttttttaggagca

SEQ ID NO: 390987 - DNA, 1051 bp, Oryza sativa
cccacgcgtccgcccacgcgtccggtgctcgaacagatctcgatctcgatctcgatctccgcacgcaccaaggcgaagccaattccactaccaccgctcttccttcttctcactccttctcgcgactgcggcgagggtgagtctcctgtcgtgagaatttcggtctaccggcggcggcggcggcgttgggtgttcttcgcgtcgtcagacgtcgggatctgaattactagacttccaataagaaggaaacaccttagggaatgcagaaagatgtgcttgcatgctagagagctaccttgtgagggaattggcagggtagcaagccatatttctccttccacaactcttcatgacattggaacacaagagtatatacagcgcttgctccatgtgctctcgcactatggggttcgacgtggcaactcaaccatcttcttagatcaccatcttggtggagacggttgaagtcacctatcatttctaggctcctggttaccacactttgagctttgggattactgctttctttggcgtgatggcggagcagagaggaaatatgttgatgaaaaagtatgagatggggaaattactcgggcaaggaacctttgccaaggtttaccatgcccgtaacaccgagacttctgagagtgttgctatcaagatgattgataaagagaaggttttgaaaggcgggctcatggatcagatcaaacgtgagatttctgtgatgaagttggtgaggcatccaaacattgtgcagttatatgaggtcatggctaccaagactaagatatattttgtgctggagcacgtcaaaggtggagagttgttcaacaaagttcagagaggaagactaaaggaagatgcagcaaggaagtacttccaacaactgatttgcgctgttgacttttgccacagcaggggtgtttatcaccgtggatttgaagccagaaaatcttcttcttgatgagaacagcaatctgaaggtttcagattttggcctaagtgctcttgctgattgcaaaagacaggatgggctgctccacacaac

SEQ ID NO: 390988 - DNA, 739 bp, Oryza sativa
  unsure (1)..(739): unsure at all n locations
cagatcgaaacttcaactgaaagcttggaacaaataaataccgaccaatgcttcgcagaagagtcacaaaccatgaatgcattaccagaagtatccctgcacactccagaaaaagttaacgagcaattcaatcatagtccatcggcagttgttggattaaccaagccatccatcttgacattttcttgctccccggagaatgcagatgacaaagaggagagactgagccctcaatctgttctagattctttcctgggagatggtatcagccccagccacaaaactcgaacgcaagatgaattgtccatgccaagcacaaggattctgtttaaagaggatgacactccctcgggaaccccaactttgcaaaacacaccacaagaagctattttggatgataaacaggcaaggctttccttcataaaggttgtgcttgaggcttcagacttcttgtctgaggaaagttcagagatatggtgtgtggacggatcactgcttgacacatctgtattggctgaagtgggaactttgtactgcctgacagacgatgccgtgtttctctttgattgtgtggaagaagctctttgcaagatcagggataacttttttggttgtgacccttgggtagcttatctgaaacacagtgtgaggccagctccggtaggaacagggctcattcaagaggtggataattgcatcgattcncttgtcagtgatgagggttccaagtacattagat

SEQ ID NO: 390989 - DNA, 607 bp, Oryza sativa
  unsure (1)..(607): unsure at all n locations
ccacgcgtccgctgtgagcaagcttgcatcattgcagcaatttattgctcatgattatgatgctagtgaccatgggacatcaagcttccctgtatctgcagtgcacaggattggcatacttgacatcagaatattcaacacggacaggcacgcaggaaatcttctggttaggaagcttggacctgggcctgacaattttggagtgcagactgaactcattcctattgaccatggtctctgtcttccagaaagtctagaagacccttactttgaatggattcactggccacaggcatccattcctttcactgaggaggaactcgaatacattgcaaatctggntcctgtaaaagatgctgaaatgcttcgcttggagctgccctttatccgtggagcatgtctgagggtgctggtgctatcaacaatatttttcaaagaagctggcagcatttggcctctgcttatcagagataggagagatgatgagtagggcaattcactgggnaaagaagaggagccaagtgagcttgagnttctttgcaggaggcaaggaagtgggtcaagaaaagagagtattcttncagaagccggagttnaagatgcaatg

SEQ ID NO: 390990 - DNA, 660 bp, Oryza sativa
ccacgcgtccggccggagtagaagcagacacgaggatggagcagacgaaggtgaagatggacacgtggattccggcatgggatcacgagttcgagttcccgttgagcctgccggacctggcgctgctccgggtggtggtgcacgagtccgacaaccaccagaaggacgacttcggcgggcagacctgcctgccggtgtgggcgctccggcgaggcatccgctccgtcaggctctgcgaccaccgcggcgagcccctccgctccgtcaagctcctcatgcgcttcgacttcacctgactactccatcttcttcttcatcatcgtcatcgtcttagtcgtagtaggtccatgtatgatatcatgagggatgaagcattgatcgtactttctccgtcccgaaatatagctatgtaggatttagaatggaaaacatccttaatactacgaaatctggataatgtccctatctggtgtctggtttgctatgttttaggacgatatatagtacataaaattttagaaagttttgttttaaaaaagaataaattttgtgcgaaacggaaggtgtgattgtacattttgtacgtacattgtttgttgttgattaataaacgtgttaataaaagagggaaggattcttttaaaaaaaaaaaaaaaaaaa

SEQ ID NO: 390991 - DNA, 476 bp, Oryza sativa
ccacgcgtccggaacaagctttgatttgatttgattagctgcggcgcgaattcgatcttgccagctcgagctaagctagctaagctgcccatggcgccggcaatgttcgtcggaatcgccgccgccggagggaagaagggaggggcgaaggatgaggcggaggagctgcggcggcggaacgcggagctggagagggaggtggcggcgctgcgggcggaggtggcggcggcgcggcggcgcgcggagacggcggaggaggccgaggagcggctgtgcgtgcagctgggccaggcggaggtggaggcggtggagctcgcgcgggagtaccagtgccgcgtccacgacctcgcccgcgagctcgccgacgccagactgctcgtctcatccccatcgccatgagaagagaacaagctagctagattggtgcttgattcttggtgtaatgaatttctcttgcggagacaatgaaatgtcgc

SEQ ID NO: 390992 - DNA, 517 bp, Oryza sativa
tggtgcccttggtggcttttcagcaaacaacttaccccactcatgccctgagttctgattggacctccttccgttgcatatatcttctcttgttggagtatattcagtattagcatttttgtgcaaacatggagcgtcagagagaagcttaccccccttaaaggcgcacatctgagctcggtaggctgtaaattgacaagcttcaggtttttgcaggtgttctaagtacccaagaaaattagctttgcatgttgcgcatgaaatttttccttgccactttcgttctatgtatcattatttatctatgcggggactggaactatgcttctatacacaagtagaggattgaggcgagggaatagcattggctagtgctatgtatacattgttcaggatattggactcgaggcgtgttgttatacgccaatactagattactcttggtagagcatctaggttggtgcattcaataaaagttgtgtcatcattattgtcccaaaaaaataaaaaaacaaaa

SEQ ID NO: 390993 - DNA, 1099 bp, Oryza sativa
  unsure (1)..(1099): unsure at all n locations
ggcgtgcgcggctcaaccgtctcgcataggcgagctctggcgatgatgctgagtgggaggaattgcggctcaagcggatccgggttgattacatgctgcggatgtgatactactacaccgacacgaatctcgcggagacttgcggcattcaggaccttgttgacgttgacgtttttctcgatgcaaaaagagtaatggattctcttcagaacaaggaaatcgctcctgctttagcttggtgtgcagaaaacacgtctcggctaaagaaatcaaagagtcagcttgagttttttctgaggcttcaagagtttgtggaacttgtcaaggccaagaacttcatgcacgctatagcatatgctcgaaaatacctttctccctggggggctacacacatgaaagaattgcagcgcgtcacagcaacattggtttttaggaagcagtacaaacttgtgctccttacaaggtcctgtttgagcaaaatcagtgggacagccttgtggaccagtttaagcaggaattctgcaaattgtatggcatgacattggagccgttgctgaacatctatatgcaagcagggctcacagctctgaagacaccattctgcttcgatggtaactgccccaaagaagaccccttatccctgcctggcttccggaaactagcagagccgcttccattctccaagcagcaccattcaaagcttgtctgctacataaccaaggagctcatggacactgagaacccaccgctcgttttcccgaatggctatgtttatagcaccaaggctcttgatgagatggccaagaagaatggaggcaaggttacatgccctcggacaggagacatctgcaactacaccgatctcgtcaaggcctacatatcatgatcacacaacgcgtgtggatctcatctgggaagacactgatttgcgcgggtgatctgcaccctgaatgcttgtacatagactgatcagaacattctctattctgttaagtttagtctgaattgtgatgcaaatgcaagaaccattgaaactacttcagtactgatttctgattacactttgaccttttgtgtcnnnnnnnnnnnnnnnnnnnnn

SEQ ID NO: 390994 - DNA, 614 bp, Oryza sativa
ccacgcgtccgcggacgcgtgggatgacattcttatcgtcatcgactatccatggcaggagtttgcaaatagcgtatggcgcatcaaaatactgtcgccacaggaggtgcatcagttgattcgtggtggagacggccttctgtcctcacttggagcaaggatgcagcagagcaatgcctgcgacgactattctgcaagccacaacatgcagaatatcgccggaaactttgcatctgtagcgcctctggactactgagatgtagaccagaatccaaactaagcacccttaagactgcaggggcaccattcgtgatcgcctgcattccatgcgatcttcactagtcctgtccgaatcagtagcaactcagtcaataatatagcttgatgatccagttgtattccatctgatcatggacatgctgtatgatagctgctttagctctattaaatctctaatggcaggcaactaggcaagaacagttctatgatgaatgatggcagtcgctgtagaattgaccttattctgtagctataatatgatgtctagaactgatgattccaatttccaaatggagcccggaacatattaaaatcaatcatttgtcgccttcttc

SEQ ID NO: 390995 - DNA, 378 bp, Oryza sativa
ccgcccctccgcggacgcgtgcggtcgataagttgtgatgcgcaatcattggtgctcgatgttctcatttctcagtctgtgtataatactattgaatatgcttgcttgcgcacaacctcggaattcttcagatttttatatggcctggaactggaagaactgaacaggcaattataggttggtttgctgcctgccctcagttgcttacccttggtgaaaacatgcaactacagtcaacaggtgttgttaatgagtttggtagtgtctctctggatacccttgttcttttctattaatctattatatacaatgtaatgacgggatatttaatcattacccatggctttcctgtgttctgtcaataaaaccatcttgagc

SEQ ID NO: 390996 - DNA, 593 bp, Oryza sativa
  unsure (1)..(593): unsure at all n locations
cattctgctcgtgccaatgcagctcacaatcacggactggatcctgataaacttattgtggaagaggcttttgttgggaaaggactttacctgaagaggttgtcctaccatgccaaagggcggtgtggcgtcatggtgagaccgaggtgcagactgacagtagtggttcgagaggctaccgctgaggaagaggcaaagatcgcgaaactcagagtcagcaactataagaagctgaccagaaaggagaagcagctaatgccgcaccgtcttatcgaggttagcccgaggtgggctcgcaagaggaaagaggaggctggtgctgctgcgtagcatgcgcttcccatttgcaggatgtctgccttcattggccttgaagcggngagtagccgcatatgctgaaatttacccaagaacaattgtagctctctcaagaatgaattcaaaggtctcatttgtcaggcctgtctttgttctgtttgtttcatctgtatgaaatttgtctcatgaagcataggaaactgtggcattgcccacgattctactcagaatgaataatgtcacctctgatattttgttcggcctgccctattata

SEQ ID NO: 390997 - DNA, 512 bp, Oryza sativa
gttctctcgcctttggcagttgaaggccatcagactggatctatgggagattcactagcgcccgctcgtactgccgcccaagctgctgcccggatataccaagctttgtaggatgcaatccttccagagatgacaagcagttcagtatgaggatgaagatggtgcgatatcagatgagcgtgccatgtcactcttgtctgctaaaccatccaaacctgcacagcttgatcctctgcatgctgctgcgactcgaatacaaaacaagttcccgggatggaagggaagaaaagaatttctgcttattagacagcgaatcgtcaagatccaggcgcatgtgcgagggcaccaagtgggaaagcattatcgcataataatttggtctgttgggatagtggagaaggttatattgcgcttgaagcgacaaggcgctgggatgcgtgggtttcgacctacacaaaatgcattcacagagagtactatcatcattagtggcaacgtgaccctaaacagac

SEQ ID NO: 390998 - DNA, 432 bp, Oryza sativa
agactactcgtagtagttgttgcaaatctggtcagaggaggaggagagcatccaagcctagctaggatcgatcgacgatgtctgatgtggtggctatggcggggcaggcgtacatgcggcagctccaagcccacccgctgcgcaccaaggccatcacctccggcgttctcgccggcttgcagcgacgccatcgcccagaagatctccggcgtccccaacctccagcgcaggagggcttcctcctcatcatgcttctatgggatttgctttatgcggggaccgtttggccattttcttccacaagcttgatgggacaaggtttttcaagggaaaggaagggaaaaggaacttacagccaagaaggtcttagtggaggcaactaacttgcgtcaccatggaacaatatgatgtttatgatgtactatggtctgg

SEQ ID NO: 390999 - DNA, 738 bp, Oryza sativa
cattaggttccgtgaaaagcggaaggaaagaaatttcgataaaaaaatacgttacgccgtacgcaaagaagtggcactcaggatgcaacgtaggaagggtcaatttgccggaagagcaaatattggagggagagtccctatctccaggctgtgaacttgcttcccagggttcaggccaagattttctatctcgagaatcaaagtgtcagaattgtggcactagtgaaaaaatgacaccggcaatgcgccgtggtccagctggtccaaggactctgtgcaacgcctgcggactgatgtgggctaacaagggtaccctgagaaattgccccaaggcaaaagttgaatcttctgtggttgcaactgagcagagcaatgcagctgtctctccgagtggaatcgacaacaaggaattggtggtaccaaaccctgaaaacattaccgcaagccatggcgaagtcatgggcgacagcactccggcaaatgaagccgagataaggagcgccaaaggcgcagtcacaataagtttatgtttaacctgtcatgattgaaaccaaaagattctggattctttgcctacaggctatacagctaaacatcacaatagaaggtctttttcctgaccaaagtatactgattctcctcaagtgtacaattcttgcttgccagcacatgtaaatgtaattgtaattaacataaagagcctgattggtgcctgttgtgtaaaaaaaaaaaaaaaaa

SEQ ID NO: 391000 - DNA, 472 bp, Oryza sativa
gggcttcatcaactctgattgtgggcaaatatttgtatctgcaccaactgcaagtgaattgctgacaaagatggcagcaatacactcggttgcaccaggaggtggcccctgcaacaagctgggagatctcagagcttggctatggaagaacaccgggcgctgatcaatcctagcccccctcacttcaaaagtgactagtacaagctctactaatgcctttgcttttgttttcccttgcttcttgtgatcaagtgtcaaattaaactcctcaccatggacatggtctccagttgctgtgttcttgatttccatcgatccggtgacgaaccaaagaagccggtcgtcaccgtctacaaatttatttgaagtttgaactgctgcatgaatgcatgatcatgtagtgggagtaatataatttactagtaatttatgttttaaaaaaaacaaaaaaaaataataaaaataatgggcg

SEQ ID NO: 391001 - DNA, 516 bp, Oryza sativa
  unsure (1)..(516): unsure at all n locations
ccacgcgtccggcagctgttcctcatcgccattccaatccaatccaatggcgctcaccaaccacatcctcgcgccggcagccgcagcagcctgctgcttcggacggcgggttcctctgccgccgcctcatcagctcgccgtgcggaggaagcaaaagagcgtggtggtggccatggccgacctgctgggcgactttggcgcgcgcgaccccttcccggaggagatcgagagcaacttcggcgagagggtgctgggcaacgtcgacaccctccacaacatcctcatccccacgctctccgtgctctccatcgcgcgcctccccctcgagcctaaccccgcgcccgtcgacgctgccgacgcccgccgncttctccacaaggtggttggctggcgcctcctcgacgacgccgacggcatgcgtctncagtgcgtctggaaggtcagggacgaagcctgcggccacgagctcgtcgccaggatcaacgccgnggttgacggcgccccggccaccgtngt

SEQ ID NO: 391002 - DNA, 586 bp, Oryza sativa
cggtcgaccacgcgtccgcggacgcgtgggtgggagcatgggaaagggtcaggcctgggtgaatgggcagctaattggtcgctactggtcactagtagcgccagaatctgggtgctcatcttcgtgctactacccaggagcctacaatgagaggaagtgtcaatcaaactgtggaatgcctacacaaaactggtaccacataccaagagaatggttaaaagagtcagataatttattggttctgcttgaggaaacaggaggtgatccctcgctgatatcaactggaggctcattatgccaaaacagtctgctcaagaatttcagaaaattattatcctcccctttctgcctggccgcatctttccagtggccgtgcctcagtgaatgcagcaactccagaactgcgcttgcagtgtgacgatgggcatgtgatctctgagattacatttgcaagctatggaactccttcaggtggctgcctgaacttctccaaagggaattgccatgcatcgagcactctggatttggtgacagaggcatgtgttggcaacaccaaatgtgctatcagtgttttcaacgatgtctt

SEQ ID NO: 391003 - DNA, 789 bp, Oryza sativa
gcattttgcctcctcctctccacccctcgtcggcggcatctcgtcgcccccgcctcgaagctaacagaagcttctcctcctctctcctcccctccccatggcgcggcggggccaccaccaccacctggcggaggtggccctcctcgcgtcggcctccgaggacctcgccgccgtgggcgccggcgagagggaggggtggctcgacgaccccgccgtgctcccctccctcgcgccgcgcgcgcgcgccctcgccgtcgccagcgcggcgaggtccgtgctcgcggttgtcccggtcgccggagtaggcggtggggtcacggtgaggcccgcgctggggcccgacgacggccggatctccgcggtggagtgggtcccgctcgtcggggaggacgccgaggaggctggtggggagggagtggccgtcgccgtgggcaccgacgccgggtggcttctgttctactctctcgcaggcgatctactgcacaagcagagtatttatccttcaaagatactgaaacttaacttccgtgagaggaaggaaaacgcctgggaagattcgggttcagatgagctttctgtggttttccctggtgttattgcacgttttgatggtgctgaccttcagaacatgcttcaaaaatcattacatgaagttaaatcgcacctgtggaaagacaaatctgaacaggaagatgctgaggaagatagttcctttggaagaataccttttcaaatttggaatgtaagcaaattcagttcttgtgcagatgctgcaattgttgggctgat

SEQ ID NO: 391004 - DNA, 700 bp, Oryza sativa
  unsure (1)..(700): unsure at all n locations
tcaagcaccccggcgtccgcatcatgtacgccgantantacaccccggcgatccagttcgtcctccacgccgagaaatacgggtttttgaggcagaagccgcgggcgtgctgcggggctcccgggggtcggggagtacaacttcaacctgacgtccaagtgcggggacccggggtcgtacgcgtgcgacgacccgtcgaaccactggagctgggacggcatccacctcaccgaggcgtcctacggccacatcgccaagggctggctctacggcccgttcgccgaccctcccatcctcgagacccgccaccactgatcgatcgaaaacacgatcggtttgtgatcccactcgttcgtttgcatatatgacaagcagacacacaccacatacacacacacccttcatatgcactggagatgtgaaggatagccgaaaggggccggacaggcagaagcaacagagaatgtgatggttaatttgttcagattaattagatggttggttggggatgtgttgtagtttcattcatgtaagaagcgttttggtttgtgtatttcgtttgttggtccttggtagagaaagagagagtagatgtaattcctatttcttgagaaattaaaattgctctcatatatagcatcctttcgaccttgtatacataccgaccgtgtatttctaacctgtcgttttactacttttc

SEQ ID NO: 391005 - DNA, 1143 bp, Oryza sativa
aaactggtgaccatgttggtgtttattcagaaaatgctatcgagacagtggagcaggctgaaaagctgctagatctttccccagatacatttttctccgtccatgcagacgcagaagatggatcacctcgtaaagggggtggttctttggccccacctttcccttctccttgcaccttacggactgcacttctaagatatgctgatctacttaattctccaaagaaggctgctttggttgctttagctgctcatgcgtctgacctagctgaagctgaaagattgagatttttggcttcccctgctggaaaggatgaatattctcaatgggtagtagctagccaaagaagccttcttgaagttatggctgcattcccttcagctaagcccccactgggagtattctttgcagctgttgcacctcgcctacaaccgcgttactactccatatcatcatctccaaagatggctccttccagaattcatgtaacatgtgcgttagtttatggacctacaccaacgggaaggattcaccaaggagtttgttcgacatggatgaagaacgcaatcccatcagaatatagtgaagagtgtagctgggcaccaatttatgtgaggcagtcaaattttaagttgcctgcagatccgaccactccaattatcatgattggtcctggtacagggttagcaccatttagaggcttcttgcaggaaagattagctctaaaacaatctggagttgaactgggcaattcagttctcttctttggatgcaggaaccgtaatatggactacatatatgaagacgagttgcaaaacttcattcaggagggtgcactttctgagctgattgttgccttctctcgtgaaggaccagccaaagaatacgtgcagcataagatgacagagaaggccacagaaatttggaacatcgtctcacaaggtggttacatatatgtgtgcggtgatgccaagggtatggcaagagacgtacacagagctcttcatacaattgttcaagagcagggatctttggatagctccaaaaccgagagctatgtaaagagcctacagatggacggcaggtacctccgtgacgtatggtgacaccatcagaattatcagaaatagctcgctctagctt

SEQ ID NO: 391006 - DNA, 673 bp, Oryza sativa
  unsure (1)..(673): unsure at all n locations
ccacgcgtccgcccacgcgtccgcccacgcgtccgtgggaatggaacagcatgatgccaacttattagctagacaatattataagcatttcaaaaagaagaataaggcaattgctgttttggacagtatcttttcacttttatatgtattgttccaagttgttacatgtgcttgtgcttttggtatttggttcttggatggtggtacttacatgccaagacacttgcacaaggtacatgcaccgaaacatactcgggtgcacatccttaactcaaactacagatatgcttcctaatttattacaataccctcaaatggagaacaggaggcatccagcttgggctatcttcatggaagatgataaggaggatatatgttttaaaatggaaaaagctttctgccctccaaaactagcagaaggcaatccatgtttggagtacataaaatatatcatcttgccttggtttggaatgtttgaggtggtccagaagaaagggaatggtggcaaaaagacttttctgngcatggaggaacttacagctgattatgaaagtggcgctctgcatcctgctgatgtgaagctggcccttgaaaagtcattgaacgagatattgcagcctgttcgtgatcactttggaaggaatggtgagnaanggatctagtggaagctatc

SEQ ID NO: 391007 - DNA, 429 bp, Oryza sativa
aatactgctggctttgtgtactttcatttcgacagtgtagcagctgcgacagctgctcaacgcgcactgcatggtagatggttcgcaggaaagatgattacagcgacctttatgactgctcagcagtacaaaatgaagttcccaaactagcagactagtgatgggtggcaaagatcgagttggcatacaagtgtgtgaggtgaatcaggagccgttcagccgttcgatcaaattcgtaatagtggagcagctacattagttcgtttcctgtaacattatggcgtattggatgaatctcggtccgaatagttgcatcgtaatgatgactgaatatgtgatcaactgcttatcaccctttttgataggaactgtccccggtgacaaggcccttctaaagaaatgcaagacaactctcatgtgttgccggac

SEQ ID NO: 391008 - DNA, 760 bp, Oryza sativa
ccacgcgtccgcaatcttttcctcaagaacgccggtgtagcctatgccaatgctttgcctggagcactcctactactgtcaacaggtgtactattctgtccatttgacatattctaccgctcgacgcgatactgcttcatgcgtgtcatgcgcaatatcatattttcaccattctataaggttctgatggctgatttcttcatggctgaccaactaactagccagattccactattacggcacatggaatttacagcgtgctacttcatggctggaagctttagaactcacccatatgagacctgtactagtggccaacaatataagcatctggcctatgtgatctcctttctcccatacttctggagagccttgcagtgtttaagaaggtacttggaggaaggacatgatatcaaccaacttgctaatgctggaaaatatgtatcagcaatggtagcagctgctgttaggttcaaatatgctgcaacaccaacaccattctgggtgtggatggtcatcatttcatcctcaggtgccacaatttaccagctctactgggactttgtcaaggactggggcttcttaaacccaaaatcaaagaaccgatggcttcgtaacgagctcatcttgaagaataaatcaatctactacgtatccatgatgctcaatcttgcacttcgcctagcatggactgagagtgtaatgaagatccatattggtaaggttgagtcgcgcttactggatttctcgctcgcttcac

SEQ ID NO: 391009 - DNA, 836 bp, Oryza sativa
  unsure (1)..(836): unsure at all n locations
tcgtcctgctcctcgcgctgccgaacgacccgtccaccggcgtcgcgcacgccgccgtgttcttcttcatggggttcgccatctcctggaacgcgtcatccacaaacaacccaatcttcgcggagattgtaccggagaaggcgagaacaacggtctacgctctcgacaaatgctttgaagcggtgttcgcttcattcgcgccaccgatcgtcggtgttctagcagagcaagtgttcggctacaagccggtctcctctgacgcaagcgtcgaaacggacagagaaaatgcggctgcattggccaaggcagtgtacacggagatcgccgtgcccatggccatctgttgcctgacatacaccttcctgtactgcacgtatcctcgggacagagatcgtgctcgaaggaacattctgatggcatcggatgaccagctctgccaagaagcaggtgagagtgactcaagtgagatttgtacccaggaggatgaagaatttgctgttggttccataaaccagaggttaatacatgcaagagagtagcatcagaagaggggccgcccgttttacaaaggtctcgcaatcttccagagtctgcactctgttgctttccatttttcagattctcaactattggagagctctgcctgagcagaatcgcgctcatcaactagtatttggaagatatatatagtacccgagagatgtaatttatacaacatcctgtgaataagtgctgcaattgattnttttcaggagctaccaaaaaaaggaggaaaacagtgtaatggcttattggcactcnnnnnnnnnnnnnnnnnnnnnnnnnnnnnnnnnnnn

SEQ ID NO: 391010 - DNA, 701 bp, Oryza sativa
tcgtctcgcgttccctcccctctcccctccggccatggcgtccaagcggatcctcaaggagctcaaggacctgcagaaggatcccccaacctcctgcagcgctggccctgtgggagaagatatgttccactggcaagctacgattatgggtccagcagatagtccatatgcaggtggcgtcttcttggtttctattcacttccctccagactatccgttcaaaccgcccaaggttgcatttaagacaaaggttttccacccaaacatcaacagtaacggaagcatctgccttgatatcctgaaggaacagtggagccctgcattgacagtgtcaaaggtactcctctcaatttgttctctactgacggacccaaacccagacgacccgctagttccggagattgcgcacatgtacaagactgatcgggccaaatatgaatcaactgcgaggggctggacccagaaatatgcaatgggctgaacgacgtaggccgatagtgttctctagcgatatatgttatcttgttgatctagtgttcatgtcctgctacatgcctacatggggtgtaatttcttctgtcactgaatttatgtcaaattctcgattgatggtagaagttattgagaaaaatttcaattacctgcaatattaattgcttccttatgagcttgttcggttaaaaaaaaaaaaaaaaaaaagg

SEQ ID NO: 391011 - DNA, 594 bp, Oryza sativa
gttttattttcaaccaccgcgcactcacacacactctccgacgatattttccttctctgttttttttttccttcgccatcaagccggattcgaggacggagggatcaatggaggaggagggggagggcctctgcgagatcgcgcggttgccggaggagctcctctccgccgcgatctcacgcgcctcgccgcgggacgcctgccacgccgccgccgtctccccggcgttccgcgccgccgccgactccgacgccgtctgggctagcttcctgccgcgcaatctccccgatctcgccgacggcgagcttctcccccgcgccggcttccaagaaggagctcttcctccgcctctccgatggcccctacctcctatcagaccggctcatgagtatgtggttggacagggagactggggccaagtgctacatgctctcggccagatcgttggtgattatctggggcgatacaccgcactactggcgctggattcctctcaccgactcttaggttgcagaaggtgctgaactcatagatgtgtgctggttggaaattcgtggcaggatacacagcaagatgctctccccaaactcaact

SEQ ID NO: 391012 - DNA, 1257 bp, Oryza sativa
  unsure (1)..(1257): unsure at all n locations
ttcccggngttttccaggggtagctaagtgtgtggaaattggtcttccagaactcatcctacttgttgcattttctcagtatttgcctcaagtgttacattttgggaagcctatctttggccggtttggtgttcttttcaccgtttcgatagtgtggctttacgcgtacattctcacaattagcggtgcttacaagaatgctccaccaaagacacaggtgcattgccgtgttgatcgctcaggccttatttcaggagctccttggattagagttccttatccctttcagtggggagctccaacttttgatgctggtgaagcctttgcaatgatgatgacttcatttattgctcttgtggagacaactggagctttcattgctgcttcaaggtatgcaagcgcaactatgatacctccatcaatcattagtcggggcatcggttggcagggaatcagcatcttgattgattctttttttgggacggccaatggaacctcagtttcagtggagaatgttggtttactcgctttgacacatgttggcagcaggagagtagtgcaaatatctgctggtttcatgatcttctttgctatccttggaaaatttggagcacttttcgcatccattccattgcctatatttgcgggcatgtactgtattttcttcgcttatgtcggtgcctgtggtttgagtttccttcagttttgcaacctaaacagcttcaggaccaaattcatcttgggttttgctttcttcatggggatctcagttcctcagtacttcaatgagtacacagctgttgcaggttatggaccagtgcacactggtgccagatggttcaatgatatgataaacgtgccgttctcgtcgaaaccgtttgtcgcgggtcttgtggcctacttcctcgacaacacgatcgagacgcacaataacacggtgaggaaggataaaagctaccattggtgggacaaattcaggagcttccagaaagacccgaggagcgaaaatctactcgttaccgttcaatctgaacaagttcttccctgctgtctgaatgatctagcaaatgtcccccaagcaaaaatggttcatgtctgaacataatcctgctggccttctccatgttgctgtgctcagttttgtttacttataataggcaatctacctaattggacaagaaagtttcttaaaatgggattaatatcatgtctatttttttgtcctacaatgattcctgtgtcattacctaaaacaaa

SEQ ID NO: 391013 - DNA, 717 bp, Oryza sativa
ccacgcgtccgcacagagatataaagccacagaatatattggtgaatccacataatcatcagttgaaattgtgtgactttggcagtgcaaaagtcctggtgaaaggggaaccaaatatttcatatatctgttctagatactacagagccccagaactcatatttggggctacagagtacacgacagctattgatgtgtggtctgctggctgtgttcttgctgaactacttctagggcagcctgtttttcctggtgacagtggcgtcgaccaacttgttgaaattatcaaggtactgggtactccaacaagggaagaaatcaaacatatgaatccgaactacactgagtttaagttcccccaaatcaaagctcacccatggcacaagatctttcataaaagaatgccatctgaagctgtagatcttgtgtctcggcttctgcagtactcaccacacctccggtgcagtgcattggaggtgttaattcatccattcttcgatgaactacgagatccaaatgctcgcttaccaaatggccgtactcttcccccactattcaatttcaagcctcgtgagctgaaaggagcatcaatggaatttcttgtgaagttggttccacagcatgctaagaagcaatgtgccttcttaggattatgagcagacagttcatacactaatccggtattacgttggtctacttggttccgtagaacagcat

SEQ ID NO: 391014 - DNA, 1040 bp, Oryza sativa
ccacgcgtccgcgaggatgttgcacgtgacacaaacagaggtcacactgtagctgctgttgctgattgcttttgtttggctaaagatgctggttttaaggtggtcgcccacatgatgccagatttacctaatgttggagttgaaagagatctggaaagtttccgagaattttttgaaaatccagcattccgagctgatggtctaaagatttatccaactcttgtgattcgtggaactggcctttatgagctctggaaaactggcagataccgaaactatccacctgaacttctggtggatattgttgcaagaattctatccatggtaccaccttggacacgagtttaccgtgtacaaagagatatccctatgcctcttgttacttctggtgttgaaaaaggtaatcttcgtgagcttgctttggctcgaatggaagatttaggcttgaagtgccgagatgttagaactcgtgaggcgggaattcaggatatccatcacaaaattagacctgacgaagtagagcttgttaggcgtgactatgctgcaaatgagggctgggagacctttctctcatacgaggatacacagcaggatatccttattggtctgctgcgattgcgaaaatgtggccgcaatgttacatgccctgagctagtagggaggtgttcaattgtccgtgaacttcatgtatatggaactgcagtccctgtacatggtcgtgatgcagacaaactacaacaccagggttatggtactcttttgatggaagaaccagaaagaattgctcgcaaggagcatcgttcaaagaaaatcgctgttatatcaggagttgggactcgccactactaccgtaaactgggttatgaacttgaggggccttacatggtcaaatgtctggtctaataacttctatttatggatgcttgtactccagcagcattgtcactgtagtatgggttttgtacaccagtgtaactttttttttatatgaatgagtaaacacacctcctttcaaaaaatgagtaaacataacatttaat

SEQ ID NO: 391015 - DNA, 1337 bp, Oryza sativa
tggactttaaagcttgctactcagctgctctaagctcacaccgatccagtaatcgagctccagacatccatcaatggccatggagctctctaacctgacgaggtgccatctgccactgctcctgctcttcctgctggcaggatcctcctccatggctttgccagtgcatcctgcaatggacagggtgagatggcaggtcgacaaggtcaaccggcggggccattccatcgggctcgtcatgtcgtacatcgatgaggccactgctcttgaatcctccggctacttcagaccttggcatgtcctccccttcgttgacctctacggacgaaggtatcacatcgggagtattagaggtgtcaatgttatatatgcactgacaggacaacgcaggttaaatgcggctgtgactgtacagactctcatcgacgtctttactgtgtctggcattgttcattatggcacagcaggaagctctaatgattcaatgtcatttggcgatgtcagtgtccccaaatttgttgcttatacaagtgcttggacatggaagaagttcaaatcaccaaaagagtcggatacagaacttagctttggagattttactgtcccaaatggaggagagaatcttctaggagctctgaaattcagaaatgaggagctatactcagtgggtaagcctatgaaagaagttttctggttacctgtagattcagcatggttcaaaatcgcagaaggacttaaggtttcacttgaaagatgtaacgacactttctgcttgccaacaactccaaaagtagtctgtgggctaaaaggatcgtcagctgatatgtttctagacaatgcagaatataggaagttccttttcagagaatttggtgtatcaacagtagatgaggagagtgcagcagtggtgatgacaacaacatctcctggcatacctgtgattgtattccggggagtttctgatttggctggaggggagccaacatggtcgtcaacaagcctgatgaacctggcatctattaatgcactcaaagtggcagtggagtttattgctacagtcgggaaacagaagtcaacaatgtcagcaggaagtgctaataactgaaggaaaaagatcacatccatgctgatccaataatgccctggaataacattttacagcagtagctgcattcaccacccacatgctttcctgagcttcaagtgcatgtcctctcccataaaggatattagtgttgaattattttgttgaaacttgtaagcatgcatgtgcgatcattttattgcaaatggaacacccgatgatgttgctttttacgaaaaaaaaaaaaaaaaaa

SEQ ID NO: 391016 - DNA, 710 bp, Oryza sativa
ccacgcgtccggcagatccagatggtggtagtcctggtgatctttatgtaactctgaaggttcgtgaggatccggtatttcgaagagagaaaggtgatattcatgtagatgctgtattgaacgtgactcaggcaattttgggcgggacagttcaggttccaactctctctggagatgtagttctaaaggtcaagcctggtactcagcctggccaaaaggtggttctgagaggaaaaggaatcaagacgagaaattcatcgtactatggagatcagtatgtccacttcaatgtcaacatccctgcgaatttgacaccgagacagcgcgtgctgatcgaggaatttccgaaggaagaccaagctgaagaggagaaagacgcaaagccagcaggagcatcgggatagctgattttaggaccgacccgtacatttgattagtgctttagtctcatcatatatcgcgagatagaataggctgctgcctgaaatttgcaggggcaagaagatatagtttggttggatgcatggaaattttacatgccgacatatagcagtttcaaattttgtacctgggaataatatgcaccacgtccgcctgatgtttgcaatctcctaatgtcactagcatcagtgagacaggcggcaggatcctgtattgtataattttgtgtgttaagaaagtatggaactcacggtaccaaaaaaaaaaaa

SEQ ID NO: 391017 - DNA, 449 bp, Oryza sativa
ccacgcgtccgctctctttcattccgggttacccactgctcaactttatgcttgctacagcaatatatcttcttatatcatacagagtgtttgagctgacaggtgtgttgaagtcagcttttattcccagcagagataacaatcgtctatatcaaaattttgttgccgggattgccatctccgtatgtctgtatttcctctcaattgtacttcttaagattcccattgtataggtaaaagaacctcaacagacaacacaaatcaatgcatctattatatactagacaacagaaaggttttgtggcgcagttccaggaaaagaaaatgttcacggtagaagtttgcttgtgaattgttgttagaatgatccgtcgaccgtcggcgcctagttccaccttgcagatggagataagtgcactccaaataggaagaggatatttgtttccacc

SEQ ID NO: 391018 - DNA, 509 bp, Oryza sativa
aaatcatccaaaagagtggatatcaggcccttccttgggttcgatacatcacaatggctggtgaatatgagttcaaactcatctgattttcacacctctggttgctggaagaaatgattcatttcctggagtccaagcctcccagggggcgtttacagaggcaactcagacgaacattcactcgctggatgggctcccgaggcttcatggttccatctcgcgcaagcgaggaaagctgctgacagccatgttattgattttacccatgttttgctgcaagtttgtcatcagtataggtccccagaatcttcatttcttttctgcgttttgttcccagccgatatctcttgtatcattgtaaaatttatttaatcaactgatgtcacaagcttggatttttttttgtatctcctgtacctaattaacaagcttggatcatgtatacccctatgtatatctctcctctccatcaaggaaaagaaatgttcacggtagaagtatgcttgtgg

SEQ ID NO: 391019 - DNA, 475 bp, Oryza sativa
ccacgcgtccgcccacgcgtccggcttgttggttcgggtgttgggcttgttggttcgggtattggcgctgtcggcagcggcctcggtaaagctgggaaattcatgggcaagactgtggccgggcctttcagtatgtcccggaagaacggtagcagctcaactgctccccaggctgaacaaccttctgcgtgacttgatgtacagtgattgcaatggacatcgcatgttcagttgcgtgttaattctgtttgatataaacctgtgatacctagaattatagggttgcataccatgcatttcagtgttctggcaccgtcggtgtcaattatatgaccatctgttgcttttttttcttcgttctgtttttacctgaagataaatagcaagattaaactggtaattggcaagctagacatatccagatcctttctggacaatgcaatggtattggaatttggtcgttgttaccggcttg

SEQ ID NO: 391020 - DNA, 576 bp, Oryza sativa
  unsure (1)..(576): unsure at all n locations
ccacgcgtccggaatcaaactcgaagcccatctgctgccctgttcaagatagcacatgttttggtctttgcaccacttgtgagggcaatgcaagtacaattttgcacccaccatctggatatctttttgaggatgatgttgatgacgccattgaagtttatgatgttaatgctgctattgatgtgtttggttctgcttcgtgcagtcttagtaaagataaagataaaggcctgctagagtcagatttcatatattttgatcatggaaggaatgcaaatcttacaaagattctgaatgacgactctattttatgatgaagacaatggtgatgatatagctctgctgttagatttggaggggatttattgacatatattgaggtgtggaattatttatcctcgaacccctccaatccctctgaacaaggcttaatatggatgaggaggggatcattattcaggttacaagtttgtctagtcattgtaataacagaagaatctatatttgcttttggacaatgagtcgcnannctgtnnnnnnnnnnnnnnnnnnnnnnnnnnnnnnnnnnnnnnnnnn

SEQ ID NO: 391021 - DNA, 928 bp, Oryza sativa
ttctttacctagcagtccaaaatcgctaaggtgtttggcggagccaaaggttgtaaggaggatcagggttgtagctgagaagactccaattcagcatgttctccagccaccaaccatcgcctccttgctcgccattgtcatcggcatggttcctttgttcaaagattttgtgtttgtgcctgatgcaccactgtcgttctttacagacagtttggagattctagctcaagccgttgtaccctcggtgatgttaattctagggggcatgcttgcagaaggacccaaggataatgccttgggtatccggactatcactggtataattgttgcaaggctcctgattctcccgtgcattggcatcggtgtcgtcctgctggcagatcggttgcatctgcttgtcgaggaagaccacatgtaccgctttgtgctgtcgctacagtactccacccctagtgccatcctgcttggagcgattgcgagcctcagaggttatgctgtcaaggaagcatcggcacttctattctggcagcacatttgtgcggtgctatctctctccatctacctgatcgtatatttcaggttgcttaccatttgaaagatgacggccggccgccttccaaaattggtttgtagcattcatcctcggaagtgatttctagggagatgggtacttgaatggattttcaaccacgtctccttatggtcaagtgtatttatagtatatttaattttttttagcgatttatatttcagatacatgtagaacttgagaacatgagatatgttcttgtcgttcattagtgtcaatatattgctgttcgcttgcacatttcttgatccgattacagcattacagttgctgctcaaaagttgtacaagtactgctacattagaagtcaatatattgctgtttgatgcagtgatgctt

SEQ ID NO: 391022 - DNA, 635 bp, Oryza sativa
attcacaatgtgtacaaagtggtcgaggcaagaaaaggaagcatgctgctggcactagcaatgctctttccttttggtttgctgttggccggagttcttgtctggtcctacctatctccttcagatataatgagaaaccagccacatcttctagttattggaactggttttgcatttggctttcttgtgaatgattctggctcacttatgtgatgagcccaaaggtctgaagacagggatgtgcatgtccctagcatatttcccatttgcaattgcaaatgcgctgactgcacggcttgatgatggaaacccccttgttgatgagcagctaagttctcctaaatggactgcttatttaccgtggctctctacatgcattttgctacatctgttatccatgaaatcaccaatgctctcgggattcattgcttcaggatcactaggaaaaaggcataattgtgaaccatccacaattgccttgctctggttggcaatcatatgttatatttgcgcaaaaaggcaaatattttcaattattcttcatgaagattctgctcttcagatcatatttgcatttgttattcccaggattgctattatccgagattgaaattatcatcagaacttgtgctgat

SEQ ID NO: 391023 - DNA, 918 bp, Oryza sativa
  unsure (1)..(918): unsure at all n locations
ccacgcgtccgcccacgcgtccgtgggaaaatctcccgtcccgttccgctccagcgcctgcgccgatctccatctcgcgactcgcgagcagagcagggttggtaggggcgcccatctccatccggcgagcagagcagagctggaggaggtgcgccatcgtcccgctgcatcctgtttggagcctggatcttgccaaacaagtggttgatcttactgctttcggcggccgtgtctcctccacaggaaggaaggcaccgcggatctagaggaggccatgggagaattctccaaggaatctcgcccttctgtgaagaacattttgcttctggattctgaagggaaacgtgttgccgtgaaatacttctcggatgattggtctagtaatgcgtcaaagttggcctttgaaaagtctgtctttactaaaactctgaagacaaatgcacgctcagaagctgagataacattgtttgatggctatattgtcgtttataagtttgtacaagaccttcatttttttgtcaccgctggtgatgatgagaatgagctcattatagcaaatgtactacagggcttctctgattctgttggtcttttactcaggggtgatgttgagaagaggactgcactcgagaatctggacttgatacttctctgcatcgatgaaattgtagatggcggcataattctggaaacagatgcaaataccattgccgggaaggttgcaaccaatgctgttgatggttctgcccccttctctgagcagacgatatctcaggctttancactgctagggagcaccttgcaagatctctgctcaagtaaatcatttatcttttgactccttaanacttctctgcgttgaggattgggcgagtgtacgttggaagcatgtaattggtaccttttacncataataag

SEQ ID NO: 391024 - DNA, 701 bp, Oryza sativa
  unsure (1)..(701): unsure at all n locations
aatatcagcagatgcacaagatccgagtaaaatgccacttctaggagatgcccttgtcattgccgggacaatattttttgcatttagcaatgttggtgaggaatactgtgtcaagaaaaaagatcgagttgaatttgttgccatgtttgcactctttgggttgcttgtcagtataattcagatattaatatttgaaaagaagaacttagttgcaattgcctggtctccaacaatgttatgtctgttcgcaggatttgcagtggcactatttatgttctacagcatcactccttttgtccttaagatgagtggatcaacattgttcaacctttcactcctaacatccgacatgtgggcagtcgccattcgagttttattctatcaccaacagataaactggctgtactatatagcgttcgcagttgtggccattggattgatcatctattcgctgaatgaccattcttccgacagtggaacaagaacaactgcaaatacagaagcagcagcccaataccagcaacttccaggagagaataattcaacaggaattggttcgaacgacagccaagaaaggaaacaagaggaggaagttcatatctgttagtgggggtcaatgtacaaagtcacctnccggggtgaatttgggcataattacatatggttacaaagggcaaaaaaaaaaaagaatatgctagggg

SEQ ID NO: 391025 - DNA, 438 bp, Oryza sativa
gggtggggttcagggcgcagaaacttcttcgtttgaaggtccagggcatcattttgctgaggccccaaaagctaacaactcctgggacagtgtctggactgatgatggtagtgggaagtaaggcaatgtttgtgcagagtgagtgttttgtgagagaatcatgatgagtttgtttatgggggagaaataatctgttgacatctgttcatatgctatttgcatttgaatgagagagaaaaaaaagaagtaatcactaatgctttttgtatgtaatgctcttccctagtaacatctgtagctctgtaaaaacaagctgttaaagcacctccctggaaatgccagagtgctagtaatatagcaatatttgtgtaaccgcacagtaaaaaaaaaccccccaaaaagaaaataagatagggcggaaagctagcgatctagtgc

SEQ ID NO: 391026 - DNA, 975 bp, Oryza sativa
  unsure (1)..(975): unsure at all n locations
tctgtatgcttcttgttgagcaagttaaagttagcaaaggtagtccacttgtgacatgcctcttggaaggtcctgctggaagtggtaaatcggctttggctgctactgttggcattgacagtgattttgcttacgtcaaaattatatcagcagagacaatgattggtttcagtgaaagcagcaaatgtgcacagatttgcaaggtttttgaggatgcatacaaatctcagtttggcatcataattctagatgacatcgaaaggttactggaatatgttgccattggaccacgcttttcaaacataatctcacaaactctactagtccttctcaagagggttcctcctaagggcaagaacttgcttgttattggaacaacaagtgaagtaggctttctagaatccattggtatgtgcgacgtgttctccgtgacataccatgtccccaaactgaaaaaggaggatgctacaaaggtgttgcggcatctcaatgtgttcgatgaagcggacattgatgcggctgcagaagcactggacgatatgccaatcaagaagctgtacacactcgttgagatggctgcacaagggccatcaggaggaagcgcggaagcagtctatggtggagaggaaaagatagatatcaaccacttctttagcatcttgagtgatattatccgctattaactacacggcgtcggaatgaaccctaggtgacaccataggaatttaattgcacatttcttcttacttcaagttctcccttttgccaccgtcgccagggtatagggttgtttgatctttgaggttcgtgtctccttgttgtgccgctttgagcttttgttggaatgttgttatgattcggacagaggtataccttacacgatgtagcatgtttcaaccgtatgttcgatactttcccagcacagagtgcacgaatatgattttgggnggctcnnnnnnnnnnnnnnnnnnnnnn

SEQ ID NO: 391027 - DNA, 573 bp, Oryza sativa
ccacgcgtccgcagaagagtcatgtacaatgaagcgattccactcaccgggaagacggcgaacaacacagagccttttaacagaacctctgaaagcagcagcaagttacctgatagcaagccagcatcatcagttgttgtctcggtgctagccgatccaagggaggctggtaatggggatggcgatccgagagtatctccgaaacccctgtccaagatatttgttgttgttcttgttgacggtgtgagatatgtcacttactcctgcacgcttcctttcaagagctccagcccacatcttgtgaactaagcggctgggttgttcgccaaaaactgacagatgaatagatttatacaatgatctgatgctgtttcctaaccaaggactaaacttcctatgcactcaggctgaggtaattcaagtttgtcgaaggttcggagtgatgagtgcgagtttagttaatgtatgcagtttttgcagtgctgtgataatcgggttcgtttgctgtacctctagctgtaacggtgatgtaatcatgtaatactgtttgatcgtgagatataagtgcaacta

SEQ ID NO: 391028 - DNA, 566 bp, Oryza sativa
ccacgcgtccgggaacaatggtttaattgggttattcacggagaagtgatattcgttggttgtcatggttgcctggaagggaattacaacatttgattttaagctttaatagcttaggcagcgtttgggctcactaaagtgcttcctttttcttatcttttagacttccactatgaattatttaacacccataaaagaactttccttgcatgattttctttattatgaaatcaacatttatattgacaaacctgcttagcttcagttggacaatgatacgctgcagtaaggcatctcattgaaggacattggtggattctgcactgctgttctattacttaacttcagtagagaatatatttgcccttttgcttgacttcatatggtgttatatttctcattttagatggacattcgtctaatttatctgtaaccgtgatctttttctgaaaatattctctgcaaaggagaggtcatctgaagcattgttaaaaaacaagtaagtagcaaaaaaaaatcatggtacaggcgtcaatggtacgcagtagtgaaaacatagttaggag

SEQ ID NO: 391029 - DNA, 426 bp, Oryza sativa
ccacgcgtccggcttgtgcactacacggttatgcatgcaccaacaacggaccgagctgtgagatacacatgtgatggaattcgaacggagcgtctatggtcaagttcccagcatgctctcctgctccacaaagagcacattggtccgagcacaccacttcttgatgttcacggtgtgcgtctgaaaaattccagcacaactgcacgtgcatttattgcccgattgcgaagaagtgatgatgataactacccagagaccctatatcaaatgtttattgtcaatgctggtccggggtttcggctcttatgggacactgtgaagtcctttctggacccaaaaaccacttccaagatacatgtactcggggacaaatatcaaagcacgctgctaggagtaatttgatgctagtgaattgccggattcctt

SEQ ID NO: 391030 - DNA, 934 bp, Oryza sativa
  unsure (1)..(934): unsure at all n locations
ccggtggcctttttggccactaggagaatcngcagatgctgattcagtaattagaactgtcagattagttttctgaaagtcttgcgagacacatctatggactaaaaggaaagaatattgatgtttttgcggagaacagcagtttagccatcaaccctcactacatccagtcctggttggatcttttatcacgaacaccacgggttgcaccgtttcttcagaagaacgatccctttatagcagccctaaagaaggaactatctgagcacactgctgatgtccacgttcaaagcgatgttcttgatggcatgttcactttctatgatgcaacaaaggcaactctaaatgtatatcaggttgcaagtgttacttttgatttactgttccttctggtgattggctcctacctaattattctcttcagtttcctagtaatcactacacggggtcttgatgatctcatcaacatattccggcgaccaccatcacgcaaggtcaagggggcataatagaatagattgtgctttgtgtattagtatccaggaacgcgctgctagttagaagagctagacaccaggacgacaggcgagacgacccagctctccacagcaaacagacttgtaatttcaaaattttcatgttcgatagccaatgtgagtggcttcagatactgcaaggcagaaacatcacgaattttgactgatgaagctgcattttgttttatgttatttttgctggtgctcgccattttggctaccatggaatcaaagggcctcttttgcagaattatcgatcctgtcagcaggggcgggctcaagatttagaggttgggtattcgaaataggtaaggggtaaaacaaatttacacccaaaagtctaataattggtttgtgtaatatcatatacaagtaatatattatatgcatgtagccca

SEQ ID NO: 391031 - DNA, 892 bp, Oryza sativa
  unsure (1)..(892): unsure at all n locations
ccacgcgtccgaagaggtattgagagagcagattgcaggaggccagcctcgtacacacaggccgtggaagaagattattgtgattgttgagggaatatatagcatggagggggagctatgcaaactccctgaggttatagctgtctgcaagaaatataaggcttacacatatttagacgaggcacacagtattggagctgttggtaaaaccgggagaggtgtttgtgagctactaggtgtggatccagctgatgtcgatattatgatgggaacatttactaaatcatttggatcatgcggaggttacattgcagcatcaaaagagattattgatcatctgaagcacatatgccctgcccatatctatgcaacatccatgtcacctccagctgttcagcaggtcatttctgcaataaaagttatccttggtgaagatggatctaacagaggggccaagaagcttgctcagattcgagagaacagcaatttcttccgttcagagcttcagaaaatgggttttgaagttcttggagacaatgactcgccggtcatgcctatcatgctttacaatcctgctaaaatacctgcattctcaagagagtgcctgaggcaacacgttgctgttgttactgttgcatttcctgctacaccactactgcttgccagagctaggatatgtatctcagcttcccactcaagggaagatcttattaaaggattggaggttatcagcaaagttggtgacctcgtgggaatcaaatacttcccagtggaacatgaaaagactgcatctgttgagaaactgaagaagcttcaatgaacacctacaaccagaagaaatatactgggtgatctangcagtgtgccatgcctcggttcggctcatgtgcct

SEQ ID NO: 391032 - DNA, 492 bp, Oryza sativa
ccacgcgtccggagccgtcgccgccgtgggatgtcgccgtcgtcgtcgtcgtcgagcacggggccgatgggggtggcggtgtcgccggaggtggaagcggcgctggcgcgcggcggcgcggtcgtcgccctcgagtccaccatcatctgccacggtatgccctacccgaagaatctccagaccgccatggaggtggaggccgtcgtgagggagaacggggcggttcctgccaccatagccattctgaacggcgtgccacatgttggccttagcggcgagcaattgaagagcttggctgtaagtggaagacagtttcagaagacggctagaagggatattgcacatgttgtggcctctggtggtaatggtgcaacaacagtttctgccactatgttttttgctcataaggttggcatacctattatcgtaactggagggattgtaggtgttcatagaaatggtgtacagaccatggacttattcttatgtctt

SEQ ID NO: 391033 - DNA, 717 bp, Oryza sativa
ttgatgactactggcatcactggcaggaggcatttgcaggctctctgataggtcttacagacgcatcattttgttatctgcaattcttcccatatccttatgacgcagacgctttctggcctcatgcatacaccttccagctagcggaggcctcgcgcaacaataacaccgcaaactcctacagcgtgagaccgaccgggttcgagactgtcaatgtcccagaagggcatggcgggattgctctgagagacaccaacctagaggccggcaggagaccgtgaaatctgagacctggactggagaaaatctaccaaataccatgacaatatcctgactttacgagttcgaattttgtccactcgacagacgatatggtaggctgtgttcatatatgtattacagttgtatctagatctgctgtttcatcacttctgaattggtctcttggcttccatggtttttgttttctgctaatgggatggctagccccagaagcattggctgtaaacaatctagtagacgctctaaaattacattgtacattaactctgcttattttgggtttggtcaagatagggttgtggtcataattgttatgcttatgtatgctctctctgcattacagattctgagaaacggtgtaatgaaatttggacttcctcgatgtgatgaacgtgagaataacccaattacattgatatatgttgattttgttat

SEQ ID NO: 391034 - DNA, 678 bp, Oryza sativa
  unsure (1)..(678): unsure at all n locations
ctagtnctagatcgcgggcggccgcaatctgagangttaattttnanttgcgatcgcnagcttgggtcacaatctcaaacagtcattgggaggccaactcttcctgatgctactgttcatgctgtcgttgaggagcatgccctagatgcaaaggttatcatattcaaaaagaagagaagagaaaattaccgtcgagcaaagggccatcgtcaggaattgacaaagctgagaataaccaacattgaaggaatagataagtcagaggccacggctgttgctgcttaaattaagatgaataatgaaggaacatggcttcatgcccaggcagtccttcatactggttttagtgtccaatcaaatcttgatgcggcgtgctgttgcttattgtcagtcactgattgaaagaaccatatctgaaggtcttgtctatgtatccacattttgggaacgggccactcaagctatgccctttctcacaatgccaatgtcttgaccagtttggatattctgatgtggatcccatcttgtagttacagccaaactaactttttgttttctttctccatttactagcgtacctccttgaatgtgttccaatgcatcagtgccatgtataccgttctagccatgaataatgaaactgaaagtttgtggttcccatctaaaaaaaaaaaaaaa

SEQ ID NO: 391035 - DNA, 651 bp, Oryza sativa
tctttgagagtggggtgatagagtcaaattgctactattggtttggctgctgatgaaaatccattcggtgttgtcctggggggagttctggcccaagcactctgcactaccgctgctgttatgggtgggaaaagctcggcctctcaaatatctgagaaaatggtcggattgtcgagtggagtgctattcctgctgtttggtatcatgtcatacttgtcaggacccagaaggagaattataatgcccccagaaagtcatgcataaggagaattatcatgttcatcatggccggttaacaagcttgttttcactacgacttgatctcatcttagtaggtggacgatggcgacgaaagcgctgatcctttgcaaggaggatggcgattacttagcttagtcaacacattgtaaacatttcactcatcattcataaataacaagatggtaccaaagactctactggttgcttcgtgttagtcccagcaccagacaacattcagccaaaactgtcggagtagttgctgcatactaccatactatttttttggtcgcaactatgcataagaactgctagtcttcggactaaattgcctggactgaagaggggttacaaatcataaaaagtgatttcagaattagttgtttttctaaa

SEQ ID NO: 391036 - DNA, 561 bp, Oryza sativa
  unsure (1)..(561): unsure at all n locations
ggaagcagctagcttcactgatccccattactaccagcttcttcttccaatcttcttctccgacgagcagctagccagctagcggcgccggccggcaatggcggacgaggtggtgctcctggacttgtgggtgagcccgttcgggcagcgttgccggatcgcgcttgcggagaagggcgtggagtacgagtacagcgagcagagcctcgccgacaagagcgacctcctcctccgctccaaccccgtccacaagaaggtccccgtcctcctccacgccggccgccccgtctgcgagtccctcgtcatcctcgagtacatcgacgagacatggccgncggagccggagaagaagaaggagtcgccgcgtctcctccccagcgacccctacgcccgcgcgcgtgccaggttctgggcggactacgttgacaagaagctgttcgactgccagacacgcctctggtagctcagggccggcgacgccgngcacgancaggccaagagggacatggcggaagcgctggggacgctggaggcggagcttcggggagggggactacttnc

SEQ ID NO: 391037 - DNA, 558 bp, Oryza sativa
cctctctctctctctagtttacttttcttggagccaccaagaaaccagccatgtccgtgctcggtgtcttcttggcgtcgctgcttctggcggcggtggcgccggcgagggcggcaggaggggggtgcgcggcggagaggttcagcagcaaccgcgtgtacgcggcgtgcagcgacctgccccacctgggcgcgtccgtgcactggacctacgacgccgcggcgtcggcgtcgctgtccgtggcgttcgtcgccgcgccgccgtcgcccggcgggtgggtggcgtgggggctcaacccgaccggcggcgggatggccggcacgcaggcgctcgtcgcgctgcccaaggggggaggaggcgggtacgaggtccagacgttcgacatcgaggggtactcgctctccgcgccggggaagctcaagtaccccggcgaccgacctcgccccgaggtcgccgccgacggccccttcaaaaccttctgtaagcttgtgctgaagaaccacaccttctaaaggctccacgtgcaactggccaacctcttcttgatgactggaattg

SEQ ID NO: 391038 - DNA, 650 bp, Oryza sativa
tgaacgagggcgacgagagcgtccacgcgctcaagtggtgcctcgccagcttcgccaagcgcggcggcggcgggggcgcggcgccgcggaacaccatcatcctgctctacgtccggccgccgccgcccacctactccgtgctcgacgcctccggctacgtgttctccgacgaggtggccgccgccattgacgggtacagcaaggaggtggcggaggcggtggtggagaaggcgcagaagctctgcacgctctacggcaaggaggtcggtggcgaccgtgaggctggccatgagatgaaggtggaggtgaaggtggcggtcggcgacgccaggaacgtcatctgccagatggcggacaagctcggcgccgacgtgctggtgatggggagccatggctatggcctgttcaagagggctctgcttggaagtgtcagtgattactgcgtcaggaacgccaactgtccagttctcatcgtcaagtcgtagctgccactcactccagtgcttgtaactgtgcagcagcatgtgtgctctgtccggcttttttttttgtttttgccttgtgttctgctttgtatgtctactttagttcgcttcgcatgtaatctgccggaagaggacgtgctgagtgattactcataactctgaagt

SEQ ID NO: 391039 - DNA, 679 bp, Oryza sativa
  unsure (1)..(679): unsure at all n locations
ccccgtaaatccnactcactattaggccgaattggttaccggcccccccctcgantcgacccacgcttccgagaaatcccagcccggagctggtccacctcctcgccttgatcatgttgctgtcagcttacctggggggagagttttgatatttggtggatccagtggcaggtcttcattcagcgtcacagctttatctcttggatccaactgaagaaaagcctacctggaggatactgaatgttcctgggcgacccccacggtttgcctggggccacagcacctgtgttgttggaggaacaaaagcaatagtgcttggaggacaaactggagaagagtggatgttaaccgaaatccatgagctttctttggctagcagcacagtttgaggactggaacactggatgagtatactgaatcttttggcaacgacttgtatttacttggaagaggtggtttgccttgagtagatcaaaacctacatttggggttgcttgctttatgtagtcaaggtgtagtgatatgttctttttcttgttgtttgttttgtcttttaccagaaaatataattcataagctactcttgtgaaatgagtaccaattttatgtattctcagacgcttctgacatgcattatgttagggaaaacagaacaacgttgtataaaaaaaaaaaaaaa

SEQ ID NO: 391040 - DNA, 387 bp, Oryza sativa
ccacgcgtccgcccacgcgtccggaaaagcctacctggaggatactgaatgttcctgggcgacccccacggtttgcctggggccacagcacctgtgttgttggaggaacaaaagcaatagtgcttggaggacaaactggagaagagtggatgttaaccgaaatccatgagctttctttggctagcagcacagtttgaggttcgaagtttattttttatgtttcagcgagcttccttcagaacaatcatgattattcatgtgtggcctgaaacttttcttcactggcaggactggaacactggatgagtatactgaatcttttggcaacgacttgtatttacttggaagaggtggtttgccttgagtagatcaaaacctacatttggg

SEQ ID NO: 391041 - DNA, 514 bp, Oryza sativa
gcccccaacggccacaggtccgactggatcatgcacgagtaccgcctcgagaccaccgagacggccccgccgcaggaagaagggtgggtggtatgccgggtgttcaagaagagattacccacaacaagaagagattcagaccatgacgcaccttgcggcagctggggcgttgatgaagatgcaccgggcgccttcatgtctccgatgatgatcaccagatcatcaatattgcgcccacaccaacaccacgccggcatcacgctgcaagagcaacacctccacaccacttacaagcacagagacctcactactaagattcagcagctccaagtccctgcggcaggccatcatcttctcaacaccatgccccatgacctggagagttctacttcctccttccattctcttttggtctcacctgatcaccaccaaatcaacatgcaccatgctcaggctgatcccttctttgacgacatgcatgcagtcgatcaagccactaccactgactggagag

SEQ ID NO: 391042 - DNA, 498 bp, Oryza sativa
ccacgcgtccggccagagcgtgtgtcagtgtgtgtgtgtgggagagagagagagacagcagaggctccatcggccatggcgctcctccgctccctggcttgcttcctcttcctcctctgctcgtccttcaccttcgaggccgtaaatgggaggatgtacgggggaggcgacgtggtggaggaggaggaagacgatagcagtacggtcgccgacggcgctcgcggcggcgcgggtgggtggcccgggtacctctacaccagggccgtcgggagatgcacgccccaattctggagcagtggagctgagcaatggcccaacatcatccctcaggaagcggcggtgtcgaaggtgttcggctcaaggtccatcgacaggtacgggccacggctcaccgtgcttggaggccaccactaggaccgacgactatggcagcagcagcgccttctgcaagctcgtcatgcaaggcaacgcggctctgctcaacgcctacgcgcgcaa

SEQ ID NO: 391043 - DNA, 543 bp, Oryza sativa
cccacgcgtccgacaacattcaatgaagttgttgctgtaactggtgatggcacaaatgatgcgcctgcgcttcatgaagcagatattggacttgcaatgggcattgctgggactgaggtggcgaaagagagtgccgatgtcataattctggacgacaacttctccacaattgttactgttgccaaatggggacgctctgtttacgtcaacattcaaaagtttgtgcagtttcagctgactgttaacgttgtggctttacttgtcaacttctcttcagcttgctttacaggaaatgcacctctgacagctgttcaacttctttgggtgaacatgatcatggacacccttggcgcccttgcattagctaccgagccacctaacgatgacttaatgaagagagagccagtgggcagaacagggaaatttatcacaaatgtcatgcggtggaacattcttttgccattcttattatttttcatatcatttttcactcctatttccttaatctctatcctcttctttttacttttcaccctttctttc

SEQ ID NO: 391044 - DNA, 868 bp, Oryza sativa
gagaagagcaaaaaagcaaaacagcaaagcgaggagagagatggcggcgaggcgaggtcgagggcgcgggcgcgagtgggaggacgacgacctcggcgtcggcggcgggcagcccccgcacctcgccgcgcccgtcgtctgcctcgcccgctccgccggggacctcgccgccgggccttcgtcggctccctcgtcggatacgggcaaggtttgctcactaacaaaggtatgaagggttcactcagcagtgctggatcttctgccaagactttcgcagcactgtctggtgtccaaagttttatcctgtgcttgctgagaagattgcgagggaaagatgatatgatcaatgctggcgtggctggttgttgcacaggacttgctttgagctttccaggtgcaccgcaggcgatgttccacagctgtgtcaccttcgcggcattctcttgcatcatggatggactcaataagcagcaggctgccatggcagcgacactttgccagtaaaccttcaaccatcaagcatcaggagggcgacgtcctcccaccgttcactcttccaccgctgctgaacgcttctgacgctttagcttcatgctgccaagccttcctcaaaccgaaggactagactgctgaagaataatcacagaaaaatcttgctccattagttttgtatttgcccttagtattcggaaattcatgcccagttatgtgctatgtttccctgaacttgcttaactttgatcctgttttggttctgtgggtatcaggcatactcccaatttttgtatctattttgttgatgcactttgtaacaagcttaatgaaaaatataatagcaatatcagtgcttatcaggctaaaaaaaaaa

SEQ ID NO: 391045 - DNA, 1174 bp, Oryza sativa
  unsure (1)..(1174): unsure at all n locations
gacaggcgtcanaagtgacctatatagctttcttcaggtgttctttaagaagcatccagagtttgcaaagaatgacttctttataaccggagaatcttatgctgggcactacattccagcattcgcaagccgggttcaccaaggaaacanagcaaacgagggcattcacataaacttgaagggttttgcgatcggtaatggcctcacggatccagcaatccagtacaaagcttacaccgattatgcattggacatgaaccttattaaaaaatcagattacgacaggatcaacaagttcatcccaccatgtgaatttgcaataaagctttgtggtaccaatgggaaagcatcttgcatggcagcatacatggtctgcaattctattttcagctccatcatgaagcttgttgggacaaagaattactatgacgttaggaaggaatgcgaagggaaactttgctatgatttctcaaacttggagaagttttttggagataaagcagtcaaagaagcaattggagttggcgaccttgaatttgtctcatgcagcactactgtttatcaagcaatgctgacagactggatgagaaacttggaagttggcatcccagctctacttgaggatgggatcaatgtgcttatatatgctggagagtatgatcttatatgcaattggcttggaaactcgaggtgggtccactcgatggaatggtctggccagaaagactttgtatcatctcatgaatcgccatttgtagtagatggtgccgaagctggtgttttgaagagccacgggccactcagcttcctcaaggtccacaatgctggtcacatggttccaatggaccaacccaaagcttccctggaaatgctgaggagatttactcaagggaaactcaaggaggaatggcttgccgagcttcctgagcaaccgatgtatgctgcgatgtgataaaaatacaactgaaatagtctaataggtagtttgagttgccgtttcacggagtgcctaaagcttcatgtttccttttttaccctctttctttttcccaatgtatcaactgaatgcataattctgaaaataacgttggaaccgcgatgtaactaaagttccactcatgtacactgcaaatgaaaaatcaaatacatggacgggaaatgtttcaaaaccaaa

SEQ ID NO: 391046 - DNA, 542 bp, Oryza sativa
  unsure (1)..(542): unsure at all n locations
agctcaccagttctgacaacggcgtgagcagacatcacctgatctcaccaagaacatggccgccggcgagaggccggcgaccatgcgcgccgtccagtacagtggctacggcggcggcgccgctgcccttaagtttgtggaaatccctgttccttctgtgaagaaggacgaagttctcgtaaaagtagaagctgcaagcatcaatcaatccgatttgatgactcagaaagggatgatgcgcccctttcacccgaaatttccatttattccagtaaataatgtgtccggagagatcgttgaggttggctctgcagtacgcgagttcaaagttggtgataaagttgtctccaaactagacttctggacagcagggggccttgctgagtacgtggccacatcggacaagctcaccgtcgctcgccctgccggaatcttcgccgctgacgcggnaggtgcccgtcgcggctgcagcgctcatgcgctaaggcatcggcccaagtcgcggtcgggcccacgggggccgacgttgacccgggctcacg

SEQ ID NO: 391047 - DNA, 555 bp, Oryza sativa
ccacgcgtccgtgctggtctgaatgtaaaacaggtgcttacaaggtctttacttgctgcactttgtttccacgcgtaccaacaggtgtcctacatgatcctcgcgagggtgtctcctgtcactcactccgtgggcaactgtgtcaagcgtgtcgtggtcatcgtaacatcggttttgttcttcaggactcctgtttctcctatcaactccctcggcactgccatcgcacttgccggagttttcctgtactcacaactgaagagactgaagcccaagcccaaggctgcgtaactgaagcatgcagttgccatcttattgtagcagtctttccaagatgaattgtcgtagcacacgtttggaaatttatagtgcatttagtgtagagggaagctgaacatgttcacgttgaagctaagtgtagtaggatcatgtatgtggtctaactcttacagttaaagcagggttttgaagtacatgagcagatttccgtgcgtgttgttgcaataaagtttcggcttcaattaatgcccatcaaaataattattattctagacc

SEQ ID NO: 391048 - DNA, 709 bp, Oryza sativa
ccacgcgtccgcccacgcgtccgcccacgcgtccgggaactgggctagcaagaacccttatggatacgggtcacttgactccaccaagcagaacggacaccactcgtacggatcaattggctctcccaagcagaatggccactgcacaaatggattttctgaatccactaggcataatggtcacaacggatatggactggtcgactctgccaagcataacggcaacggccacttccactgaccatgcttcagccttgagttggcctgtgggctccttgtacatgcgatgtatcgaaacgatgatccgagatcgttgcaggtcaacgatggattggcagggtcacacgaaacatggtcgaagccttaggataatattcctttgcattgttcaatcgtttggctgaagatattcccacttgccctgtgggtaatatcatttatctccctactttgagtgtattatttttctttcagaatttgttgtaggatatgtgacatttagccaaccagctgattcgattctttcactgctaattgagctgcattatctgttacagagctttgactgattcctgtaccatatatctctttttgtgtattttatgatgtaatatttatgaaggggaattagtctaaaaaaaaaaaaaaaaaaaaaaaaaaaaaaagggggcgcccactatagaggacacgcgctcgtgcgcgtgcacat

SEQ ID NO: 391049 - DNA, 508 bp, Oryza sativa
  unsure (1)..(508): unsure at all n locations
ccacgcgtccggtgaaatgtgctattctcgcaataagcattttgataaccccttcataaaaggaaatagcgttttgtcaaatgtcttgaaaactcttgcatcaagagtttgtacttgatgtgatcaaatgtgtaaatgacactccacgtgtaagatacaggaagaggagctggatattcctccaggctccaaggatctatatggattttggagctagaaatgttaacttggttttctttttgctttgcaattttcgacatacttgatgagaagagtcgccagcgcctctactgatctagagtggttgtattcatacacagaagtccaaatacatgagtgcctcttgtaaagttcaatgtcttgtattgttattttttggaaactaatattgcgttgtccggtcatattgagaaagtatccaagattaattgtatagagttcagaaatatatgttacatttgataaacattgntgctgtttctgtcaggacatagtggtgttctttgtc

SEQ ID NO: 391050 - DNA, 559 bp, Oryza sativa
ttggtccggcaagctgcagccaagacaaatggggtggctggtgatgggacaacgacttctgttgtccttgctcaagggatgatcacagagggtgttaaggttgtggctgctggtgctaatccagtacagattacccgtggtatagagaaaacggccaaagcacttgtgagtgaactccaaaaaatgtccaaggaggttgaagacagcgaacttgctgatgttgctgcggtaagtgctggaaataactacgaaattggcaacatgatagctgaagctatgaacaaggttggacgacagggggtggtcacacttgaagaaggaaagagtgctgaaaataatctctatgttgttgagggaatgcaatttgatcgcggctatatttctccctactttgtaactgacagtgaaaaaatgtcagtggagtatgagaattgcaagttgctccttgtggacaagaaaatcaacaatgccagagatcttataacaattctggaggatgctattagggggtggactcccaatcctaatacttacgggaggctatatatcaagaacctct

SEQ ID NO: 391051 - DNA, 468 bp, Oryza sativa
  unsure (1)..(468): unsure at all n locations
ccacgcgtccgggaccagtaaggccttgccacatcagagaagcctacagaagattgaaacttgaagggaagatcccacggcggactgttcccaggctcctccgttagaattgaagcatctctgttgatccccagtcgacactgagatggtcctttctgcggtcagatgcgcggaaagagagaatgacatgagatgtatttcttcagctttgtgaaattgttactgtgatttctgtcgcagcaagggaaccagagcaaacagtacgtacaagctgaagtactacggtactactagccgtggaaaattctatgtataaagtattggccgtaggctgtgaattttcaggcttatgaatagttgaactgtgtactatgctgtttggagtatgcgctgaatctgattatatgcttgtctgcaattaaatgcgaccctcgttttaacccnnnnnnnnnnnnnnnnnnnnnnnnn

SEQ ID NO: 391052 - DNA, 664 bp, Oryza sativa
ccaccagatctcccccatttcaactccctcctcctccactttcccccccgcatcgagcagcgaagcggcgatggcggaggagcagccgcgcgcggcggcggaagggcggcggcgagacgctgatggagaagatcgccgacaagctccacatcggtggggacgggtcgtcgtccgactccgacgctgacgagcgcaagcagccgaagccctcggcgccgccggccccggccgaggtcgcaacggagtcgtttgttgattcggctgctgctgccgcggccgaggccaaggccaaggtgttccgcctcttcgggcgcgaggagcccatccacaaggtcctcggtggaggcaaacccgctgatgtgttcctatggaggaacaggaacatctctgccggtgtactaggcggtgccactgcgatctggatcctttttgaattgcttggctaccacctcctgactttcgtttgccatgggctcatattctctttgggtcttctctttctctggtctaatgcctcatcatttattaacaagtctcccccgcggatcccaaaggtgattattccagaagatttggttgtcaacattgctctatctacacgttatgagatcaacagggcctttgccaatcttcgtcagattgctcttggccgggacatcaagaa

SEQ ID NO: 391053 - DNA, 1038 bp, Oryza sativa
caggtttattgtaccaagccaccccgacacgaatcgctcaggcctcccccctgttgttcatccctcactcaacttttgggcagcttggctttattcaattccccttcctttttattgcgaatttgcgactgcgagcgagcttttcttcctcaaaggaagacgacgacggaggagcagccctgcagagcataaagagaggagaggagaggagagggggccggtcaaggaagaggagggaagatgagcagcacagctccactcctcacaccctacaagatgggaagatttgatctttcccacagggtagttctcgcaccactgacaaggcagcgatcctatggtaatgttcctcagcctcatgccattctgtactatcagcagagaacaaccaaaggaggccttttgattgctgaggccactggaatctcggacactgctcaagggtacaaagatactcctggtatttggacaaaggagcaagtggaagcgtggaagccaatcgtagacggcgttcatgccaaaggaggaatatttttctgtcagatttggcacgtaggaagagtctctaataacacttttcagcctaatgggcaggctccaatttcgagcaccaataagtcactaaaacctgcagtaagagccaacggcatagatgtggctactttctcaactcctaggcgattagagactgatgagatcccttttgtcgtgaatgattacagggttgctgctagaaatgcaattgaagcaggatttgatggtgttgaaatccatggagctcatggttatttgatcgatcagtttctaaaagaccaagtcaatgatcgttctgacaaatatggtgggagcttagagaatcgctgccggtttgcgctagaagtggtccaagccgtaactgatgaaattggagctgacaaggttgggataaggctgtcaccctttgccagctattcagaggcagcagactcaaacccagaagctctaggcctatacatggcaaatgcactaaacaagtttgggattctctattgtcacatg

SEQ ID NO: 391054 - DNA, 660 bp, Oryza sativa
  unsure (1)..(660): unsure at all n locations
ttgttttctcggacactgctcaagggtctgtatgctagattgttaggctgtgactttctgaaatttcatgagccatgttcaattgccttttgacggttcaacaatctttaaagatcaaatgtttcctgtatgcatgcaaggtacaaagatactcctggtatttgggcgaaggagcaagtggaagcgtggaagccaatcgtagacggcgttcatgccaaaggaggaatatttttctgtcagatttggcacgtaggaagagtctctaataacacttttcagcctaatgggcaggctccaatttcgagcaccaataagtcactaaaacctgcaggttgctgctagaaatgcaattgaagcaggatttgatggtgttgaaatccatggagctcatggttatttgatcgatcagtttctaaaagaccaagtcaatgatcgttctgacaaatatggtgggagcttagagaatcgctgccggtttgcgctagaagtggtccaagccgtaactgatgaaattggagctgacaaggttgggataaggctgtcaccctttgccagctattcagaggcagcaaactcaaacccagaagctctaggcctatacatggcatatgcactaaacaagttttgtatnctctattgtcacatggtggagccacggat

SEQ ID NO: 391055 - DNA, 734 bp, Oryza sativa
ccacgcgtccgcccacgcgtccgcccacgccaaccaaccacttcctcctcctcctcctccgccgccgcgatccccaatccgatctcgaaaggtagtagtgaagaaagcaaggcagggcgcgcgtgatggcgaggagctcgttcaagctggagcacccactcgaaaggaggcaggctgaggccaaccgcatcagggagaagtatcccgatagaattcctgtcattgttgagaaggctgagaggagtgacattcctgacattgacaaaaagaagtaccttgttcccgctgacctcacggttggacagtttgtgtatgttgttcggaagcggatcaagctcagtgctgagaaggcaatcttcatcttcgtcaagaacacgcttccaccaacagctgccctgatgtccgctatctatgaggagaacaaggatgaggacggcttcctctacatgacctacagcggggagaacaccttcggcctgtttgtctgagtggcagcaatcatcaattcgacaatgcctcgtgtaaataggcatctaaaaaaaacctctgtatataatctggtctagcagcatgttccaaatcccttaggcatcttatttgtcaaaaacctaccctgtaatcatcaaagcacacggtgctcttagtacattaacaactgtctggtctgttctttctgttcaacaagttgcataattgcattgcttcagtgttctctctgaagctgctattctaac

SEQ ID NO: 391056 - DNA, 914 bp, Oryza sativa
ccacgcgtccgtgaccatcattgatcttgcccgcaatattcgtgaacggcataacaaagccttgaaaacaccactgaaggagatggtgattgttcatcctgacaatgaatttcttgaagacataacgggaaagctaaaagagtatgtcatggaagaaatgaatggtaagactggcaactcatgtaatgatcccatgttgtatgcttctctccgggcagaacccaattttagggtgctagggaaaaagactgggaaaggacatgggcaaagtgtcaaatgaagtgaagaaaatgacacaggaacagatcttagcctttgaacaaagtggagaaatttcattctttggtcattgctttgaggttagacgttattaaggtgatccggcaatttaaacgtcctgcaaatgtggcagagaatgaaattgatgctgcgggagatggtgatgtgttagtcgttttggatcttcgagctgatcaatcattgtttgaagctggagttgctcgagaggttgtgaacagaatccagaagttacgaaagacagcgcaacttgagccgacagacttagttgatgtatattacaaacctatggacgatggcaagaatactctagtagagattgtgcagtcacaggatcagtatataagggatgctcttggcaatccactaattccaaagatggcggcgcaccagatgcagtaatgatctgtgagggggtctcacaatgtacaagacatgtcgtttgtcatttacattgcaaagggtttctccagtggtcacagatgatctccttgtccatgccgctggcaaccgtgagcattttgatgcattaaaagtatatttactgtcaaggtctatttccagattgaaggatgaattccaggctgggaatggcaagattacggtggatttcattg

SEQ ID NO: 391057 - DNA, 808 bp, Oryza sativa
  unsure (1)..(808): unsure at all n locations
nccgcatccgcgcatagggcgcgaggctcaacttcccccgcnacggcgatggctcccctcgccggantaacgaccggccctgctggaccatcgacctcaacctccccgcggcggccgtntccggtgacgacgacgacgccatggccgtcgacgccgcagacgcagacgcaggcagtgctggccgtgcagcagcctatgcagatcaagaagcactgagcgcggcaaagtgcaagatcaagcagtgtcctcgcgacgaacagatggcgagcgccacacctgagctcatggaggaggacgcgagcagcagcagaaacatggtgcccctgtccatggcgctgcagctgcagtatgcggcgatgatcgccgaatgcgaccgcgagatggaggagatcgccgccgtggagagggacctcgagaggcgcaggaggcaggtgttcgagcgcagaggccacctggtcaggcaggcctctcttctgctcgactgacgatcttgctgaactgaactctgaatgtttgagcttgtctgaagtctgaactctgcactatgccatatggtgtttcaccttcactgtgaggctgacatgtgggccagacgtccgtttgccttgcttgcttttgagctgcaactgggcgttgtgctgcaagcctgcaaagtgcctgtgtaaagtttgtgggattgtgtgtgtggatcttgtatccttgtgactttgcaagctttaattttgtgaggaacaatagtattttagattggtgtgtaaaatatagaaataaataatagtagcaactaaattttggttttcagctcttc

SEQ ID NO: 391058 - DNA, 1352 bp, Oryza sativa
  unsure (1)..(1352): unsure at all n locations
cggaactctcccgggggcagcccacatgcttgtttcatgtttctattgaaaccgttctcttgagtgagttgtccttaaagggggatttatacttactgaagattcaacaattaaggattgggatcacactgttcatgatgctgacacatattatcaggcattgaagataataagtctgcgtggttgggaaccccgcttgctaccctatgctgttgattgtggaactaaatctcattcagatgcaaactcgtcctctacattgacccaaccagggctaataaataactcaatggaagatcggcttgttgtttacgcacctaatgaagttgatggctcaacagtaattgcagatgctcgccaagcatatcagcattacgatccattatcagttgctttagattgtcaattttgtggagctcgcgttgccttgtggcctttttcacttgttgaacgacctcttcaactctgtatgctgatatcagattctagtaggcacgatgagcaaactgaggggcatgctggcagagtcagtggcgcaagaccttcaaagactgcgaatattggttttaatttcactattgctggtggtcctccgccaactagacagaattttcggccaagagtttccttacctgttgtcagtcgacatttgaaagctgacttaagctcccatgggcattttatttcctctggaagtgataaccacatggttcctgttactttgcatgcttcagggctgaccaaacgcaaaagaagcatggatgagtctcatatgttggaaggcaacaatacaatctcaactgatgctggcacaaccaccaatggagcagatcatcaaagagagaattctgtaaatggcacatcaaacttggtagcaaaccctgaacaccaacaagggggttcacattcagatacaagcagggttaccagcacaggagaagtttccaatgaagaatcagaaacaggtcatgctgcaatcaaaagtcacacaagcacagatgaacttggccaacatggatcagatcctaaatctttaccagttggagattcttctaatgctcatgatttggcaaagacttgcacgaacaattccaggccagttcaggctgccacactcacataatcgtctaacgatggggaaaagggcgcatttaacccatcaggaagccaaggcctggatgacaaattgaatgaatttgatcctatgaagcagcacagggacttttgcccttggttatgccctgatggtggtgaaacctggcctggatggaggctgacactgccggcattactttctcaggacaaaagaatngatgaggattcacaagtggagcctcagattagccttctta

SEQ ID NO: 391059 - DNA, 1015 bp, Oryza sativa
ttcagctcaagtttagagtgagaggtgagagctcagcggcgcgccatggcggcggcggcggggaggatggaggagtacggcgtcgggcggatcctggacatcacccacgcgtaccgggcggacctgccggcgttcgcgccgggggcggtgacggggccggtggtgcggctcagggactccatggcgaacgggacgctctacaacctgtcggagctcaagatggagtgccacatgggcacccacgtcgacgcgccgggccacatgaaccagggccacttcgccgccggcctcgacgtcgacaagctcgacctcgacctcctcaacggtcctacattattggttgatactccaagaaacacaaatataacagctaaagcaatggagtcgttaaatataccaaaaggtgttcgtcgagttcttttcaggacattgaacacagataggaagctcatgtggaagaagggaggtgatctgagttatgtcggattcacagaagatggcgcacagtggttagttgacaacactgacatcaagctagttggtattgactatctatcagttgcagcatatgatcacttgatcactgcccatgtggtctttttcaaattcccgaatatcatcctagtcgaaggcctgaagctagacgatgtcaaggctggaatctacatgctgcattgcttacctctgaggctggttggatccgagggctcaccaatcaggtgcatcctgatcaagtgattgcttcatcactgctcctgataatggcgacactgcagatcatgccatctgatgctgctacatcctggctgaggccttgagagtgccaaggccagctcagtagaaaaacaataataagtgtaaacgtatatatattgtttgtttgatcagtaataattcaataaagcacttaaagtaatttttcatgtaaaaatgcagcagatattaggaatgtggtgaaagaaactgacagactagtaatccctttgttctcaaatgcgaggcgtattagcttttt

SEQ ID NO: 391060 - DNA, 422 bp, Oryza sativa
ttgcaaaggcagctcagctcaagtttagagtgagaggtgagagctcagcggcgcgccatggcggcatctcggcttgcgctcctcctcctcgtcctcgccgtcgccgcggcgcgccacgcgctcccggcggcggggagcgacgcgcacccggggtacgacggcgcggaggacacctgcggggtcccggcggcggcggcggcggcggggaggatggaggagtacggcggcgggcggatcctggacatcacccacgcgtaccgggcggacctgccggcgttcgcgccgggggcggtgacggggccggtggtgcggctcagggactccatggcgaacgggacgctctacaacctgtcggagctaagatggagtgccacatgggcacccacgtcgacgcgccgggccacatgaaccagggccacttc

SEQ ID NO: 391061 - DNA, 561 bp, Oryza sativa
tcgggcgccggctgcgagcggctggttgcggccgtccgcgaccgcgcggctctgcgaggcggggttcttcaccgattacgccaaccccgccactacgcggttctgcatcggccggaggcggagcggtgcgccgagaaacattgcagggcttcaagttgcatcatccaatttgggccgatgcaaaattgctcatgttaaaagtggagatgctgatggttacccaacgactgaagatttgtcaattgacgaggaaaccctgcagcgtaatttacagacagccatccaggaagaagattattcccgggctgcaaagataagggatgatctgcgcatcctccatgaagataccaaagctttccctccttgcagcaaacacacggttttacaatgctttcaagaatggcgatcttgcagcgatgtactctttatgggctaagggtgaccatgtatatgttatccatcctgctgcgggtcggatatcaggttatgacgtggtcatgcaaagctgggagatggtatgtggcgcagattatgagtttccactaaacattgatctgaaaa

SEQ ID NO: 391062 - DNA, 728 bp, Oryza sativa
ccacgcgtccgcggacgcgtgggtggagtactaaggaggaacttagcatctgttgaggaatttagcatctgttgttgttagagaagaaaataatgagaaaacctgtgatcaaagggattcgaactcaggcaagcatgctgctccctgtcagccgagctctccctgccaaccaagctaggtgccgttctcttctacataagtagtagacgaaactcagctggttttaactgcatagacaagcattttgctgtccttctgtcagtaaccatgaaatgcaacacacggtcacccttgagctggtgagacacagctatcagccacaaagcagatagtactttgcttacaggagatgattctggagtgctttctttctggtttcggcagctcaatgatcccaccgtgaaaggcgaggaagcaacagatatttggtagctcctccaaagtggagattatcgtggaagctgagctgtttccaaatcccaatactacacctactaatcgtctcttatctgaaagataccactgatcatttctgaataacgaaaaaaatgagaatgtgtaaataggcaaagttctatgattaaggccacgattgtcggttatttgggcgttttccacatatgattgatggcatctaatgatcacatttctactgattatatctctgggtcggttcagtaatgaggaaatgagagggaacggctccttcaagttgttttactgtcttg

SEQ ID NO: 391063 - DNA, 609 bp, Oryza sativa
  unsure (1)..(609): unsure at all n locations
aaagagaaaacgcaaaggtacaaggcaagaacatgttgaacagcgacancgtttcaattcatacccttccaatgaagttaaagatgtgaagcctataccagaatccaccaagatagaggtggagcctttgccttcccctgtggccgttagtctaaaaccacctcctaagattgagcgcaaccagtcatttgatgacgatgatgatgacttttcaaacaagcctgttgcaaagaaaagtaattcagcatcagtaaaagcaacagtttattcagttgcagacctacagatggcaacagatagtttcaacattggacaatcttgttggagagggtacttttggacgtgtttacagggcacaattcagtgatggaaaggtactagctgtcaagaaactaaacagtactgtgttgccaagccaatcttcagacgatgtctttgacttggtgtcaaacatttcaaagttgcaccatcccaatctcaatgagcttgtgggctattgcatggagcatggacagcacttgctagtttatgatttccacagaaatggttcgctgcatgatatgcttcacctcccagatgaatatagcaaaccactcagctggaattctc

SEQ ID NO: 391064 - DNA, 927 bp, Oryza sativa
ccacgcgtccgcgcgaggtgggagccgatgggggcgcgggacgtcggcgactaccggagggccatctacggcgacatcacccacaaggccatcctcgtcgacgccgccgggacgctcctcgcccccaccgagcccatggcgcaggtatacagaacaattggcgaaaagtatggagtcaactactcagaggatgagatcttgatgagatacaggagggcttatgcgcagccatggggtagatcgcggctgaggtatgtggatgatggtaggcccttctggcagcatatagttagctcttcaactggatgctcagatttacagtactttgaggaactttatcagtactatacaactgcaaaggcttggcagctctgcgaccctgacgctaaatatgtttttgaagcattgagaaaggctggtgtaaaaacagctgttgtatccaactttgacacacgtcttcggccacttttacaggccctgaattgtgatcactggtttgatgcagttgctgtatctgctgaggttgctgcggaaaagccaaacccaacaatattcttgaaggcttgcgagtttttaggtgtgaagcctgaagaagctgtgcatattggtgatgaccgcaggaatgatctctggggagccagggatgcaggctgtgatgcctggctctggggcagtgatgtttactctttcaaggaggtcgcagaaaggatcggagttaaggtgtaaggagtcgttcgtccgctgggtcacctgaaataagaaggccgggaggtgttgcatttttgtacatagcggcaacccttgttgctccactgatgtacatatttttccagagaataaccgatggcagtgtagtatatatctgtatgactgcatttgcatttgagactttgagcgctcaatttacgttacccctgctggtgtctg

SEQ ID NO: 391065 - DNA, 706 bp, Oryza sativa
atggtttcttctcagacatcctctctgacaagaactatcgcacaggaccccgagctcttcacagcaaaaataattctcccaatgggtcccccggatcttatctctgaaaatgatgagttggatttctctgatgtttttggcaccactccagttcagacgccaacaggcatttcggtagctggtccagacagtcctgcacctttggctgagtccaatgagggggtttacaatgatcctattgtcatcatcaagcgatctcattctcttgttggtccaacatcacttgttagccagtccctgcgacttagcaatctcactctaaataaaacagaggggtcatcagaacctgcagaagaaaaggaaaggaacctagggcagctcagtgatgaagagtttgacaatgccacaacagaaaatgaaggtattgggcttgatgactttgaaatcttgaagcttgtaggccaaggggcatttgggaaagtctttcaggtgagaaagaaaggtacttcagagatatacgcgatgaaagttatgaggaaggataagatcttggaaaagaaccatgcggagtacatgaaagccgaaagagatatattaacaaaagttgaccatccttttgtagtgcagctcaagtactcctttcagacaaaatatcgactttatcttggccctgacttcataaatgggggacatctcttcttccagc

SEQ ID NO: 391066 - DNA, 1032 bp, Oryza sativa
  unsure (1)..(1032): unsure at all n locations
tcngggctgcgccattcggacgagaatggacaacncttgatgaagctggtacggaacatgcaccaaggagtctgtcatctaaaaataccagtagcataccattcctacctcaagtcgctagcatgagaatgaacagttctgaaatgagtaacatatcaccatggtttgcttctgccaatgcttgtgctcctntagctataaagtcgtttttaccttctagagganaacagcctcacccagtcganacagcagctggaagtggaacccagaggatcatcacatcgatggcagatggtgtccaacatggaagtgatcccagccggactccagttatttcaacttcaccgactatgatgtttcaccctcctgcttatcagtatgcaggattcccttttactcctagtgtccaccttcaagcaccggggttttcaattgggtctacatcatatgcgaattctgcacctggaggaattccttatttccctacaattgctccgacgcttgttggcccagcaggtgcattacctgctcagcatactcgacaatatgcaataaacctccctgaaggaagcagcactgttggacatgacaataatcggaaatggggaagacagggtcttgatcttaattctggccctggaagtgtggatgtagaagtgaaggacgatagagtaactttaccagttagacaaaattttattgcgccaccacatgcctttgtggacgagcatacgagaatgtatcaaatgcctccaggtgttggaataaagaggaaggaaccagagggcagttgggatgccgaacgatcttcatacaaacaattgtcatggcaatgagcttttgctggtatcatttctcagcgacttcggcatccaatgagcttaggcagctgcatgtggtacttgggttcgtggactgcaccctcgctggaatatacaattcatacatggttactttccttgtgatgatgtgaatgtgagaggcacgacgcttgaagaaattgctgaaatgtcatatttatactttcctgga

SEQ ID NO: 391067 - DNA, 615 bp, Oryza sativa
  unsure (1)..(615): unsure at all n locations
aaccaattgctgagaaagacaggtttaaaacnaaactggtgatggagatgcaccagcaccttcagagagcaagagttccaagaagaagaaaaacaaccgagccaaaggaggctaaagaatcacaagaaccagctgatgggacagaggagactgccagtgcagaacctgatgaagacacaacctctgttgatgtgaaggagcgcttaaagaagatggcttcaatgaagaaaaagaaatcaggcaaagagtcagacacagctgcaaaaattgcagctgctggaggctgcagcaaggagcgctaggctcgcggcagccaagaagaaagagaagaaccattacaaccagcaacctgtgcggtaaatggccgccaaagttttgaaaaatgttctgagtttgaaaaatccccttgttcgtttttggactcacaataaacttttttgagttgtatttatgacctttgagcgcctttctgagattcatttcgaattcttgaaggcctttctggtctcaaaacggtcatgtaattgtgttttgaattgttgacccggtggaacttaatggacggcatggccagtgggggctaattgggtaaaaaaaaaaaaaaaannnnnnnnn

SEQ ID NO: 391068 - DNA, 638 bp, Oryza sativa
ccacgcgtccgcaccatccttcgacgccgccgtcctccgtcctcgccgccgctccggtggaatccggatcttccttcgtcgagggggtcgcgtcgcctcgccggccgccgtcgcgagcatgtcggatgaggaggtatctgacccgaaggcactcctagaggatcgatcgaaggctaactgggtgtaccagtggtatgaatatcagaaatgtgtcacgagaattgaagatgatgagactggtcagaagcattgtactggtcaatacttcgattactggaaatgtgtcgacaaaaatgttgccgagaagctttttgatagcttaaaatgacaaggaaaatgttctctcttgctaccgtttacgcaacagtgaggaataatcatatcgtttctgcgccctgtagacaatgtcaggtgcttaatatctgtaagaaaaaaagttttgcctgtcggataatacgacagtttttcaaccgccactttacttttatttctgccagaggcattgaactctctacatctgggttcgtactgcgttattggctcatgctttttccctttcggttcataattgatatatccccagattgtgaatgagcacggaatgctgtcatttgccttttccaaaaaaaaaaaaaaaa

SEQ ID NO: 391069 - DNA, 422 bp, Oryza sativa
ccacgcgtccggtcaaagacgaacatgtatcgtcccgggatcgacgtgacgcccgcccacccggcccctcatttgaattggcgccggcaggagaggacggaagccgttggacattggaaagctaaggtttatgatatgttaaacgttctggtgactgtgaagtcaaggcgtgtgccgggggcgatgacagatgaggagctgtttgcgatggagggggaggagaagaatgggaggggcactgaacttgacgcggagctggatgaagtgttgacagccgaagagaggaaacagcttgattctgcgttgagaatgggcgaaccagggaagaagaatctgaggagaggtgcgaggaaggtgatggcggggctgatcatttggatgcaaatggcgtggcaaaagataagaaggattggtttggttgg

SEQ ID NO: 391070 - DNA, 717 bp, Oryza sativa
tctttaattatcatatgcagactattatgaaagggcactgataaatggtgttttaagcatccaaagagggactgatcccggggtgatgatttacatgctacctcaggcccctggacggtctaaagcggtttcctatcatggttggggaacaaagtatgactccttctggtgttgttatgggacagggatagaatccttttcgaaacttggcgattccatttacttcgaggagaaaggagatagaccggtgctaaacatcattcagtacataccaagtgcttataactggaaagcagctgggcttactgttaatcaacaactaaagccaatcagctctttggacatgtttcttcaagtttcactctccacttctgcatagacaaatggtcagtctgccacattgaatgtgagaataccatcatggacatctgccaatggcgcaaaagcaactctaaatgacaacgatttaggattaatgtctccagggtctttcctttcaatctccaaacagtggaactcagatgatcatttatcactacagttccctattacactaaggactgaagcaataaagatgatcggccagaatatgcatcttttcaagcaatcctattcgggccatttgttctagctggcctgtcaactggtgattggaatgcagaaaccggcaacaccagcgcaatttcaggactggtttcttcagtcccttaatctaca

SEQ ID NO: 391071 - DNA, 448 bp, Oryza sativa
  unsure (1)..(448): unsure at all n locations
cggatttcgattttcatcaggcagactttcatggacaanccagaatgtgaagctggactgcaagaggttcagncctattcttctggaggcactggataatctaaacccgtaggctttgagatgctcttgtacaatgttccatttttcttttcacggttcgttccttttacttttatgtagtaaatctgttgttcattctctctctatctctcatggctctcatgaggagatgcaaattgtctgaattatagaaaaattaagaactacttgtgtgatagtgtaaactgtataaattgccgtcgctccaagatggaacaatattcattctaatcatataaaggttccttgaattattcatcgagataaaagaatacaagagttttttctttcaatctacaaacagtggaacctaaaatgatcattaatcactaccagttccatataaagg

SEQ ID NO: 391072 - DNA, 515 bp, Oryza sativa
  unsure (1)..(515): unsure at all n locations
aagaagataagcgaagaggaggagcttagcttgccagccatggctaggcgctctccttgcctcactgccgccgtgctcctgcttggggcattggnggtggcgagcgctttagttgatgaagcggcgccgctggccagggactcggccatggcgcccgcttcatgagcaagcagggccgtgcgatgtacgagaagccgccagagctggagccgaagccgaagccaaagccaaagcctcatcctaagcatgaatcaaaaccggagccaaagccagaacctaagccggagccaaagccatacccagagccgaagccagagacgaaaccggagctaaagccagaaccaaaacctaatccagaacctaaacctgagcctaagcctgaaccaaaaccagaaccaaagccatacccagagccgaagccaaagcccaataccgagccaaagtcagaaccaaaacctgagcataaacctgaaccaaaaccagtaccagaacccaagccatacccaaagccaaag

SEQ ID NO: 391073 - DNA, 672 bp, Oryza sativa
gaagttcttagtcacccatgggtcgtgttctacacagagtgccctttgaaggctgtaactgctaatttgagtattactaacaatatcgtagcacccagaattacatgggacagaattaggttacattgcgagtcaatatcttcagattcatcaagtcagagatcagcagatcaggatgaatgtggtatagttgatgcactgacagcagcaataacgaatgttaggatatcagagccaaaaaggagtcggctgtgtaacccagccattcccatacagcaggaatgctcttcaaacttgaagagcaacctctgtacggcattctgacccgacctgatgtacagctcctgattggaatggtgcatatttttctcgcagaggttggtctgatgccagttaaaaggctccatcaggtggtgtctctgagctgaggataataacctgggtttctgtcaaatcaaataagcgtttgacatgggtatgatgtagtttttatctggtgatgctgataaaccggccattagaaggccggttctgtaaattttgtaaatatcatgatccccttagctcctgggttgctaatctatgcgtacgtagcaaattgtttcaattaatgttgataaaatatcgtgtgccatttccctgtgcatgattcatcttgtttcaaaaaaaaaa

SEQ ID NO: 391074 - DNA, 481 bp, Oryza sativa
  unsure (1)..(481): unsure at all n locations
tcaagtcagagatcagcagatcaggattgaatgtggtatagttgatgcactgacagcagcaataacgaatgttaggatatcagagccaaaaaggagtcggctntgtaacccagccattcccatacagcaggaatgcncttcaaacttgaagagcaacctctgtacggcattctgacccgacctgatgtacagcncctgattggaatggtgcatatttttctcgctgaggataataacctgggtttctgtcaaatcaaataancgtttgacatgggtatgatgtagtttttatctggtgatgctgataaaccggccattagaaggccggttctgtaaattttgtaaatatcatgatccccttagctcctgggttgctaatctatgcgtacgtagcaaattgtttcaattaatgttgcttcaaaaaaaaaattatgaacaaataaaaagaaaatgatgatgaaaaaaaaataataataaaaag

SEQ ID NO: 391075 - DNA, 626 bp, Oryza sativa
cccccccgtccgttgattccaactcgcggggttggagattatgattgctgaccacaagtcccccggaaagggccttggtccaggagccattttatccatggttggcctttgcagtagaggaaatttggaattcccactttcagggcaaaaattacccgaatccaattccggcatccttaaagctgttcagaaaattgggcttcaaggatgcttcgtatagttcagtgtttaaggaggtgacactggaggcacccgcaactgcactaccattggtttctcctctgaccataggaaactggtgacatctgagtatctgactaaatttccgaagcagttattggtgttcctcaactgggaaacaggaaactaactgcgttccatgctaaactgactactgtattatctgcccaacaatttgcttgggattagaataaacttgtgtaggcttctcgactgcaacgtgatgctgaacggtttgaacttttgatggtgtgatgttgtatatgtagggagctacccgtgatgtttttcaagagagattttcaaccacaaggtgtggaacagggtgcagtaatccctagaaagtttatgagggcgatgcattgctcaaaaaaaaaaaaaaaaaa

SEQ ID NO: 391076 - DNA, 1062 bp, Oryza sativa
ctgaaggagtcgacatcatggttgttagagagcttacaggaggaatatacttcggccaacctaggggttttggaaagaacgacaaaggagaagacactggcttcaacactgaagtatattcagcttctgagattgatcgaatcacacgtgttgcatttgaggttgctcgcaagaggcgcgggaagctttgctcagtagacaaagcgaatgtgcttgaggcatctatgctttggagaaaacgggtgacttcattagcttctgaattccctgacattgagctgtcgcacatgtatgttgataatgcagcaatgcagcttattaggaatcctaagcagtttgacacaattgtcacaaacaatatttttggtgacatattgtctgatgaagcatcaatgcttactggaagcattggaatgctcccatctgccagtgttggggaatcgggaccaggtctttttgagcctattcatggttctgcgcccgacattgctgggcaggataaggcaaacccattagctacaattcttagtgctgccatgctattgcggtatggccttggagaagaaaatgctgcaaagagagttgaagccgcagttacagagacactaaacaacgggttccgaactggggacatatattctcctggaacgaccctggtcggatgcaagcgaatgggagaggaagtcctgaagactgtagagtcgcagagcgcggttgctctaaactcgtagctctcagtatttcagctgtagccctgtgattgtgatggtcgaaagcacatcagagattgaggccgccaaagaatcacattgatgctggacttcctgatgttttttgcctgtccttgtgtcattctgtaacttagcgcatgagttgcctctttccccttttctcttgtaccttgaattttttctgtggtgatggttgacttaactgtctaggccaacaataataaaatggggttggttccatatacctagctgaacaagaggttggttgtgtaacgtactaacgttggttgagtatatatactacccccatctcctgttcatgttactgtcc

SEQ ID NO: 391077 - DNA, 463 bp, Oryza sativa
ccacgcgtccgaagctcgctttgacgaagccctcctcctcccatttctcctccccgagctagggtttcgccgccgccgccgccgactagccggagttgccatggggacgccggagacgtcgagggagccgtgcccggaccggatcctggacgacgtgggcggggcgttcgggatgggcgcggtggggggctccctcttccacttcctcaagggcacctacaactcccccaacggcgagcgcctcgtcggcggcgcgcaggcggtgcggatgaacgcgccccgcgtcggcggcagcttcgcggtgtggggcggcctcttctccgccttcgactgcaccatggtcttcatgcgccagaaggaggacccctggaactccatcatcgccggcgccgccaccggcggcttccctctccatgcgccagggccccggcgccgccggccgctccgcgctcatgggcgggat

SEQ ID NO: 391078 - DNA, 1001 bp, Oryza sativa
  unsure (1)..(1001): unsure at all n locations
ggtcgacccacgcgtccgcggacgcgtggattgaggcccgtaaagtgttccgtacactagaaaaggagtttaatgtgcccgcttttgggaagatgataattactgctagcaatgacctgaatgaggaaacaattgatgccctgaacaagcagggccatgaagttgattcctttggtattggaacttatctagtaacatgttattcccaggctgctcttggctgtgtctntaagctagttgagataaacagtagacctcgtatcaaactttctgaggatgtggctaaagtatccattccatgcaaaaagcgatgtttcagattgtatggaaaagaaggctaccccttagtagatatcatgatgcgtgaaagtgaaccatcaccgaagctggagaacgaatcctttgtcgtcatccattccttgaatccaagagagcatatgttgtcccccagcatgttgaggagctcctacaatgctactggcctggtacatcaaataaacctagggtagagttaccctctctagaggagatcagagggcgctgcatgcaacagcttgaaaaacttcgaccagatcacatcaggcggttaaatccaacaccttacaaggtgagtgtgagtccaaagctgtatgagtttatccattccctatggttgaatgaggccccagtaggagagttacaatagatttctacagaagttgggaaaaacagagaagcgtattctttgaagcatagcaaaatagcaatacatcaaagaaaagtagagctctgttgtaaaaaaataaaaaaaatcgtcagttcatgggcccaaccttataggatttttgctccccaatttttattagtacaaactagttatcagtatagagataggccaacctatctgactgtacatccatgatccattgtactatacgtcgttatggaattgaacatcctttttggtgatttgagtccnnnnnnnnnnnnnnnnnnnnnnnnnnnnnnnnnnnnnnnnnnnn

SEQ ID NO: 391079 - DNA, 622 bp, Oryza sativa
ctttctcgagcctcatttcccccccaatcttcttcccaaaagcagctccatccaaacccaatcaagccccactccccaccaacccccttccctcaattataagcctacaactactgctgattgcttcagactgatccaagaaagggaagtttggttgcggtgcagagaggtgcagaagggggagggagggctctgaattttcaagaaagggaccatctttctgctgctgctgctgtccgggttggtgcttgttgaatttgaggctaaagaagtcggaattggaggttttgtaagagggaaacaatggctggcaaggaaatctaccacaagatgaaggacaaggtgaaagatgcttttagttcgtcaggaccagaaacagggaaaggaaaaacaaaattgtcaggcaagcgtgtcaagcatggttaccatcttgtgaagggaaaatcaaatcatccgatggaggactatctagtggcagagtacaggcaagaaggagagcatgatctggggctgtttgcaatatttgatgggcatttgggccacactgttccagacttcctgcgctcacatctctttgataatatcttaaagcagccagaattcttggagcaacccacaagct

SEQ ID NO: 391080 - DNA, 555 bp, Oryza sativa
  unsure (1)..(555): unsure at all n locations
cnacggccagcagcgtccagctccaggcgggcggcgagccccggcggcgatggacgtggaggaggagaagcggctgatcgacagggaggtgggccgcggcgtggtgtacctgatgggcgaggccaacgtgtcggcggggccccaactcgtccatccctcaagaggatcgcggtgaactacatctacaccttcctgaggaagaacctgacagaagggcacagggcactggcgattccaaacgatcagctgctcaaggttgggatcacgtatgaaatctaggcatttgatacatctgatctgatatcaaagtatacatatatatgtgggaaaaaaaaagagcctagtataaaccatgggttttgttgatgatgctgatgttggaagagaaggggcaaagtgccttttttgtttgttgaataagtagtttcagctgaaagtgttggcaggcagggagggtttggtttttctttcgcctctgtacagtgtggtttgtgtaaacggcgtgtgccaacttgagtagaaggtttctcactggtggtgtgttgtcaacaaaaa

SEQ ID NO: 391081 - DNA, 1027 bp, Oryza sativa
  unsure (1)..(1027): unsure at all n locations
cctctcgcctataaaccacgccgccngccacngccgctcgccatcgccaccgtcgttcacaccacaccacctgctgcacacagctcgatcgagttagcccactagctaccaaccaagctgccggcgagaggtatggcggcgtggcgcggtctggcgttggcagcggtggtggcgtggtgcgtggcggcggcggcggcggcgccagacgcggcgctgcagagcaaatgccagcaggacttcacgaagctgacggactgcatggactacgcgacggggcacgaggaggcgccgtcgtcgacgtgctgcggcgacatgtcggcgacgcagcaggcgcggcccgagtgcctgtgctacatcatccagcaggtgcacggcggccggaacgaggtccagtcgctcggcctccgcttcgaccgcctcctcgccatgcccaccgcctgcaagctccccaacgccaacgtctccctctgcatcaacctgctgcacctgaccccaagctcaccggactacgctgtcttcgccaacgcctccaaggcagcggctacgacgccgtcaagcaccaccccgggggcggcggcggccaccgccggcggcttcaaggttcaggcggggctcagctacggcgtcgtcgcggcggcgatggtttctgccgtcttctcatccatcttctgatccgtgaaacaagctagtcacccacccatttttctttgggaaaaaatcttttctgtctcttgatctctacgtcgttcagcttttactctgcaagaaacgaatgcacactggatggatggatggatggttggtttgtgatgtgctacacgaagattcgttctgatgttgtactcttttgtaccctgataaatagatttgagacttgatttttgttcatctgtggcttgatgctagctagctacattctgaatactgatacacgcatatgctagtactaaatctgaataatcaataatgtacctcattttttcttctnnnnnnnnnnnnnnnnnnnnnnnnnnnnnnnnnnnnnnnn

SEQ ID NO: 391082 - DNA, 1237 bp, Oryza sativa
  unsure (1)..(1237): unsure at all n locations
catagtcgaatccctttccctcgcctccacgaacaagcgaaagtaaacgcgacggagaagaaccttccccacgttgggttggattggtcaaggcggcaacgaaccgaaggaaggaagggaagcatctgggctacaggtccacgcgatcgattgttcgatcgatctcggattgatcgctttgtgattgtgattaatctcgcggcgacatggcgacgtcgtgggctgcgccgccgccggggtacccgtacgcgcagggtcagggcggcgcccagccgccgcacccgccgcagtccacggccgtcgccgtcactccggtcagcaacggcgtggggaaccccttacgtgatcgtcaccccggccagcgcgtccccctccacctgccagtcactaaggaaggcgctggagcggtacggcaggaagctggaggacggcacccgcaaggccgccgacaccaccggcaacatctggcaccaccttcggacggcgccgaacatggcggacgcggcggtggcgaggctggcgcaggggacgaaggtgtacgcggagggcggccacgacagggtgttcacgcaggcgttcggcgtcgtgccgggggagcagctgcgcaaggcctacgcgtgctacctctccacctccttccggcccccgttcatcggcacgctctacatctccacggccccgcctcgccttctgcagtgacagccccatatcctaccacgcccccgccgtccgctgntcgccggcgccgccccagctcaccctcnctgaggccatctacaaggtagtgcttcccctgaaccaagtgaaatcggtgaacccatccgccagcatgacgaacaggggcgagaggtacatccagatcatgacgacggacaaccacgagttctggttcatggggttcgtctcctacgacaaggcgctcaagaatctctacgaagccctgcagcgccgtgcgtgatcgtcgcccacggccaccgcagctaagcttcactctgaccctaatatacatatctgccgatttatattccattggtgaacttgtaagcttcagatcttgctctggaataagtgtgacacatcactaaaacaaaatctgatgccgtgtgcccgcgtgtatgatctgtaattcgctcatcagtgtagaatgtgctgaattcacttgttattgtagattgtgctgaactcactatcctttttataatgtactgaattacctgaacatagataaaaaaaaaaa

SEQ ID NO: 391083 - DNA, 1020 bp, Oryza sativa
ccacgcgtccgctcaactatctgcagatctttcatgtgtctgcaggagttaaattgttgcctagctgacatttactttttgcgataatttcattcaaacgatcgatcgacaggcatctagctagtacactaattctgaaagtgctagctagtacactattgtgattcttttttaccagctaagtacttttgcctgtggagaatttggcctagagtaaaagttcaggtgtgcacttgatccgaagtacaaactgtaagtcaatcattgatgtgtcctggataggtatgttttgttatcttgttttagcatggaagaacagaccagatctgattactgtaacttaccaaactcttggatattcccttctatcatccaagtttctctcaagatctctagtttgcatccaaagcttacatttcggtttatcaggattataaagttccagggtcggcgaggcagttgccgatacagttgaatcggtccatgagctctacaccagtgagcgacaacgagtaggaagatatctagatgcttaagtcattcaggttccagagctagatttatcaataatcattatggaggtgaaaagcaccagcatgactcaagttcagctcgctttgactgtttaagtcaagagttaaaaaggatacccaagagttcttacctgaatagagaaaatgtaaaaaccatgagtctaagtgaagaggctcaaatccatctcgctaaattcaggtggggaagctctccgctccagtgatttctcaaataaaaatctcgttgagctgcttcagattcagagttatatgagcagtagggctctagttctgctcaattttctgcttcatattcagagttaaatattacaagatagttgaaccagaatcctaccaaatttctgggttttgccgggatacaactgataatctcatggaatcattgtcaacattttttgagctattttttgagtgagttcagagataatagcagtgatgttctatgcattttctgatcatatattgc

SEQ ID NO: 391084 - DNA, 355 bp, Oryza sativa
aattcccggtcgaccacgcgtccgcaggttttggattttagtttagaagaagaggagtaccctttttggcagttggcaaccatttttacactggaggcaggcagaatttcacagttgcatctgagacgttttttcttttcctgtgtgtaattgctgcgtacgtcaatgtggcagatgagaggagtagtaggttatgaatggccagcattatgacagtttattgctgctcgaccttacagaagagctgaaacagtgcaacataatgtttttaaggttgcgaattatgcaagctgaagtcgttggtgaagagcttaggctccaaaggtggaaacaaagactattctagtcctaacgg

SEQ ID NO: 391085 - DNA, 961 bp, Oryza sativa
  unsure (1)..(961): unsure at all n locations
cttttctcttctcgtcgccggtggattcgccgccgcctccgccgccgccgccggaggaggaggacgaggagagggcgctccctcgggggtgagcatccagccacctcggcccgttgcctcctcttcgcatctcggccccgcgagattggaagtgagggcagggcagggcggcaggggccatggcggtcccactcgtgctcgtcgtgctcccgctcggcctcctcttcctcctctccggcctcatcatcaacgccatccaggccgtcctgtttctctcgataaggccgttctcgaagagcttgtaccggcggatcaacaggttcttggccgagctgctgtggcttcagctggtctggcttgtggattggtgggcaggagttaagatacaactgcatgctgatgacgaaacttacaaggcaatggggaatgagcatgcacttgtcatatcaaatcatcggagcgatatcgattggcttattgggtggattttggcacagcgctcaggatgccttggaagtacacttgctgttatgaagaaatcatcgaaattccttccagttattggctggtccatgtggtttgcagaatacctctttttggaaaggagctgggcaaaggatgaaaagacattgaaatggggcctccaaaggttgaaggacttccccagaccattttggctagccctttttgttgagggcactcgctttactccagcaaagcttctagcagctcaggagtatgctgtttcacagggtttgccagcacccagaaatgtattgattccacgtacaaagggatttgtatcagctgtaactattatgcgggattttgttccagctatttatgatacaacagnaattattccaaaagattcacctcaaccaacaatgctgcggatttttgaaagggcaatccttcagtgggtacatgtncgcatgaaacggcatgcaatgagtgagat

SEQ ID NO: 391086 - DNA, 491 bp, Oryza sativa
ccacgcgtccgcggagaccggcaggcagaggcagcgtcacggtggtcaggcgacaacagcggcggctcgctcccgccgtggtcgcggcgccgccgtcggtgtctgtcaagcgttggtgttggcttcggtaatgctgcggcggcgcgctctagctggtcatcccctgtacctggctggatctggccgtccgcggccggatccatcgcctccacgccgaatggcagctggtcggcgggacggctgcgtgtggacggcaagcgcggcggcggctcgctggcggccagcctcctgctcggcagggggcttctgccggtggtgggtcttgtcgttgttgatgggcggcgatgtgcggatgtggaaatggcaagacgacggcttgtgctggcgtgaagcaagaatggggcttgatgtccgtgacggtgacttcctcaatgtcggccgagtggtctcccttttttcggattgcccccttggccgaccctttttagtta

SEQ ID NO: 391087 - DNA, 514 bp, Oryza sativa
tcttttactcctactttgaatacctgctcttgctcttcgcctcgctcgtctccaacgagctcgtgagccgagggctgcgccgtctcttcgttcatctgctgctgtgtctcccctggtgaggtacgacaagatgttggaacattcggagagtgcaacagaaaaaattatgagcagcatcatggataccattgctgagaaccttcctaagcagaaatctgggaaatttgacgtaggcgctgcctctgacaaaatgaaggagaagctgtttggtcgtcagaagaccattcatcgagttctgggtggtggaaagcctgctgatgtgttgctatggaggaacaagaagatatcctccagtgtcctggctcttgcaacagcaatttgggtattctttgagtggctcgactaccactttctaacaattgtttcatttgcccttgtccttggaatggttgtccagttcgtgtggtccaatttctcaagtgctctaagcggatctccttttaaaagaccccgt

SEQ ID NO: 391088 - DNA, 820 bp, Oryza sativa
  unsure (1)..(820): unsure at all n locations
ccacgcgtccgtacatatctgattctgctaatgcgccaatctgaatagataaagtgagaaacatacacaatatgacttgccactgagggaagggatgccatctgctgtttgcacctgtgcttctaatacagcaagcgtcatggccaatgcgcatgacagaggcagctccactaaccaatgtctctacatatgggtctactctgtgatctcccccatcatctccgtcatggattaggtctaagcttgatttaggtgtgcggctgtccagccatctgcgctcctccaatggcatgctgctggatatgcagccatctccagcttggttattctctgctgaaaaaaaattaatccctcctatcacatctaacatttgcttcgacccatgacaatgcttggtttggtatgccttttttcaccatcctttactctacaatccatgatttgcattcattgtttacaaggtaaatttattgaagagtggtctgttcttttgcgctgcagcattgtattgctcagaagctattttccagtcatcaaaatctcatttggataagcagctgtgttctgctatatattttttttgtccactgactctgtgaacaaccccgccaattatactaaaaccaaacaaaggtacatgaagaacaatccgcctgcaaaatcatttctatcaaacacattcttcactttttattcaagagctaatagacaaaccntttcttaagacgtatcgtgtcttgatgacatctatttanatgtgtccngaccggtttnnttanttcccngaaaanaatcctntgnanaaaaaaaaaaaaaaaaa

SEQ ID NO: 391089 - DNA, 653 bp, Oryza sativa
  unsure (1)..(653): unsure at all n locations
cggacggnggtntccccgatatcacaagtntccagtgactactatgtagccaagnatgaagaaaattctccgaacttcaaacttgcccagagaaactttgtggaaagcatggctggatactcaatcctgtgctacctgctccaggtcaaggttcgtcacaatggaaatctcttgatagatgaggaagggcatataattcatattgattttggctttatgctttccaactctcctggaggggttaatttctgaaagtgcaccatttaaactgacaagggagcttcttgaagtgatggattctgatgcagagggaacacccagtgagttctttgactacttcaaggttctatgcattcaagggttccttacttgccggaagcatgcagagcgtattatactactagtagaaatgttgcaggattccggcttcccttgctttaaaggtggtcctcgcactattcagaacttgaggaagaggtttcacttgagtcttactgaagagcaatgcgtgtctctggtgctttcacttatcagtagcagcatggatgcatggcgtactcggcagtatgattactaccagagagtattgaatgggattttatgatatacccttcaggagcttctggctccttccaaaaatcaatttgcttata

SEQ ID NO: 391090 - DNA, 551 bp, Oryza sativa
tcgccttgacgccaagggtgactatgatggtgccctggagcaccttgtgcttgcctccatgaccatggtcgccaatggacgtgacattgaggtcgcgacgatcgatgtcgcgataggcaacacctaccttgccctcgcccgcttcgacgaggctgtcttctcctaccagaaggcgttgacagtactcaagtctgcccgtggtgatgaccacccttcggttgcatctgtctttgtccgcctcgcagacctttaccaccgaacagggaggctccgcgagtccaaatcctactgtgagaatgcactccgtgtctatgcaaagcccgcgcctggcgctgcccctgatgaggttgctggaggcctaatggagattgctgccatctatgaggcgcttggagaccttgatgaggcactgaagcttttgcaaagggcactaaagttgcttgaggactcaccaggacagtggagcactgttgctggcatcgaggcacaaatgggtgtgttgtactacatggtagggaggtatgccgattcaaggaactcatttgaaaatg

SEQ ID NO: 391091 - DNA, 465 bp, Oryza sativa
ccacgcgtccgtctctctgctggtcaaaaggctaaggaggaacctttcaaacaaggtgaggatgacgcccaaaggagaaataaacttgtgcgagatatgagtgatgtaatgggagaaggcaatatagagagcatgctctcagttgaaatggggcttagagagctttcatcattgaaggtggaagatgctgttgtggttgcacttggtcaacaccggagacctagtatagttcggcaattcacatcagattttaaatcacctggtgaacctaaattcttggaggcgtttgatcttagccatgaagaggcagaagatgttagctttaagcaggcatggcttatatacttctggagaagaagctaaactcatggcattgaggaagacattgctgaagaaccgcttcagttctggattggtcgcaatgctgtacccccaacttctcatgatgctatagatgtggagcga

SEQ ID NO: 391092 - DNA, 542 bp, Oryza sativa
  unsure (1)..(542): unsure at all n locations
ggagcgatagacncggcanagnaacctgaccgagacctgccccagcgagctgcagctgcgcacgccggcggggagcgtcgtggcgtgcaagagcggctgcgaggccttccgcaccgacgagctctgctgccgcaacatgtacaacagcccgcgcacctgccgctcgtccaagtactcggagttcttcaagcgcgagtgcccgcaggccttcacctacgcgcacgacagcccgtcgctcacccacgagtgcgccgcgccgcgcgagctcaaggtcatcttctgccactagaatccagcgcgccaaggcgtactcggtaggatcccttccggggtgtctgtgactgtgttctaatgttcgattagctcgcgggtttagatgctggagtcgttacttacgttcgattagcccgtaatcggtgtgctgctgcttgtgttggctgcagggatgtctgtgactgtaatggtgttactgccaggtttccagcctgaaataacatgttcctagtgtgttcagatgtttaaaaaaaaaaaaaaaaannnnn

SEQ ID NO: 391093 - DNA, 353 bp, Oryza sativa
ttagagcccaacaataataatccccccttttcagcgcggcgacgatacccgccgtgttcatctcattctcaccaccaaaagcgaccacgcagcgaccggccaccgatcgagatggagcagcatgaggaggcagcggagaggaagccttcgccgccggtgatattccggctgttcggcgtcgaggtccgcggcggcggcggcggagttgacgaggaggagtacgaggaggaggaggtggagggtggaatttgttcatcaagaagagctccagtatgcccaacctcacctccatcgacccgctgccggtgccggccgacggcggcaaacggcgcgcctccgacgactccgagctc

SEQ ID NO: 391094 - DNA, 854 bp, Oryza sativa
ccacgcgtccgggagcttatgagctaatctcctgaaaaaatattactcagatggatgaactttcaattgaagaaaggaggtttccaaagaacagtaacaaatttttcatcagatataaaagatagtgaggcatatgcttgtctactgaatgtcttggcacctgaatgcagtgctaaaccatccccaatgtcagttaaagatcttcttcatagagcaagattagttcttgagcatgcagataggatgggctgcaaaagatatctgaccccaaaagacattgtcgacggtttaccaaatctaaatcttgcttttgtggctcatattttccagaaaaggaatgggctgtcaaaacaaatgaaacaagtttcctttgtcgacggactctctgatgatgctcaagtttcgagggaggagaggtcattccggttatggattaatagccttggaatttctacatacatcaacaatgtgtttgaggatcttagaaatggatgggtgcttcttgaggtgattgacaagattgctcctggctcagttaattggaaaatggcaaataggcccccaataaaattaccattcaggaaagtggaaaattgcaatcaagttctgaagattgggaaagaactaaaattttccttggtgaatattgctggtaatgatattgtgcaaggaaacaagaaactgatattagcttttctgtggcaattgatgaggtacaatatccttcaattgttaaagaatctgagattccattcaaatggtaaagagatcacagataacgacatactgatttgggcatacaaaaaagtaaaggattctggaaagcattctcgaatggagaagttcaggataga

SEQ ID NO: 391095 - DNA, 618 bp, Oryza sativa
atgtaagcaagcagccgctcggagcgaagactgaggcggcggcgaccatggcggggctcgcgcacctcgtcctcgccctcctcctccccctcgcgctgctcccgccggccgcgcgcggcacggaggagacgccgcagtacacgacggtgcacgccgagtccgacttcgaggtgcgccgctaccgcgacaccgtctggatgtccgccccctccgacgacatcttcttccacgtcgccaccaagctcggattccaccgattgttccagtacctgatgggcgcgaaccttaactcctccaggatcaggatgacaactcccatcctaactagcatcgtcccaggtgcagggccgctacactcgtctgcctactttgtgcggctctacttaccagcgaagttccaggcttcccctcctgtgcctctccccgaactgaacctccacccggataggtggccaagccactgcattgcagtgaggagcttctcgggttatgcacgggacaacaatgtcgtcgaggaagcggagaaacttgcgttgagtttgagccggtcaccatgggctaattccacaaactaccctagcaagagcgcctactcaattgcgcaatataacaacccct

SEQ ID NO: 391096 - DNA, 605 bp, Oryza sativa
cggacgcgtgggttctgtatttgggaatattctttcgtgtaaagtcgcgacggaaatgtctggagagtcgaagggatatggttttgttcagtttgagctggaagaagctgcccagaatgctatcagtaagctcaatgggatgcttttgaatgacaaaaaggtgtatgtagggccttttgttcgtaaacaggagagggaaaatgtatcaggcaatcccaaatttaacaatgtgtatgtaaagaacctatcggaatcaacaactgaagataatttaaaggaaatttttggtaaatttggacccataactagtgtcgttgtaatgcgtgaaggtgatgggaaatctagatgctttggatttgttaactttgaaaatccagatgatgctgctcgagctgttgaagatttgaatggcaagaagtttgatgacaaggaatggtatgtttgtagagcacagaagaagtcagagagggagatggaattgaaaagaaaaatttgagaagaacatcaaagaggcagcagataagaaccagggaactaacttgtatttgaaaaaacttggatgatagcatcgatgacgatgagaaattaaaagaaatttttgctga

SEQ ID NO: 391097 - DNA, 919 bp, Oryza sativa
  unsure (1)..(919): unsure at all n locations
cccacgcgtccgcggatccaatcttgtcgccgcttcgggctttcgtctccaccgccttgatgccgccccgggagcaggagtagcggctcatcgccaactacccttctccgtcggagcgtgcgtcgtcgtcaccggcgatccccacccacctcctcactgcgccgcctcgccgtccgccccttctccaccttgccctcaacccgccacagatccctctccctcccttcctcgtccccggccttcctcgccgcaaacactgccccctcttctccgctttccttcctcctctccacctcagccgccggccacgatctcagccgtgatctggaagaggctcttcttttaatttcagagccttaaccttaatacaagtaacagtttgggggttcaactgaacccccatgtcccaagttggatccgcccctgctcccatggtgacatcccatgaagatgctaagaaggcgtatgctgatttcgagaagaaggtcaagaggaccatctatattgatcatctttcccctcaagtcacgagctcagtacttaaagcagcccttgcccaatgtgcaaatgttgtcgatgtggagttcattgttaattacacaatcccgtatgacattccttctgctgcattggtggaattggatgacgaaatacaagctaaggctgcactagacttgatgaatgatttccctttcataattggcgggatgccaaggcctgtaagagctacatgtgcaaagcccgacatgtttccgggaaggccttccttgcctgacatcaagaaagaagttccggtgggtaaaacaagaagatggaacagagtatgaaggaatgaagaaattgcaggatctagcaaaaaaggaagaagcagaaaatatggactcataaagaatccatttgaaaaagggnaaggacttgg

SEQ ID NO: 391098 - DNA, 526 bp, Oryza sativa
  unsure (1)..(526): unsure at all n locations
gaaattcgtctcctccgctcctagcgccgccgagtcgcggctgaacagaacaagggagggaggggcggcgatctccatctggcgagcagagcaggggaggggatcctcatctggaagaggctcttctttttaatttcagagccttaaccttaatacaagtaacagtttgtttgttccccgatccgcccctgctgctggtacttgggctatttgattcctgcatagtttcagagctagagctagtgttgctctttacagctttggggcggattcgcgatgggcggttgaagaagtcgcctgacttcaacttttgccagatccattttgagggagaatgggggcctggagttccctaaagctatccctgtngcaagtacanctggtgatgctggtgcagataacttaaagactaagaagatcgaaggcaacatgcaggcaacaattcaattaaagntcaaacatctaattctatatctagagctcatcggnatcctcgagctctatggaaangnagtctagaggagat

SEQ ID NO: 391099 - DNA, 507 bp, Oryza sativa
gaacaatgcctcggatcgcaaatcccctcacgcgcaatcgcgcaattctccgctgcttccctcccatcgctccttctcatcggcatcggcatcgccatcgctattctccgagtatcttctccttaccttggcggcataaaagaaggaaaatctgtctcctccgctccttgcgccgccaagacgagtcgcagctgaacaaaacaagggaggagaggcgcctttctgattcatctttctctcccatcgggactacttttgtctggataattcttgcgtgcgttcgttaaccctagcttctcttctagatctggaagagactcttcttttaatttcagaatacaagtaacagtttgggggttctcaagtgggatccgcccctggctcccatggtgacatccgatgaagatgctaagaaggcgtatgctgattttcagaagaaggtcaagaggacgatctatattgatcatctgttccctcaagtcacgagctcagtaattaaagcagctc

SEQ ID NO: 391100 - DNA, 521 bp, Oryza sativa
  unsure (1)..(521): unsure at all n locations
ctcatcgccaactacccttctccgtcggagcgtgcgtcgtcgtcaccggcgatccccacccacctcctcactgcaaacactgccccctcttctccgctttccttcctcctctccacctcagccgccggccacgatctcagccgtgatctggaagaggctcttcttttaatttcagagccttaaccttaatacaagtaacagtttgggggttcaactgaacccccatgtcccaagttggatccgcccctgctcccatggtgacatcccatgaagatgctaagaaggcgtatgctgatttcgagaagaaggtcaagagggaccatctatattgatcatctttcccctcaagtcacgagtcagtacttaaagcagccnttgcccaatgtgcaaatgttgtcgatgtggaggtcattgttaattacacaatnccgtatgacattcttctgctgnattggtggaatggatgacgaatacaagtaaggttgaatagacttgatgatgtttcctttcaaattgggggt

SEQ ID NO: 391101 - DNA, 373 bp, Oryza sativa
  unsure (1)..(373): unsure at all n locations
aagaaattcgtctcctccgctcctagcgccgccgagtcgcggctgaactgaacaagggagggaggggcggcgatctccatctggcgagcagagcaggggaggggatcctcgtgagcatccacatcctctttctgattcatctctctcccatcgggacactcgatatttcttgcgttcttcgctaaccctagcttctcttctagatctggaagaggctcttctttttaatttcagagccttaaccttaatacaagtaacagtttgtttgttccccgatccgcccctgctgctggtacttggggctatttgaattcctgcatagtttcagagctagaagctaagtggttgctctttaangctttggggcggaatc

SEQ ID NO: 391102 - DNA, 796 bp, Oryza sativa
tttgtataaaaggatcaattacgcagatacccattttaaccatgcctaatgatgatattacacatccaactcctgatcttactggttatatcactgagggacagatctacattgacaggcaactacataatcgacagatctatccaccgattaatgtccttccttcactctcccggctcatgaagagtgctattggtgaaggcatgactcgcagggatcattctgatgtctcgaaccagctgtatgccaattacgccataggcaaggacgtacaggcgatgaaggcagtggctggagaggaagcgctgtcatcagaggacctgctgtacctcgagtttcttgacaagttcgagcggaagttcgtgacacaaggagcatatgacacacgcaacatcttccagtcgcttgacctcgcctggtcactactgcgcatctttccccgagagctgcttcaccgtataccagcgaaaacccttgaccagtattatagccgtgatgcctcccactgatctgcaaagggtcgtgtgtaataagaaaaaaaaccatcccggactcccacttcttctctttcatttttgccaccaatgcattcattattttttgtgtaaaaaacacgaattatctagtgatgtgggcttccatcattgttgtcccaagcacaccatgtatcatatttatcttcttttttggaagaaaatgtattattttcttgccgtggaaaaatgaataagtgaggacgagtgagctagggatttggttaatgtaagaacacaatgaaataagccatttgcctcaa

SEQ ID NO: 391103 - DNA, 812 bp, Oryza sativa
cgccccacggcgtccggagaaggaaaatcttgaatagtggaaagacttgataagattagaacgaggtgcccgctctaatacaaacagatctattatgtcccatggtgcttttgcagttctttatggccagcatttgaaatactacataaaggatccagaggttacacttgggagagaaacaagtgaggaacatgtcgacatcgatttgggaaaagaaggaaaggcgaatacaatatcccgtcaacaggcaattatcaagatggataaaggtggatctttccacataacgaatataggaaaagctccaatcttcgtcaatagcaaagaagttccatgcaacgaatgcactcacttaatttctgatgcattacttcagataaggcacatgaaattcatttttcacatcaatccaggatgccgtgaggcaacatatagttcgcagtaggagaggaacctcccaaggcaagtacgccagtatttaattgggatgaaaagccatgaattaaggttacgatcaagctcatgtgtgaatttattgtcagtaatatatatcggcaggatagaagtatatagcaccatatctaattcggtcccatcctttgcatgtaaatcgttgtatatttccatgcttatcatttagtatataatagatatatgctcaattatcgtcttcagatccatattgttgtaaggtgccacggttttatgtttgaaatttggatttaaatttcatcgacaaaagttgttttagtggactgggaactgaattctcaaagatgaaccccttgcatgctttaaaaaaaaaaaaaaaa

SEQ ID NO: 391104 - DNA, 559 bp, Oryza sativa
  unsure (1)..(559): unsure at all n locations
ccacgcgtccgcatcaattgttagcaaatggcgtgcggattcagagaagctagttaaagttctgtttgagcttgctagacatcatgcaccatcgacaatatttcttgatgaaattgatgctattatcagccaacgtggtgaagctcgcagtgagcatgaagctagtcgacgcttgaagactgagctactcattcagatggatggcttgacaaagacgaacgacttggtatttgtacttgcagcaacaaatttaccttgggaactggacgcagctatgctccgccggcttgagaaacggattctcgtacctcttcctgaggctgaagcaaggcatgctatgtttgaggaacttttgccatcaactacctcaaagctagagggtccatatgatactttagttgagaagactgaaggggtactctggttcagatatccgtcttgtgtgcnaagaagctgccatgcaaccactaagacgtcttaatgtcagttcttgaagccagagatgaagctggtgcctnagggaagaattgcccgangttggtcctctcaaacttgaaga

SEQ ID NO: 391105 - DNA, 483 bp, Oryza sativa
aagcggcgaccctctggtctttggaaggggtggagaagagatggatttccttcaacaacaaggaataagagttgaagttatcccaggaattacatcagcttcaggaattgcagcagaacttggcattccactaacccatagaggtgttgctaccagtgtcagatttttaactgggcactctagaaatggtgggccagatcctctatatgtggcagagaatgcagcagatcctgacacaactttagttgtgtatatggggtttgtcaacactgccatctcttgctcccaagttgatgaagcatggtcttccaccggatacaccggctgttgcagttgagcgtggcactaccccccaacaacgcatggtaattcgccatgttaaaaggatttttgtgaatgaaagtcaagtcggaggatctagtcttctcctactctgataattattgggaaggtggtggcattgtcacccttttggatcgattc

SEQ ID NO: 391106 - DNA, 848 bp, Oryza sativa
  unsure (1)..(848): unsure at all n locations
tgttatagagattcnttaccagtgaggaagaagcttgtttgtcgatacaatgaaactgcttccattctgaaagagctgattacagagtctgtggggtctgaagctattggtgtggattgtattgccgattttcgccgtctactccgccagatggagagcatgacatcggtttgtcaggagtacatcatcagcaacncgcttcgcttatacctgatgctaacaggacggcggtatttctattattttacaatcacatcatgggtaagctcgcccaggagcaaccaagactgaagaatcagattattagcaaagttgccgtatgatgggatttggctaggcatagttatttccaaccgctttctcagaagatggttgaatagccatagggaatacgtgagtaccggggatgatgacatgagctttaactggaatgtccgctctcatttttacgtacatctgtggatctttgcttatagtcaattggaggtagaggaatgcttatatggtgagtttccagagcttctgttggagattgagatcctgctatggaaagcgaatgagatcgatgggctaggattcgaggataagttttagtggctttgagatatggcaatgcattgtaatatgggtgaattgtctgtatgacgtttaatctgagatcatggatctcttgttagggctttaggtggtgtttggatccagggacttaactttagtctctgtatttagacactaatttagtctattaaatatagactacttacaaaactaattacataaatgaaagctaatttgcgagataaattttttaagcctaattaatctatatttagaaaaaaaaaaaaaaa

SEQ ID NO: 391107 - DNA, 594 bp, Oryza sativa
agcctcctaggcacttcttcccctcggctctcgccgcttaactcctccctcctcaagcggcgactcgcggcggccggcggcggcgcaggcgcaggcgcagcaatgaacccgatccgatcggccctcgcgagggcgctcctctccccgaagccccgcccgccgcgcgcccgccactacgcaacctcctccaccggcggcgcgacgcagccggagagcgtggcggcggagatggtccgctacgccctcggcggagcaggcccggtagctcgccagatgaggcgatgcggatactggagcagggggcctcgaacctgcagggaggcggcgaggggtgcggtgaggccgtcgggatgctcatgctcgcgatgtctacgctgctctatcggagtggaagacgccaagaagcaatggaaaaactcaaggcaaccaaccaagttgctcctgcagctttcagagttgcagcatgggaagcaacaatggggctgtgcatggaagcgggccaggttatcaacacctcagtgtccccagatgatttggtcgatctatcaatcaaggatgataatatcaaatggtcagatcagggccatctgaaat

SEQ ID NO: 391108 - DNA, 647 bp, Oryza sativa
tcgaggctgtcgaaaatctctcctggcagagtgaaggtggcctatcatgagtccatgggtgacagcttcagtcactacactgcacctgagctgtacagaaacgaaatattcgacgcaagcgtcgacgccttctcatttggtttcatcctctatgagatggttgaaggaacacacactgtacatgggaagtcatcagaggaatctggccacacaattcgatatgatgggatgcgtccatcgctgaagaacaagctcaggggatatcctccagatttcaaagcgctgatcgaagaatgctgggatactcagggtatagcaaggccaacattttcagagataatcatcaggctcgcacaagatatacgcccagtgcatgaagcaagggacctggaaggactcgctaaagatttggaaatgacacgtgtgggctaagctgcatgaacgccttcttgtgtacatatcactgcgaagcaaatgcgtcactctctgtgaagaagaagcctgagctagcactcactcgtctggaggaggatgacacgacgtaccgacaaatttgtgtacgtgttgtaaaaggcccggcgaaaaaaaaagtacttgtaaaagatcaatttgagttaaattggaagtaacaaagcttaattattact

SEQ ID NO: 391109 - DNA, 462 bp, Oryza sativa
  unsure (1)..(462): unsure at all n locations
tgtgaatttctgctgtggcnccccctgttgcctcgaggggaaatcattggcggggattttaccaagcaattgatctcatcagcaagaatgctttggtggggatcttcctactttgttggatttggattgttctgcgtcgaatcattgctcagcatctgggttatccagcaagtgtacatgtacttccgaggaagtggaaaagctgctgagatgaagcgtgatgcaactaggggtgctatgcgggcagctttttaattatcagaaaagattattggtccgactcatatctctgatggaatggatagattgtggtataaacgaacatatatgttttccctgtttgctgactacaatttcaaattgttagtaggttacagtgacgttgtatgacctgtcctcttgattcatcaatatagagaatgtgcagttgttacttgttaaananancccccgtccgnnnnn

SEQ ID NO: 391110 - DNA, 1083 bp, Oryza sativa
ccacgcgtccgcccttatcgtcctctctctccttcttcctttcctgattcatctcgccgagctctcctcgtcgcctcctccgtctctctataaataaggcgccccacggcgcttatcgattcgcgtcgccgcttcctgcagaggccgagaattattctcctgcgcccgccgcaaaaaccctagccacgccgatctcatggcggctaccatcagccaggcgagcctcctcctgcagaagcagctgaaagatctcgcgaagaccccgtggatgggttctcggctgggttagtcgacgacagcaacgtcttcgagtggcaggtcacaatcatcggcccgcctgacaccctatatgatggaggttactttaatgcaataatgagctttccacagaattatcctaacagtcctccaactgtcagatttacctcagaaatgtggcatccaaatgtttatccggatggacgtgtatgcatttctattcttcatccgcctggtgatgatcccaatggttatgagcttgcgagtgagcgttggacaccagtgcatacggttgagagcatagttctgagcatcatttcgatgctttctggtccaaatgatgaatcaccagcaaatattgaagcagctaaggaatggagagagaagagggatgacttcaagaaaaaggttaggcgccttgtaaggaaatcacaagaaatgctctgaagaaaccggcagtactggggaaagttaaccataccacgtcacatgtgcatgatttggctgtcgatttccaaatgtcagttgacactagcaattcacttctccccctctgtacttcccatagtgtgcctggtggtggtcgcggtttcgtctcccaggaaggctgaatagcactgggacatgtttgtcacctattctaaagctctggttgtatttgtgtggcttgggctgtaaccgttgagaaactttgaaatactgccactcatcacaattttcgtaacaaacgtcatataagcaggcacctgcctgatctgctagctgttgaacgttgaaacacaatatctacaaactggtttcagtccgttctttataatatgttct

SEQ ID NO: 391111 - DNA, 412 bp, Oryza sativa
ccacgcgtccgcacaccgatacatcgtcgagaccaacacatagagagatcgacatcgatcgccttctaacttctaagttgtgattgagattgaaaaccgagaaccatgggaggcgggcatgacatgcacggcggcggccagaacggcggcgtgaaggggctggtctccaagctcgtcggcggcggtggccatggcggcggacacggcggcggacacgggtacgagcaaggctacggcgggcacggttaccctccccacgccggcgccgcccacggcgcgtaaccctcctcagcacggcgcgtatcctccacagcacggcgcctaccccgggcacggttacgtgccgggagcctacccttcgaacgccgcgccacatggagggcacatgggatcgtaccacaccggccatggc

SEQ ID NO: 391112 - DNA, 649 bp, Oryza sativa
cccacgcgtccgcccacgcgtccgcccacgcgtccgtggtggtgcagccatggttgctccactgaagtttgcagttgtcacagagaaaacagtcttcgcaacccctgaggctagtgttggattacacacagactgcagcttttcttatatccattctagactccctggatatttaggggagtacctggctttgaccggtgcaaggttgaatgcaaaggaaatgattgctgccggtcttgctactcattttgttccttctgaaaaattggaagaacttgaaaaatgcctgctgaatttaaacacaggagatgagtctgctgttcgagctgctattgaagagttctcaactgatgttcaacctgatgaagatagtattttaaacaagctcccaactatcaacaaatgtttctctgctgagactatcgaggacatcataaaagcttttgaatcagaagggagcattgatggaaaccaatggatcgctacagtactgaagggcatgcgaagatcatctcctacttcactgaagatgactcttcgatcgatcagagaaggtcggaagcagagcctgccggaatgtttgaagaaggaattccgacttacaatgaacactctccgatcctgagttactggcgatgtctatgaggga

SEQ ID NO: 391113 - DNA, 601 bp, Oryza sativa
  unsure (1)..(601): unsure at all n locations
ccacgcgtccggcctctcctcctctgctttgcatcgattcgctcaatctcgtctcctttatatgtctgcatttgcaccgtctcttcctctccacgttgcagcagcagcaacagcagtagcttcacaagggaggagaggaaggattaagacgacgagcacttgttggaggaggagagcagctgtcccggtgaacatggcagccgccaccagcagtgcgctgtcaaagcttgctccactggaggcgatcttgtttgacatcgatggcaccctctgcgactctgatcctatccatttctgcgccttccgcgaactgctgcagcaggttggtttcaacaatggcgtgcccatctccgaggagttctacagcgccaatatcagcggggggcacaacgatgacctcgcaagggccttgttcccggatttggatcatgacaaggcaatgaagttcatggacgacaaggaagcattgtacagaaggttggctccagaacagtttggtggcagtagaaggcctgcatgatctgtgcagatggataaaagatcacaagctgaaacgnggcgccgtaacaaatgctccaggtaaatcagagttcatgctttc

SEQ ID NO: 391114 - DNA, 562 bp, Oryza sativa
gttcgtggtgacggccttcttctacgccaccgcgggcgccggcggcgtgccggcgccgttcatggtgcggaaccgggagtcgaactggatggggtacgtggccgtggcgacggacgccggggtggccgcgctgggcaggcgcgacgtggtggtcgcgtggcgcggcaccgtccggcccatggagtggctcaacgacctcgacttcacgctcgtgtccgccgccggagtgctcggcgccggtggccgttcgccggcgccgagggtgcacagggggtggctgtccatctacacggcgagcgacccggcgtccaagtacagcaagctcagcgccagggagcagatttcggatgagatcaagaggctaatggacaagtacaaggacgaggagaccagcatcaccgtcgtcggccatagcctcggagccgccgtcgcgaccctcaacgccgccgacatcgtctccaacggcctggatcagcacggcgcctgccccgtcacggcggtcgccttcgcctgcccgcgcgtcggggactccgggttcagaaagctcttcgacgagctcccc

SEQ ID NO: 391115 - DNA, 526 bp, Oryza sativa
ccacgcgtccgggcatggaattggggcaagagtcgatgctacactgtatggaaaagatgcaattgaacttaaatccatctttcaacaggggggcagggcaccactctgccagccatccctgttagcccctggaggattctttgatcagcagtggtacactcagctacttcagacttctggtcatggcgttgtcagtgctttgacgcatcatatttataatcttggtggagggaatgatgcccaccttataaggaagatattagatccaggggggttagattcgttcagaagatgcggatagggatatgcatctcacccttcaaaggcatggaacatgggcttctgcctgggtcagcgaaagcggaggtgtcttcaacaatggcggcgaacttgtgtcaaacactctcatcaatagcatctggtatctcgatcagcttggaatggcatctaagtacaatacaaaaatattccgcaggcagactctgattggtggccactatgggctacttgacacccaaaccttttt

SEQ ID NO: 391116 - DNA, 599 bp, Oryza sativa
  unsure (1)..(599): unsure at all n locations
ccacgcgtccggtgatcatgggctatggcttgtcgatgaacatagtgatgagtcaccacttggtagaatatgagcaagctggcaaagctacaccacatctgtccttgcaacagcatcaaacttttgcagctggtgtttaactggttgggattgcggaaccgtgggattgatttgccatccgccacacaaaaatacagcaactggatatgtgcagtagtttttaattgtacatcaagcccctttcagagcgacctgttgtcatgatgattatttttatttcattatcttttacgaatacggcagcagtaagatcttagggtgagaatgtagctatttaagggaatgtggccacaaatattagcgagtcaagtagtaactcattggtctatatgtatagcatggtaattttgttaacctgtaggcattttttttgacactggattgtgtttaatattattctttttacctcctttcataaagacctctaactgtcatgtgtgatggcctgctgggtgtccacaaaactgtgctaatgatgaccttgtaagttgtaattccgnatataaattatttaaccatgctcaggtaaaaaaaaagga

SEQ ID NO: 391117 - DNA, 470 bp, Oryza sativa
ccacgcgtccgccctcaaggcctcaacctactccagctatctcgccgtaccgccgtcgccgcttcctctcgcacgcgcgccgccatgccctcttctcttcattcctcgcgcgcgccgtcgcggtcgtagcttcgtcgtccttcgcctccctcgtgccctcatccagccattgttactgtgcccgcgctcccgcgccggcaagcgagtccgtcatgtccaccagtgaggaggcggggcttccagatccggcaacagcggcctcctcgctggtggattgtcggttgcccggacgagagggatgcgagccactgcactcctcttctcctctttcatctcatctccacgtggatccggtcgtggccctcttcggcagtacaacgctactctccactgtcttcctcacccgttctccatgccggtcaccttcccttggtgccaggatggggagagcaagagcagcagcttgggca

SEQ ID NO: 391118 - DNA, 829 bp, Oryza sativa
  unsure (1)..(829): unsure at all n locations
ccacgcgtccgcccacgcgtccgcggacgcgtgggtgaaaagaggaggaagaagggtggtaggagaaggaaggatcagaagacaaaggcacactatggggaagaggaagaagacgaatatagagatgaaccagaagcagaagatgattatgcaaacacggcgaggagtaacgatggtggcgattcagagaaagccccaggtcaccttcttgctgctgcaggtcttgaagattctgatgctgaagaagatgacatgggacaccctcaatctgccatagaacggaagagacgagcctggtcagaatctgaggatgatgagccagtgcagaggccagtgcaacctagcgcaggcgagaacgatctgagtgattgaattagacggtgaagattatggccgaatttgggatcacttcatatatttgtgacgaagaatggctcctgggatgcggaatcaactatagggcgtgctcatatgcacttgtggataattcgatgttgaaatggagctcagacagatggttgaaccagaagtgttaaaaaaatttatctgggagcagagcagtcactgatattcaacaattaatctcgcgtcattctagacatgccatgggttggtggagctaacataaggcaatttgtaatttatgtctagtttacgcttaatcagccagacttctctcctgtgagcttctaacgctgtaccaattttagctcacttacatctcaggatagctgatctcctactttgttctttgctgctaggcaagcgtgccaagaaaagatttccnnnnnnnnnnnnnnnnnnnnnnnnnnnnnnnnnnnnnnnnnnn

SEQ ID NO: 391119 - DNA, 1191 bp, Oryza sativa
  unsure (1)..(1191): unsure at all n locations
cgtagtctccngntcccggtcttcgcgacgacgctagctttacacgttcgtgataatggcggcgctgctgctgctgncggcggcgatggtggtggtggcggcgacttcaagaagggggcgaacatggcgatcatcgtgcgccacctccatggacgccgccttcttcaagtccatcggcctcagcgacaagatttggaacaatggccccctcgacacccagatccagtggttccgtcagctcctcccctccgtctgcggcaacgattgcaggagctacctgtccaagtcgctgttcgtggtgggcgagttcggcggcaacgactacaacgcgccgctcttcgccggccgcgccatgacggaggtcagggactacgtgccacaggtcgtcagcaagatcatccgtggcctcgagacattgatcaggatgggcgcggtggacgtggtggtgccaggggttctacccatcgggtgcttcccgatctacctgacgctctatggcacatccaacggtgcagactacgatcgcaatggttgcctcaagagctacaatagcctctcctcctaccacaacacgttgctcaagagaagcctctccaacctccagaggacgtacccacatgccagggtcatgtacgctgatttctactcgcaggtcactgcctatggtccgctctccccaaaacttcgggctgaaatacgggctgaaggtgtgctgcggggcgggagggcaggggacgtacaactacaacaacaaagcgcggtgcggcatgtccgggtccagcgcctgcgccgacccggccaactacctcatctgggacggcatccaccttaccgaggccgcctaccgctccatcgccgatggctggctcaagggcccctactgcaaccctcccatcctccactgatttattaatcctacatgtataatatctgcagagagatgagatgtgacccaattaattgtgcactgtttgcttaattaggccgaagtgtgtgtttgtatttgtgtgtgggttaattaatatttgttcatggggtttacttaattagagtttggttgtgatttggagagggtgattttaagcctgatgatgtatttagttggggatcgaatcaaactgatccaagtgaataatgaagctcaaacaagggcttttccattttaaaaaaaaaaaaaaaaaaannnnnnnn

SEQ ID NO: 391120 - DNA, 496 bp, Oryza sativa
  unsure (1)..(496): unsure at all n locations
ccacgcgtccgatttccgccccctctctctccctccttccccaaatcagctagagtggtcggctcgacccctcctccacgcctccgcctccgcctccgcctccacgacgtagcccagggcggctagggtttcggtttcctccgccgccgccgccacctcctcctcctcctcgtgcgcggcggcgaccatggcgatggtgcaggccggcatgggcctcacccgcgtcgttgtcctcatcggcgccgggatggccggctccgtcgtcctccgcaacggccgcctctccgagatcctcggcgagctccaggagatactggacaagggggagaaggggaaagacggagaagggggcgggggcgccgacatgacggacgcgctcactagacaggtgcgcaacttggctatggaggttaaacaacttgcttcttcccgtggatctataactgttcttaatggaggttctggtcaaacaggggtntcaggtttnatagtacct

SEQ ID NO: 391121 - DNA, 500 bp, Oryza sativa
  unsure (1)..(500): unsure at all n locations
cggacgcgtgggcatattcaagatcaaagctgccggcagacacactcgagaacattgtgagcaacattgcttcacagatagatggcgaggaccgcggtgggaaagctaagaagatgcttgctgagatggtgaaggttagcatggagcaaagcttgaggcatttgcagcgtcgagcttcttttgcatgatcaggtgattggcacattttgcaatggaagtagacatagtggaaataatgagtttgctggtgatgccggtccaggccttgacaggaccgagtgactggtttgagcgctcatatacttaagctgttgaagtagtagttccttttccatttcaatcttgtgtgttctgaacaagaacatttttttcttctgtttctcatgtgcccttcctgcactttgtgcatgaaagaccccataaaatgcaaaagaaagaaaacaaaaaagaaagacatatcctttgaggaatggactgtacnnnnnnnnnnnnnnnnnnnn

SEQ ID NO: 391122 - DNA, 1242 bp, Oryza sativa
  unsure (1)..(1242): unsure at all n locations
tttctgattctctcgccctcctcccataaagcgagcggtggttgacaccggacggatgccccaatctttgcatcgaggggcaacgaagcgaggtcacggatgcgggcgatgccaccgccgtcttcttgtccctagatccatcaagtgaccagttctctgatcagtgagaataatggccgctgctgaagcaagggctgcttggcagcgtgctgcaaaccgttgcatcgttcaggaggatagaaaaagagcaccaaaactagcctgctgtccaccatcatcagaacagcagcatgtcaaaagcaatggaaattgtaggaattctgaagaccgccctgtgcccaatttcatgccattgagctggaatcccatgaactccagtctgccacctgatattagatggtggcttcagttacaaccaaatttaggagggcagaagaatcttgcaggtgagcacctatattttctgggaagagagatcagtgataaggaagtggaggattcagcacaaaagaatatacacgacgaaccattattttgtgaaatgttcgacaccaatcctgagaagattgaggatgtttttgagccttcgtggatggtttccacagcttccatgaagtattcttctgaaacaggcttacaagacttgaaaaatataggtggctattcccaagttccttcgaagtgcaaagaaaatgccagcgactgcttgttcaatgataaagaatccctggatttcaaaaattttaacccaccaccgtcgaagaacccacagaaggacgattttgatatgaatgcgccttggaaaggtggtgtaaggagtcatccatggtggcagatcactgatgagaatgagctggctttactggttgcagaaagagcaatgcagcatattgagaattgcgatttaccaagacctacccagatagttcgtgttcagggtactgtatcacgcagtcatgaaaatatgggtcggtacagggggtcatcaggtccagcaggtacaatgtcatatcctgatactggacaatgtgaacatattgaatgcagttacagcacagcaagcacagatgaggtggatttaaccagtgatggagtttggcaacagcaggaaagaaatgttgcacgcagtattgcacaagatttttctaggggcatcaatacagaaccacgaggcaagcgacataccagaatcctgcagagcaagctcacttttngnggcctttgtcactngcaaacacgggc

SEQ ID NO: 391123 - DNA, 396 bp, Oryza sativa
  unsure (1)..(396): unsure at all n locations
ggagatacagaaagtgctggacatcaccggcgtgcagacgtacatcatcaacagcgcgcgcntcgtgttcctcaacgagcgcccccggccccggcccggcaagggcctcaccaacaccggcgaggtctgcgagcgcagcctgcgcgacaccttccgcttctgctccctcggctgcaagatcgtcggcacctccggcgactaccgcggccggaagaggcacgccggcggcggcatcaagaagacgaagaagctgcacaagggcgcggcggcggtgccgtcggactcggacgactcctccacgaccacaagcggcgggagcgacaagagcagcgtggtgcagagcttcaccccgtccacgcctccggcgaccgtcaacagctaccgcaccggcaagcg

SEQ ID NO: 391124 - DNA, 721 bp, Oryza sativa
cagtagtgaaaaaaaaaagaaaagaggaaatatctgctggccaaaatcattgtgtcctcgcctgagggtgtccccatcccatcccgtcggctgggcgtggaggtggagtcccgtgtcgcgagttcggccgccgctgccctgcgccgatctccatccccgtcggttgtcctgctgcttccgccgcatcctggagctgccgccatgtccgacatggagtccatgacagcccttatggagtctacaggctccaagctgcagctgcttcagcgtgcatttgccgagcttgagagccagagtgctgtttcattgaacttaaagtggaagcaacttgaggaccatttccatggccttgagcagtcgcttaaagaaaaagtttgatgagctgaaagagcaggaaagggagttcaaggagacagtcacgaaatcggagcagatgcttgagcaacaggaggctgctgtcgtggcaaaggaactgactcctcttgaaagactgcagcagaaaagggatgctgcgttggctatgatcttcggcaagtcaaagctgaacttgtctatgcctgtaatcaacccaatcagcaaatctgtgagtaacaatgctgtgttaaatggcaacatcgctagcctgtggcccaaacctgcaactggcatgggcatacctgcagatggaacactgtgtgagcctcgttctaactgtatccttgtgaagaataatgtaacgggc

SEQ ID NO: 391125 - DNA, 385 bp, Oryza sativa
ggtaaatgcaagaagccaaagcggaagtataaggctgtactattgggcttttcacagatcaagaggctagatctctttctcatctgtggccaaaaacattcaagatgaaacctccagaaggacaagatattggactgtgcttcattagttctcttcaaaggaaaatgtaataagttttacttttggggtgttttcggagagctgcacagatactataatcaaacaggtaatgttaagattggcaataccgactcgtgagacaaatttgaagatattggcatgaacttggacttgacaaatggcaaagagttaaagagaggcaaatgtgggagttaaaagagaggcaaatgtggggttgaggtgtcatttgagaggcacaaatgta

SEQ ID NO: 391126 - DNA, 598 bp, Oryza sativa
  unsure (1)..(598): unsure at all n locations
gtttgacaagactggaactttaacaattgggaaacctgtagtgactaaagtaatagcttctcacagagagggagatgaaaatacaaaggattcctgtaacaatgaatggactggtgagattctgagtttggcagcaggtgtagaatcaaatacaacccacccgcttggaaaagccatcatggaagctgctcaggctgccaattgcctctatctgcaggcaaaagatggatccttcatggaagaacctgggtctggtgctgtggcgaccattggcgagaaacagcgtttcagttggaacacttcgattggatcaggaggcatggaagttcttcacaatccatttgctgatggagaaaattttggtcagtctgttgcatatgtagctgtggatggtactctagctggacttatttgttttgaggataagctgagagaagattctcatcaaattattgatatcctatctaagcaagggattagtgtgtatatgttgtctggngacaagaaaagtgctgctatgaatgtagcttcacttgttggtatccaggcagacaaggtcattgcttgagttaaaccacatgagaagaagagtttcata

SEQ ID NO: 391127 - DNA, 644 bp, Oryza sativa
ctttgcctgagtcgagtcgcctcccccaccgccggccaaccatgctgccgccggccgcccgcctcgcggcccgccgcctcctagggctcgcgacctcctccgcctcggaatcggccgcggcgcgacgcttgtcccgttctccgatctcctacgccgccgcgggctgctcctccaggctgttctccacggcgcttaactaccacctcgattcgccggaaaacaaccccgacatgccgtgggagttcacggaggccaacatgaagaaggttaatgagatattgtctcactatccaagcaactacaagcagtctggtattattccaatgcttgatcttgcccagcagcagcatggtggatgggtgccagttgcagcaatgaatgctattgctaagatcgttgaagttgcaccaatcagagtatatgaagttgctacattttacacaatgtttaaccggactaaggtgggtaaatatcaccttttggtgtgtggaaccacaccttgcatgattcgtggttcacgtgaaattgaagaagccttgttagaacatcttggagttaaacggaatgaggtgaccagtgatggtttattttctgttggagaaatggagtgcatgggctgctgtgtgaatgctcccatgattgct

SEQ ID NO: 391128 - DNA, 1028 bp, Oryza sativa
gtttcaacgtcacaattttcttctgcagacgacggtgataaaagatatcaagaatggtgctggagtctattccttcaacctcacatgggatgatattgcgaagaacctgaagcccaagatatcaaacccaatgaccacatttgatgtgtacagaaatcctagaaacaagaatgcaggaggggggatgagactatcggacttcttggcctttgcaaaaggaaaggagttggcaggagtcatgatcagtatagagcatgctgcattcatggcagaaaaacttggatttggtgtagtagatgcggtgatcaaagcccttgatgactccggctatagcaaacagactgcccagaaagtgatgattcagtcaaccaacagctcagtactagtgaagttcaaggagcaaaccaagtacaaccttgtttacatgcttgaggaggatgtcagagatgctgcacccttcctcccttgcagatatcaagaagtttgctaatgctgtttcagtccgcacaacgtccatttacccggagagcaaacattatttgataaaccagaccagtcatatcgtccagaccctgcagtccgctggccttcccgtttatgtttacgtgctcatgaacgagtttgtttcgcaaccgaatgacttcttcgcagacgccacaacacagatcaacacatacgtgcagaagaaaggtgctggagtggatgggatcatcacagatttccctgcgacggtgcacagatacagactgagcccctgcacgagcaaggaaagcaacttgccgaccttcatgctgcctgtccagcccggtggcctcagcgggaccatcatcgatccagctgcacagccaccagcaatggcgccaatgcctctcttgacggactccgacgtcgcggaatcacccctaccgccggtcaagaacgtcacagctccagccccgggcgcttacgagccatcaagatgcggaccgacgcctcgatcatcgtcgcgctgctggtgctatgcgcctctctgatcatatgatctaagt

SEQ ID NO: 391129 - DNA, 505 bp, Oryza sativa
  unsure (1)..(505): unsure at all n locations
acttgttctgcattcatcttgcagtgttatatatatctgtgtctgtcagctaaactcaccttgagcttacaatgatgggcttgcaggaatccagcatcggtggtcggacggccagcttcttccactaccagaggctggaatgccgggatgacggtggcccgccgcggcaatccaggtggcggtggctgccggccctcgacggtaagccggcacacncnctgntcttcttccatgtcaagaagctgaaatggagcaggatcacctcggtcctcctgccaagaaggtggtggcggatctcctccaagatccgccgtgcccgggcgacgacgatggagggcgcaccgacatctgcccgaccatcatcttcgcgtcgnagtgggggctccggtgctcttcagggcattgctggctngtaacaaggcangtatcttaacatnggaagggcttctgaggaagtaagaagctttgtttctntgcctcttcaaagtttaactttgctcctagt

SEQ ID NO: 391130 - DNA, 633 bp, Oryza sativa
ccacgcgtccgactttgctcaagtgaaatttctgttaagaacctggcaacagggcggcgctattgctttttttttttggttcccaatcaaatcgatgctttttttccactccgtagtgaattcatagctacctttattcccttcttttaggtttgtaagatgtatcccttgttgagaaaacaaacagggatatctgtggcgaaaaagcgacaacctatgacaatcggaactaaaagttttctaaattattgaaaaaattactagaaatatgtgtaagcatggactacattcccttcaaatctctttgtctaaactcaactttatttggaaggaaaagaagacaaaattttggtgaatagtaggaagctgggtttgaacttgagatttggtggaaatgtagttcacacctatacttatctctagtaaattttccatgaatttagaaaaaaaattcagtttcggttttcatttattcaatggttttcattggatattcctccaaaaatgtaaactagaaaccgctatcctggtggaagccttggagtagtttacaattttttttatctcatatacaaaaggtgatatcggataaccatagaaattttgaatatcaaacttttgtttgtgataatc

SEQ ID NO: 391131 - DNA, 353 bp, Oryza sativa
ccacgcgtccgttcgtaaagtcactgcactatgcataggaaatgccaaatacttcggcggtggtatgaagatcactccaacagctgatcctttcgggggtgaccttgaggtcgttattcttcaagatttcaaatggcatgatttcctgctcaagcttcatagattgtatggaggaactcatctatcagtgactggtgtgtcatcgataagagttcagtcgattgaagtagcagaaaaggaagttagtgctgacatctttgtgcaatctgatggggagcattttggttttcttccaaccaaattttcagttcttcccggtgcagttgatttcttctgctagattagtatgcttc

SEQ ID NO: 391132 - DNA, 645 bp, Oryza sativa
  unsure (1)..(645): unsure at all n locations
acgacggccagtgagcgcgcctaatacgactcactatagggcgaattgggtaccgggccccccctcgaggtcgacccacgcntccggaccaccgtcgctgctgacccctgaaaaggaagacgagattncgaagaacctgaggaagtacagcaagaagtacgagcaagaggatcaggatgccttcaaccagctgagcgagcaggaacgcaagaggcggaagcagcttcaggaggaatgggaaggatgggttgccaagtggaagcagctgcacgaggaagagagaccatacaggatggagctcagagacggggaggccagtgacgatgaggaagagtacgacaccaaggaagttgagattgaagaggaggtagacgtccaagaagaagttccattcgagctggatcaggagtgaaaagcttatgctagcatctgctgagatctttttctgttgttgcctgtcttaagttaatttctgccccctttgcataataggctttagagatcaagaacacaatttcttgatctttctggtttctactggttgattgtacactttgtccttggattttacggaccaatgtattcgaagatgaaaatttgcggttggcatactaattttaatgtgtcgttctccnnnnnnnnnnn

SEQ ID NO: 391133 - DNA, 450 bp, Oryza sativa
ccacgcgtccgctggtctgaagggctttaatgggcagctggagttttacaatgttgatgagcttgagacgatggcaacgggtgaacatttcatggctactgacattatgtgggatcctactggaagatatcttgcatctgcagttacctcagtccatgaaatggggaatggtttccaaatatggtctttcagtggcaagcaactttacaaggtgtcaaaggaccacttctttcagttcctgtggcgtccgagaccaccgtcgctgctgacccctgaaaaggaagacgagattgcgaagaacctgaggaagtacagcaagaagtacgagcaagaggatcaggatgccttcaaccagctgagcgagcaggaacgcatgaggcggaagcaggctttcaggaggaatgggaaggatgggttgccaagtggaagcagctgcacgaggaagagaga

SEQ ID NO: 391134 - DNA, 559 bp, Oryza sativa
cccaaaccgaagagatatttcttcttccggcggtgcccactcccggaggagataaggccgacttctctctctctctccatttctttcgatgtccccacttctctctctctccctttctctctgtgtgcagcggcggcctggcagggacagaggggagcgtgcggcggcccagcggcggcggcgccctcccctccaccagatctaacaggagcaggaggagaggcacggtcatggcgaacggtgtggaggtgcaacgccggtgaccacaagccggctagggctccaagtttggacaacccgagctcggggggctgtggatctagctgtcccgagtttgggtactccagatccagtggcctccggcgccaacagcgcagatccaggctcatggtgagtggatggcgtctcctctctcctccaatcggctgtgtgcgctgccgtccgccgtcaaggcctatcggctgtacggcggagcatgtgcttctcctcatcctgtgcagtaacaactaccggctacattaggtagacatctttggagctgctttccagttgctgaagt

SEQ ID NO: 391135 - DNA, 634 bp, Oryza sativa
tgcggccagcgctgatctccatccatctcgcgagcatagcggagccggagcggagcaggggaggggcgccttcgtcctactgcatcctgggagagatcagggcagagaatcagcatgatgatggagactgaactatgctcttcccgggttctgtctctcccgcggcccgatagtggagatgaggagctctcagtgcttcctcggcacacaaaggtcatcgtcactgggaacaaccgaacaaaatctgtcttggtcggtctacaaggtgttgtcaagaaggctgttggtctaggaggttggcactggctggttctaaagaatggtgtagaggtgaagctgcagaggaatgctttgagtgtcttggaacctccaactggtaacgaagacgactatgatattgacggcaacaattcattctgtagcagttccgacatgggagacaaagacatggactattcgatcatagaataccataaaccaacctagccaagagttcggcatacaaggccctggtcatcctgtacaaaatccagcaaccgatgcaattttcaccccagttcaatattgcaaacgagagttaacctgacaagactcggaacttctaccctgtggagatactggaagcacttcaatc

SEQ ID NO: 391136 - DNA, 497 bp, Oryza sativa
ccacgcgtccggttgaagtggaggaggcaaagcgaggaggaggagattggggatcggaaatccaatcatccaatccaagattccaaaagtggttggattaatcgagtcatcgagatgagctcgccgggcggcgtgaacgagtgggaggactcaccgggggagatggagtcggaggccgcctccgccgtgggcatgggcatgatggaggtcgacgccgacgaccgccacccgccctcctactcccttcccatcgatgccgaccttcttcaatttcttccccgacgacttcgacgaccaagaccttgcctgacctcctctcctctcctctcctctcccctcccctcccctcccctacccatcgcaggtgcctgttgtacccaacatcaaatccaagatccatcatgtcatcacatttcgtagccaaggtaatgcttcttctccacctctagtattgttaccattattggatccccatctagacccacatatattctatt

SEQ ID NO: 391137 - DNA, 761 bp, Oryza sativa
  unsure (1)..(761): unsure at all n locations
accccgcttaatnccccgctacagggcgcgtcccattcgccattcagctgcgcaactgttgggaagggcgatcgttgcgggcctcttcgctattacgccagctgccgaaagggggatttgctgcaaggcgattaagttgggtaacgccagggttttcccagtcacgactttgtaaaacgacggccagtgagcgcgcgtaatacgactcactatagggcgaattgggtaccgggccccccctcgaggtcgacccacgcgtccggaagcatggatacccaggtcaaacttgccgtcgtggtgaaggtgatgggccgcaccggctcccaggggtcaggtgacccaggtcagagtgaagttcctcgacgaccagaaccgtctcatcatgaggaacgtcaagggcccggtccgtgagggcgacatcctcaccctgctcgagtctgagagggaggccaggaggctgcgctgaagctgtggcggttgtgttatttcgtggttcctgccttttgaaagtaaaatgccatattgtcgccttatttcgtgtactgcttttccggtccagttcttgaacaatggtttgtctttctgagtaggccttatatgttatgagttaagagcaatggaaatgtaatgggtacttgtctggttgcagttttggtctgttgcctataactaaagttccattgttgtgagacatggttatgctctantggctttgggcnanatgaactgattngntgnnnnnnnnnnnnnnnnnnnnnnnn

SEQ ID NO: 391138 - DNA, 704 bp, Oryza sativa
  unsure (1)..(704): unsure at all n locations
aacacnacgttgtaaaaacgacgnccagtnatcncgcgtaatacgatcactatagtccgaattggtaccgggccccccctgggggtccccccgcctccactccttcctcctcgcgccgtcgccgccgccgcatccgtgccctccttcgccgtccgccgtcgctagcagccggagaagagaagcatggatacccaggtcaaacttgccgtcgtggtgaaggtgatgggccgcaccggctccaggggtcaggtgacccaggtcagagtgaagttcctcgacgaccagaaccgtctcatcatgaggaacgtcaagggcccggtccgtgagggcgacatcctcaccctgctcgagtctgagagggaggccaggaggctgcgctgaagctgtggcggttgtgttatttcgtggttcctgccttttgaaagtaaaatgccatattgtcgccttatttcgtgtactgcttttccggtccagttcttgaacaatggtttgtctttctgagtaggccttatatgttatgagttaagagcaatggaaatgtaatgggtacttgtctggttgcagttttggtctgttgcctataactaaagttccattgttgtgagacatggttatgctctactggctttgggcaacatgaactgattagatgaatgctatcttcaatttactnnnnnnnnnnnnnnnnnnnnnnnnnnnnnnnn

SEQ ID NO: 391139 - DNA, 559 bp, Oryza sativa
  unsure (1)..(559): unsure at all n locations
ttcgacaaaactggagctccacgcggtggcggccgctctaaactagtggatcccccgggctgcacgaattcggcacgacacaattttcacatatctctacagcacagcacaaaacccacctgatctggatggccgtaacgaacgactgaccatggccgggtacggctatgggatcccgattagccgtctttatgctcgatattttggcggggacctgcacatcatttctatggaacgatatggaacccgattgcttacctccacctttcacggctaggagattcggaggagcccttgcattacgagatctggaggaggaaaccctttgcctcagttctgataccactgctgtaattaggatgctattgcttttaccattgctgtgctggtatgcaaatacatagtccccagggccagccagctctatgtgcttccagttttgctggagcgtgatcataattcagatttccgaatcccctctggtttctacattgccattaaaaactcctttaaaaaaaaaaaaaaaaaaannaactccaangggggggcccngtncccc

SEQ ID NO: 391140 - DNA, 636 bp, Oryza sativa
ccacgcgtccggatgatgtttgaattggtgaagaattccctccgtgcagtacaggaacgatatatgaactctgataagcatgcgcctcctgttagaatcatagtcgctgatggagcagaggacgtaacaatcaagattagtgatgaaggtggtggaatacccagaagtggtctctcgagaattttcacatatctctacagcacagcagaaaacccacctgatctggatggccgtaacgaaggagtgaccatggccgggtacggctatgggatcccgattagccgtctttatgctcgatattttggcggggacctgcagatcatttctatggaaggatatggaaccgatgcttacctccacctatcacggctaggagattcggaggagcccttgcattaggagatctggaggaggaaaccctttgcctcagttctgataccactgctgtaattaggatgctattgcttttaccattgctgtgctggtatgcaaatacatagttcccaaggccagccagctctatgtgcttccagtttgctggagcgtgatcataattcagatttcagaatcccctctggttcacattgccattagaactcgttatccctcgccctcggtggctgcctgaaaaaccaa

SEQ ID NO: 391141 - DNA, 950 bp, Oryza sativa
  unsure (1)..(950): unsure at all n locations
caagccatcgtcgagcacattacacaggagtggccacggtcgtctactacgctttctacttagctcacatggttgaagtaacgacactgatgaacttgctcatgcactctcttgagagcaaaaatctacattaagagaaccaacctgccgttagatatgatggagtcgaggtacgtcaaggtggattcgcgcttcttcctcgtcgacgacaactcctcctcctcctcctcctcctgcgccgccgccgggggntnggcggacgacggcgattaccactacctcgacgcctgcttcctctgcaagcgggacatcaccttcaaccgccacatcttcatgtacaaggggaacgcggcgttctgcagcgacgactgcaggcaggaccagatggacatggactccgcgctcgccgccgtcaagcgccgccaccgcacgctgcaacgcagcaggggacatgtcgtcctcctcctcgccggcgccggctgcggcacagtgcgccgccaacgaggcgggcctcttcgcggtgatcccccgccgccccaccgtcgctgacctcaccacccacgctgctcccgccgtgtctggcactgtgtgatcgatcgacgagcggtggtttgtctctgaatgtttttgccatcttccaagatggttcatcgttgtgctcagctgctattagcccatgtcaagaatcaagatgcatgaggtgaagacgatgaggccatgcgaacactagtctatctatatatagtatagtagtaatctcctggttatggagagagaaaggtgttgaaattaagagaaatcaatcgagatcatgatgatattagattccaaatcgagacatgtaacataagtgttcatgctttctccatcatgctggagcctgtactaagttgaaggatcgatcatgcatgtagaattaactagtactggtactggtttggtttgagctt

SEQ ID NO: 391142 - DNA, 851 bp, Oryza sativa
  unsure (1)..(851): unsure at all n locations
atatttcccatgctctggtcctccattgcaactctgctcctgcacatccctctgtcttggctgttggtgttcaagaccagcatgggatttactggagctgctttagcaattagcatatcttactggttgaatacattcatgctcgctgcatacatcagattctcatgttcttgtaaggtgacgcgctcgcctcctacaatcgaggcattcagaggagtcggtttgtttctgcgaatagcactaccatctgcactaatgttatgttttgaatggtggtcatttgagatccttgttctcctgtcaggacttctacccaacccagagcttgaaaggtcagttctttccatatgcttgacgactacctctttgatgtatactataccatatggtcttggaggcgctgcaagcactcgagtagctagtgggttaggcgctgggaatcctgaaggagctcgatcggctgttcaccttgtaatgtctattgctgggacagaggcagttcttgttactgggatgctggttgcagcacagcgcatcttgggctatgcttacagcagtggatgaggaggttgtcacatatttcacctcaatggttccttttgtgtgcatctcagttgctgctgatagcctacaaggagttttatcaggttacatttcctaacatttgatttatctgttaattattcattcccttcaaaagaatggaaaaaatggagtattcagctatgcctgaagttttcgaaaatttgatctaactngccttgctctctcttatttcattttntgtatataactggttcttatagttttgggggccattacatttacaccattcagtatctttagcctgt

SEQ ID NO: 391143 - DNA, 561 bp, Oryza sativa
cttccctctctctatatatatactcaggtccaagctgttcttggctcctctctcttcttccaacacctcctaatcaccacaaaggcttaaaaatctccagtctccatagagagaaagagagagaagagaaggcagcttgatttggggcgaggagacgcgataccgcgataggctaagcagctggcagcggcggctgctgcgatggccggcgccgacgtggacgtcgggacggagctccggctggggctgcccggaggtggcggcggcgccgcggaggcggcggccaaaggccgcgaagaggggcttcgaggagaccattgacctgaagctgaagctgcccaccgccggcatggaggaggccgccgccggcaaggcggaggcgccggccgccgagaaggccaagaggccggcggaggccgccgccgccgacgccgagaagccacctgctcccaaggcgcaggcagtgggttggccaccagttcggtcgttccgcaggaacatcatgaccgtccagtcagtgaagagcaagaaggaagaggaagctgacaagcagcagcagca

SEQ ID NO: 391144 - DNA, 643 bp, Oryza sativa
  unsure (1)..(643): unsure at all n locations
ccacgcgtccgcggacgcgtgggcgcggtcggtgctgcccaagttctacgcggaggacgtgcacccggagagctggagggtgttcaactccttcggcaagcggtacatcatcacggcgagccccaggatcatggtggagcacttcgccaagacgttcctcggcgccgacaaggtggtcgggacggagctggaggtcggcaagaacggcaaggccacggggttcatggtgaagcccggagtgctcgtgggcgaccacaagaggcaggccgtcgtcaaggagctacgcgacgcggtgcccgacgtcggcttgggcgacagggagacggatttcgacttcatgtccatatgcacggaggcctacctcgtgacatcaaggaagcacagcgcggtgcccaagaaccagctgctgggcccactcatcctccacgacggccgcctcgtgcagcgtccgacgccgctggtggcgctcgtcaccttcctgtggatgccgttcggttcgcgctcgcgctcctccgcgtgtacgatcaaccttgccactcccggagcggatcgtcttctacaacttacaagctcatgggcatccgcctcatcgtgaanggnaacccgccgctttnccccaagaangggacatccttggcgtcct

SEQ ID NO: 391145 - DNA, 416 bp, Oryza sativa
gcacctagcggtcgcatcgctagctgccatctcctggtgagatccatcgtgacgcccggcacgacgacgatggtgtcgcggaggttcaagcccgtggaggagtgcagctcggatgggaggtcggagcagacggtggccgtcgacttcgacggcacgctggtcaggtcgcggagcgccttcccgtactacctcctcgtcgcgctcgaggccggcagcgtgctccgcgccgtcgtgctgctgctgtccgtgccgttcgtctacgtgacctacattttcttctccgagtcgctggccatcatcacgctggtgtacatctccgtggccgggctcaaggtgaggaacatcgagatggtggcgccgtcggtgctgcccaagttctacgcggaggacgtgcacccggagagctggagggtgtt

SEQ ID NO: 391146 - DNA, 767 bp, Oryza sativa
aagattcctctgtgtacttggctgtggcctcgaacataagtggttcaatgccaaaagatctgtttgaagatgtaatggaggagcctgagaaacagtatcaagatgacaaagcccgaattaaagaagcagtgaagtctggaaagattcccatgacgacttcatggacactagaggatttcgaaactgctgttacggaggatgatactttgaaaggaataacaaacataaacatgaagcttattttttgatgatcaagttgaaaggctcagggaaaaggaggtaaaggaagcaaagaagcgccagcgtctgggtgaaaatttctcagatcttttgtactcaatcaaggaaatatcagcttcttcaacatgggatgattctaaagcactattcgaagatagccaagagtacaaggcattggacagcgaaacatactctagagagcttttcgaagagtgcgttgtccacttgtaagaaaggttaaaagagaaagagcgcttgagggaggaagaaaaggcaagaaaagagaaggaacgtgaagagaaagaacggaggaaagagaaagaaaagaaggagaaagaacgcaaagaaaaagaaagagacaaggagaaagaaagagaaaaggacaaaggaaaggatcggtcgaggaaagatgagatggatattgatgctgttgatgcagatagccatggcttaaaagacaagaaatgagaaaaggacaaggataagaacataagagacaccaccatgacacttcagatgatgtgagc

SEQ ID NO: 391147 - DNA, 680 bp, Oryza sativa
atggaatggacttgtcgaattttggtggcatgggtggaatgggtggaatgggcggaatgggtgatatgatgggtggcatgggcagtatgggtgcaatgggttgatggctgagatgatgggtggcatgggtggtatgggcggatgggtggcatgggtggcatggatgagttcgaggacgagagtgacgatgaagaagaagtgtctaaacctcaagacgcagagaaggctgctgaagccggaaaatcccaggagtcggacgctaaagccgagacaagttagagcaatcgaaggcccctctacataattcctttctctgttgcatcccgtcttttatggatctggtgaactgaagaaaacattttacgttatgacggtagggatgggtgctcccttgtagaacgatgctatgaaactggagctccaactggagtacgcaaaccattcttggattgtttttcttaatgcgctttgatgcttcatcgctctgcaatcatatattaagctttggatgctttaatctgcttttgtgaaaaactgctgggcccgggctaaagtcccctgggcatgcacccattcatgtgatctgacgatgcttgtgctaaacgagtgaggcagtagccctgttagttccccagcctgtttttaaaggatgcatagtgaatccccttttttttgtttcc

SEQ ID NO: 391148 - DNA, 516 bp, Oryza sativa
aggaaagcccttctcaattaggacggcagataaccaaccagatgttgtggacaaaagtgatcctaaagaagctgacgatcatatggaggactctcataaacaagccgagaaggatgctgctgacatttccaagacccttatgtctcgcaagcagagaggccttcttcaagcaattgagattaaccaggaaaggaaaaaggccaaggtgaacttgctgaagaaaaggaaaaagaatgctgattccagtgcttcggccaaaggtcgctgaggctcgaacttcatttgctccatgctgtatctgttttgacaaattgttcatcggtcgctgcttctgtggagttgctgccatgatctgcacacctacgtattcttatgcatgataagcagctccattttgatgtttaggtgttttacatgggctttaagaatatgcccagatacctcagtagaaaattttgagctatttacctagtgtccaaagtgtgttccctgatgattagtagctatttctcttcc

SEQ ID NO: 391149 - DNA, 539 bp, Oryza sativa
tgcaaaccaacagtgtgttagtccttatcagccatgatgtgacagagtgcagcacatggcttccaggcttcagctcttgtacttcattgccattacagtgctcgcttcggtgttccaaccttgcacgtccattgagctccaccgtgagctctctggctggtcgaatggcattgctacatggtatggcgatcctaatggtgcaggaagtgaaggcggtgcatgtgggtaccagtatgctgttgaccagccaccgttctcatccaggattgctgctggtagcccctacatctatgactctggcaagggatgtggttcgtgctaccgggtggtgtgtgctggtaatgaagcttgctctggtatccctgtaaccgttgtcatcactgaccaggggcctggtggcccatgcttggaagagctagtcgatggtcaatgcatgaatgaagcagctcactttgacatgagcgggacagcattcggtgccatggcgaggcctggccaggctgttcaaactcctggtgctgttcttcttcaaaattcag

SEQ ID NO: 391150 - DNA, 924 bp, Oryza sativa
ttttcctatcgcccaaaatccgaggttggagcttttgctcgggcgattgattttggaatcggcggaggggatgtcaggaccactcgatcgatttgccaggccatgttttgaaggttttacgcataatgatgaaaagaaagagatcagatctgacgcagacaactccgaaggagagaagaagactaaaattggttctttcaagaaaaaggcgattaatgccgggaacaaattcaggcattccctgaggagaagaagcaaaaagaaaaatgaacctcggggttccattgaggacataagggatgttcaagatcttcaagctgttgatgcatttcgacaatgtttagttgatgaggacctgttgccgcaacagcatgatgattatcacacaatgcttaggttcctcaaagcacggaaatttgatgttgagaaagcaaagagtatgtggtcagatatgcttaaatggagaaaggaatttggggctgacaatatagaggagtttgactacaccgaggcggatgaggttatgaaatattatccacaattttacgatggagtggataaagaaggaaggcctatctacatagagttaataggaaaagttgatgcgaataagctaatgcaagtaactactatagagcgatatgtgaaatatcatgtgaaggagtttgagagatgcttccaaatgagatttcctgcctgctcgattgctgcaaaaaggcccatagattcatctactactattctggacgcgcaaggcgtgggtttaaagaacttctcaaaagctgcaagggatctaatcacacgactgcagaagatcgacaatgacaactacccagagacgttgcgccgcatgtatattattaatgccggccaaggctttcagatgttatggagcactgtaaaatcttttctagatcctaaaac

SEQ ID NO: 391151 - DNA, 607 bp, Oryza sativa
  unsure (1)..(607): unsure at all n locations
ccacgcgtccggaactttggagcagaattgttggagaccttgctaaagatggctcctaccaaggaagaggagatcaaattgagagaattcaaagaggagacatctcctattaagcttggtcctgctgagaaattccttaaggcagtccttgatatcccatttgctttcaaaagagtagacgcaatgctttacattgctaactttgaatcagaggttaattacctgaagaagtcctttgagacccttgagactgcttgtgacgagcttagaaacagcaggctgtttctgaagctacttgaagctgtcctgaagactggcaacaggatgaatgttggaacaaatcgcggcgatgcacacgcgttcaagcttgatactctactcaaattggttgatgtcaaaggcactgatggcaagactacacttttgcattttgtcgtgcaggagattatccgaacggagggctcccacctctctgctagcaaccaatcaactccacgaactcaggcaaaccctttacgggacgagctcgagtgcaaaaagcttggcctccaggtagtggctggcctcggaaacgagctcagcaatgtcaaganggcagctgccatgg

SEQ ID NO: 391152 - DNA, 472 bp, Oryza sativa
  unsure (1)..(472): unsure at all n locations
ngnacgntggtgttttctctccccttggttttgaattcgctcgccgccgacgcgggtggcttccgtcgagaagcttctggaagcttccgggaccgggggcgccgtcccccgcctcggcgttcgtgcctgccgcggcgaggcgccccgtggctcggcgatcgatccgttgcttgcttgcttgctgcgggaggaaagggctcaagatggtcgtctcaatcattaccagagctctaatacttattcttggatatgcatacccagcctatgattgctacaagacagtggagctgaacagacctgaggttgagcagttgcggttctggtgtcagtactggagtttactagcagttctaactgtttttgagagagttggggataattttgtatcatggttaccaatgtatagtgaagcaaagctgggcatttatcgtgtatctatggtatcccaagacacagggcacttcctatgtgt

SEQ ID NO: 391153 - DNA, 937 bp, Oryza sativa
  unsure (1)..(937): unsure at all n locations
ggctagcttctgctccgacaagcgctctctctctctctgggctccggcgaggctcacgcgcgctccgaagcttcggatagcggcagtagtcagcgcattgatggcgaccgacgcggcagcgactgagcccgaggtggcggcggaggaggctgcggccgccgcgcctgagaccacggccaccgccggggattccaagccggcgaaggaggccaaggccaagaaggccgccgcgccgaggaaggcacgctccaccgccacccacccgccgtacgccgagatgatctcggaggcgatcgcgacgctgaaggagaggaccgggtcgagccagtacgcgatcggcaagttcctcgaggacaagcacaaggaccacctgccatccaacttccgcaagcagctgctcgtccagatcaagaagctcgtcgccgccggcaagctgaccaaggtcaagaactcctacaagttgccgccgacgcgcgcgccggccgcggccaagcccaaggcgaagcccgccgccgccgcaaagccgaagccgaagccgaaggccgcagctaagcccaaggcggctgccaagccgaaaggccaaggctccagccaagtccaaggccgccgcgaaccctaaggcggctgccaagccagccgcgaagccgaaggcggcggctaagcccaagtctccggctaagccagccgccaagcccaaggctgcccccaaggctaaagccaagccggccgcgaancgnaaagccaaggcggctcccaagccgaagggcagcctngacgaagacgaaggcgacctcggctcccgcccggaagccggcgaaggcggngaagacgttcagccaaggacacgcccagcaagaaangcggcgccggcgggccaagaaagcccgccgccgcggcgaagaaggcgcccgccaagaaagccgcgccggcgaagaag

SEQ ID NO: 391154 - DNA, 728 bp, Oryza sativa
ctcttgaccactctagcagtagtagtttggctacttgtctataggcgaagcaagaggaggagaagatcgcgtgaaggttccagtacttcagctaccgcgttagttccaccgctatggaaagtgttcaccagtgaagaacttagatcaatcacaaagaacttcagtgagggcaaccggcttcctgggaatgcaaagactggtggaacctatagcggaattttgccagatggatccagagtagcaatcaagaggctgaagagatcaagcctacaaaggaaaaaagatttctactctgagattgggagagtcgcaaagctgtatcatcctaatttagttgcagtaaaaggatgttgttacgatcatggtgaccgctttattgtttatgagtttgttgccaatgggccggttggatgtttggctacatcatgtccctagaggagggcggtgccttgattggccaatgaggatgagagttgctacaactcttgcacaagggatcgcatttttgcatgacaagggtgaagccccaggtcgtgcaccgtgatatccgtgcaagcaacgtgctacttgacgaggaattggttcccatctgatggggggtgggctgtccaagtttgtaccatggggaagtaatgcacgagagggctgggaaggctgcaacctaatgggtaccttgctcctgaattcatatacaggaatgaactgacaacaaagaggcgatgtctaca

SEQ ID NO: 391155 - DNA, 944 bp, Oryza sativa
  unsure (1)..(944): unsure at all n locations
ccttctctcgcgccgtttcgctccctgaccctccgccgccgccgccgccgatcatcatgagtaagttgcagagcgaggttctcaaggaagccatctcccaggttgttggggaatccaaggagaagggcaggaagttcaccgagaccgttgagcttcagattggtctcaagaactatgacccgcaaaaggacaagcgtttcagcggctccgtcaagctgccccatatcccccgccccaagatgaaggtctgcatgcttggtgatgcccagcatgtcgaggaggctgagaagattgggcttgactacatggatgttgaggctcttaagaaaatgaacaagaacaagaagctggttaagaagcttgccaagaagtaccatgctttcttagcatcagaggccatcatcaagcagattcctcgtctccttggtcctggtctcaacaaggcaggcaagttccctacattggttactcaccaggagtctcttgaatccaaggtcaacgagacgaaagctacagtcaagttccagctgaagaaggttctgtgcatgggtgttgctgtgggtaacttgtcgatggaggagaagcagattccagcaaaacatccaaatgagcgtcaacttcctcgtgtcccttttgaagaagaactggcagaatgtgaggtgcctgtacatcaaaagcacaatggggaaaccgtacagggtgttctaagctggtttgctccacattgaagctgataagatgctgggcggttgaactgagcttgtccttacattagatctgcttgcactgatatcagttttgtgcttacccaagagaacatcgagatatgttatcatattttgtagtagtttattcagtgcacttcggatttatgcaaatgaggcttgtgttatttatgaatagtttcgttcatggggagnnnnnnnnnnnnnnnnnnnnnnnnn

SEQ ID NO: 391156 - DNA, 941 bp, Oryza sativa
  unsure (1)..(941): unsure at all n locations
ctcctccgccggcgccgcccctgcccaaaccctagagtgttgttgagttatcggccgcaaacatgagtaagttacaaaccgaggctctcaaggaagccatctcccaggttgttgctgattgcaaggaaaagaacaggaagttcaccgagaccgttgagcttcaaattggtctcaagaactatgacccacaaaaggacaagcgtttcagcggctccgttaagctgccccatatcccccgccccaagatgaaggtctgcatgcttggtgatgcccagcatgtcgaggaggctgagaagattgggctcgactacatggatgttgaggccttaagaagatgaacaagnacaagaagnttgtgaagaagcttgccaagaagtaccatgctttcttagcatcagaggccatcatcaagcagatcccccgtcttccttggtcctggtctcaacaaggcagggcaagttccctacattggttactcaccaggagtctcttgaatccaaggtcaacgagcgaaaagctacagtcaagttccagctgaagaaggttctgtgcatgggtgttgctgtgggtaacttgtcaatggaggagaagcagatccagcaaaacatccaaatgagcgtcaacttcctcgtgtcccttttgaaaaaggactggcagaatgtgaggtgccctttcatcaagagcaccatggggaaaccaatcagggtgttctaagttggtgtgttccacctagaagtgaaaaggatcagttgaaaccaagcttttcctcttaaaatagacctgtcgctctgggaccggcttttgtctgtcagtgcaagagaatatatcaaagaaatatctgggccttatttttgtagcgtgtttatttgggagtaacttattctacgtaagcttctaatgtggaaattctatgtgtgttatgctgctcctacaaaaacaaa

SEQ ID NO: 391157 - DNA, 912 bp, Oryza sativa
ccacgcgtccgattaaattctctccccgcctcatctagggtttggccctccgtgtaatcctattcctatctctatccattactactctccagtgttcttttttccgtacccatggcggcggcggcggcggcggcgaagaggaagccggtgttcgtcaaggtggaccagctcaagcccggcacggggggccacacgctcgtcgccaaggtgctcagctccaagaccgtggtccagaagggccgcgccgccgcgggagcgggcccggcggcgcgtcccacgaggatcgccgagtgcctcatcggcgacgagaccggctgcatcctgttcaccgcccgcaacgagcaggttgacctgatgaaggctgacagcactgttattatccgcaatgcaaaaattgatatgttcaaaggatcaatgaggcttgctgtggacaaatggggccgcattgaagtgactgaaccggcaagtttcaacgtaaaggaggataacaatctctcacttgtggagtatgaacttgtcaatgttgaagggtgagatcgtgttgggtttcgcttgttattcagaagtttatgtgttccaagcctattttggtcaaattctaccttttgagttggctcaagaaagtgaaagatgaaggagattctgaggttagggttgtagcagttggtctgaactgcttcatgtcctcctatcgagcatttctatgtacggatgggtattagcctattaggtgctgcagcagttgtggttgtaagaacaaatgtgatgtgagatgatcagtcaatttgctgctgcattttgagcctctaaaaggatatgatttctaggagataaattgtctgcagtgcttctgattcgaaccgtagtaatcttatgtttgaacctctggtccataaaaaaaaaaaaaaaaaa

SEQ ID NO: 391158 - DNA, 640 bp, Oryza sativa
cggcacgtgacgggacgcagggagcggtgacagagcagatcacgcgagcttgtcgccaagggggggaggaagagaagtgagaaatccgcgccaagaagcgagagaggtccgcagctggtgtcgtctggtgctgcgggtatcgtcgctgccatggcggatcagtcgaacaacatgatcatcgaggaggtcaacaagggcctgaaccctggaacgatagtccttcttgtggttgcaactctcctgattcttttctttgttggaaactatgcgctctacatgtatgctcagaagacgcttcctcctcggaagaagaagccagtctccaagaagaagctgaagagggaaaagctgaagcagggggtttctgcacccggagagtgaagagattcgtcagtttaccaatgttactgattttatcctgagcttcttttgcatgataagaattatcagctggacgcggcaagtgtttacaagtaactatgttatgtagaagctttgtcctaagtggtttacatttgtattagacgccttatttgagcaatctgttgaacagcactgcaaattgagcccttcttttggttttgtttctgcgggtctcttggattagctagcgtcctgcccaaaatttttgaacctgggg

SEQ ID NO: 391159 - DNA, 448 bp, Oryza sativa
tgagcagcaagcggtgacagagcagatcacgcgagcttgtcgccaagggggggaggaagagaagtgagaaatccgcgccaagaagcgagagaggtccgcagctggtgtcgtctggtgctgcgggtatcgtcgctgccatggcggatcagtcggtaaggatctgcgagctgtttctgtttaatctcttggttttaggggtgcgaaaccttcgacgtttcggttgtttgaccggatctcgacgcgtttttacggcggatttgcttttgtctggaatttgcttgtgttgaccctagcttctcttgtagatctggaagaagctcttctcttaatttcagagccttaactaatacaagtaacagtttgtttgttccccccaaaaactgaacccccatgtcccaagttggatcagtccctggcgtgggatagttagatctgtaggaatttgcgc

SEQ ID NO: 391160 - DNA, 1029 bp, Oryza sativa
  unsure (1)..(1029): unsure at all n locations
cgggtggcggcgcggcgcaccacctcgcggcgagatggcgagctcggcgctgaggcgatccctccgacgcctcctcccttcgagcccccctcccccgtcccccgcctccgccgccgccgccgcgaccttccgccgctccttcctgtccggtggcggtgacggggtgggagagagcgtggaagaatttgagaagaggatgctgagtggcttggatgatgggcttgagaatcgccgtggaggatctgactggggttggaggggtgggttccgtaacaggggtaactctagcagcatcttggctgaattgtgcacgggcttcgattccttagaagatggtttggatgagaagttggatgaggcgtcccgcacctttcatgtgacggaggagtatgagggacgatgactatgattacaggccagatgtgactttcaggcgaggntcaacttataatgtnaaggatcttgaccttacaagacctgcagccgcaaagaaccctcctaggccacagtttcaaacaactacagaggaggtttttaaagaaagccgattttagggaatgttagatttctggccaactttcttacagaagctgggcattataatcaagaggagtcagactcgtataagtgcgaaaagctcagcgtaaggttgcaagagagattaaaaccgcccgtgcattggggctattgcctttcacaacaatgggccaaagaccattcatttatggcagatctgtggaggtgaatctttcagaggaggaatatggttacgactttgtagatcggagggcaggtgagcctgatgagaatgcagacgacgctgtgcctgatgaggacgttgcgcctggtgtggagaatgcataagcatttttcaagggcttgccattctgcaatgctctgcatttcttctgttactcattcgacacggttccacatgccttcctgcctgatagtcatctactcttgcccgatcatagcccagttcaataaattgtagatttcgcatgttatgacactataatctcggtt

SEQ ID NO: 391161 - DNA, 497 bp, Oryza sativa
  unsure (1)..(497): unsure at all n locations
ccacgcgtccgcagaagagagggagatacttgctctcgttaacacggaagtcagcatgttgacacagaagcttagcaagagtgctgaaatggagaagaagatagaacaccttgagcagaaattgcaggcaaaagattctgtggaatcgacatcccgcgacttcagccttgactcatcaacgctgccaagcaaacaacgcgacagatcgctggctcctgaaaacgccccctccaaacccaacacaacaagcaagaactgcgagagccttctggtatcatggcctttaagttcatcctgggagtcgcgctgctgtccgtgctcatcggtgtatttcttgggaagagatactagcgtttatgcctttcagaatgtctactgggaaaccccattgtcaatactgctttcggtgaacctcaattgtcttagcagttgaaactgtncaaattctgcaaaagtttgaaagattttggtaggcttcacttggacaacagttcatg

SEQ ID NO: 391162 - DNA, 561 bp, Oryza sativa
  unsure (1)..(561): unsure at all n locations
ccacgcgtccggaggtgtcattcaaagcaaagggggttctgtgaagggtttaaatactcctgagggtggttccatgaggcaaagccattctgatgggtcccttgatacgatggcccggaagcctgctgatcctgaagaagaacttcggtggatgtctcaagaagttcgtggttatgtagaggctgttttgaacagtttggcagcaaatgttccaaaggcaatcgtactttgccaagtggagaaagcaaaggaagatatgctaaatcagctctacagcaaaataagtgctcaaaccaatgcaaagattgaagaacttctccaagaggaccacaatgctaaacgtagacgggagaagtaccaaaaacaatcatctctattgtcaaagcttactcgtcagcttagtatccatgacaatagagcttctgttgcctcgtataccaatgatagttctggagctgagagtagcccacggacctctggccagtcaggtgagganctgaggtctgcgttcgattctgcatcaaatgngctctgtgatcgatccattcacacaatgaaaca

SEQ ID NO: 391163 - DNA, 560 bp, Oryza sativa
  unsure (1)..(560): unsure at all n locations
tgcnggattcggcacgagtccggcgagggacgtgtgagtgggtgccggcgatggcggagacggcgaggtggagcacgcgtgcgacgacgagcgccgagcggctccatctgcgccggctgggggggtgcgcccgtgggcagcaccaagccgtggtccggcgagcgccgtgcggcccggacctcgtcggcggggcctggcgcgaccgcgatggatgagatggcggcgaggccacttcctgttgattcccggtgcgatgcgaatctcacccctctccaccgatggtatttgctgcatgcgacatgccactactgtctcgagtttttgactcgctctatgacaaaagaaccaggagcattgatcccatccgggtttgttttgagagattcctcttgtcttgcatggaagcgaccgttgtactttcacattgcaatgttaggcccttaattcttgttgttgctgttaccaaaaaaagatgatcattgagtaggagtattacaatccccattacccatttgtatatctatcattattctcttaacngtaccttatcntttgatgat

SEQ ID NO: 391164 - DNA, 547 bp, Oryza sativa
  unsure (1)..(547): unsure at all n locations
gcagattactaagctggtgtctggcatcttgtactttggggacatgttgcttgcttcattagcgttctttgtgcttactgggaccatcggtttctgcgcttgtttctggttcacgaggttgatttactcatctgtgaagattgattagttgcaacactacagagcccagcatatgtttttaagccttctgagtcatgggaattgtatgttcgaagtggggatcaatcccctgggtttttttaaagaaattttcagtgaagttacattttaggttttagtttatgaacaatttatgtttgttatggctaaacgatacatcttactgtagtaatttggagtacaagactacaaggatagaacacattgtgatggagttgttttttggtgaaatttttttaatggactggtataagaattcaattgattatgaactgcttgtactctaatcaatggtattattgactctggcaccagtatgaaatcaatatgatgtaccagtaacaatttnnnnnnnnnnnnnnnnnnnnnnnnnnnnnnnnnnnnnnnn

SEQ ID NO: 391165 - DNA, 660 bp, Oryza sativa
  unsure (1)..(660): unsure at all n locations
gcagggggctgcgagtgctcgatgtggttnactgcnagatgaacgacgacgacgacgaggtggtggactgggtggcggcgttcccgccggggacgaccgacctcgaatcgctctccttcgagtgctacgtccggccggtgtccttcgccgcgctcgaggcgctcgtggcgcgctcgccgcgcctcacccgcctgggcgtcaacgagcacgtgtcgctggggcagctgcgccggctcatggcgaacacgcctcgcctgacgcacctcggcaccggagcgttccggcccgggggacggccccgaggatgtggggctcgacatcgagcagatggcgtccgcgttcgcgtccgctggccggacgaacacgctggtttcgctgtctggcttccgcgagttcgagccggagtacctgcccaccattgccgccgtgtccggcaacctaacgaacctcgacttcagctattgcccggtcactcccgatcaattcctgcccttcatcgggcaatgccacaaccttgagagactatatgtgcttgattcggtgcgtgacgaggggctccaggccacggcgaggacttgcaagaagctccaggttctccatgtgcttccattgaacgcacttgaggatgccgatgagctggtgtcggaggtcgggcttact

SEQ ID NO: 391166 - DNA, 488 bp, Oryza sativa
ccacgcgtccgcccacgcgtccgctcatcctattgtgcctcgatgaaattgttgatggagggattgtcctggaaacagaaggaagtgtgatagctgaaaaggtgtcagcacatggaatagaaggtgctacttcactcgctgagcagactatagttcaagccctaacaacagcaagagagcacttgaccaaatctcttcttatgtgatgtgctctgcttttggagctgaagatggagtagcatcccgttgttacatctctaggactgatacgttcattgcaatagaaacgacggaacagaatatctgaatccatttgcgtgtagagtggcacgttcccttcattgacactatctggttcagttttgcgagtatttaaaaaactgcacaaacaagattgtgaacggtgattgtttcaattttgattgttctttgttttgtagatttatatatatgttgttgtgcagtggatcaaaaaaaaaaaaaaaaaa

SEQ ID NO: 391167 - DNA, 740 bp, Oryza sativa
  unsure (1)..(740): unsure at all n locations
ccacgcgtccgggagagactcgcgcacggcgagcctcagcggcgcaaacaacaacatcccgccgccgacgtcgggactcgccaacctcacctgcctcttcggcgcgcaggccctctcccagaaggacatggtcgccctctccggatctcacaccattgggcaagcacgatgcacaaacttcagagctcatatatacaacgaaaccaacatcgacagtggctttgccatgaggaggcaatcaagttgccctcgtaactcaggatcaggtgacaataacctggcacctctggatcttcagacgccaaccgtgttcgagaacaactactacaagaacctcgtcgtcaagaaggggctcctgcattctgatcaggagctcttcaatggcggagccactgatgctcttgttcagtcttacataagtagccagagcacattctttgcggattttgtgacgggcatgatcaagatgggggacatcacaccgttgacgggatcaaacggggagatcaggaagaactgcagaaggattaattaagaagtgattaagaggcaagctgtgttcatgtccagtagtgcaaacgcacattgtgtcgtgtttcttgcggatatgtttgcaacatctcccttaatttctttcatgtgtttatgtatcattatgttcgtttgaaataatgaaagtactatgtgatttgttttaaaaaaaaaaaaaaaaaannnnnnnnnnnnnnnnnnnnnnnnnn

SEQ ID NO: 391168 - DNA, 1185 bp, Oryza sativa
  unsure (1)..(1185): unsure at all n locations
acgcgtgaggtcttcttccccactctctccctcccacgccgccgcccccgcaaaccctagcgaacgcagcggagagaggagagagcgccatggccgtggaggtggcgacgcagaagatcaggtggggagagctcgaggaggacgacgagggggacctcgacttcctgctcccgccgcgcgtggtctccgggcccgacgagaatgggttcaagaaggtggtcgagtatcgcttcgacgacaaggggaacaaggtgaaggtcaccaggaccttccgcgtccgcaagatcgcccgcgcccgcctctccaagagcgccatcgagcgccgctcgtggcccaagttcggcgacgccgtgcaggaggacgtcggcgcgcggctcaccatggtgtccaccgaggagatcgtccttgagcgcccacgcgccccagggagcaaagctgaagaaccaagtgcttctggtgatccactggcaagcaagagtggtgcagttctcatggtttgcagaacctgtgggaagaagggtgatcactggacctcaaagtgcccctacaaggatctagctccccagacagaagcttttgtggacaggcctcccactgctgatggctctggacctccaggtggcgccgtgaagggagcatatgttcctccaagcatgaggtctggtgctgttgatagggttggacatgacatgaggcgtaggaatgatgagaactctgtccgtgtgaccaatctatcagaggacacccgtgaacccgacctacttgagctattccgcacatttggtccagttagccgtgtctacgttgcggtggatcagaagactggagcaagcagggggttcggcttcgtcaactttgttcacagagaggacgctgagaaggctatcagcaagctcaatggttatggttatgataaccttatccttcgtgttgagtgggcaacaccaaggccaaattaattttgttactccctgcaagcgttacatacttttcatgaatgttcgatcagtatgtctcttgaaatagtacttttggtttgcgcatatcctgtgtcctgaacttaagctgtactatttttgcttggacgagaataactgaactcgcagctatttcctatatcagctgatatttgcaagtgtgtttgtatggatgtgcgagggttccnnnnnnnnnnnnnnnnnnnnn

SEQ ID NO: 391169 - DNA, 784 bp, Oryza sativa
  unsure (1)..(784): unsure at all n locations
ccacgcgtccgctggaatattatgcaacttacaaaaacacagatgactccgaggacaatttgttgacttgtctggctgatcttttttcacagataactctagcgaagaaaaggactggtgttcttgcaccaaaacgttttgttcaaagagtgaggaaacagaatgaattgttcagaagttatatgcaccaggatgcccatgagttctggaatttcttagtgaatgatattattgatattcttgaagaagattgtagaactgcaaatagttctcctgagactactcctgaagaggtctcaaatggggcagccaatgctttagcaaatggagccagagaaaggccattagttacattggtgcacaggacttttcagggtattttgaccaatgaaaccaaatgcctaatgtgtgatactatcacagcaaaagatgagacgttttttgatttgagcattgacgtggaacagaatagttcgctcacaagctgcctgaagagcttcttttccactgagattttaaatggcgaggataagttcttttgtgacaaatgcagcagtttgcaagaagcacacaagagaatgaagataaagaaggcgccacacgtattggtgatccacctgaagcgcttcaagtacgttgagcagcttagccggcacaagaaactgtcgtaccgagtggtatatcccctggagctgaagctgggcagcatgtctgaagacgctgactgcgagtactcccttcttgcnngtgtagtccatgtgggagcagccccaaccatggacac

SEQ ID NO: 391170 - DNA, 885 bp, Oryza sativa
  unsure (1)..(885): unsure at all n locations
aagctggcgaaanggggatgtcctgcaagccgattaatttgggtaacgccagggttttcccagtcacgacgttgtaaaacgacggccagtaagcgcgcttaatacgactcactatagggcgaattgggtaccgggccccccctcgaggtcgacccacgcgtccgcagctagctagcagctagcccaagtactgacatacagtatgaagctgatgctcctcttcgccgccaccgtcgtcgccgcggcgttggtgctggtggcggcggtggatgtcggcagcagcggcgccttgttgccgatgcacgtgctgcgcggccgggtggctgacgtcgaggacgtggtggcgagcgtggtggaggaggaggaggccagcgtacccgcggaggaggatcctctacgacagccggtacgccagctacaacgggctcacggagagcaaggcggcgtgctacggctcctgccccggcaggggccagccgtacagcggacgcagctgcctcaacatctaccagtgcaagggctaaaagcttggagaaattaaagctgctggtgatatgatcgatcgatcgatcctctgcaataattctgcgtctgtactgcaggggaagatatgttcaaactaactgtgttgaaatgatactggtgaatttgtatgctgttgatgactttgtgttagtcgatcacttcatatatgtaatatgtagttaagtgttgtatccgattcacgtacgctcgtngttaatagctngtttgagcgttngatacaattaatatccggnctatacgattcattgttgttcgatgaattactgggacgangaaactgattaatcgatgaataaaacaanggtttgnntctgcnnnnnnnnnnnnnnnnnnnnnnnn

SEQ ID NO: 391171 - DNA, 961 bp, Oryza sativa
  unsure (1)..(961): unsure at all n locations
tttgtcagtcgctgtaatagtttcgaggccgcggccctgttactggaacaactgcgcttatttgataactttgtctatggtgttgcttatggtcttctggtcggttctcgagaagtttggtcacaagctcaatcgttatttaatcagttaggacgcatggactctccaacatcctctgccttttacaatgctcttactgatgtgctatggcatttcggccagaggcgaaaagctcagcaagttgtgtttgaagggataaatcgtcgtgtctgggagaacacatggggtgagttttgcttggacctgcaccttatgtcatgtggtgcagctcaagcaatggtccatgcctggctcctgaatgtgcgctctatcgtctttgaaggaagagctatgccctgaatttttaagcattcttacagggtggggaaagcatagcaggattgctggtgcaagcaccctccgccgtgtcattgaagcactgctcaattcaatcgcagccccggtccaggtggaccggttcaacatccggaaggttcgtgtcaccctgcgccggggtggcagcctggttgagagaatcggccaccttctacatccttctcctccgcgacgagcgggttcagcaagcagccccatccaatctggtgccgaggttacaagccttgcagttgtagcccagccccatagggcaggctcgcccttccttgtagccttgtatctgtaatccttccaattcttcttaagttcatcttctcactttcagaaagatgtagttgtatcataggcgcaccggctagcttctcgtctgctaaaaacctctgacccactgtcagccagcaatgttgtaaattttggcaattctgcctttcaaactccttttcatcaaccccggaaatttcaaagaataccagaatccctccaaaggtatcatcagnatatcnnnnnnnnnnnnnnnnnnnnnnnn

SEQ ID NO: 391172 - DNA, 794 bp, Oryza sativa
ctcgtaccttccccaccctattgacaatgactcatatgataggattgtgctctgtgtgaggttgctttgcaatactggtgatgatgtgaggaaggtctggttgcagtcatgccgccagagctttacaaagatgcttgctgaaaaacaattccgagagactgaggagatgaaggccaaggcgcagatctctcatgcccagcctgatgatctcattgatttctaccacctgaagagccggaggggaatgagccaacttgagttggaagatgcagtccaagatgatttgaaggctgctactggtgaatttacaaaagatgcagatgacgcaaacagactgaatcgcattcttcaactaacagggttcagtgatcctgtgtatgctgaagcatatgtaactgttcaccactatgatattgtgcttgatgttacagtcataaaccgaacaaaggaaacacttcagaacttgtgcttggagttagcaacaatgggtgatctcaaacttgttgaccgcccccagaattacacgctggctcctgagtcaagcaagcaaattcgggccaacatcaaggtttcatcaacagagacgggagttatattcggtaacattgtttatgagacctcaaatgtaatggagcgatcagtgggggtcctaaacgatattcacattgacatcatggattatatctcacctgctacttgtggcgatgttgctttccggaacatgtgggcagaatttgagtgggaaaacaagggggctgtgaacaccgtctttaagatgagaaggaattttggat

SEQ ID NO: 391173 - DNA, 531 bp, Oryza sativa
ccacgcgtccggagaaatatcagcatctgcaaaaatcatctcagattcgttcgccatggcgaggatcccgttcgccgccatcgtcgtcgccatcctctctttcgccatcgccgcggctgcacaggcgcccgcgccgtctcccaccagcgacgggacgtcggtggatcaagggatcgcatacctgctgatgatcgtggcgctggtgctcacctacctcatccaccctctcgacgcctcctccgcctacaagctcttctgagcttatgcagagatctcttcgtcgccatggtgttccttctccttcttggatctcctcctcctcccttttgatagtctagtggtggatctctcattctcggtgtaattaattagtgggatttttatattctttttcagctcgcgttcgtttgtaaatttgagtcggtggtactgcgctgaggatcgatttcgcattgtgtatatcattcatcattctttgctgttctcatatgcatttgtatcatgttgggaaatttgtttatccctaatttt

SEQ ID NO: 391174 - DNA, 532 bp, Oryza sativa
ttcccggtcgacccacgcgtccggcaccgccccccccccccaagccctcgctagctttctcgttaattctccgttgccagcatctccagtcgattcatagctagcgatcgaaatggcggccaccctcaagctcaggatcctcgccgcggctgccaccgccgccgtcgtggcgtcgtccttggtcggcgtggccaccgcgaccgaggccccggctcctggcccgtccggagcttccgccggcgccgccgcgacgaacgccgccccggccgtcgccctcggcacgctcgccgccgccgccgttgggtacctcttctgctgagctcgcgagcgcgtcagttcggtctggaccggttgcgctctcgccgcggaggttatatgcattaattgataaatgtttttctttttctcttttttttttcttttgcaattgtgtctgttgttgctggatatatataatgtaagctgatagattgatgtattcgttcagctcgtgtacacagtatttcatgaagtaatatatataattttgttc

SEQ ID NO: 391175 - DNA, 1127 bp, Oryza sativa
  unsure (1)..(1127): unsure at all n locations
ctcctatccgcgtccatctctctccccgtctcgattccccaccagcggcgaaaccctaaccctagagcggccaccgccatggagaagcgcgcgaccaccaccagggcggtggtgctccgcctcgacgacctctcccttccgccgcgccgcctcaccgtgccgtcccgcctcccggtctcccacctcctccgcgcgctgccgcagccgctgctcgagtcgtcgtcgttctactctcaccgccgatggccgccccgctcctgcttgtccgcgcccgtggcgtcgcttccgccgtcgggttcggtccagctccgcctccgcgcgctccgcggcggtggcggcgccggcggcgccacgggcgccgagtcccgcgactgctacctctccatgtacctcgcgaagaagcccgacaaggccgaccccaacgaggcgcggctctcccgcttcacctgctgcgcgctctccggcgagccgcttgccgcgcccgccgtcgccgatcgcctgggtaacctcttcaacaaggaggccctcgtcgaggcgctcctccacaagcgcctccccaaggcgctctcacacatcaggggtctcaaggacatgatccccatccacctgcatcctaagcctgatgccgatgcggctgggtgaggaggtccggttccagtgcccggtcaccgggctccgatttcaatgggaagtaccaattcctcgcgcttcgcaagtgtggccatgtgcttagcgtgaaggctctcaaggaggtgaagacctcggcgtgcttggtattccataaggagtttgatgaggcggacaagatgccgctcaacggaactgaggacgaggttgcggcattgaggctgaggatggaggaggagagggggaaggtgaaggaaaagaaggagaagaaggtgggaaatgggctaagtgggagtaagcatgctgccgctgccgtgatggcagggggtgctgagaactttgaaaatggggaagaagggggaggctccctcttttnaagccggttccaaaggctttggaggacccattgcacccagcatattgcaaaaccaaaggaaggtttaattccatccgattttttnacctttcctttccccaggaaggtcaaatttttcnaaggg

SEQ ID NO: 391176 - DNA, 766 bp, Oryza sativa
  unsure (1)..(766): unsure at all n locations
aaaggcaagactgttgattttaaaggtcatatactccagttctctggtttcgtgtggcatgaaagtgatgaaaagcagagggcgaaggctaaggagaagcttgacaaatgtgtgaaagacatgttgttggaactctgttggatccttgctattccgactccaaaagcaaacatcagaaaggaagatattgtggcaaagctgttggatttcattgctgaacctcatgctatggctgattccgggcattcggatgatcaggggtcgaattctcggaaacgcaagagaggaagcacacccaagagttctagcaagaaatttgatgatgatgacgacataactccaagtaaaaagcggaataaagctctggaatatgatactgatgaagatgaggatgatgcggatcccatgaagtcagatagtgaggaagatgactatgattctgagaaagagaaggcaaagaagaactcctcagatgcaaaagataccgctagtaaaaagaaggctgcaacagggagcagccacaagacaggtactccaaggacagtgagcaagagttcaagcaaaacaccatctttcaaaagttttccaaggaaaaggagagccctgaggacagtgcaaaagtcttctctagggaggaggaatctgtcacaccaaagcgtccttcaacgctctgaaaaggagataaagccaagaagtcatcaggtaaaaaggtgncaaagggtaaggngatcagcagaagtaggcttcccgtaaggncggcttaggg

SEQ ID NO: 391177 - DNA, 369 bp, Oryza sativa
ttccggtcgacccacgcgtccgcttaggttatactagctgccaatggcgtcgtcgggagtgggcggcgtgccggggtcgccgtgcggggcgtgcaagttcctgcggcgcaagtgcgcggcggagtgcgtgttcgcgccctacttctgcgcggaggacggggcggcgcagttcgcggcgatacacaaggtgttcggcgccagcaacgcggcgaactgctgcagcaggtggcgccgggcgaccggagcgaggtcgccgccaccgtcacctacgaggcgcaggccaggctgcgcgaccccgtctacggctggcgtcgcccacatcttcgcgctgcagcagcagctggcgacgctgcaggtgcaggtggcgca

SEQ ID NO: 391178 - DNA, 790 bp, Oryza sativa
  unsure (1)..(790): unsure at all n locations
ggggcngggggaggagatccggcggtggtggacccggtgggggctgcttcaagtgtggggagtctggccacatggccagggactgnnccaacggcggcggtgtcggcgttggtggaggcggtggcggcggcggcggcgctggtggtggctgcttcaagtgcggcgagatgggccacatggctagggactgcttcaacagcggtggtggtggaggtggtggtggtggcggcggcggcggcggcgcctgctacaactgcggcgagaccggccacctcgcgagggactgctacaacggcggcggtggaggcggaggcgggcgattcggcggtggaggcgaccgctcctgctacaactgcggcgaggctggacacatcgcccgcgactgccacaagtgatggattcacaacaccatcttcccccccccctcctcttagatctcgcctaaatcttcatcactcctaagtcgaattattgctttagttttgccgccgatctgggtcacatggagagcgcgttgcctgctataaaggaaccgcttgccttttgtttttacctctttttctttttttgctattgggatttcggtttagttttaacttctgctgctgctgctcgtgtgatgatgcctttgctgctatgagttggtctggtcctctggttcaggttaagaagacgtgatgtctcggattgggtttgtgtgttgggcgaggagattgacaaaatctctctccttttttgtggtttccccgagaatgaaaaaagatgattattgtcggttactctataaaaa

SEQ ID NO: 391179 - DNA, 814 bp, Oryza sativa
  unsure (1)..(814): unsure at all n locations
cccacgcgtccgctcgtctcgacccatcggagccaccacttcctcaatcctcacccgggaaatcgccggcggcgagccccctcctcctcctcctcctcttccggcgacccccgactccgctccggcgacccgatccccacctcgaccaatatggactcagagccctcatcgcagaacccggcagatatgacagcatttgtacaaaacctcctaacccagatgcaatcaaggtttgagtctatgtcccagaacattgtgtcaaagatagatgaaatgggaaccaagatcgatgagctggagcagagcgttcaacgacctgaaagctgagatgggtactgatgtgcctaccaagaaggccgacgaggcgaagcctgccgactccacataacttggccgcagaccagagattggcccgtaacgatttggcatcggtgatggatttttcagcgttttatgtgtatccgatattagttttcttggaccattgctgttgaatgactcgagagtgattttatgctatgagcgttctcctctagagtatctgctgctgctgctgctaaggcgatgtgtttggcttgtatgcaaatttgattttagcagaatgccacagatgtttgcttgctgataacaagccgcagctgctcgccttttataatgcttcagttcgagtattcagttgtgcccttcttttacacaaatctgatacctgtgatttcagctcacgagtacaggcgtttggttatatccgaagtatatatgatctgaattctctaagnccanannacaaaaaatagtggaaaaaaaaaattaaact

SEQ ID NO: 391180 - DNA, 620 bp, Oryza sativa
  unsure (1)..(620): unsure at all n locations
taccgcccggtgatcaagttcgtgcaaaacccagacgaattcgggttcagcgagtcgtcgaagctccgggcgtgctgncggcgncggcggcggggcgtacaactacgacgtggcggcggcgtgcggcttccccggcgcggcggcgtgcccggaccccgacgcggcgatcaactgggacggcatccacctcacggaaggcntacggccaggtcgccgccggctggtccgcggcccgtacgcgcatccgcccatcctcgcggccgtgcaacgatctgacgaaggaaaccccatccaaatggctacgtcgatgcctgcctctttctgatacgctctccttttgagtcactttgtctctgttattcttaatccaagagtaccccagctgttaattgtatatgctcctttaaaaaggagtccataagtgacagttactggaagtcggagctgcttcatcgattgcgatgagtttggcagcgatatataaccggtgacgagtctgagtagttgcgttgttctggggttttgcttatgctttctgtgtggtttttgctggtttttcataaatgaaccgtgtggttgtatggttctgtgcnnnnnnnnnnnnnnnnnnnnnnnnnnnn

SEQ ID NO: 391181 - DNA, 393 bp, Oryza sativa
ccacgcgtccgctctctttcgccgcagtctctgcttccgtgcatccatcggcgttcggcgactcggtgtatagtagtattgccaactgtgcgtagcgagctcgatacagcggcgatcatggggttccctctggtgtgctactgcatggcgatccccaagccgctcatcgccttggccaagctcctcgccgccatcagggaggccctccagctgatgctcttcggcgtcgggatctgccaccacccggagcgatcgggccgcccgcctgccgtcgacgccccgctgcccgactaggtgaaggaccgtcttccgtccctagagtatcgaacagctgctctcggtctttgtgcgcggctgtcatggctgcgaccaccacggggcggccgctgtata

SEQ ID NO: 391182 - DNA, 585 bp, Oryza sativa
  unsure (1)..(585): unsure at all n locations
aggcaatccaatcctatgcgatacatgtgctctccttgacataccagaaagttcctaggcctgttcttgcggaggccatcaacattgagggtcttgcattggacaagttcctggagcaccatattgcaaactccggttgggtgatcgagaagggtgcacgatctcagctgattgtccttccacgcaacgagttcaatcaccctgagctcaagaagaacacagctgaaactgttccgttcgagcatgtaactcgcatattccctgtccttagctgagtcaacaaccagaccaactgagattttgcattacagaacttctgagcgcgtgaagatactctgggcgcatctgttttctctgctgtgatgtactgcgttttgatatgcctgttttagctaaacaagtcaattctagtgacgatccgagcgtcatatctgcctagttatgtttatgtaagcattctgccatgatattacattgttggcaagatattttatcaggtcagagcaaaattttgcaaagcggccgtgttcggctttgggcnnnnnnnnnnnnnnnnnnnnnnnnnnnnnnnnnnnnnnnnnnnnn

SEQ ID NO: 391183 - DNA, 612 bp, Oryza sativa
caagttctcagaagtgaagcctattcagctggtgacttaggcactgctgttcatagagctttcttcaggatggacgaaatgatgcgaggacagagaggctggagagaactatctgcacttggagataagataaacaagattggtggtatgattgaagggttgatttggtctccgagaggcagtgattcgaataatggacaagatgattggtctttcgaagagggaccccactccgattttgctgggccaacatgcggatgcacagcatgtgtagcgctaataagaaataaccaacttgttgtggcgaacgctggtgattcccgttgtgttatttctagggctggccaggcatacaatttgtcaagagaccacaagccagagcttgaagctgagagagacagaatagtaaaagcagggggtttcattcatatgggacgaataaatggaagtttaaacttgacaagagcaattggagatatggaatttaaacagaacaaattcttgccttctgagaagcaaatcgtgactgcaaatcctgacatcaacgttgttgagctttgcgacgaccaccactctcttgttttagcatgtgacggcaattgggactgcatg

SEQ ID NO: 391184 - DNA, 465 bp, Oryza sativa
  unsure (1)..(465): unsure at all n locations
ggtcgaccacgcgtccgcgcggcttaggctttctttggcgccaaatccgccgcccaatcccagttttcccaagggtagtttcttggtttagtcaactactatggggtcctgtgtgggaaaggaacgcactgattgaagaagacaagattgacttcaaaggtggcaatgtgcatgtgattagtaacaaagagaattgggaccacaaaattgcagaggcaaacaaggatgggaaaattgtgattgcaaatttcagtgctgcatggtgtggaccatgccgtgtcattgcacctgtatatgctgagatgtcacagacatacccccaggtcatgttcttgactatagatgtcgacgagttaatggacttcagctcatcatggggacatcccgagccgacacccgacgttcttccttncctaaaagaccgggggagcaggttggacaagctcgtcggcgccaacaagccgg

SEQ ID NO: 391185 - DNA, 641 bp, Oryza sativa
caatttgagcaacagaaacactaacacgtcaccaataatggcgtccctcgccaactcttctgtccacctcctcctcctcgtcgtggtgctcgccgccgccgccgatgcggtgacgttcaccatcgtcaacaagtgcgggtacaccgtgtggccggcggcgctgccgtcgggcgacggcaatcagctcgacccggggcagagctgggccgtgtacgtgccggcgggcaccaagggcgcgcgcgtgtgggggcgcacgggctgcggcttcatctccggcggcagcttagggcagtgccagacgggcgactgcggcggcacgctgcggtgcgcggccgtcggcgcgccgcccgtcacggtggccgagttctcgctgggccaggcgagcaaggacgactacttcgacatctcgctcgtggatgggttcaacgcgccaatggccatcgtgccggcggcggcgggcgggcggggtgcccccgcggcgggcctcggtgcgcggcggagatcacgctgcagtgccccggcgagctgcgcgccaaggccgggtgcagcaacccgtgcagggggaacagcacgtgcgggccgaccaaggacacggagttcttcaaagagctgtgcccggagacggtcacctacgcccggga

SEQ ID NO: 391186 - DNA, 543 bp, Oryza sativa
gattaagcttagtaggccaatactgagtctgataatgatcagtgaacagatgtttagtaatttgagagcacagatattagcatcacagcctgtagaccagcaacaacgcctttcgcaatgcggcgacaagctgatgtctgatgttgctacgaacttggaaccaaagaacagagataaattcactcaaaatctggacaacattcaggcatgatttccgtgtgaagaacattcaggcatgacagctgttcaggaccagctgccacgtttaaggtggtccactcatgtgctgtaaatccttagcttagcttcgttttaggaaccaccattcccgtggggggaaagttatggtttaactcagtttggtttggattggctgaaagatgaaagggttctcctgctgcacgtggcggcaaaatgcagttgttgatctcttaccttgtcgtgtactagaatggctgagtgcaggggattgacttttttcttcttctctttttataccttagtgttaattccttctctttttgcttgtacagcaatattcat

SEQ ID NO: 391187 - DNA, 727 bp, Oryza sativa
  unsure (1)..(727): unsure at all n locations
ccacgcgtccggcaactactacccgccgtgcccggagccggaggccaccgtcggcacggcgaggcactccgacccggcgttcctgaccgtgctcctgcaggacggcatgggcggcctccaggcgctcctcggcgggcggtgggtggacgtcccgcccgtcgccggcgcgctcgtcgtcaacgtcggtgacctgctcgagctcgtcagcaacgggaggatgaggagcgtggagcaccgggtggtggccaaccggagcagggacgcggcgcgggtgtccgtggcggcgttctgcaacgtcgacctgggccgcgagagcagccggagcggcaggctgtacggccccatcgccgagctcaccgccggcggcgacccgccgcggtacaggagcaccaccgtcgccgagttcctcgcgcactacgacggcaagggcctcgacggccgccccgccctccaccacttccgtctacctgccgccgctagtctagattagctatatcagggtttaatcttctgttttttaattggcgtttgtatcggagggatgccgatatactgaaatttggccaaatttaaataaaaatattatcgaattcatataataaaatgaaattttttttaagaaattctggccgaaataatgttatattgggagggtctgataggaccgaaacttctaaaattttgttccagcaccttgaacgaggctatatatttctccctcaaanaa

SEQ ID NO: 391188 - DNA, 476 bp, Oryza sativa
cttccccaaaccctccacttaacccgcctcctcgagcgacggcgcagccatggcggaagcagcagcagcacctcccgccgccgccgccaccaactacgaggtggacctcggcaacctcatggcctacgacccgtcgcatcacctccccgccgcatcctcctccagggaggagctgagggaggagtgcctgcggaaggggacggagctggcgcaggcggtcgccgacgccctcttcgcgctgccggccaccgaggaccgcgacggccccatggtccgcctcccgccgcccaccacccgcttcccccgcgagaagcatctaccaaggccgaagccccctactaaatgggagcagtttgcgaagatgaaagggatcacaaagcacaagaagaacaaacgtgaatgggacgagcaaactcaaacctggaagcggacttatggctatgaccgtgttaatgatgataaaagacatccaatca

SEQ ID NO: 391189 - DNA, 560 bp, Oryza sativa
ccacgcgtccgatttgatggctgctagctggactggacttccagattctctggtaatggaagcaaagaaagctgcatccaaagctacggatgataaggctgggaaagaggctttgctaaatgaatttcgtgcagctgaggcatgtgaagaatttggtggagttctagtcaccctaagaatggctctagatgatctttgtggtataactggtgagaatgtgggccccttgcctggttatatagaagatcctgttaaatctgcatataagcgttacatgaaatatctggaatcttttggcccggaggaaaattatctacgtaagaaagtggagaatgaggtggggactaaaatgatacacctgaaaatgcggtgcagcggtgtagggtccgagtggggagagatcaccctgattggcacctcaggcatctcaggatcctatgtcgagctaagggcatgaggaaagtctgcagatcataaccatggcagaacatcgttttctgagggaaggatgcatatcagaacaaggtgttccgtttctcttttcttactgtgtagctacc

SEQ ID NO: 391190 - DNA, 920 bp, Oryza sativa
ccacgcgtccgatttcaagctgttggattaaacctttatctcttcccatatggtgttttacccactggaccagagcgaggcataattgaggtggtaccaaatactcggagtagaaatcaaatgggtgaaacaactgatggtggtttattagagatatttcagcaagactatggccctgtaggttcaccttctttcgaagctgctcgcgaaatgttcatgatccgtagtgctggatatgctgttgctagcttgcttcttcagccaaaggatcggcataatggcaatcttctctttgatagccacgggagactagtccatattgattttggatttattttggagatttcgcctggaggaaacatggggtttgaaagtgcacatttcaagttaagccatgagatgactcaattgcttgatccatctggaacaatgaagagtgacacttggcatcagtttctgagattgtgtgtcaaagggtacctaagcaggaaggagacacatgaatgggattattactaccgttaatttgatggtggacagtggcctgccttgctttagcaggggagaacctatcgctaatctgcgaaaacgttttcatccagagatgaacgagcgtgaggctgctaattttatggtcagaacatgtgtggatgcctacaacaaatggactaccgcagggtacgacttgattcaatacttgcagcagggtattgagaaatagtctatttctccttttgtaaatggggggtcgtgtacatcaattgtatgtagccactaattcttttatgtagaattatgttgttgagcggttcattgtatggtaagaacggtgatttcaagcgactaacagagggtgtatcagtgtaagtttaaacagtgcctattcatttttttgttccttttgtaaaaaaaaaaaaaaa

SEQ ID NO: 391191 - DNA, 821 bp, Oryza sativa
  unsure (1)..(821): unsure at all n locations
ccacgcgtccgctcagagcagcgtacaaggacacggaatcagcgaaaaggcacgagctcacgatcgagctagatcaagctaagctagcagtaagatcggaaggagaaatctagtcgttgttggtcatagacaaggaaaaaaaaaacaagccagaaaccgatggggaactgcggggcgtcgcagcgtgccgtggagtcgtgggccgacggcgacgagtgggaggacgaggcggcggcgtcgtcatcgtcggaggacgatggccaccgcgagcggatggagcacgtggcagaggtgaccatcaggatcaccaagaggcagctgcacgagctgatggagcgcaagggcgccgggaatggccacgggaagatcagcncgcggtccacgcagcagctgctggcggacatcatgaactccggcgaggtgcaccaccacgaccagcacagggaggcgcactggaagcccgccctgcagagcattccggaggccgtggagtcatgagttccattctacgccttaagcttggtggttaagtcnccgcttgattatttttccaagaagtttgtcgctttcctccatgtttcttttccatgaccacattttctttactctgcaccagatttaatttcggtgcttattgatgtgcatagctagaatacatttgggttaattcatcaattgttcagacaggacatgtacaaaaatccgcgcgctcaaaaagaagtcgaagaatatgtaaataaatgtaggggaaatcattgtaaagatattttacaattgtataaagaaggctaatttgaggnnnnnnnnnnnnnnnnnnnnnn

SEQ ID NO: 391192 - DNA, 553 bp, Oryza sativa
  unsure (1)..(553): unsure at all n locations
ccacgcgtccgggaaaaggttttttctatggtcgataccctgcaccccgagaagtggaattggatgctggaactgaaacaaacattaatcttaatcatgagatatattaccatgtcgtgggatctgatcagtccgaagatatattatgctggaaagatcctgaacaccctaagtattcctttggtgcatcggtcacagaggatggaaagtacatcatactaggtacttatgaaggttgcgatcctgtcaataagctatactactgtgaaatttgtactcttcctcaagggatagaggggttcaaagagacaaaggggatgcttccatttgtcaagcttatagataactttgatgcccaatatcatgttgtggcaaatgatggtgatgaatttacatttttgaccaatagaaatgctcctaagaacaagcttgttagagtagatatcaaggaagccagaattgtggactgatattcttcctgaacatgaaagagntgtgctcgnatcagctgtcgcggttaatggtacccngttattggtatgttatatgtcag

SEQ ID NO: 391193 - DNA, 473 bp, Oryza sativa
ccacgcgtccgcggagatcaccgtgcgcgccacgggcgacccggcgggcgcgccgcggtgcacgcggggcgcacgacgtgcccgccgtggcgttctccatcggcgggtacacgggcaacatcttccacgacttctccgacgtgatcgtgccgctgtacaaacaccgtgcagcgctaccgcggcggggtgcagctggtgatggtgaacgtggcgtcgtggtggctcgtcaagtacgacaagctcctccgcgagctgtcgcgccacgcgccgatcgacctcgccaaggccggcgccgccggcgaggtgcactgcttcccgagcgccgtcgtcagcctccgcgcgcaccgggagctcatcatcgagcgggagcgcagcctggacgggctggcgacgccggacttcaacgcggttcctccgccgcgcgctgtcgctgccgcgcgacgcgccgacgcggctcggcgacggcaccgggc

SEQ ID NO: 391194 - DNA, 650 bp, Oryza sativa
ccacgcgtccggcagtagaaaatttggagaacatttatggtcttgtttctgctatagattcgatatgggtatatgggaatagctttgagtgattgcttgttgctgtgggcaatccaaacaaggaagcattggagagctgggctgcagcaaatggaatcagtggtgatttggaggcattgtgtgagaaccccaaagcaaaagaatacattttgggagaactgtcaaaagtaggaaaagagaagaagctcaaaggttttgaattcataaaggctgtacatcttgaaccagtgccatttgacatggaccgtgatttgattactccaacatataaaaagaagcgccctcaattgctcaagtactaccagggaacaattgacaacatgtacagaagtgccaaatgagctcgccatgccgtctagaacatccaagatcaaaggagctgacagaagcaccaatctcatgctgtttgtatgttcatagtagggacggaaaaatgttgtaatatctcttttggaaacgtcttgacatatatgatttattcgtagaaacggggtatgcacctgtacgaagaatcgcaagcaccgtttctgtattgcctgacccctgaaattgccaaatttaaaatcgaccattagcggcaaaaaacaaaa

SEQ ID NO: 391195 - DNA, 500 bp, Oryza sativa
  unsure (1)..(500): unsure at all n locations
cgagaagtcgggactcttccgctggctgctccagttcggcggcttcaaggagcgcctcctcgccgacgacctcttcctcgccaaggtcgccatggagtgcggcgtcggaatcttcaccaagactgcagcagagtatgagcgaaggagggaaaactttgtcaaagagcttgactttgtgattgcagatgtggtcatggcaatagttgcagactttatgttggtttggcttcctgctccaacagtgtctctgcagccaccactagcagtaaatgcaggatctattgctaaattcttccacaattgcccagataatgccttccaggttgctttggctggaacatcatactcccttttgcagcgcgtaggagctattatgaggaatggtgcanaactttttgcagtgggaactagtgcatccctgattggaactcgtgtgaccaatgcactgataaaagcacgaaaggctgttagtaaggattttgaaggggaaagcgaggata

SEQ ID NO: 391196 - DNA, 499 bp, Oryza sativa
ccacgcgtccgcgacaacgtctaatcgccctgacgccatggacccacaccgtactgctatactgtatacgtatatacatatgtatgtatgtactgcacgcgtacgtacgtacgcacgtgcacgagcgcgggaagccattgtttgtacgatcaacgactctaccaagtcgaaatgtaatgtgtacggtgtctgtgtacgtgtggtggtcctgtgtgtacgtgggccccctctgcttgaagaagaagagagagcttgagctagctatacgtgtatacatggaccgtgtactatacgtacgtgcggatttgtcttttttttttcccctcttccctgcgcctacgtgcgtatgtacgtacgctttctctcgctggtataatcagctggcgatcgatagcggcaaaaatatgttatgtgttcgtgtcagtctctttggctttgtattaaaaatccatctgagttaatgaaggagctgagctttgcttgtcattgatttggggtg

SEQ ID NO: 391197 - DNA, 545 bp, Oryza sativa
ggactccgaccagtggagggcaaccagccgccgccgccggccgccgtctcgtcttgggatcgcacgcggcgcggaagaggtagggtggttgctagtgaggagggaggtggttggaggaggatgagcgaggggaggccggtgccgaggagggagagcccatggggcttgccggagggggacaagcgggagcccaaggcgcaccgctgcaacgaccgcgccgaggacgtcgtccaggcttgctttgaggggaatcctttcaagacagttccaggtccattcaagctcttttggcaatgcatgcgttcgaaacctggggaggagccaacggagccgtatacttacctgcagctggatcctcccaagagagcggaagtcaagctagagtaaacagcacctaagtcgtccacaagagtgtttagtttatttcatagtggtttgccttcaaaacaacgcctttatctcctagggaccatgttgtgcacaatgccttatgtttgcatattcaagaataaaaatttgacaatcctgatccagagtaatgcctt

SEQ ID NO: 391198 - DNA, 890 bp, Oryza sativa
  unsure (1)..(890): unsure at all n locations
gtgaaatggatgcagctatgactactgaaataaatcaaggcacagggcgccttcgttattgttggagcaatgtatgcctgcatatgtttactttggattttcttaatcaagtaacaaatagtcttgaaaaggacagcatttaccatttagcagagaagaagattccttcaatccatgggtacacggcaggcttaaagcttgaacagtttatatttgacgtgttcacctattctccatcaacagctctttttgagattttgagggaggaggaatttgcaccagtaaagaatgctaatggtgcaacttatgatactcctgatagtgccagattaatgctgctccgccttcacagccgatgggtggtagctgcaggtggctttttgactcattccgtgcccttgtatatgacaggtgttgaagtttctccacttagctcttatgcgggagagaacctggaagccatatgccgtggacggacattccatgcaccgagtgagatttcattttaggaatagtgtctgtcgaaagcaacagtctcagacccagctaaaaagcatctgtctcaagaagagaatggcaggatccctcaattttcattgggacatgagatgagatagttggacttgagctcttgcagttagaatgttgatattagtcagcttgttgtaatgccagtaattgtaattcaacaattggagttggctccctttccatgtaccatttttgtgctgctcaaatgtagatgatcaaacaatggctaaatcttctgtaaaaaataatacatctctgtaagactggtctatgcacaattgttaattcaacgtgctctaaagtgagnnnnnnnnnnnnnnnnnnnnnnnnnnnnnnnnnnnnnnnnnnnnnnnnnnnnn

SEQ ID NO: 391199 - DNA, 758 bp, Oryza sativa
  unsure (1)..(758): unsure at all n locations
ccacgcgtccgcccacgcgtccgccgatttctacaacgtctccgcccttccccctctcctcctccccccgcccacctgcgacctctcccgcggccgatgggtattcgacaacacctccctcccggcctacagggagaaggaatgcaccttcctcaccaagcaggtctcctgcctcgccaatggccgccccgacgacctatggcagtactggcgctggcaacccaacaactgctcgctccccacgttcgacgcgcggcggttcatggagaagatgcgggggaagaggatgatgttcgtgggggactcgctgaatcggaaccagtgggagtcgctggtgtgcctggtgcagcccatcctatccaagggcaggaagaagatcgtcaagcgcggttccttcaacatcttctacgccaaggagtatcgcgccaccctcgagttctactgggctccattcctcgccgagtccaacttcgacaacccccatttccaccacatcgaccagcgcatcatcagccctgagcggatcgagagccatgccaacaactggaaggacgttgattacctcatcttcaacacctacatctggtggatgaacaacgaagacatcaaagtcaggagggcaaattcaacttcttgggtcagatcacggcgaggtgccaaggatcgagacctattggccgtgtgttcaaagactttggtcgancttggttggaacaaaattttgatcctgccaggncttcggtgttcttcatgcaatt

SEQ ID NO: 391200 - DNA, 497 bp, Oryza sativa
cccacagcgtccgcggacgcgtgggcaaaccaccacacccagcggcaccatagacaccaagcagaacaggctgctgagctccggccgaccgaaggtgctccattctctctcctcatcattattgatatttgcaggatcgatcacttgaggtagcatgggcctcacgtgtgatacacagactgcaaaactggccattatactactagcattcatactgctatgtcatgggattggcaacgtcgattgccgtgggaacagagccgatcagctctcactgcttgagttcaagaagggcatcaccaacgatccatatggagccttggccacttggaacaccagcacacatttctgtaggtggcaaggtgtcaagtgcacctccactgggccatggcgcgtcatggcgctcaatctctccagccaaagtttgacaggccaaataaggtcctctctcggaaacctatccttccttaatatacttaacctcggccgcgaccacg

SEQ ID NO: 391201 - DNA, 501 bp, Oryza sativa
ccatctcgaactctccagtctccaccacccccgtccccgtctctcgatcgccatggcctccgccctcgccgcctccaccgccgtctgctcctctcccctcgcatccgcctccgcctccgcttcgtccgcgcgccgcctgcgcgcggtcccgccctcccgcggcatccgctaccaggccctccgcgcggactccggtttcgccgggaaccgccggggtggcggccgtggagcgtcggtagtgtgcgcggtccagggccaggacacatccatccaagttccagaagtgacgaagtcaacatggcaatcacttgttatggagagcgagcttcctgtccttgttggatactgggctacatggtgtgggccttgcaaaatgattgatcccgttgttggcaagctctccaaggagtatgaagggaaactgaaatgctacaagctcaatactgacgagaatccagatatagcaagtcagtattgggtccggagcatcccaaccatgat

SEQ ID NO: 391202 - DNA, 454 bp, Oryza sativa
ttatctttctagttaatacgtgtgcttgggagtccttgcaatttgaataaaccaagatcttaccatgactgcaattttagagagacgcgaaagtacaagcctgtggggtcgcttctgcaactggataactagcaccgaaaaccgtctttacatcggatggttcggtgttttgatgatccctaccttattgaccgcaacttctgtatttattatcgccttcatcgctgcccctccagtagatattgatggtattcgtgagcctgtttctggttctttactttacggaaacaatattatctctggtgccattattcctacttctgcggcgatcggattgcacttttacccaatttgggaagctgcatctgttgatgagtggttatacaatggtggtccttatgagctaattgttctacacttcttacttggtgtagcttgttatatgggtcgtgag

SEQ ID NO: 391203 - DNA, 857 bp, Oryza sativa
  unsure (1)..(857): unsure at all n locations
gcagcagtaactgggtatttctactctattgcttgcgcatccacgacaaaaggtgttgatgatagcttacaggatatccttcgtctcttgactctttggtttaatcatggggctacctcagaggttcaaatggcactgcagaaaggcttttcacttgtcaatatagaaatgtggttggttgtccttccccagataattgcaaggatccattcaaataataaaatagtgagagaactgatacagtcattgctggttcgaattggaaaggatcatccacaggcattgatgtatcctctgttggttgcttgcaaatcaataagcatattaagacatcgagcggcgcaagaggtcgtcgataagatccgccaacatagtggaggtcttgttgatcaggcacagcttgtttcaaaggaactgatacgagttgccattctgtggcatgagatgtggcatgaggctcttgaggaagctagcaggatgtattttggtgagcacaatattgagggaatgcttgcagtgcttgaaccattgcatgcaatgctcgagaggggtcctgagacaataaaagaaaatactttcattcaggcttatggtcatgaattactggaagcccacgaatgctgtttaaaatatcgggctacaggagaggatgctgagttaactaaggcatgggatttgtattaccatgttttcagaagaatagacaaacagcttncaagtcttacaactttggatttgcactctgtgtcacccgagcttttgagtgtcgaaagttggagcttgctgtaccaggaacttattctgcagatgcacacttgtgacaantgagtatttgttctcatttgatgtataacatt

SEQ ID NO: 391204 - DNA, 901 bp, Oryza sativa
gttgcttgcgagcaaaggtggagttcatgccctcatcatatgccatgcagattatgtcaaactaaaagcacttgcaatatcaatagctgaggaaattgagtttcagtttgactataaagatgttgcactagcaaatgcgtccaagtctaatttgcatctaattaatatttcaattgatgatgagggatatgaggaagagggaacagattggacatcacggatgggtctaaacctcaaacatagttccaagattaggaaagaaacaccagagagtcaagaacagcctcctttatcattttggggattattttccaagccatcacctatttcagttgtttcaaacttgaaatggctttgcaggaaagcacgggactccatataaggtcattggttatgcttccagccctggatgttgtggcaactccagacaaagttaagcccgcagttacaaaaactcagatagacactgctggaaatgctcatgaaaacattgcaagtgaagcagacgtctgcaacaagtattggctcctgcacgaatccaatgatgtagctgatatgtgcaagcgtcccaaggtgaatgatcaggatggacattctcttattaatattccaattgctgttgctgaatatcctatgatgcatcaagtttgtgagcgtccagtaagtgtgagtgcatgtgatgaccctatctgttcatttgattcccaggattcacccacaactgttgcagtgtcagctggcaaacctaccagagaacaatgtggtgctgaatcaactgagttgagtactgtaaaacagttcctggacaatgggcttatcgctgagggaggcagcatgaacttcataagtaatcatgagcacttagaatctgacaatgcaacctcagtgtgcaaagatgaac

SEQ ID NO: 391205 - DNA, 454 bp, Oryza sativa
gacccacgcgtccggtgcagaatacacgaagcttctcatcatggaggagatgaagaagagctttgctcggagagtgagccagtgaggcagtcaagctagcattagcaagggcggcgacatggacggcgagtcgccggcggcggcggcggcggcgctgcggctggccgccgtggcgaggaggtggctggagaacccccgggactcgctggcgaggagcagagaggaaggctgcggcgacgcgttcaacacggtggtgattgcccgggttccgcgtctccctcgccgagcccggccgcctcgtctgctccttctgcgtccccggccgccgtcgccgtacgacgcggacgggaggtggcacgccggggcgatggcgggcggcggtggacaacctgtgcgccccgcggggtgtacaccgcggacggcgtgcacaggttcaccatcagccaggccatgt

SEQ ID NO: 391206 - DNA, 404 bp, Oryza sativa
cccactgcgtccgcttaatttgagtgtgtttgatgcgaggacgggagctgcgcgacgtggtgggcgggagcggcgggctcggcaccggcggcggcggcctcccttccccgacctcccatgcgtggcggcggcatcccttccccgacggcggcgggcacggcgacgacgacggcggcgggtggcggtctgcggccgtccccttgtccccctgccgctaccgccggagggctgggacagtgggactgagccatggctgccatcgcctgtgtgcacgcgtgcaagtcatctctgaaatcacgcttgcagcagccatatcgatgcacgggtaacatctgatttcgatacatcggttggtgaagtcagcgtttactgttgattaggacaaactctttgttggagatggc

SEQ ID NO: 391207 - DNA, 529 bp, Oryza sativa
aaagggtctggagcagatttgggtggttttgatggagaagctgatgatgacgatggtgttgaactagagaaaagcaatgttctattaatggggcctactggctcaggtaaaactctacttgctaagacattagctcgctttgtgaatgtgccatttgtaattgctgatgcaacaacattgacacaggcagggttccgcccacgcgtccgagaatctatactatacaagttactggcggtggcagattttaacgtgcaagcagcacaacaagggatggtgtacatcgatgaagttgataagatcacaaagaaggctgagagccttaacattagtagagatgtctccggtgaaggtgtccagcaggctttgttgaaaatgctggaaggcacaattgtcaatgtccctgagaaaggagcaaggaagcatcctcgcggtgataatatacagatagatacaaaggacattctttttatttgtggtgggcttttattgacttggagaaaactatatcagagaggcggcaagattc

SEQ ID NO: 391208 - DNA, 466 bp, Oryza sativa
atgtttcctaaattgtgacatggtatcagagcaagagcaagggatcaaaccctaacgtcgatccggagtccacgccggcacgccggtggcagctcgccaccggcgagcccatccaatccgtgcacatcctcgtcagcttcgtcgtccaccaccgtcgagccgtcaatcgtggcagccaatcgtttcgtcgttcgtccacaagcagcaagcagatccagtcagcacaagcaacaagcagcatcaagcaatcaaatccacaagcaagcagcggatgcatgaacaagcattcagatccagttcttcgtcaccacgtcagtcgtagccaggccgtactcgtcgcggatcttgtcgtcgcgtctccccgtggctcgtcgttgtcgccgcattcccattggccggtcgcggcgctctcttcatcgccgccagcgccgtcctcctcccatgtcagtcgtccagctttccgtac

SEQ ID NO: 391209 - DNA, 524 bp, Oryza sativa
  unsure (1)..(524): unsure at all n locations
cccacgcgtatggccacgcgtccgcccacgcgttcgaacgtaaaacaaacctgtgacaaacagcagggatacacaagaggtcaagtttccacaaggttcagagatgctgaacattttcaagaacttttcatgtaaaacgtcaatattggatgactttgacttctatgaaaataggcagaaagtaatgcaggacagaagaggcaagccacttgctacaacattggatcaccccatgtttaaaagttgaaaaacctgaagaaactaagaggccaagtcaatttgtaagtacagtggatcttgatacagccaaaccagatgaagtggtgtttgacaagattgcaacagaactcgatacagccaagctaagtgaggagcagatcaacaaagttgaagtgggaattggcacaactaacagtagtgagtagcagagaagggttgcagaggatgaattacaggatgggnacttgagctagaacnttaagggtgatttccagaacgggcttcctacttccaccatttactgc

SEQ ID NO: 391210 - DNA, 711 bp, Oryza sativa
  unsure (1)..(711): unsure at all n locations
tgcgctagacagacctcagccaatgtgaatgtgaggtagacacgtacagtacgtactagattagtacattacatactcatgtcgtgtgcagtagtgtaagcagaagcagacgcaccaaaagagacgaacactactactagtatagtattccccattggattccatccgccggccggcctgctgcctgcctgccattgatagattccatcgtcgtcgtaggatagagagtactagtttgcaattcaattcaatcccccatacccataggccataggataggagtatgggaggcggcgatggcgatgaggtgctgctgctgccggagccgcgccctcgcaggggcctcgcctcctgggcgctcgatctgctggagcgcgccgccgtccgcctcggccacgacgcctccaagccgctctactggctctccggcaacttcgcccccgtccaccacgagaccccgncggccccggccctncccgtccgcggccacctccccgagtgcttgaatggagaatttgtcagggtaggacccaatccaaagtttgtccctgtcgctggctatcattggtttgatggagatggaatgatccatgcgatgcgtatcaaagatggggaaagctacctatgtgtcgagatatgtgaagacttctcgtctcaaagcaagaagagtatttttggtggagcaaagtttattgaaagatttggaganct

SEQ ID NO: 391211 - DNA, 465 bp, Oryza sativa
gcctggtcgtgctcaaacgagagagatcttggccgaatccgagggggagaagccacagaaacgatgacctcgctgtcgtcctccgccgccgcggcgcgcgccaccttcgtcatgccgtcgtcggttcgtgggggcatgagccgcggcaggaggatggcgaggctggtgacgcgcgcggcggcgtcgagcccgaagctcccgagcgggcggcggctgcgggtggcggtggtcggaggcggacccgcgggcggcgcggcggcggaggcgctggccaagggcggcgtggagacggtgctcatcgaacggaagctggacaactgcaagccctgcggcggggccatcccgctgtgcatggtgtcggagttcgacctgccgctggacctcgtcgacaggaaggtgaggaagatgaagatgatttcgccgtccaacgtcgcctgcgacatcggcggcacgctcgcgccgtac

SEQ ID NO: 391212 - DNA, 715 bp, Oryza sativa
  unsure (1)..(715): unsure at all n locations
ggacgtgangagagagaaaaaaaagtttctccccgaccccccgtgccccccgcccgcccgctaccgagatctcgccccgccgtccccgagatcccgccccgccgtcgagatcacgcgccaccgaggagaggagattcggcggtccgcctatcgcgtgaggacgagcgagactgcatactccagaaggtgcgtgatttcttccggatcgaagatactctttgtcaaaaggaaaaaaaaagggtatatagaaaagaaaaattttgagtagaagaatatcaacagagacgatgatgcggcggtttgtgaatttggtggtggacaccgccggcggcggcggcgacgcgacggcgtacaagctgtaccgcgtcgctgcatcggccctcttttcatgtccagcacgtcggcaagcagccaaagtactagatccagatgacgtggaggacgccgccggcggcctgcctcctccggccatcaccttccacccttcctcattgtccggccctggcaacgtcgattttcttgcacctccccggggacgacagccttctcgccctcgacgtcgacggccgcgtgctgctctatagtgccggctccgccgccgttcgctacatgcccgacccgtgcaagcccaagatggagcccatctccttcaccgccggcgatagcgtgctctacgtcatcgagagggtgtccttcttcggtaaccccggctgct

SEQ ID NO: 391213 - DNA, 608 bp, Oryza sativa
tccggccgcgtccgagttccggcacgcgcacgcgtccgaaacatacccaatctcacgcgtcctccccttccacccgcctcttccaacgaaacgcgaaaccctagcccgtctgatctctctctatcgccatggccggcggcaagatgaaggagcacgacggcgccagcccagccaaaatcttcatcggcgggctgcctaaggacaccaccatgggtactttcaaagaatactttgggaagtatggggagatagttgatgccgtcataatgaaggaccgctttacccagaaacccagaggatttggatttattacctttgcagatcctgctgttgttgacagagtgattgaggacaaccatgttattaatggaaaggaggttgaaattaagagaactattccaaagggtgctgcccccctaaaagatttcaagacgaagaaaatatttgttggtggattaccatctgctttgaaagaagatgaattcaaggagttcttttcgaaatttggaaaggtggtggaacatgaaatcattcgtgaccattcaactaaccggtcacgaggatttggatttgtagtctttgatgcagaaaaaactgtagatgaatta

SEQ ID NO: 391214 - DNA, 469 bp, Oryza sativa
  unsure (1)..(469): unsure at all n locations
ttttataccacgcacccacccctcgagagggaagaaggaacccggaaagggaggaaagcatggccggagcagcagccgcctccgccgccgccgccgccgtggcgtccgggatctcggcccggccggtggccccgaggccctctccctcgcgcgcgcgcgccccacggtccgtcgtgcgggcggccatctccgtcgagaagggggagaaggcgtacacggtggagaagtccgaggagatcttcaacgccgccaaggagttgatgcctgggggtgttaattcaccagctcgtgccttcaaatcagttggtgggcagcccattgtgtttgattctgtgaagggctctcgtatgtgggatgtggatggaaatgaatatatcgattatgttggttcctggggtcctgcgatcatcggtcatgcagatgatacggtgaatgcangcatgattgaaactctaaagaanagaactag

SEQ ID NO: 391215 - DNA, 827 bp, Oryza sativa
cccacgcgtccgcccacgcgtccgcacaactaataaccaacgaaaccacgagcagcggctgatcggtaagcggtagtggtagtagtagtttcgtttgtacgttgacccaagcagcagatgccaattgcagcagccgcggtcacctcgccaccggccgccgcgcaggtgcacggtgtcgtgccaaggcatgcctcgccgacgccacagcagcgggcggcgccgcggcgggagcagtcgccgctgaacccgagctcgcagtcggtccggtcggcctcctccggcaccgagctcgcaggttccgcggcgacggaggcctcccgggcgcacatcgccaaccttgaccgggttctcgggaagccaccgcaggtgccgaggccggcgagccacgcggcggcgagcaagcaggagcggcagcagcaggacggggagctggagccgctcaacgtcaggcacggcctgctcaacgcgctcaacctgtccttcttcgtgcccatgcccgggatgcgggcccgcaccgccgccgacgagcacatgtcgcctcgcagcctcatgcacatgcagcagctcggcgtcgacccctcggcgccggtggacgtcggccggagcatggcgtacgggaactgcgccgtcgcgagcccctccttcgtgagacgacgagattgacgtcttcttccaagagcccttaattatgtaaatttttgtagaagcagaccaacaattctttcgttagtcaggggtgtcagcgggaaaaaagattttcccttgccatttgacgtatgtatgtacagcaccataaaaactattatacttgcaaaaaaaaaaaaaaa

SEQ ID NO: 391216 - DNA, 615 bp, Oryza sativa
  unsure (1)..(615): unsure at all n locations
ggcacgtccacgacagcacgagacgggttggggacttggggggttgaagaagccaagctctccttggttggcgcgcacgtacgttcgcttcgcttcgattcgatggccactggtgacccaaaccctaccaccactccgccgtcgcagcagctgcaaggagcagatccccaaccccaatcccagcaggatgccgccgccaacgccactccggcggccgtggccgtgagagaggattatgtccagaacgccgtcaagttcctctcccaccccaaggtcaggggctcccccgtcctctaccgccgctccttcctagagaagaagggccttaccaaggacgagatcgacgaggccttccgacgagtccccgatccgcaacccagcgctactgctactgctgctgcttgcccttcgccttcacagcaccccaacaaccagaaccactcttctaccgttgtgcaaccttatgcaccaaggcaaccagcaacacctgctggctctattattgttgccacacagcnccaagttcagctggtaccgtgcattcgtcgctgcagggctattgcttggttttggggtagtgctgctgtgtttgtcaagaaattgctccttcctagg

SEQ ID NO: 391217 - DNA, 561 bp, Oryza sativa
gtcgcggttttcccaagctgagagttgtcgtgcgagagtgaggagcatggcgatgctggggagctcgtcggcggtggtgctggagctgatgacgatggggtaccagtcggcggcgtacctcggcgagctgctccgggcggcgtccccggcgcaggcaggggatgagcagcaggagctcgccgcggagatcctccgctgctgcgaccgcgtcatcgccaagctgaaccggggaggagccactggtgctactaccggcaagaagcggaaggcggcggagtccgccgccgccgccgccgtgacctccccttctctccccgtcacgccgaccaaaagaagggcgcgtggcgcggacgcggtgagggaggtgaggagcggcacgacgacggacgggttcatctggaggaagtacgggcagaaggagatcaatggctgcaagcacccgaggctctactaccgctgcgcgttcaagggccagggctgcctcgtcacgcggcgggtgcagcagtcgcagtcgcaggacgacccggccgcggcgttgtgatcgcctactacggcgagcac

SEQ ID NO: 391218 - DNA, 562 bp, Oryza sativa
cccgcagcgccccaacccaaccctccccgaggtcgcagccttatcctctcctctcccctccgcgaggtcaggaaatcatggcttcaacattcggtgccacttctacggttggcctcatggctgcgccaaccggaattgtatcagacaagaagccatcttctctatcttcggtgtcatctgtttctgttgccagccgaccacgcaatgcacgccttcagaggaagtgcaacttcagggtaaaagctgccaaggagttgtacttcaacaaggatggctcggctatcaagaagcttcagactggagtaaacaagcttgctgaccttgttggagttacactgggaccaaagggaaggaatgttgttttggagagcaagtatgggtcccctaggattgtcaatgatggtgttacagttgcaagagaggttgaactggaggatccttttgaaaatattggagctaagttggttaggcgagcagctgcaaagaccaatgatttagctggagatggcacaactacttctgttgtgcttgctcaaggggctggttgctgagggtgttacgg

SEQ ID NO: 391219 - DNA, 526 bp, Oryza sativa
taatttctggtattggaatagcagagaacagccttccactagggtgcctgcaattttccccaaagaccaaagaaggatactggtttccaatttgcagccttgcacggagtatgctttccggatcatttcatttactgagtatggtgatctgggccactctgaatgcaagtgttttaccaagagcgtggaaatcattcacaagaacatggaacatggtgcagaaggttgctcatctactgccaagcgggacagcaagagtcgaaatggctggtcatcaggcttccaggtgcaccagctgggtaaagtcctgaggaaagcttgggctgaggagaatggttgccccagtgaggcctgcaaagatgagattgaagattcctgctgtcaaagtgattcagctctacacgataaggatcaagctgcacatgttgtttcccacgagcttgatcttaatgaatcctcagtccctgacctaaacgctgaggtggtgatgcctacagagagcttccggaacgagaatatatgtagt

SEQ ID NO: 391220 - DNA, 560 bp, Oryza sativa
  unsure (1)..(560): unsure at all n locations
cccacgcgtccgcccacgcgtccgcccacgcgtccgcccacgcgtccgcccacgcgtgcgcccacgcgtccgcccacgcgtccgcccacgcgtccgcccacgcgtccggatctacttgactacataagcccggatcaggaaagaaaagagagggatacacaaagaaagggcaggcgtgcaaagaataatatcagagcccatcaaggtgaattagttgaagaaaaggagagctttgagcacgacataggatctcctcatgaagcaaacaaagaggagtttcaacaagtaaaatcgaaggcacaccctccagcaatatcagaagaaaattatgctatccatgatgagctgaagcaagttgatcctttatcacctgaagaatattctgatgaagggtggcaagcagctaatttgcgtggacgatctgcaaatgtacggaaggaaagcagtcgcagaaggcccgctctcacttaaatttaatgggttgatcgctttgggaggttnggccgtacagggttctnctttataggggcttggtgttcancatcacatgnaagggggtt

SEQ ID NO: 391221 - DNA, 493 bp, Oryza sativa
cccacgcgtccggtcgatctggttgtggttcccctcctctcctctctttcttcttcttctccaaatccaatttctccagagagcagaatctctctcaatccaatccatccccgaccccgatcccaaaccctagctagcacgtactccagtagactgcgatgggcgcgccgccgaccagggaatccgaagcccgcgacgaggaggcggaggtgtcccgatcgggtgagcaaggcggcggtgaggcctctacgacgcagcagcagcagcagccggtgcctctgcgccaccagctgctcggcgcctgccgcgccgacgaacgcctcaggcccctcctcactctcaacctctcatgcggcgccggcgaggaccgcttcatctcccacctctcgcagcacttcgaggcgtccgaggtcggcttgctctacaagtgtctctgcgttcccctcgtcgctcttcgcgtcggcaaggtcgaacgcaatggtcctttcttttg

SEQ ID NO: 391222 - DNA, 1025 bp, Oryza sativa
  unsure (1)..(1025): unsure at all n locations
cccacgcgtccgcccacgcgtccgcccatcatccatcacccatatcgttcaagatgccgccacgaaacggcaacctcgtcctcgccgccgccgccgccgcgctgctcgtgctgctggcgtcgccgccgtcgtgctccgccgcggcgcctcgtcgtcgggaccccgtggtggttcccgtcaccagggacccggccacctcgctctacaccatccccgtcaggtactacgacaacctcgtcgtcgacctcgccggcccgctcgtttggtcgacgtgcgccgccgaccacctgccggcgtcgctgtcctgccaggacccgacgtgcgtggtcgccagcgcgtaccgtgctccgacctgcaaggtcaccggcggcggcggcgactgcagcaagaacgtgtgcacggcgtacccgtacaacccggtgaccgggcagtgcgccgccgggaaccttgcccacacgaggttcatcgccaacaccaccgacggcaagaaccctctgatccaggtctccgtcaaggccgtggcggcgtgcgcgcccaagaggctcctggcgcggctgccgcgcggcgccacgggcgtcgccggcctcgccgtctccggcctcgcgctcccggcgcaggtcgcgtcgtcgcagggcgtcgccggcaggttcctcctctgcctcccgaggctcgggtacggccagggcgtggccatcttcggcggcggcccgatatacctcggcgaagggctgccggacttcacgacgacgctggactacaccccgctcgtcgccaagagagacaaccccggctactacgtcaccgccaacgccatcgccctcgatgacgcgcggctacccctcccgagcggcgcgctcgccgccggcggcgtnggcgctgcgcaccgccgtgccgttcggccaactccggccggacgtgttccgcccgttcgtccgggagttcgagaagggcctgaaccggagcgacgcgaaggtcgccgccgtggcgccgttcccgctctgctanagggcgtcgatgctggggaa

SEQ ID NO: 391223 - DNA, 812 bp, Oryza sativa
gttagaaagcacaacaattcttatttgatagaagtttgctaatgtacagatggcttccacaatggagagaaaggtaccaaatgctgtaagatcaacacatccaccaccattacttacagggttggtggtaaaaataacaattactgaataataattgcattaatgcatccaaattacttggaatcacaatagcaggcaatcaggaatgctaatgatactatatatacatatgcaaatcctatttactcctaagcaacggagagagggccgaagcgtcatcaatctgggtgttcaggacttcttacctaaatctgggcaccagacaagaacgccaaggctcctaccaaaacacaaaacaatttggaacggcatgcatttgccagaatgcctcttccaggcggtcttgccagtcttgggaacttcctggcacttgcagttcaaataccaccacaattcaagacaaaagggcgttgcgtcttcagcacaggaagcagtaatgaagaaacattggaatttcctcaaatgatcatatcagaattagggcaaagtcaatggttagcagtccctgttagtaactgaggcatgatggtccaggtcgacggattcatgtgatgagttcatactgctcaatttgatggtgtcacctatgactgacagcttagactttgaagccagcagcttggcctcctcgtaggagtaaatataaatccgtttcaccatgctacaaaattcatcccaaggatcatccccgacaagcatcatgtcatcctcatcatcggtgtaaacaacttgccatctctgcagggagggac

SEQ ID NO: 391224 - DNA, 520 bp, Oryza sativa
aacgaacgctgcttttcgacgaagaaaaggagggttcctcgctctgacgccttgcgcagttgtaccgtacattcgtactaccacacagcttgaagaagaagagggaattcgacgagaaatagtagaagcttggcgttcgtgcgaggaattctcggtggttgatcgatccgtgtttcgcggcggatggggcaggcgttccgcaagctgttcgatgccttcttcggcaccagcgagatgagggtcgtgatgcttgggctggatgccgcgggcaaaaccaccatcctgtacaagctgcacatcggggaggtcctttcgactgttcctacgattgggttcaatgttgagaaagtacagtacaagaacgtgatgtttacagtatgggatgtcggtggccaagagaagttgaggcctctgtggaggcattacttcaataatacggatggtttgatctatgtagttgattcattggatagagagagaatcggaaaagcgaaacgggagtttcaggcaatcgttaatt

SEQ ID NO: 391225 - DNA, 639 bp, Oryza sativa
  unsure (1)..(639): unsure at all n locations
gttgggcccagttaaacgagcaacggtgacatgggatgaaccggacctgttgcagaatgtgaaatgtgtcagcccatggcttgtggagcttgtgtcaagtattccaccaatccatttaggaccattttcgtcacctcgaaagaagttgcgggttcccccacatcctgacttcccatttgagggtcatcttctgaacccaattttccatgggaacccacttggtcctagcaacagcccactatgctgttacccggacaccgctcctgcaggcatacagggagccaggcatgctcaatttggtttaccactaacagaccaccagcttaacaagctgcaccttggtctgttacatagcggcagttttaacagacttgatgctattactccaccttcccggatatcaaagggctttgtggtcagtagtgcaccagcccatgacaatatctcttgtttgttgtcaatcagtacaccacaggtcgcagagaaatctgatgacagaaagacgacaccccatataatgctgtttggaaaggctatatttactgagcagcagataacttcaagcggatcaacagagacactctcccctggagttactngaaatagctcacctaatggcaatgcgcacaagacaggaaa

SEQ ID NO: 391226 - DNA, 494 bp, Oryza sativa
gggccaataagcctggggaaatgcccaagtggcgttggcgacataggttggctgaggatggtgcagcctgtcattcaggaacgcatcgatcggttctctcagaatgagataagggtcagcgtcatggctatcctaaagaaccggagggagaagttcactttagaactcaaggagcttcacaggaagagggagaacctcctggcacagatgggtgatccttccgccaataggcacgcgccatctgttgagcactctcttgcggaggttgctgctcatattgaggctgtaacagagaagatcataatggaggaagagaagtggaagaagtggaagacagagaacatcaggaggaagcacaactatgtgccattcttgttcaatttcctcaagattcttgaggagaggcagcagttgaagcccctgatagagaaggcgaaacagaagtctcacagctctgctaatcctaggtgaaatcaactgttatttgtctcgat

SEQ ID NO: 391227 - DNA, 473 bp, Oryza sativa
cccacgcgtccgcccacgcgtccgcccacgcgtgcgcgcagcttcagcgcaccggcggcacccttggcggtgacctcgaccgctccaccggctgtatccacctcagcgacctcagtcaggtgaggaaaacgcttaagaactttttcctaggaaggaatgatctatacctactacaagttgacacttccaagctttcagatggcttagtttatgaggcagctgatgattcaaactattttcctcatttctatggccctggtcggagttttgcacctcttcaactagacgctgttatcaaggaggcagagaaaatagttctggtaaacaatgatttcacctgcagtctacttgatggagcagaccccttatcgtgatgtgtaagggtgacctttcccttgatctttataatgttttgaaaaattcgctacaagacgctcaaaagtttgcagtattttgaaaaaaaagctgcaaaa

SEQ ID NO: 391228 - DNA, 821 bp, Oryza sativa
cccacgcgtccgcccacgcgtccgcttggagtttgttcaatgatacatatagcttcactcgtggcaatgagaacttgacagtagacaagaaggacatctcttggaaaagtgatagggagcacaaatttggcaaaaatgtctatccaagcaactttcagaatggtttgctcaaaggtggaggaacacttgatccggcaatcccattgagtgagcaagaggaccttatcgtttggatgcggactgcggcacttcctacattcagaaagttgtatgggagaatatatgttgacctcaagaagaatgataccataactgtgaagctgagtaacaactacaatacatataactttggtggcaagaaaaagctggtcctttctactgcaacctggcttggtgggaagaatgattttctaggatttgcgtatgttatagtcggaggggtctgctttttcttggcatttgctttcaccttgctatacctcataaaaccaaggaaattgggtgatcacaactacttgtcctggaacagacatcctggaggccgttaagacgtccaaaacacttgtcgcataaaaatggctcatccggtgccatgtatcatgctcctaaatgatgatatactgaaaattgtcagggagtgtaatcaggtctttggtttgacctagcccttcatgtacatcttagcataagaaccccgctgttttgtttcattgtttcttttgttatttcgggactgcatatagcagtgatgaatagaatcggtactgattgttttgtgatgaatagaatcctatcattctgaatgcctaaaccgttctgtt

SEQ ID NO: 391229 - DNA, 1019 bp, Oryza sativa
  unsure (1)..(1019): unsure at all n locations
cccacgcgtccggcctcctcccccgtctgtactgactactgagatggaagcgagcaagtgaaagagagagattcctggcttcctgcctcacgcgcacgcacaccaacctcaagccatcgggcgctctccccccgcacttctcccaccgccaccgaggcacggctctcgaaccttcccactgcttcctccctccctcccctcccctccccgcgacgagacgagacgagaccggcggcggcggccggagtcaagagccttccctatgcagcggcggcggggcctcgccgcgctcgccgtcctcctcgccctcgcggcgcgcggcgcggacgcgtccgtccacgagtactcgggcggggggttcgcgccgcgggccaactccttcttcttccacggcggcagcgaggggctgtacgcctccgaccccacctccaactcctccgcctccttcatcaggtttgactctgtcacatttcgacggacccaggagtcagcaggtaggcatgaggctatgcagcaaaagacagggttagttgaggctattattgttgagatccaggacagaagcaagattggtggttcttacttgcattctgatgcaatatgctgcactcctgagctcgataaagagaagtcctgcaaagttggtgaagtaattatacagccaaatcctgataatcctgactggccaaaaagggttcagacattttttagtggtagagatgaagaagctagcatggtcacacaagttgtatctataaacaaaacagggatgtactacctctattttatgttctgtgatccacagctcaagggattgaagattacaggcaggactgtttggcgaaacccacaaggttatctccctggtaaaatggccccaatgatgacattttatggtttcatgtcgcttgcatatcttgtacttggacttctgngggttcttcagattgggcgaagctggaaggatattttgagctgcctaccatataacagctgctaatggtctttgcatgcgccac

SEQ ID NO: 391230 - DNA, 504 bp, Oryza sativa
tcgtccgaaacctcgagaccctagatcgccgtgtggcctcctccgccgccgccgccttctaccgcgacagggaggacgcggcgccgccgtcgtccggccccgggggaggcggcgccatggcggcgtacgacccgagctacgtgccggactcggtgaagacgttcgtgtcgcacctctaccgccacatccgcgaccgcaacgtgtacgagacgcaccagatgtacgagggcgggttcacccgcctctccgaccgccactttcgcgacacgccgtggccgccggcggaggccgtggcggcgcactgcgacggcgaccacgtcttcctcctcctctaccgggagctctggttccgccacgcccacgcccgcgtctcagggcctcaccccggcgcagcgcgccgagtcgtgggacaactactgctccctcttcagcgtcgtcctccagggcgttcgtcaacatgcagctccccaaccagtggctctgggacatggtcgacgagttcgt

SEQ ID NO: 391231 - DNA, 623 bp, Oryza sativa
  unsure (1)..(623): unsure at all n locations
gaagaagcagcctgcgccgccgccgcagccaccgacgacgacgacgacggtgctgcctgagccggtgaaggcgatcgaggcagctgccaagaaggcggcggcggcgccgtccgcgcgtggcgctaacgaggaggacatcaagcctgcgctcagctcctccagggcgtcgtcaacatgcagctccccaaccagtggctctgggacatggtcgacgagttcgtctaccagttccagagcttctgccagtaccgcgccaagctcaagaacaagacccacgaggagatcgccctcctcaagcagtacgaccaggcatggagtgtttatggcgttcttaattccttgaaagcactggtggagaagtcaatgattggagagatcctggagagggtgaaggtagggcttgaacagttcacggcaactgatgggtatgactatgagggcgggagnaatgtnttgaagatgctggggtactacagcatgattggnctgctcagggtgcattgccttctttnggggattaccatactggggctcaagtgcttgggctccaataggttataaggccagcaggggtgtctacaccactgttatttggagccacatttcccctatttatcactatn

SEQ ID NO: 391232 - DNA, 477 bp, Oryza sativa
gtcttcttaagcgcgaaaccctagcaatggcggcggcggcggcggaggggggcggcggcggaggtggggcggtgtacgacccgagctacgtgccggactcggtgaagacgttcgtggcgcacatgtacaggcacgtcagggacaagaacgtgtacgagatccaccagatgtacgagggcgggttccagcggctctccgaccgcctcttccgcgacgcgccgtggccggcggcggaggccgtctcgccctactgcgacggcgaccacgtcttcctcctcctctaccgggagctctggtaccggcacgcctacgcgcgggccttctcgtcgtcgtcgtcgtccgcgccgctcaccgccggccagcgcgccgagtcgtgggcgaactactgcgacctcttcagcgtcgtcctccacggcgttcgtcaacatgcagctccccaaccaggggctctgggacatggtcgacgagttcgtctac

SEQ ID NO: 391233 - DNA, 1348 bp, Oryza sativa
caataagccagtctcacttcctcttgactctactgtaccatctgccagcagtaataagcctatgaatatacctgtgccaacctatctaccttcctctcagccaccattggctaatattgcagcaagtgcagccactgttgcagaaccagttacattggtcactcctggccaacttctaccaaccatttcatctacagtcctttcggctgatgccttggaaacagcttcagctatgattccatcccctaaggctgcctcctctatggtctcatcctctcaggctgccttggctgcatcctctcaggttacttcctctgtagtttcaccctcagaggatcaatttgcttcctcacctgttccatcacatcaacagctggagcaaaacaatgaagataggcacaccaagaaacctgaatggaaggctaaacaacactctgttgctccatccaacaaggaacccctgttgccagcacctaagcctactcttcagaagcctgttggagcttcctcatacattcaatacaacaatagaggccgaggaagaggaagaggccgaggaagaggaattgggcaatcacgtcctataaccaagtttacagaggacttcgatttcatggcaatgaatgagaagtttaacaaagatgaagtatggggccatctcggtaaaagcaaaggacagttgaacgatgatcctaatgagtatgaagatgatgttctagaagatgatatttctcctgggaagccagaagttaagcctgtatatgtcaaagatgacttctttgattcactgtcatgcaataccattgataatggaggggggaatggaagaatcaaattctcggagcagagaaaaatagacacagagacttttggtgattctgcaaggcatcggcccatgggcatgcgtggaggagggaggggtccccgtggtggaccccgtggacgtggttactatgggagggggtatggatatatgggaagggggcgcggctactcctacccaaaccaccaatcttagtaaggagggctatgcttttccattccgatgagcagatgaatggtggttgaatggtgatgaagaaggaagagcttttatggctatatttgtagtgtaatctcgcaggtatctcaggtcccggcttgttggcacgaacgggcctcaacaacaaagcaatcaatttgataaattaagaaattctcccaacgagttttctgtagagcttttacctgctttcctgaatccctgtcaatgttgatacccgttgctctccctgaggacgcagatgggatataaactaaaaactattttgtgagtcagcgaatgattatatccagtgttaattttggt

SEQ ID NO: 391234 - DNA, 474 bp, Oryza sativa
  unsure (1)..(474): unsure at all n locations
ccttcgtcgtcttcgtcatcgtctccaacctccgatttcaattccagcgcgggagccgtaatcccctccacttccgtacgattccagcgcggtggggtgggcgaggtgcgtggccatggcggacgcggcggtggagctgcctggacggctcgcgatactgccgttccgcaacaaggtgctcctcccgggggccatcgtgcggatccgctgcaccaaccccagcagtgtgaagcttgtggagcaggaactctggcaacgggaggagaagggtctgatcggggtgctccctgtgcatgactccgaagctgctggctcattgctgtctcctggtgtaggcagcgattcaggtgagggtgggagcaaggcgcctggtggttctgcaggagaatcaacgaagcaggatactaagaatgggaaggagaccattcactggcacagccgnngagtagctgctagggctttgcacctttcaga

SEQ ID NO: 391235 - DNA, 561 bp, Oryza sativa
gtttttgacgccgcgccccccaagccgcctccgcagcggaaggaggaagagcagcagcagcagcagcaggaggaggcgggggcgtttgtgccttatccggaccctgtacaggtgggcgagatcacgctcgagcagctcgcggcctacgacggcaaggaccccgcgaagccgatcctaatcgccatccgcggccaggtctacgacggcgcgcgcgggaggctcttttatggtcctcaaggaccatattccttgtttgctgggagggatgcaactcgggcccttgcattgatgtcgtttgaccctattgacctcactggagatttggatggccttggtccagacgagctagaggtcttgcaagattgggaagataagtttaaagagcggtatcctacggtgggccaccttgcttcagaaaatgcagcggatggtaaccacggtggcgcagcttgatcacgaggaagggatgctttactccatcggtttgtcagtttctctggtcttttttactggattgcaagtgggtagatctgatcatatgatgctctggtaggctctgtt

SEQ ID NO: 391236 - DNA, 392 bp, Oryza sativa
agccaaaccaagaagacatccacatgacgacgcctcgcgccaccaccaccacgtcgcccttctcctctctcctcctcctcccgatctccccctccgccgcgactcctccgcgccgcgccaggacgccgccgccggcggtggcacatggcggcgtgcggtggacggctggcgggaggcggcgacggcgagggtgccgggcggcggcggcggtggtcgaggacggcgtgcttctccccaaagaacaggaggacgacgcgtcggcggcgagatacgactggagggaggagtggtacccgctgtacctcgccaaggaggtgcccgacgacgccgcgctgccgcacggtgtctaccggcgctggtgctgtaccgagacgctcagcgtgcttcgtgca

SEQ ID NO: 391237 - DNA, 539 bp, Oryza sativa
ccgatcgccacccgcctcgtcgtcttcctcgcgaactctccacccccaccaccatggcgatggcgatggcgatgcgacgcgcggcggcgtccggcgcgcgccacatcctcgccgcctcgtccacctcctcctccggcgtcctcctccgccgccacatgagcgtggacgcgggggcggcgatggagaaggtacgggcggcggggctgctccggacgcaggggctcatcggcggcaaatgggtggacgcctacaacggcaagaccatcgaggttcaaaatccagcaactggagagactcttgccaatgtgtcctgtatgggcagcaaagaaacatctgatgcaatagcttcagctcacagtacattctattcttggagcaaactcactgcaaatgagaggagcaaggctctaagaaaatggcatgatttaattatctcacacaaggaagaacttgcacttctcatgacactggagccagggaaacctatgaaagaggctcttgttgaggtcacatatggtgcaaggtttattgaatacttt

SEQ ID NO: 391238 - DNA, 536 bp, Oryza sativa
cccacgcgtccgcccacgcgtccggccattttcaggtgcggtaccagagcagaaagaggctggccgagcagcggccaagggtccgcggacagttcgtgcggcaagctgtgcaagaccaacaacagcagggtggtgggcgcgaagcggcagcggacagatgacctacctacctacctacgcgatggctttggactccaaacagctaattaacagttagtagacaacagataatgattcttcttccttggccgatcgatcaacaacatcccatgcatccggcatcccaccaccattgattccatcatatttagagtctggaataaataaggaactcctatcctatttatcccctatctatatatgaagatatgataatggtgatctgcgttactactagtagaagaatatggtgtggctgactccacttcaggtggacctataatactactccattagtatgtgcctgtggaggcaagctcgaacgtactacttcatatttaagcatgtcatgtactgctactatgagacgagagtgc

SEQ ID NO: 391239 - DNA, 867 bp, Oryza sativa
cccacgcgtccgcccacgcgtccgggaagtgctgaattctgaaaaccacaatcttacgttctcatttgatgctgccgtcaacataatctctcgtgaatgcaagagttttaacctacctaatgcaaaactgagttttcttccaacgattaacaatgaccattggactattttctgcttcaacttcaaccacaaacgaatcgatatacttgattcattaggacatgacagagacgagaaagctctaaaggctatgaaagacagagtggttggtaggttccttgatgttcttgatgtgatgttcccaaagaagttcacagatgttaggaagtggaaatgctatcatgcttgtaaccaaaagcaagtcttgacaaatgattgtggctttttagcgatgaaatacattcagttctgggatggcaaagtttttgtgaagaaagtttgccctaaggatggaacaaaatatcgtgcggaggtcctctattacatactcttccacccactgaacgaggcgaactccctgcggctattgagcgatataggcctaagattaggaagatctccaagtagttcagctctgttcttttttccaagttgtcttttggaactttgtacctaaatgattgcagtaacatacttagatgctggtagtaacataattagttggtggcagtaacacgagactgttaggaacattgccacgttttttaagtaatgaaggtgtacagtggcagtaacgtacttggatgctggtagtaaaaatacttagttggtggcagtaacaggagactgttaggaacattgccacatttttgcagtaacgaattatatagtggcaggaacataccatatattataagtcttttgtgt

SEQ ID NO: 391240 - DNA, 460 bp, Oryza sativa
  unsure (1)..(460): unsure at all n locations
cggacgcgtgggttcttatccacttctcttctctccttctcactctcctcctccctcccggcctccccaccagcaacggcggcggcggccctggtggcggtgaccggcggcggcggcttttggaggtggtgactggcggctccccatgccgccctgccctcccatcccctcctcacccctctcccagatctatccgaggggaggaggccgccgtcggcgtcacaaccgaggggagcacacagcgcggtggagctgacgacacggcgggcggtaggtgtgcacgcgggcggtggcagatctgacgacgacgaccacgaccgcggcgacgacgacgacgacgctgcaggccgtgctaggtgacagaggaggcctgccacggcggccggcggcggatgtgcacgcggcgcggtagcacgcgggcggcggcgaatctgacgacgacgaccatgaccgcggcgan

SEQ ID NO: 391241 - DNA, 477 bp, Oryza sativa
tgggatgcaaaggataaggggggagagattagattatagagatagccatggagggaggtgttcatgagttcgatggctcaaccttcagagagtgcttctccctctcatggaggaacccttatgtccttaggctcgccttctccgccggcatcggtggcctcctcttcggctacgacaccggtgtgatttcaggagctctgctttacatccgtgacgatttcccttcagttgacaagaacacatggcttcaggagatgatcgtgagcatggcggtggccggcgcgatcatcggggcggcgatcggcgggtgggcgaacgaccggttcggccgccggacgtcgatcctggtggccgacgcgctcttcttcgccggcgcggcggtcatggcgtcggcgacggggccggcgcagctggtggtggggcgggtgttcgtcgggctcggcgtcgggacggcgtccatgacgtcgccgctgtaca

SEQ ID NO: 391242 - DNA, 887 bp, Oryza sativa
tggacttttagttttcatcctttgtttgtgttattgttctcagctctcactacaaggtatagcttgtgcatgttgaattgattgatatacccagcagccattaagttaaaaagatgtctgtgaaggaaatagacatccatcttgttggttagtgttattgtactcagctctcactccaggcctgttggttagtgttattgtactcagctctcactccaggctagatcttgtgcatgttgaattgatagatattcccagcagtcatttatcagtctgtttgcgcttcctttggattatttttgcacatccttctatcaattgtttgtgcgaaagcttcaatgctctttaaacatgctcgcgccaactgcaagccagcttttgcacaccatgaattgtatatatgctgtgaaagggtagtcctcaataggtaaactggatgctatagacccatccaaaacattttcccccttccattaggatattatcctggaaaaaacaagtagtgctcggtccgaattagaaaaagcagagataacgatcattcaatatgcttgtcagtgcttcttgtgctctacttttgcagaaagttcatgtccagatacatttagttttgttgatacatctatttttgctctccatagcttgctgtgtagacttgtgtatgaggtaagacttgggtttttaccccttctattctgtttataatgcctatccagaatttataaatctgtgtaatcctttgtaccctttggttgtaggtttacatcagacgtcaagatcaagagcatctctgttgttggtggtgcagatggaacaagcccttctagaatgagagcgtttatcaaccgagaaggcattgacttcaatgatgctcaaaatatgcaacc

SEQ ID NO: 391243 - DNA, 409 bp, Oryza sativa
  unsure (1)..(409): unsure at all n locations
aaaattaactggcttctaccccaggaaaactaactagggccgcctgtctcttcgatgtagctaggattaattgaagttacaagtaatcgatgatgtatacaatatagtacgatcgagtatatatacatatacatagggaattaatatatggaagaaataattagcagcaagattatatgagaagaaacaagataagtaataatgaagtggatcgagtagctagctagctagctagcgtgccatgtcgggcttgggggagtagatgcttccggcgtgctgctccgatacggtggacatctcccaggtgagcttcagggcggtggcgtcgtgcggcggcggcacgtattcctcgagcttgcagagcangtcggaagcggtgggtgcggcgacaatgatgcggcgggcgggc

SEQ ID NO: 391244 - DNA, 554 bp, Oryza sativa
tctttctcagggaggaggaggagaaggcgaaggcgaagcaaagcaaaacctcggaagagcggcagagcccactccacacgcggagaggagaccacgccgccgccggaagccatggccgccgccaccgccgccgccttcgcggagcccaagaccaagtacgatcgccagctcaggatatggggtgatcaaggacaggctgcactggagaaggctagcatatgcttgcttacctgtggccctacaggaactgaagcgatgaagaaccttgtgcttggaggagtagggagtgttactgttgttgatggttccaaagttgaacaatctgacatgggaaacaatttcctgttggatgcagaatgcttggggcaatcaagagcaaaatctgtatgttcgttcctgcaagagctgaatgatgctgtaaatgccaagtttgtcgaggagtctcctctggctctcatagacacaaacccttcattcttttcccatattaccgtagtcattgctactcagcttccagagagatccttactgatactagatgatatctgcaggaa

SEQ ID NO: 391245 - DNA, 729 bp, Oryza sativa
  unsure (1)..(729): unsure at all n locations
acgcccacgcgttgtgagaattcttaattcatgagttgtagggagggacgtatgtcaccacaaacagaaactaaagcaagtgttggatttaaagctggtgttaaggattataaattgacttactacaccccggagtacgaaaccaaggacactgatatcttggcagcattccgagtaactcctcagccgggggttccgcccgaagaagcaggggctgcagtagctgccgaatcttctactggtacatggacaactgtttggactgatggacttaccagtcttgatcgttacaaaggccgatgctatcacatcgagcccgttgttggggaggataatcaatatatcgcttatgtagcttatccattagacctatttgaagagggttctgttactaacatgtttacttccattgtgggtaacgtatttggttttcaaagccctacgcgctctacgtctggaggatctgcgaattccccctacttattcaaaaactttccaaggtccgcctcatggtatccaagttgaaagggataagttgaacaaatacgggtcgtcctttattgggatgtactattaaaccaaaattgggattatctgcaaaaaattatggtagagcatgttatgagtgtctacgcggtggacttgatttaccaaagatgatgnaaacggnaactcacaaccatttatgcgtggagggaccgtttggcctttgtgccgaagctatttata

SEQ ID NO: 391246 - DNA, 348 bp, Oryza sativa
cccacgcgtccgtgagtttgtcgcttctgcaaggctactcctccgccgaggaagacgacccagccgccgccggcgccggcgctggcgagctgagcgactccggcgactcctccgctgaggacgccggatcagacggcgaggaggcttccgctgctccgaggccagccgcgaagcccgcccccgcccaaaccctagccgcggggatgctggcggcggcggcggggacggctcattgctgccctcagcactggatgccttcgcggagatatcgggcccgtcggagttcctgaacaatagagtcgccgagcccgaggaggccgtggaggcgctcggagtgcttgaacggcg

SEQ ID NO: 391247 - DNA, 416 bp, Oryza sativa
  unsure (1)..(416): unsure at all n locations
ctacttggcacagcttgacatcgccagagcagcagaaaagtttgctcgatcgagctagctaactaggtcgtcggatcagtgataaatcgttcgccgatggatccgtggattagcacccagccttcgctgagcctggacctccgcgtcgggctgccggcgacggcggccgtcgccatggttaagcccaaggtgctcgtcgaggaggacttctttcaccagcagcctctcaagaaagacccagaggttgcggcgctggaggcggagctgaagcggatgggcgcggagaaccggcagctgagcgagatgctggcggcggtggcggccaagtacgaggcgctgcagagcccagttcagcgacatggtcaccgccagcgccacagcgggggnngaattaaagatcagctatcacctcacct

SEQ ID NO: 391248 - DNA, 506 bp, Oryza sativa
gccaagcgagcggaggaggaaaaatcaatctgccgctaccctcctcgtcggtgtcgggctatttatacactccactccctcctccctccccttcctagttcggcccaccccccccccctctcccctccacgccccgctccgatccactcagtgagcgaagatggctccaacatccatgagccttgctgcaaagacgccgcttcccttctcgacacttccttcgagtggcgttgcacagaggccagtttctgtgactgcctccctcgagcacaagactaatgatgccagaaggaagttcctaaagctcgcgcttgggaacctcggggtcgggcttcccaccttgttgggtgctaagagagctcttgcttgaagagcaaggtgtctcgtcggtcgagaatgtctttactcgaggttccttgagtatctagacaagggacagagttaagaaggttgatttgtttgagaattggaaggtttccattgtagaggctattttttctgagctc

SEQ ID NO: 391249 - DNA, 461 bp, Oryza sativa
ggcaggcgtccggccaagcgtccggggaaagccagctctcatctccaaactaatcaggcccatgagccgaagacctctgaggtggctttagcaatgtcatcgggagagctcgccaagggaactgactggaaagaagaaactgactaaacatgacgatgaagcattaaggtttattgagctggctgagaatggtaccgaccccgcaactatcgatgcatccgaaggtatgtagaacctaccatttacattgtcattacaacattttttttctgtttcttaacagccaaggtatgcagaattggcaaagaagccgttatgcacttacacatataggacactttttcgcacttttaactacaaaaggaggcgtcatgtgcatcactactccgacgaggcacatgttactcttactcattatttagaggagtttttgggcactgatgtttgcaaaaaggatagca

SEQ ID NO: 391250 - DNA, 618 bp, Oryza sativa
gagcagatgacgatatgagctactagcagcagcagcatccaacgacagaaagggaagagattttcccttatcctcttgatggagctcctcctgcgtccctcccctccgccgccgtgggcgattccacggcggagctctggcgagagaaccaaaccctgccgctcccgctcccgctcccgcacgggaacctctaagcaaacatttcctgtccctttactggttggcaaggttggaagacgtccgtttcctgtgcagtgttctatagttcgatgctgcttgtcatcaactgatgccatccattctacaagtgatgacatccatgaagataatggacacggccattttcttatgaagtctacatctgaccttcagaaagtgatatcttcctgttttggggaaaagcatgtcttctcagttctgtcatgcttgttctaccacccagttgtttcgcagaaccgtgtgagccagagtactctctacctaacatgcctttgctttttgcaattgccatgattggagctaccgttggagggctccttgcaagacaacggagaggggagcttaaacgattgaatgatcagctacgtcagataaatgcagcactgagaagacaagcca

SEQ ID NO: 391251 - DNA, 453 bp, Oryza sativa
ggcaggcagacaggcaggccagagcggcgtgagtgagctatacaggaaggcagttagcccgtggccagcctaagaaggtgatagcatgggacttaatgggaaatggaggaaggccatgccatacatggcgatggtcttcctacagttcggcttcgccgggctgttcctcatctccgtcgcgtcgctacggcaaggcatgagccactacgtgctcgtcgtataccggaatgccgtcgccgccgtcgtcatggcaccattcgcgctctggttcgagaggaaaacaaggcccaaaatgacgctttctgtgtttttcaagattatggctctgggactactcgagcctgtgcttgaccaaaacttcttctatatgggagccaagaacacgtcggcgagcttcttatcagcactcaccaacatattacctgcttgaacgtttggtaatgccatcatact

SEQ ID NO: 391252 - DNA, 816 bp, Oryza sativa
ggtcatgggtggttggcgtttggagatcggtttggtcgtcccgcgggtcgagacgatcttgagttatatggagtcgggggattttgtgcaaaagaacgatttgtttcccttcctttctttctcgtggagcttcggattcggatgcgtacgagcgtgggttcgccagagatggatttcttcagcgaatatggtgatgctaacagatacaaaatacaggaagtcattggcaaaggaagctatggtgtagtttgttcagctattgaccaacatactggcgacaaggttgcaatcaagaaaatacacaatatctttgagcacttatctgatgctgcccgaatcctccgtgagatcaaattgctccggctattacggcatcctgatataggtgagatcaagcatataatgctacctccatcaaggagggacttcaaggacatatatgttgtctttgagctgatggataccgatctccaccaagtcatcaaggcaaatgatgacttaaccaaagaacatcatcagttctttctttatcagatgcttcgtgctttgaaatatattcatactggtatgcttccttttagaaactgaggtctgagctagcacagcgtttattgatgactgtaatatttgtttagtgttgagggataatttattctctgaaatgttgggtaaagtttattcacatttttttgggttctttgttatgcttcatgaagagcataaacgatcttgtagtgtgctcgcacatgaatttggcacagtgctagcccaataaataagtcccctataaataaaggaaattgtcattcccccatc

SEQ ID NO: 391253 - DNA, 533 bp, Oryza sativa
tcgttgacgcgtgggctcctacgattcgaaaccctagctcgtctctctctgtgctagattccatggcgacggcgggtagtaggaagggcgggaggggccggaaggcgctgacggcggtgctggacaacgacgctaacatctccgccgggaaggccgacgtggccgctgccgccgggatcctgtcgccgccgcagaaggcgaagagggcgacgtcgaagagcagcaaggggaaggccgcggctgcggcggcggcggaggaacaggcgtcggtggtggacgcggtgtcggagctgcaggggatgctggaggagctgcggctggagaaggagaaggcggaggagatggtgcgggagcgggacgaggtcatccgcagaaggaggaggagcagggtcgcctccaggccgagctcaagaaggtccagcgcgccaaggagttcaagcccaccgtgagcattcctctcgtgaaggcattgatcgagaaagaccaggagggagagatgaagagggcaagggcaaggcccgtcatgacaggaa

SEQ ID NO: 391254 - DNA, 436 bp, Oryza sativa
ccgtcttcgtcttgtccggcggcaccctctctctctctctctctctctctctctctcctcccctttgttccgccgcttcccctctctctctacctctcgcggcgaattcgccgagagggcgcagggaattttattaggagaaatcccctttttgtatccgtttctccggatccgcacacctcctgttaatccgccgattcttctttgatttgttcatattcgctttttttatttttttccctttgtttgcctttttattcgctcgattgtggggggagggaagagtttggtcgaccggatttcttggtgggtttgcctggatctggcgtcctagaggccctcgtgccccaatcccgattcgtttcgcctcggcgcggcgccgctcgcctcgaccggtttggatctccgggtgggacttaaggggaaaggggggggg

SEQ ID NO: 391255 - DNA, 451 bp, Oryza sativa
cccacgcgtccgcccacgcgtccgcccacgcgtccgcccacgcgtccgcggacgcgtgggcgactcccgtctcctcgcctgccgccggcgccgatctccatcctgctagcagaggtggcgccggcgttctcctgctcccgccacatcatcgctaatccatcccatccggcctcggccaccccactgcttctacgagttccatacccagaccgccgccgccgccgccgccgccattggtgaagcccgtcgccatcgccgtcgccgcttccacgcaagtccgtagcagcggattcctgcagcgccccccgaaacatcccgaatccccagccatggcggccggagcagcagcagccacccgccgcagtctctccgcgctccttctctcctcccgcgctctgcaacgccgctatcgcccgctcgccgccgccgcctcctcagactacctcgcccc

SEQ ID NO: 391256 - DNA, 534 bp, Oryza sativa
ctccaccttatccctttcgcacgaccgcatctcccgcacacgcgcacgcacgctcgcacgcagggatccggccgcttcccccgttgccgctctcttgtactaccagtgccggttgcctcgcctagctagctgctggcctggccggcgtcgcgtgccttcatggcctcgctcctacccagtccggtgttccccaccgccgccgccgccgcggcgtccacatcctcgtcctcgaggtgccggtgccggtgccgcatcacaacgtcatcttcggcgcgcggttggtcctactgtcagggctggagactccatcaccgggtttgggccgcccaggctgctgatcaacaaggaggggtgcagcagcagcaacaacaagaagaaaatgaagacggtgtagtcgacagcaacgtgctcccctactgtagcatcaaccggaaggagaagaagactattggggagatggagcaggagtttctccaggcgctgcaggccttttattacgacaagaaggccgtaatgtcgaacgaggagttcgat

SEQ ID NO: 391257 - DNA, 575 bp, Oryza sativa
actccactggttcttcttatctccctctctcttccttttctcttccttctcaccgatcctggaatggtctcggagggttcttagctggcttttcgattggattagcagcagccgggtcagacggagcggaggccgtgccggagaagggagaaggaaagtttcaggtgaacatctaacatggatgatcacatgggaagacggacagttggtggccttctcttcaccaaggggggctcaattcttctcttcagagaagacagtgcgcgtcacaaggccaccaattgctgcacgcgacacggttgcagcagcaagcatttggccggcaaagacaagcaaacacacagggcagcaacagcagccaaggaagcatcagaaacccctcggagatcacagattttcaggaaacccagcacgaggactcctcagggaagtactgctactgataacatcagcaggaatgcagcaagctcctatagcgaaaacgacaataggccaagagacactccgggcgtgatttaatcgctcgtctaaagagagggtcaatgcatcaagatacgatcattgacagagaaaca

SEQ ID NO: 391258 - DNA, 1002 bp, Oryza sativa
  unsure (1)..(1002): unsure at all n locations
caatgactcacagaggacagcaacaaaagatgctggacgtattgcaggattggaagttctccgcattataaatgagccgactgctgcatcccttgcttatggttttgagaagaaaaacaacgaaacgattcttgtgtttgacttgggaggcggtacctttgatgtctctgtattggaggttggagatggtgtgtttgaggtgctttccacatctggtgacacacaccttggtggcgatgacttcgataagaaagttgtggattggcttgctagcaactttaagaaagatgaaggcattgatcttctgaaagacaaacaagccctgcagcgactcactgaggcagcagaggaaagcgaagatggaactgtctacgctgtctcagacaaacattagcttgcctttcataactgctactgctgatgggcctaaacacatcgagacaactctctccagagccaaatttgaggagctatgttcggacctcattgataggcttaaaactcctgtcactaatgccttgagagatgccaaactgtctgttgataacctggacgaagtgattcttgttggtggatccactcgtatcccttccgtgcaagagcttgtgaagaagatcactggcaaggatcccaatgtcacagtcaaccctgatgaggttgtttctcttggggcagctgtacagggtggagttttggccggagatgtgaaagatgtcgttcttcttgatgttactccattgtctcttggtctggagacgttcggtggagtgatgaccaagattattcccagaaacacaacactgcccacctcaaaatcagaggtattctccacagctgcagatggacagacaagtgttgagataaatggtcttcagggagagagagagtttgtccgggacaacaagtctcttggaagcttncgcttggatggaatccctcctgcaccacntggtggtccacaattggaagcaaggttggtattgatgcccatggattctcttt

SEQ ID NO: 391259 - DNA, 296 bp, Oryza sativa
gctcttgaaacctcgcgacctccaccaactccgatcgaacagcccaatcgaccatggccgccgccgccgcccgttccggcgcgcatccgccatcgttcgcctcctcgctcggccggtgcagggttcttccagtcgtggtggtgcgtcggccgggcggtgccgcgaggccgtcaccgctgctcgctccggcgaggtgcgccgccgccgtcgggacggcggcgcccaaggtggagggcggcggacggcggtcgtcggaccacgggcagctggcggtggcgcctgcgcggctggtggat

SEQ ID NO: 391260 - DNA, 463 bp, Oryza sativa
acacgtcatcgcgcccccttctccttcctctcctcttctctcctctcctttccccaattgcttcctcctcctcctcctccttctgcacctgtccgattcggttcgattcggtttgattgggttccaatctgcggaggagcggcaacgagctaggcggaacagagggttggtcgtcggatccgtggcatggagatctcgttcgaggcgtgggagggcgtgcagcggcacggccaggacatcgcggaccgcctcgcgcaggggttcaccggcctgctccaggcgcacccgccgcagttcccgtggccggcggcgtcgcacaagcggattcccttcgagatcgacctccccgtggtccccttcggcgcctcccgcgggtgcccgggccgggaaggagtttttccccgccgcggccgtcgctccgtaatcgaaatcggcggaaggtcggcaaggttgcgttgagatt

SEQ ID NO: 391261 - DNA, 379 bp, Oryza sativa
  unsure (1)..(379): unsure at all n locations
atcgactccttcttcctcgagcaggaggaggagttcgtcatccgccatagggcacgtacaccaattcgcttcaattcgtttgtgaatttagataagttttctgatggcgaaatgggttcttgccttcttggttgcaggagttgcaggaggcgatcaagaaggcggcggaggcggcggcggaggtggccggaatccggcgggagatcgtggacttccacggcgagatggtgctgctgctgagctacagcagcatcaactacatcggggtgggcaagatcctcaagaagcacgacaagcgcaccggcggcgngcttgncggcncggtggcggaggcggtgcggganaaacggcacttcttcaagacggagacggtgtcgcg

SEQ ID NO: 391262 - DNA, 527 bp, Oryza sativa
ctttcgtaccaaaaaccgaatcgaacgccgcgtgcgtgagagagagagagagagagagagagagaaaccaccccaaaattagcgaggcgaggaggaggaggcggaggaggggagccgcaggaatggcggcgatgcagagctggcgcaaggcgtacggcgcgctcaaggactccaccaccgtcagcctcgccaacctcaactccgacttcaaggatctggatgtggcgatcgtgaaggcgactaaccacgtggagtgccctcccaaggagcgccacctgcgcaagattgttgccgcgacgtccatcgctcggcctcgggcagacgtcgcctattgtatccacgcgctttcccgccggcttgcaaaaacacgcaattggattgtagccttgaaaacacttgtagtgatccatagacttcttcgagagggtgaccctacttttcgagaagagcttcttaattttgcacagagggggcgtattttgcagctctcaaacttcaaggatgactccagtccaattgcttgggat

SEQ ID NO: 391263 - DNA, 845 bp, Oryza sativa
ctctgtttgtagatccgatgaacccatctctgggattgcaggttgtctctgagtggatgaggccttctgatattgcgaaggaggtatctatcagttcacaaccgtgcttattttctggttctgtgaattcgtcagatgtgtgtcagggtcggttgggcgactgttggttcttgagcgctgttgcagttttgacagagatggcccgtatatctgaagttataatcactcctgagtataatgaagaagggatttacactgtcagattctgtatccagggtgaatgggtggcagtggtggttgatgattggatcccctgtgagtctccggggaaaccggcatttgctactagtagaaagcaaaatgagctgtgggtatccattcttgaaaaagcttatgcaaagcttcatggctcttatgaggcattggagggtgggcttgtgcaagatgctctagtggatctcacaggaggagctggtgaagagattgacatgcggagcccccaagcgcagattgatcttgctagtggaagattgtggtctcagttgttgcattttaaacaagagggctttcttcttggtgctggaagtccttctggctcggatgctcatatttcatcaagtggcattgttcagggacatgcttactcaattttgcaggtaagagaagttgatggccataagctcgtgcaaattagaaatccgtgggcaaatgaagttgaatggaatggtccgtggtcagactcatcacaagagtggactgagcgaatgaagcacaaacttaagcatgttccacagtcaaagaatggggtatctggatgtcttggcaagattttcagatcactttcg

SEQ ID NO: 391264 - DNA, 340 bp, Oryza sativa
ctcccctgaatgaatgaatgaatcctactaggccagcactgctgctgcctgctgctcccaactcgacgacgccaaccacctcgcctcgcttagctcccacctaaacagtaagagcacacagcccaaaccggcgggagatccgaagcgcagccaagaacgcatcactgtcctcttcgtcttcgtgcatggagttgaccggcctgacgcgggcggcggcggcggccaccgtgacgccgccggcgccgcgccggggatggggcgagctccggttcgcgccgctgctgcccggcgagcggcatgggaggaggaaggtggtggtggcggccatcagcgaggaggt

SEQ ID NO: 391265 - DNA, 565 bp, Oryza sativa
  unsure (1)..(565): unsure at all n locations
cccacgcgtccgcccacgcgtccggtctccattgctttctcgggttctcctccactcctctcgtctcgcgtgagtactcgcgacctcaccgccggcggcgacgagcggcggcggcggcggttgaggaaggaagggggagggagagcaggaaatgcggatgctgtccaaggcgtgctcgctcgtggcctcctccctcccgcggtgctcatcctccgctgcccccacgatcagagggcagccgtcgttgctgccaagcgtgcgcaaggaatggcttggcaagccgctgctgtacggaatcggcacgctgctcgtcatgcctctgaggacgctgcacggggtgggacggatgtttggcgcttgggcggttcctctgcaacatgaccagcgtcttcgtcgtcgctgcaaattgagctcgtaccctgccttcaagataactatgcttacatcctacaatgatgttgatactggaacagttggagtggtggacccttctgaagcaacngccatcataaatgcactagaaaaaagaaaccagaacttgacctacatactngacacccatcat

SEQ ID NO: 391266 - DNA, 1166 bp, Oryza sativa
  unsure (1)..(1166): unsure at all n locations
nnnnnnnnnnnnnnnnnnnnnnnnnngagaaataaacccgcaacaccagtcatgtaattccaaaagtagaaagatacatacaaagtgcggctggtgttacccctctctgtacattgttcaataagtagcacatttggaagcaactcagcagaaacatcatatcaccacatgcgtatacaatggcacaaagaatatgcatgtctgaagatcaaaagcctaaagagctaactttaatgttcacaccctcctgacactctttccatactccttcctgatctcccacagctgctctccaacttctttcatggtcggacggtcctcccgcgtcggagcggcacactggaatgccaagttcagcagcctttcgagcacctcatcgtccacaggatcctccaacaacggatccaatatctccctcctgttcccttcattgaatttcttgaatgtccatctgatagttattctctcttcagcagcccgcttcagttctaccggtcggcgagcagagagaatttccacaagcagtatgccaaaggagaagacgtcgctcttaggagtcaactggtatgttctcagattctcaggatcaaggtagccagcggttccttttacttttgttgagatgtgtgtcttttctgtgtcactggggccacttcttgcaaatccaaagtcagactccttggcccggtagctctctgtcagcaggatgtttgatgacttcacatcccgatgaattattgtcttctcagcatatagatgaagataagtccagtgcatgtgcaacatcaattgcgatttcgagacgctgattaaaatccagggttcttccatattggccatcaagatgctccctcagagtgccatttggaacatactcagtgataatgatacgttcatgtcccttatcagtaaatcccagcaacctcaccaaattccggtggtcaatcttagcaagcaattctacttcattgctaagctcatctctgggacctgcgaattgatcctttttggctctctttactgcaaccacctggccatctggcaatacagctctgtagactgtcccaaatcctccttcacctaacttaaatgaaggtgagaaantctgagtagccctcagaatctgctgcacagttaagttcacagatccaactgcgagcaatttg

SEQ ID NO: 391267 - DNA, 496 bp, Oryza sativa
  unsure (1)..(496): unsure at all n locations
gggagccaagggacccttttatttaaaccaagagatacagtttctttcaccaagcaaggttgaaagggatccagggtgcttctaacaagtcaaagaaggaatttaaacaccataattaccgtggagcaaagcaaaagcaaaataaaatcctaaaaaacacccacaatgtgaatataatagagtacagagacgggttacttcattggtgattggtgcagctggtattcagtgccttgacctgctttctgtaccttggagagcgagaaggcgaacgggaatgagactgggatcgtgaatggtacctccttggacttctactcctactacggcttctgctataatgtcgccttcttggtggagatcggctaaggctcctgcttcgacccctgtaccgacctacctccgnaagtttttcctcctttggcgttcctgttctcgtttctttgctatctcagcagcagtgtcctttcgaatttgcttgttaagttgtttgctc

SEQ ID NO: 391268 - DNA, 433 bp, Oryza sativa
gtcgaagaaaagcatcgttcttgatggatctcacccgactctgctgtacggctacggtggcttcggcatgaacatgacgccccatttcagcgtcacccgcatcgtcctcatgcggaatctcgggttcgtgtcgtgcatcgccaacatccgaggcggcggggagtacggcgaggactggcacaaggccgggtcgctcgcgaacaagcagaactgcttcgacgatttcatcgcggctggtgagttcctcgtctctgcaggctacacgaacccgagcaggctgtgcgtcgagggtgcgagcaacgggggccttcttgtagctgcctgcatcaaccagcgtccggacccttttggttgtgctctggctcacgtgggtgtcatggacatgcttcgattccacaagttcaccataggccgtgcatggacctgtgatttc

SEQ ID NO: 391269 - DNA, 443 bp, Oryza sativa
  unsure (1)..(443): unsure at all n locations
cgagncaacngccacgcttgccgccgccggtcgcacgcctcctcccaccgtcggcgcgagaagatgctcgacatcaacctcttccgcacggagaagggcggcgacccggagctgatccgcaagtcgcagcgcaaccgctccgcctccgtcgagctcgtcgacgaggtcatcgccctcgacgaccagtggcgccagaggcagttcgagctcgacaaaatccggcaggagctcaacaaaaccagcaaggaaatcggcaagctcaaggctaaaaaggaggatgcatcggctctgattcagagcacggaagaaattaagaagaggttggctgccaaggagacggaggtgcaggagggccaaaggcacgctggatgccaaactcgtgacgatcggaaacattgtgcacgaatccgtccctgtcagcgatgatgaggcaaacaatttaa

SEQ ID NO: 391270 - DNA, 248 bp, Oryza sativa
  unsure (1)..(248): unsure at all n locations
ctcgccgcgctcagcgctcgctcgaaagaaaaccggtgcagctaaagcgacaagtgaaagcctctccccctccgctcgccgccgcgcgccgccgccgcacgccttcgaagatgctcgacatcaacctcttccgcacggagaagggcggcgacccggagctgatccgcaggtcgcagcgcaaccgctccgcctccgtcgagctcgtcgacgaggtcatcgccctcgacgaccagtggcgccagangcaa

SEQ ID NO: 391271 - DNA, 469 bp, Oryza sativa
cccacgcgtccgcccttctatccacccacaccagcaagccgctcaggcgcgctctccgctccaccgccatggcgtccatcaccctcctctccctcgctcccgcggccacattgctccacctcccggcctccacttcgctctccacctccttcgtcgccgctccaggccccatctccggccgccggtccgtcgtcctccgcgcccgcccgcgccgctgcgtcacggtcgtgtgcagcgccgcggcggccgaggccgcggaggcggagcccgcggagaagttccggctcgacaacctgggcccgcagaaggggtcgcggcggcggccgaagcggaaggggcgcggtatcgcggcggggcagggcgcgagctgcgggttcggcatgccgggacagaagtcgcgctcggggccaggcgtccggcgcgggttcgagggagggcaaatgccgctctaccccccgattcccaagct

SEQ ID NO: 391272 - DNA, 734 bp, Oryza sativa
tcagcaagcaacatcagtatagcagctatggttacccagctcacctacctagctgcatcagcaggagtgtgcttggcttcagctctagccatcgccttgctgtccatcgccctctacatcatcggcgtcgtcgcctccttcgccgtcctctgcgccaaggagttcgccgagagagcccacgaccggccgccgctcgtcggaacagttttccggcagctcaagaacttcgacagaatgttcgatgaacatgtcaactatgcaaccgcgcatcgcaccagcaggattgtgtatcccggtcactgcgaggtctttacttctgatccggccgtcgttgagcatgtcctcaagaacagcttcagtaaatacagcaagggggacttcctcactacagccatgaaggatctctttggagatggaatttttgcaacagatggggatatgtggcgtcatcagaggaagctagcgagctacgaattctcaaccaaagtgttacgtgacttcagcagtgacacattcagaaggaatgctgcaaaactggcagagaagatctcatgtgcagcagctaacagaattagcataaatattcaggatcttttgatgagagcaactatggactcaatctttaaagtggggtttgggtttgagctcaacacactatctggatcagatgaatctggcattcaattcagcaaggcctttgatgaggcaaactcccttgtttactaccgatttgt

SEQ ID NO: 391273 - DNA, 528 bp, Oryza sativa
aggaaaagtgccttgcaggtgttatttgacacattaagaaaccatggtcatctcttctccttgcctttgtgggagaaggtgtttgattcagtgcttttcccaatattcgattacgtacggcatgccattgatccatcaagtggttctccacaaggacagaatgtggaaagtgatccttcagaacttgatcaagatgcatggatgtacgagacatgcactttggccctgcagctagttgtggacctctttgttaagttctatgacacagtaaaccctcttcttagaaaaattctgttgctcttgacaagtttcataaagcgttcccaccagagccttgccggtataggtattgccgcatttgttcgtttgatgagcagtgccggatctgtcttcgttgatgaaaaatggttagaggtggttttatcgttgaaagaagctgccactgagacccttcctgatttttcttatattgcatccggagcttaccttgagaatgtaccaatagaaaatgggggctcttcagaaaag

SEQ ID NO: 391274 - DNA, 776 bp, Oryza sativa
cccacgcgtccggcggcggcggtgattcgggcggagtgatggtggcggcgacgattccggcgaagcgacagcgtttccaacaagcagcaacagtacgaagtcccttcctttctctcgtgaaaagcggcagcggcgacgattctgacgagcggcgatggcgcgtagcgtgaagctacggctgtccgagccactcggatctcgtgcaacgaactgatgccacccgagcccggtatgatgtcgtgcatggggccgtcctggttctcctccgcacgcagccaatgccgcgacgacgagcctcgacctcacgcgaccgacaaagacgggcgcaaggccagtccatggcgatggctagggtgcgtgcacggcggtgcggatgccgtgatcacatcacatgatggcggcgatttgccaaatcggcaagtcatcaatccgattcgcttagggatttgccaaggttctaattttggggatttttttgatttagggtttctgaaatcatgccaagtgtggtatttttgtatgttgtatattgaagttctcatggtgtaaccacggttgcatttaccgcggtaaaccgcgcggttaccgcgcttaccgcgggggtacggtaaggggtaaaccgcggtaaccgcgtcaaattcaaataaatttgaaaaataatttgaatttttgataaattttgtacggtttgtcgcggtttgtcacggttaccgcggttaccgtgcggtaaccgtgctagtgtagcaaaatgtgagagaaaacaaaaaaaaagaacg

SEQ ID NO: 391275 - DNA, 1191 bp, Oryza sativa
  unsure (1)..(1191): unsure at all n locations
cccacgcgtccggaaaaaaaagcgttatgtaggtatcagattggcatctggtcaggatattttgtgccaacagttgatactcgatccatcatatgaaattccttccttggatatgccaagtgatgcaccagtatcaaatttgccaagaaaagttgctaggggaatatgcataatcagcagctctgtgagacaagatacatcaaatgttctggttgttttccccccaaagtcactagaagaggagcaaattactgctgttcgggtgcttcagttgagcagcaatttagcagtatgccctcctggaatgttcatggcatatctctctactccctgtactgatgccttcactggaaagaaatgcatcagcaaagcaatagatgctcttttctcaactaaggtttctaatgatttggaagatcatttggagaaaaacagtgaagaaaataaggagagtgtgaagccaaccctactctggagctgtgtgtatgtacaagagattatacagggaacatctggtactgcattgtcatgccccatacctgatgaaaatatggactacaggagtatacttgaatcaacaaaaatgctgttcactgatatttgtcctaatgaagagttcctgcctagaaattcagctcccaaatatgcttctgataatgactctgattctgcagagtaaatccaaacttgcaaagggctttgtattctacatgacagggttatcgttgaagatatctgttccatattacagtgttccccaaagtcacggtaagaaatattgcagcaagggggagccctttacgttggtgagatttgccaggtttctctttgactagattgcagatgcctacattgttccatcattggtacgacatattatgatactggtaaaacactcaagagagagcgatgcagatgtccttggcattttgacatttggagaacatcataccacatgaaccgcttagtgtgattactacatccatatggttctctgaattctatgctgaatttgttggcacataggagtactgtactacataggaaggatactgctgagttctatgctaaatctgtgtatttttggtgggctgcctgaatcattgtacaagcgaacgacagaaatggatatcaaatgaggtccctccgagagggagttgcattaaaaacacnnnnnnnnnnnnnnnnnnn

SEQ ID NO: 391276 - DNA, 519 bp, Oryza sativa
ttcacttctccccccggaatatctccgccaagagaagagaagagacacccaacagcccaaaacctagcgcctctgcgctcgaggcccccccgaatccgcgaatccgccgactcccatggcgagccagggagagccctcctcctcctccgatccgaaggggaagaaggatttctcgacggcgatcctcgagaggaagaagtcgccgaaccggctggtggtcgacgaggccaccaacgatgataactccgtcatcgggatgcaccccgacaccatggagaagctccagcttttccgcggcgacactgtgctgctcaagggtaagaagagaaaagacaccatctgcattgttcttgctgatgacacctgcgaggagccgaagatcagaatgaacaaggttgtcaggaagaacctgagagtacgacttggtgatgtcgtgtctgttcatcaatgcccagatgtcaaatacggcaagcgtgtgcacatacttccaattgatgatactgctgagggcatcaccgg

SEQ ID NO: 391277 - DNA, 625 bp, Oryza sativa
  unsure (1)..(625): unsure at all n locations
nnnnnnnnnnnnnnnnnnnnnnnnnnnnnnnnnnnnnnagggcagagggagtatattacagtttgtttctaggtagactactggaacaaacatacaggtcggttttttcctgttcttgggncctttagaataaaaggntgttctgaaccctttacaatccatacacgtttacacatattaacagctaaagttttctaaggttgacaacaggaactcaaacagccaaacccaacttcctgtatagagcaagtagctgtagttttatatttagatcgaaacccgctaaagcgcagcatggataataaaataattcgctgtattttatcacggcaagcttttgcttacccacgtaccaagataaaatagcggtacagagggcaagagacgcaatttttgcactaggtcggcacaaataggttgaatgcctgtaatactactacaagggagctcccaattctgcactagctgacgggagtgacggcgcaagatgtctgcaatggatcgtcaggtttaactataaaacattacttcttcaactttggactaccatgttcattacttctagtcttttcttgctcattcactggctgctccagttcaagcctgtgggctgacattcgagcta

SEQ ID NO: 391278 - DNA, 445 bp, Oryza sativa
agaagatcgtcgaaggccggatatcgaagaggctcggcgtgctggccctcctggagcagcctttcatcaaggatgacagcaagacggtaaaggatcttgtgaaggagacgatcgccacccttggggagaacatcaaggtacggaggttcacccggtacacccttggtgagaactgattgaggaggtgatctctagtctcaatcctgacatcaggagttgggcatattttgattcatggaagttcatagctgttggtagtatgataagtttccatctgtaattctgtatcacctgttatattgctgcccctttttttcagctgctgttattactgttgctggttacagaacacatttttgagcactcctttgtagatgacaagagagatcaatattgtcaatataaacattacggcaaatcaaaactgtatctggttgtgtttgcc

SEQ ID NO: 391279 - DNA, 697 bp, Oryza sativa
atcgccatggccgcgtcgccgtcgccgccgccgctgcaggagctcaccatcacgcggcccgacgactggcacctccacctccgggaaggcgatgtcctcgcggccgtgctcccccacagcgcgatgcattttgggagggccatcgtgatgcccaacctgaagccaccggtgaccacgacagcgcgagctttggagtacagggaggagatcctcagggcgctgccgcctgggagcaactttgtgccgctcatgacgctctacctcacggacaatactagcccagaggagatcaagctcgcaaaaaagagtggcgtggtttttgctgtgaagttgtacccttctggagcaactaccaactcccaagatggtgtcactgatatatttgggaagtgcttgcctgtgcttgaggaaatggctaggcaggagatgcctttgcttgttcatggagaagtcacagatcagcatgttgatacctttgatcgtgagaaggttttcattgagaaaatattggcaccacttgtacaaagactgccacagctgaaaattgttatggaacatatcaccactatggatgcggttaacttcgtagaatcatgcaaagaaggtcatgttgctgcaacggtgactccccaacatcttcttctcaacaggaatgcgttattttcaggtggcttgcagccacacaactattgcttac

SEQ ID NO: 391280 - DNA, 605 bp, Oryza sativa
  unsure (1)..(605): unsure at all n locations
ccaccaccgatccatcgcgacagggaggaggcgacgaggagaagcggcggcggcggcggcggcagcgggcggcgatggatgtgagcaggaggaagaagtgggtggcgtgggtggcggcggtcaccatcttcgtcgtgctcatgctcgtcaccccggccatcccgcagaacgaggagtaccacgacttcgccgaccagcgccgcctcttcctcgggatccccaatacgctgaatgtgatttcaaacatccccttcttttttgtgggtgtcgttgggctcgtcttgtgccattacaaaaactacttcaggctaaactcgcaaggggagctctggagttggacactgttctttgctggtgtgactgctgttgcttttggttcatcctattatcatctcaaaccgaatgatgccacactagtttgggacagattaccgatgacaattgctttcacatctgtcatggccattttcattattgagagggttgatgatagggcaggaacaaagtccctagcacctcttgttattgctggtgcactaagcatcatgtattggaggttctttgacgatcttcncccatatgcantaattcantttgttccntgc

SEQ ID NO: 391281 - DNA, 1033 bp, Oryza sativa
gacaggctgggagaggacgtgccctgatccttgcggtgaaccgaggcacagcaggaaaccgagcttcttcaacgagactcgagcgtgcttctgacaccacgtcaagttcacattcagaagccatgctttttgggctgatattaccaagggcgtgctgtgctgtcgtatccaggacctatgggacagcttgttcgtccattttgacttcattgagtcgccccctgggtgcaagtctgacgcccttgatgactccgatactgggccagcggagatgttccgaaccatgggctgcagcactggggacttgatcaagtttgtctccatctccttcgatgattctgtgccggaggacgacaagacggtgacggagtggacactggacatgggtaccttgcagtggaccaagggcgaggagctgcgcttcggaactctgtgggaactggatgacttcaagaaggatggattaccggagaccgagccagtgtaccccctgctgagcatggaggaaggcgatggtggagacctttacttcatactgtccaggccaatcatgcggtgggaggaccctgcggtgcaccacgtctgccgattcaacatgacaagcaagaagcttgtgtccaaccctctttcctggcgcccagataagattgttccttctggtttgttgggctgtgaattcttcagacaccttgatagtcagcgccttgttcctgacaataggaagatggatgcgggcaaagtgcaatcctgggtcgagatggagtcagcattggaggaagttgatgaaagcatgcagagagagatatcacggaagcaaatggtgtggtccgggagccagctagatttgttttgccaggcaacatttagggagatcaaatgctgattagggagatcggactctgaattccatcattcgatgttcacaagctgggttctttaatacttctgtttattggtaccagtatgtttttgcttgtcgatctcacaaccttatgtatgcactgaagtaatttgaattaaaaaaaaaaaaaaa

SEQ ID NO: 391282 - DNA, 511 bp, Oryza sativa
cttggtcctgttctcaggtggtggctattgtctatgccattatgacaacaagaagatgagcacataacatgggaaatgagggcaatccgagtgctgccgatgtttgtcttgcctgctgtatcttctgtgatatattcaacagtcgtaaaattcacaaggatgcttgagcggtaagaccagaagacacttgaaaagctgagagctgagaggaaggccaagattgatgagctaaaagagagaactaattattacctcacccaacagcttattcagaaatatgacctagatccagctgcaaaggctgcggcagcatcggtattggcatctaagctcggagaggaaactggcttaaaagtacatgttggtgaagaaccaaaactggattcagcagttgctaggagcaatgatgtggagatatcaccatcagaagggctgagaaacaggaagcaatccaatgcaagaggtagccgaactggaggcaccactgctgctcaaaatccagctcagggag

SEQ ID NO: 391283 - DNA, 459 bp, Oryza sativa
gcttgcaagaacactggtggctgtcgcggagaaagggccggatgtgttctacaaaggcgcagttggtgatcagctggcgaaggatattcaggaagttggagggatcataacaatggaagatctgaagaaataccaagttaagatacgtcggccacttttagagaatgtattgggactgacagtattaagcatgcctcctccttcagctggtggtgctgggctaatgcttgttctgaatatccttactcagtatggcctccctgctggtttttctggcttcacttgggatccatcgtctaattgagtccttgaggcattactttgcaataaggatgaaccttggcgaccctgaggttgtaaatgttaacgaagtcgtctctgatatgatgtcccctaaatttgctgctgacctgaagaaaaccatctatgataacatgacatttgaccctaaacactatg

SEQ ID NO: 391284 - DNA, 812 bp, Oryza sativa
  unsure (1)..(812): unsure at all n locations
aacttggccggtnccgctcggccgccgcnacgcgctgtcgccgagtcgaaagccggtgtcgaccgacctcccgggccccgaggccgacatctccgcgctcgtctccgccttcgccgccaagggcctgagctcgcgcgacctcgccgcgctgtccggcgcgcacaccgtcggccgcgccagctgcgtcaacttccgcacccgcgtctactgcgacgccaacgtgagcccggcgttcgcgtcgcaccagcggcagtcctgcccggcgtccggcggcgacgccgcgctggcgccgctggactccctgacccccgacgcgttcgacaacggctactaccgcaacctcgtcgccggcgccgggctgctgcactccgaccaggagctgttcaacaacgggccggtggactcggtggtgcagctgtacagctccaacgccgccgccttctcgtcggacttcgccgcgtccatgatcaggctcgggaacatcggcccgttgaccgggtcaaccggcgaggtcaggctcaactgcaggaaagtgaattcctgatcgatactactagatagcattgccgcgcgcaaattgttcatagtacaaagtttaaagttatataatcagctgtcaatttcatgtattaagtgaattatgacataagaatgcaatagaaatgtcccaattttagacatcaatcactagtggataattcttccgtttgttcaattaattaaaccttgcttaattcagctacctgtaactattgcgacggctatgatttttgnaatgaananaanagntttnnnnnnnnnnnnnnnnnnnn

SEQ ID NO: 391285 - DNA, 723 bp, Oryza sativa
  unsure (1)..(723): unsure at all n locations
gtggattacacctacactaaaggcgaaaataagaagtgcccttctgttgctctgatgttccaaattggagagaaagcaacgtactataatatgggagggtgtaaagatatgcctggttcatgcacaagcaaaagttgcagaggtcaagaggttgacattatgcacttttctgttggaaatgctatccctggacgtctttatggtggaaatcacatagataatgcagacggaaatggcggtgatagattcggtcatcttgttgatttgtattcatggaatccgcattgccgataccttgatgggataggccctaaagagaataattcaaatgctcagaatgattggcatggggcatggtggcatagctctctgacctttcactcaggctttgtggatgatgacagtccttacggaaaacaagatgagaagggcacatattattttgagttttcaaggcccctaagaacaatggatcgattacagcaggatgcacagttcacgataggtgggcccaacagtatggctgtggctttctggtacccaaacgatggcaaaccatggagcaagtccgagcattattcggccagctgcgactggttggttcttgatattcaaccatccatggaagctgcacattaccgcccagctccaaatcgttcatgggatgctgcaactgcctttgccttncttctttcggtagtagcaatctgtatatccgttttt

SEQ ID NO: 391286 - DNA, 357 bp, Oryza sativa
cccacgcgtccgcccacgcgtccgatcgcggcgacgaggctgagcgtggcgacgaccacggtgttctacatgctgtgcgggtgcatgggctacgcggcgttcggcgacgcggcgcccgactacctcctcacgggcttcggcttctacgagcccttctggctgctcgacgtcgccaacgtcgccatcgtcgtgcacctcgtcggcgcctaccaggtgttcgtccagccaatcttcgccttcgtctgagcgctgggcctcccgccggtggccggacagcgcgttcatcgccaaggaggctcgcgtggggcccttcgcgctcagcctcttccgcctgacgtggcgcctcggcgttcgtct

SEQ ID NO: 391287 - DNA, 541 bp, Oryza sativa
cccacgcgtccgcccacgcgtccgctctcctcttccttcttcttccaccatggctgcaaccgcttcgtcctcctccaccgccaccgcctcgccgctcctcctcccctcggcccgccgcccgctcccttcctccaaaccgtggcttcccgacggcagggcgttcaggggcagcagggcgctgagttcagcggcgcggcgatgcttctgctgctgctgcaggtgcgaggccgccggtgaggcgggaacggcgccgccgccgcagcagcgcggagtggatgacggcggcgtggtctgtaccagcgccacccggtcccggaggaggagcgttcttggagtcgccgtgggggtatcgtcggcgctggcgctcggcctggccgcgttcgatgatgccctcgccgccgggctgcctcccgaggagaagcccaagctctgcgacgccgcctgcgagaaggacctcgaaaatgtgcccatggtgactacagagtctggtcttcagtacaaggatatcaaagtgggtgaaggcccaagtccacccattggc

SEQ ID NO: 391288 - DNA, 437 bp, Oryza sativa
gatgggtgaaagggtgaagctcatcggtgctttcgccagtgcatacggccaccgcgcagaggtggcgcttcgcctgaaaggcgtgcgatacgagctcatcctggaagacctccgcaacaagagcgacctgctgctcaaccacaaccccgtccacaagctcgtccccgtcctcctccatggcgaccgctccttgagcgagtccctcgtcatcctcgagtacatcgacgagagcttccatggtccacccatcctcccaaccgatccgtacgatcgagccgtggcgcgtttctgggcgcagttcatcgatcagaagtttggtaggttcaatttctggatcccgttcgtgcaaatggagggcaacatgcaggattgtttcgtgagggaagcaaaggagaatctggcgcttcttgaagggcagctcaaggggaggagattct

SEQ ID NO: 391289 - DNA, 462 bp, Oryza sativa
  unsure (1)..(462): unsure at all n locations
cgcaggcggaagcggaggcagggcaggcaggcagcagcaacaatcccccacctgcgcgtgtgcgtgtctgtttcggtgctgcctcctcctcctcgccatggcgctcctcctcctccgacgcggcggcggcttcgctgcggccacggtcctcgcggtcgtcgtcgtcgcgctcgtcctctcctgcggtggtggcgcggaggcggccgtgagggacctcagggtcgggtactacgccgagacgtgccccgacgccgaggccgtcgtccgcgacaccatggcccgggcacgcgcgcacgaggcccgcagcgtcgcgtccgtcatgcgcctccagttccacgactgcttcgtcaacgggtgcgacgggtcggtgctgatggacgcaacgccgacgatggcgggggagaaggaggcgctctccaacatcaactcgctccgctccttcgangtcgtnaacgagatcaa

SEQ ID NO: 391290 - DNA, 736 bp, Oryza sativa
cccacgcgtccgaaagatttcaagaaatccaaccaaaaatctcgcgctctcctctcctcctcctccgcatgagctcatcggcgttggcgttggcctgtcgtctccgggaggagtagtgcaggcggcggcggggaattccgaaacggagtttgttcgttttggagcggagtggtgaggtgagtcgtcgagatgggggagtgcaaggtgggaggaggaggcggaggcggagactgcttgatcaagctgttcgggaagaccatccccgtgccagagcccggcgcctgcgccgccggcgatgttgataaggaccttcaacacagtggcagcagcacgactgaaccgaaaactcaagagaacaccgttcaagactccacaagtccacctccgcagccagaggtcgtcgacaccgaggactcttcagctgataagaactcatcagagaatcagcagcagcagggcgatacggccaaccagaaggagaagctgaagaagcctgacaagatcctgccgtgcccccggtgtagcagcatggacaccaagttctgctactacaacaactacaacatcaaccagccgcgccacttctgcaagaactgccagaggtactggacagcgggtggtgccatgcgcaacgtgcctgtgggtgcaggccgacgcaagagcaagagcgtatcggccgcttcccatttcctccagagggtaggggtgcttgcccggtgattctcctcttatgccc

SEQ ID NO: 391291 - DNA, 1165 bp, Oryza sativa
tatttagaataaataaaaatcccaatcccgggcgggttttcttcttcctccgtgggcccttttcgattcgattggattggattgttttgctggctcgctctctctctctctctcgtggtgtggtgtggacaagaaaggaaggaaagatggagggcggcgtagggggggaggtggaccacctcgccggcgagagggccaccgcgcagttcgacgttgaacacatgaaggttgcctgggctggctcccgccacgccgtcgatgtcgccgaccgcatggcgcgcctcgtcgcttccgaccccgtgttccgcaaggataacaggactatgctccccaggaaggagctgttcaaggacacactcagaaaggcagcccatgcgtggaagcgtatcgtcgagctccgtcttacagaagaggaggcaaatttgctaaggctatacgtggaccagcctggttatgttgatctgcactggggcatgtttgttcctgctataaaaggccaagggactgaagagcagcagaagaagtggctacctctggcctacaggttccaaataattggatgctatgctcagactgaacttggtcatggttccaatgttcagggccttgaaacaaccgccacatttgacccaaagactgatgagtttgttatacacagcccgacactgacctctagcaagtggtggcctggtggcttgggaaaagcttccactcatgcagttgtgtatgctcgtctgataactgaaggaaaggactacggcatacatggtttcattgtgcaactacgaagcctagaggaccactctccccttcccggtgttactcttggtgatatcggcggaaaatttggtagtggtgcatacaacagtatggataatggagttctgcgatttgaccatgtgcgcatcccaagggatcaaatgttgatgaggctttcacaagttacgaaagagggaaaatatgtgcactcagatgtcccaaaacagctgctttatgggacaatggtttttgttcgtcaaacaattgtttgcagatgcttctaaggctttatcacgtgctacttgcattgctgtaagatacagcgctattcgaaagcaggttggccctcaaactggtggccctgagactcaagtcctcaattacaagacttagccaagcaaactct

SEQ ID NO: 391292 - DNA, 668 bp, Oryza sativa
  unsure (1)..(668): unsure at all n locations
cccacgcgtccggttgcatcatttttcttcgatcgggctgctgaggccggttttgtaaacccgaaggcaccatttgctaaggttagaccctcagacttcgaagaagctgcacgacgtgtttgtaaactgaatgtgaaggatgcacaggccacctacccggatgtttcagaggagaacgttccatacctttgcatggatctagtctaccagtacacgttacttgtggatggatttggtgtggatccctaccaggatattacattggtaaagaaggtgccttatagcaattcatttgttgaagcagcatggccccttggtagtgccattgaggttgcatcttcatcatagcagaaatagcttggctataacttatgaaagaaaggaaggtctcagcatatagttttggcttagttcaccgacttagtagggagtgtagatcctatgtttgaggttagattctttttttacttgattcaccatttgttgtccattttcgattctatttgtttggccgcctacaccttgacgtacacatgaggaatatagcttgcagatgttaagtactgaccattgtaaggattttttttttgtattaatgcaaagccatatcagagcctttttttcnnnnnnnnnnnnnnnnnnnnnnnnnnnnnnnnnnnnnnnnnnnn

SEQ ID NO: 391293 - DNA, 413 bp, Oryza sativa
gcgctcatactctgaagttcggtgatgccacatataatctgtacagtcacagctttctacaacttggtcagaatgttgcgtacgaatcactccatgacatgctgagcacacctgggcataaatcaatggcaacacatttaatttctcaagctaagtacagagatccttgcactccaaggggattttcgcccatggagggagcagttaaacttcctgccagtgttcttgagtcgaaggttgagtacagaccttatgctcatgctgttggtaacttctccgaatgtagatctgcagcactaacactattgcagaaaggaagagaggaatgtagggtaccatgaatgccgtatgggagcagcatttgtaccagaccttgatgggaaatttttagcaacagagaatttctaccatac

SEQ ID NO: 391294 - DNA, 661 bp, Oryza sativa
  unsure (1)..(661): unsure at all n locations
caaagctcctcatttgcntcttctctctctactacttctcctcctcctccttcctcgccgatcctcgccgccgccgccgcgcatcgccggagcaatctccattgacaagagcggtataggttggtgaggaggggagctagagcttgatggtggcggccatggagaagcggagggaaatccgggagcttcgcgcaccggatggaccaggacgctggcgctgcccgacctcgccgacgaggagttgctgagatctctcgtgaagaggcagattcttgcgtcgtcgctgtccgccggcaacgatgaaggcaatattgacctgattgctgaagcaaggtctaaagagatctcgaattttcttgaaatgctaaatacttcggggaatgaacgatcttcgaagattcatgaggcatcacataaagaatggaaggtgaagcaagacacggaccaattacgagttatgtatcgcgagggaccagaggggaccccatttcacaccctccttgctgaaggctttgctgatggaccaattgatgtttgtacatgtgtttcatgggaatcgtctctgtacaaaaaatggtttccacaatacaaccttccaacttttaaagttgctcagtcaggctgtttgaagaaggttcgggttggtgaagaaatttctttg

SEQ ID NO: 391295 - DNA, 565 bp, Oryza sativa
  unsure (1)..(565): unsure at all n locations
cccacgcgtccgcggacgcgtgggcgcacctgcagagtgcagacagagacaaaggcgacgtctatcatgtccctgcgactgcgtctcgccttccgtctcctcttctgctactgcctcctcctcgccgccgctcatccgtcgtcccgccgcctcctccccctcctcgtcgtctccgccgccgaacgcacgaacgtcgccagcctccctggcctcgatggcgcgctcccttcccgcttcgaaaccgggtacgtgaccgtcgacgaggagaacggcggcgagctgttctactacttcatcgagtcggagggcgaccccggcgccgaccccgtcctcctctggatcaacggcggcaaccgctgctccgtcctcagcgcgctcttcttcgagatcggtccggtgaagctggcgatagagccgtacgacggcggcgtgccgcggctgcggtacaacccctacacgtggaccaaggtcgccagcgtcctctttgtcgactcgccggtcggcgccggcttgtacttctcccgggaccccaggggtacgacgtaagagacgtctncttcacgct

SEQ ID NO: 391296 - DNA, 588 bp, Oryza sativa
  unsure (1)..(588): unsure at all n locations
caagccgttccctcttcgcaggncaggggcttctttctctcagcacnctgtaacatggatccgcaaagtgccattccattgctttggtctgttcctagggatgcaagagaaaggctcgactagtgttactgtagattacgagtttgccgcaagaacaggccatcaggcgagtttgtcagcaagtacaagggctactataccttcaccggtggaaaggcggttggataccggaatctatttgcaattccatggtcatcgttcatggctgatgacagcctcttcttcatcgagggggtactacacttgagagctgaattaaccataaaacaaccctagatagtggacggcgtttaactaacagcgtctctgttcttgctgtgtccaaattagtgtgaaaaatgttgtgtgattcggacttactgttgttttctacttgagcaacctaaatagacagtttggaaacggcaagtaaaatcccttttgtttttacatcaaaagaggatcatgacatgtaacgcattgttatcgaactgtgaaaagtgattcttctaatcaaagttatgctgaatggtccacatcgtcaatgac

SEQ ID NO: 391297 - DNA, 453 bp, Oryza sativa
cccacgcgtccgcccacgcgtccggccggagaagcggaagcgagagcccacggcggaggcgaggagggtttcatggagcccgagaaatccaaagaggcggcgagccagccgatggaagcggacgccggcggccccgtcgatccccgagaactagtgtccagcgacgatgagatagattactccgtggagcccgagttctacgatcccgacctggatgatgtcgatgagcggtgggtgagcaagcagaggaaagggaggacttctgacgccgtgctcagctgccccgcgtgcttcactaccttgtgcctggattgccagaggctgagacgtatgtaaatcagtaccgtgcaatgttcgttcgcaactgcaaaggtcaagactgatcagattctacgggaggggaaaggcaaacggaaaaaccgcaagggaaaggctgctgattcttctactaca

SEQ ID NO: 391298 - DNA, 636 bp, Oryza sativa
cgaagaaacccaaaaagattgggaagatttctatccctcttcaagagtttacatggtctgattccaagctctcctttgagaggtggggcgaattgaaacctcatgatgggcatgccagttcacctatcgtcagcctttcgagttgctgcctcttccactgtcccagtgaaggctcagcaggttcttagcatgatcaggacagaacctttctctcttaagagttttctgtcaccgaattccatcaaggatcaaaagatgagctgctggactcgctttgtgtatgattgcaatactgaacttatccgtcttcaaattagggatcagaaggcaaagaacggcatggttgtcgctcgggagttggtcggagtaacaaagtcatcaaagaaaccatttaagctagcagagttcgtggacaacaagtggtcactgagcaactctaacttatgcatcactaatgacatgaaaccaagcaaggatggctctatacttgagctcaaatgtgacaacaaaacgatcaaactctaccagggaaagaggctagaatttcaacggaagtgcttgcaacaatcacgcagaggagaatgcttcagctattactgctgtgaagttctctgctgaacatccctatggcaaagc

SEQ ID NO: 391299 - DNA, 556 bp, Oryza sativa
ctcttaacctgcagtttgttcagcgtctccatactcgctttctattactccccatgctccaagacgttacaagaagcagccagcgtcctccatttcctgaatggtcaagcaatggaaagcacagaagtgtttgctttgtgaacaaatccacgggtcaaattctagttgcagagcccccaaactttttgacaatacacgatgctattgctattgttgttagttacagattaggggcacccgtgatcttgccgattgcttcagtatttgcatgcccagatggcacagagaaagaggtgcttaaaatactccgtctgggcactgacattggagtctcaaaacgtgaaggaaggcacaatggttccctgggagcagagttgttgtcccaagatgctcgccaggttcaattccttcctttaagaccattctatagtggagaaattgtggcatggaagacggggaaagagggtgaaaagctcagatatggcagggtccctgaagatgtaaggccatcagctggccaagctctttacaggtttccagcagagacttctgctgg

SEQ ID NO: 391300 - DNA, 1022 bp, Oryza sativa
gttatttcgtggaatcaagaagagactttagtagcttacgttgctgaggagcctcctcaaccgaagccagaattcaatgattcaggatacaagaaggctggctcgtctgaaaaagactgcaagagctggaagggaaaaggggattgggacgaaacttggggagaaacgtattccaagaaaaggatacctgcattgttcgtggtcaacatttcaagcggtgaagtgcgagctgtgaagggcataccgtgaacattaagtgttggccaagtgatttgggctccatcatcatcacatagcctggtttttgtggcgtggtcatctgataatggttaccaaaagacaccaaggaaacttggaattaaatactgctttaacagaccttgggctctgtatgctgctcctgatcctttcatggaagaagctgataagccatcacttaatgtcagtaagggtgaaactgcacctacaaccaagttaacatcagagtggagcagtgcttttttcccacgattcagtccagatggaaagtatcttgtgtttatctcagcaaagagtgctatagatagtggaacacacaatgcgacaaattcaatgcataagattgactggcctgcagatgggaaattggagggcctcagtgttgctgatgtggtacctattgtgatgtgccctcaggatggttgttttcctggtctgtactgctctggcatacttaggaatccatggcttactgatggacaaactatgattttatcttctatttggggaagtaaggaagtaatactttctgtaaatgttgcgagccgtgaagtttcaagagttagtcctcaggattcggattattcatggaatgttcttgccctagacaaggataatattcttgcagtttcaagcagccttattacaagttcctcaaatatactatgggtctgaggttgtcagactggaaaaccaaaccaatgggagtggcaagaaattgcaactcctttttcgagtccttctgattagatcagtgcaatatt

SEQ ID NO: 391301 - DNA, 1494 bp, Oryza sativa
gttaaattctgggatatggataacaccaacatacttacaacaacagattgtgacggtggactgcctgcgagcccacgcttgagattcaacagagaaggttcattgcttgctgttacagcaaatgaaaatggaataaaaatattagccaacactgatggacagcgtttgctaaggatgctagagagcagagcatatgagggctctcgagggccacctcaacaaattaataccaagcccccaattgtcaacacccttggttctgtttcccgtgtgtctagtcctatggcagtgaattcggagagacctgatcgggcattgcccacagtgtcaatgagtggcctggcgcccatggatgttagcagaaccccagatgttaagccaagaattacagatgaatctgaaaaggttaaaacctggaagttggcagacattggtgactcaggacatctccgagcactgcgtatgccggatacatcagcaacttcaagcaaagttgtgcgtctgctgtatacaaataatggggtcgcgcttttggctcttggcatctattgttgttcataagccgccgaaatggcaacgcactgataggaatcctaatggcaagtccactgcatctttcactcctcaaatgtggcaaccagcaaatgggattcttatggcaaatgacactagtgatggcaaccccgaagaagcaactgcctgcattgctctgtccaaaaatgattcctatgtgatgtctgcatccggtggcaaagtctcattgttcaacatgatgacattcaaggtcatgactactttcatggcacctccacctgctgcaactttccttgcattccaccctcaagacaataatatcattgctattggaatggaggactctaccattcaaatttataatgtccgtgttgacgaggttaaaagcaagcttaagggacattcaaaaaagatcactgggctggcattttcgcagtcaatgaatatgcttgtatcttcaggcgctgatgctcagctatgtgcttggagcattgatggttgggaaaagaagaaatcaagatatatccaatctccagcaaatcgttctggtgctttagttggtgatacaagggtgcagtttcacaatgaccaaacacatattttggtggttcatgagagccagttggcgatctatgatgcaaagctagagtgcttgcgctcgtggtccccaagagaagcactccctgctccaatttcaagtgcaatatactcatgtgatggtctcctcatctacgccggattttgtgatggtgcaattggagccttcgaagcagagtctcttaggctgccatgcaggatagcaccttctgcatacataccaccttacatgtctagtggcggaagaggttaccccatgcgtctgctcattcgcttgccttggaggctcaccagttcgggaaaataactagcgatgttgctgatcatgcaaagtcttccaattaggtcacaactaatatcatc

SEQ ID NO: 391302 - DNA, 569 bp, Oryza sativa
  unsure (1)..(569): unsure at all n locations
gttgccttggctgctttggagagttgggaggagcagcgagagagtgggggttgatggcggcgatggcggcggccgtggcctcgtccccctccccctcccccgcctccacccgcctcctccgcggccaccacccgcccccgtcgtgctcggcgccgtcgctgctccgcctgaccaggtcgtcgcggaggctacggctgcgcgccgcggcggcggcggaaggaggccgacgtgctccccgggcctggggccgagggggagatggcgacgggcgggaggctggaggagcaacccgaggggccgatcgggggcagccaggtcgacatcggcgggctcgccttccaggggcgacatgggcggaggagggttcgccggcgggagcgggggcgccggggccggcggcggggacggcaacaagatgctcgaccgcggcatcaacacggccatcgtgctcggcgccagcacctacgccctcaccaagctcctcaccgtcgaccacgactactggcatggatggacgatctttgagatcttgcggtacatgcccgancaaaacttggtcggcttacgag

SEQ ID NO: 391303 - DNA, 629 bp, Oryza sativa
  unsure (1)..(629): unsure at all n locations
tgctttataagctgccatctccttcctgaaaagtggggctcatttaaagggacgggggggtagcaaatcactccaaaccttgcttctcctcctcctcctcctcctcccccatctccggcgccgcgcgccgccgcccggaggagagcttctcgccggtgctgctactgctactaatccccacacccacctgctctcagctcagctcagctcagcttcccagctcggcgaagaagatgaagacgaggagctcggggaggggaggaggggagccgaggaggaggctgaggaatgcggctgtcatggcgctcatgctctcctccctcgtcgctctctccctcgtccgcgccaggttctcccccatcgctagtgatggaggcgaggccctcaagctcaaggccgacgaatccaagctcgtcgtcaccaccaatcacgccgtcgtcaacaccgaatccggcgactcctcctcctcctcgtcgtcggcggctgcggaggaggaggaggaggtcgccgctccggnaanccgcngccgccggggcgggngtcccaggccggtttnctacnanangagccgccgctccgacacctgcaaggccgccggcaacgtgcgcttggtggggggcagccagacc

SEQ ID NO: 391304 - DNA, 934 bp, Oryza sativa
  unsure (1)..(934): unsure at all n locations
tctctatcgactgcgcagcccagcgccgacgagcaaaaactactcctagcaatcaagcaagattgggacaacccagctccactcagttcatggagcagcaccggcaactggactggtgttatcagtagcagcacaggtcaggtcactggcctctccttgccaagtctccatatagccagaccaatcccagcctccgtttgtagcctcaagaatctgacctacatagacctctcttgcaacaatctcaccggtgatttccccacggtgctctacggttgctcagctttggagttccttgacctatccaacaatcaattatccggcagacttccggaccgcattgacaggctatcgttggggatgcaacacctcaacctgtccagcaatgctttcaccggcgatgtgccgtcggctattgcaaggttctcgaagctcaagtcattggtccttgacactaatagattcaatgggaattacccgggtgccgccattggaggccttgtggagcttgagacgctgacgttggcatccaacccattcgagccgggtccagtcccaaaggagtttggcaagctgacaaagctgaaaatgctgtggctgtcatggatgaaccttactgggaccatccctgatgatctgtcgtcattgatggagctcacattgttggacttgtcacaaaataagatgcagggacaaatccccgagtgggtattgaagcaccagaagctcgagaatctatatctctatgcaagcaatttgaagtggcgagattggtcctaacatcacagctctcaacctgcaggagcttgacctgtcccatgaacaagtttctctggatcaataccagagacattgcaaacttggaagaagttgagantactatatttgtactacaacaatctcactggacccatcccggctggtgttggtatga

SEQ ID NO: 391305 - DNA, 611 bp, Oryza sativa
ctcgcgcaatcgcgctcgcacgcacgcgccgcctcacctcctccctcgcgcgcaccgcctcgcccttctcctctcctcgcatgtgccgtgatcgccaccgccgttccacgctcttctagccatcttcgccgcgccggaagatccagccacccggacaagagtggtgctggccgtcgcttccctcttctcccctttcatctccacgcgcccaccgcttccctctccttcacgctctccactccgctcgggtgcccgatctggttcgagggtggccggagccgatggtctaggcctccccaccggtggatctggctgccctcgctccgggctctggcgccggggatggtgctcgtgctccctcgacttgtccgtacaccctttacccctatcctctgcacgatacggtggcggcgggagggcggagagaagcagctgtgccgcattagctcttcgctggtttcagaaactcaacttgttccaggtatagttccaggtgctccgtgctcgtcagggctgaaagagattacagatcttatttggtgattcgcagaagttctgcagtgcaggacattcctgccgctggtcgtgtcttggacagccagagctctcga

SEQ ID NO: 391306 - DNA, 650 bp, Oryza sativa
  unsure (1)..(650): unsure at all n locations
aacctcctgagagaccagccaagcccaaaanacgaacgaaggaaggaagcagagcaacgcaagcagacaatagcagcagagaggcaacgagcggcgagggagctactataagtncccacccccgtttccctccctccctccccgttcattcctctccccccccccccctgaacccggccaactccggcgagagagacatagatagcgtgtgagacagtatagagatggagagggagaggtagttttttgttgccggcttgcggatttattgtaggagatcaggtcagtttcgttttcttgccggcgcggcgggcgtttgttgggtgcggcgggcggggaggagctcgtgaatggtgaacggagaggcggaggcggagtgcacgcgggcgtcgctgctggggaggtatgagatcgggcgcacgctcggggagggcaacttcggcaaggtcaagtacgcgcgccacctcgccaccggcgcccacttcgccatcaagatcctcgaccgcaacaagatcctctccctccgcttcgacgaccagataaggagggagattgggacgctcaagctgctcaagcaccccaacgtcgtccgcctgcacgaggtggctgctagcaaaactaagaattacatggtgcttgaatatgtcaat

SEQ ID NO: 391307 - DNA, 559 bp, Oryza sativa
cccacgcgtccgcccacgcgtccgcccacgcgtccggatttatagtacattgttgtggttctactggctatgttcccatgggcatttatctcctttttttacttaagctttgacttttgcattgtcgtacaaccgtcattcacctgtcattttaaccccaccaccccgcgcaccaccgccgcctccgcctcctccccctggtggcgggcggcgggggaggctcgcccccgcgtgtggggaggaggatcagggccagccgggagaaggggcggcgggtcgggattagggttttcgcgaggtacagccaggcccaggacttctccactcgcctccaagatagagctggcgaattgcctaagttggttgaggaccttctacagacatcaattagcacagggcccacgaggtgcttttaggtttgcccaagggatccaagctgtcccttggggttgggggggagtggctaaatgacttctcaaagacagccaacagtggagcagaaacgccagctcttatacaaccgcgcctgctttgtcctctttatctgagaaatgagcac

SEQ ID NO: 391308 - DNA, 440 bp, Oryza sativa
cctaaaccccggcggcggcggcggcgaacatcggatcgtggacgaggcctcctccaccgaaaccaaacccctttgccgagtactacgaggcaagaagcacagagatagttgaggcaggggaacctttgggagtgtgctgatatgccactaattgcttaacacaccgagaagcttctcggcatttgccaaatttggcttcccaagacaggtcatgggcatctatttccataggcatggaagtaaaaatgttacttgtgaagacttttgtgcacacatgtgtggtgcaggtttgaactttagtcaggaaaggtctttggattccatcgcagctcatgagcatgttgaagtggctgttattccacctgcaggtcaatcaccaaggtccctgcagttttttggtggtattgtttgcataatctggtcactagatgcctaccact

SEQ ID NO: 391309 - DNA, 543 bp, Oryza sativa
atttgatgaatgggtggatgtagcaaaggcacttgcattaccagccagcttgaaactgtacaatgagcttcagggtcttgggatccacatcatcctcttgaccggtcgaagtgaattccaacgtaacgccacacaagtgaatctttgagtggcaggctaccattcatgggaaaaactcatcctgaggcaatcccctgatattggcaagacagccgtgcagtacaagtcagaaagacgagcagcactggaagctgagggattcaagatacttggaaattctggggatcagtggagtgatttattgggattgccaatggctacgagatccttcaaacttccaaacccaatgtatttcatcagttgaatttattagtgaaaagtggagaaaatctgtcatgtcgcttggaacctcctttactctttcttttaagttcgtaatgaattcaagaatcattctttggacataattgccgaggatttatctctagacatgttgaacccctagtggggcccgggaccatgcccaatgatggctttgtaatg

SEQ ID NO: 391310 - DNA, 401 bp, Oryza sativa
ttggtatggtcgaacacagctagctagctgggctaggatcgccatggatcggggtgaccaccaccacctccagcagcagcaccagttctggatgccaccgcctgcgccggtggtgccgccgcagctgtgcatgccggcgatgatggcggacgagcagtacatggacctgggcggtggcggggcggcggcggcgccggggaggggcggggccggggagaggaagcggcggttcacggaggagcagatacggtcgctggagtccatgttccacgcgcaccacgccaagctggagccccccgagaaggcggagctggcgcgcgagctgggcctgcagccgcggcaggtggccatctggttccaaaacaagcgcgcgcggtggcgcttcaagcagctcgagcacg

SEQ ID NO: 391311 - DNA, 571 bp, Oryza sativa
gcgcgccacgcgtccggtctcggctcgtcgtcttctagctagggttcgtaagttctagggtttgcgatgatccccaactcctcctccctctagtatttcgagcgaattctccaacactttcacccagccgcgcgcgagaggagaaggaagatagatagatagatcgctccgcacatactatggtgctcaccccatcgccgtctccaccgccgatgctccccaagaagctccgcgcgctcggtccaggcttgaatccctttgctcccttcggcatgggtaactactattcctcctctcgctaatatatttctcctcgctcgatccatcttcccccacctccccccttctcaaacaattaatccccttcccgattcgattcgattccggtcggttcgctttcggactcggtttcaatttcgattctccctccgtcgtcgcggccctattctagccgccccctcccctccgctcgattgcctgcctccggatggtgcaattccgcagctctctcagcatgagccgggcacggacccgccacggcgatggcgacgaccgcgggtggaaccagctc

SEQ ID NO: 391312 - DNA, 406 bp, Oryza sativa
gcacgagcgacgccgatagcgtgatcgatcgatcgagctcgtcgtcggctacacattggtgggtcgatcggcggcatggcgcagcagctgggcctccgcgccgccgtcttcgtgtcgctcgccgtgcacgtcgcgctccactgccccatccagccgctcgccccgccgcccgcacgcccacccgccgccgctcgcttccctcccaacaacctcctccagaatctggagaagcttggggaagggatgctgagcgcgccggaggacgtgtacgtggacgacgccggcggcgaggggttcaccgcgacgagggacgggtgggtgcggaggatgcatgctaacgggtcaggtgaaccactggggcccttggtagtgacccaaattctccttgatttgttgggtgggtttg

SEQ ID NO: 391313 - DNA, 727 bp, Oryza sativa
  unsure (1)..(727): unsure at all n locations
gcgctttgaccgacccatcgatcgatcacgatatttagtagtagtagtagtattacaaatccagcaagcgatcccaatatcccattggcaaaaccccaatccatcctcggagcacgccaccttcacgaggaagagagaatcgaggaagcagagcgctcggaccagaggaggaggaggaggtgccagccatggtggaccggatcggcgccgcgtggtggtgcgcgtgcgccgtggggatgctggtggtgggggcgtgccgcgccggggagaccagcgagtaccggcgccagctcggctccgccgtcgacatgccgctcgacgccgacgtcttccgcgccccgcccggccgcaatgcgccccagcaggttcatatcacacaaggaaatcatgatggcactgccatgataatctcatgggtgacaacaattgagccaggctcaagcactgtgctctatgggacttcggaggataatcttaatttctctgcagatggaaaacacactcagtatacgttctacaactacacctcaggatacattcatcactgtacaataaaaaagttggagtttgacacaaaatactactatgctgttgggattggacaaaccgtgaggaagttttggttcagaacccctccaaaaagtggcccagatgttccatatacanttggtctcataggtgatcttggtcagagctacgactcgaatattacgctggcccattatga

SEQ ID NO: 391314 - DNA, 595 bp, Oryza sativa
  unsure (1)..(595): unsure at all n locations
gcttccctccacactgcctcgccaaccaaccaccgctacacacgaggcggcgcgtggccggagagcgagaaaaggcgacgtacccatcgatagcgagaaattaagttgccggagaggaggaggatgacgatgaggttggcggcggcggtggtggtgatggtggtggtggcggcggcggcgatgtcggtggaggcggagtgagcgtggattactacaagaagagttgtcccggagtggagaacgtggtgaggtaccatgtcgccaaggcgctcaaggcgaatcgcaaggaaggcgccgccctcgtccgcctcatcttccacgactgcttcgtcagggggtgcgacgcgtcggtgctgctggacccgacggcggagaacccgcacacggagaagacggcgccgatcaacatcggcctcgccgcgttcgagctcatcgacgagatcaaggcggcggtggaggagcggtgcccgtgcgtggtctcctgcgccgacatcgtcatctacgctgtccgcgacgctccatcctcctcagaacgncacgttcacttcacgtcctcgccggccgctcgacgtcgcgtttccgcgcgcgacgccaa

SEQ ID NO: 391315 - DNA, 888 bp, Oryza sativa
  unsure (1)..(888): unsure at all n locations
cccacgcgtccgcccacgcgtccgcccacgcgtccgcccacgcgttcgcccacgcgtccgcccacgcgtncgcccacgcgttcgcccgcgcgtccggaagcaattaacattcgcattcatcagctggtaggtagtgtgagctagagattaagggagagagagagatcatggcgtccaaggttgagctggtggtggaggtgaagtcgccggcggacaagctgtggacggcgctgcgcgactcgacggagctgttccccaagatcttccccgagcagtacaagagcatcgagaccgtcgagggcgacggcaagtccgccggcaccgtccgcctcctcaagtacaccgaagggttgccgatggtgacgttcgcgaaggagaaggtggaggtggcggacgacgagaagaaggtggtgtcgtacagcgtggtggacggcgagctggtcagcttctacaagaacttcagggtgacgctgcaggtgacccccaagggcgggcgccgccgcccccgccgccgacggcgcggtggtgagctggaccatggacttcgacaaggccagcgaggaggtgcccgacccggacgtcatcaaggagaccgccgccaagaccttccacgacctcgacgactacctcctcaagaactagccagacagccagatcgagcgccgccgtgcgggtgcgtggcttatgtgttagagtccactatagcgtcctcgccgtcagtcgtcgtcgcacacggtcgcagtatcggggtgttgcatttgctagctctccggctagccactgtctcccacgaattagtgtacgtatcggtgcatgagtgaataataaagtgttcaggttaaaccgttaaaaaaaagaaaaaaaaaaaaannnnnnnnnnnnnnnnnn

SEQ ID NO: 391316 - DNA, 800 bp, Oryza sativa
tctcatccccaccccaagaacaccaaagccacatcccatcccatcccagtccacggtgaggttgagcgatctgaaaaaaatcatcagcgacgagcagcaacaggtttgttctctgaacttctctgatctttttagaagcaggtaacacacaagaaaggtcctgtcccaagaaggtacttctttcgggtttattagatcgaaagaggagttcttgtgcgtacaggttctttctcatcccatcaacttctcctaggaggaacagagatccagagaaccttttttctcttctggattcttgccgatttttaggcttcctttgcttttctaaggccagaaagggttgttttgcaatacccttctagttcatcctctcaaatttttcttctttctattcaaaagctctttctttctttgcaccctttgtttctctacttttattgaggaacagggctgatttttcacttcttgcatccaaaaagcaccccttttttctttcctgtttttaagatttccatacccttgccatcttcatcttctacctccatccagccctcatggccgcagcaatagacatgtacaagtataacactagcacacaccagatcgcatcctcggatcaggagctcatgaaagcgctcgaaccttttattaggagcgcttcttcttcctccgcttcctccccctgccaccactactactcttcttctccttccatgagccaagattcttacatgcccaccccatcttatcccacttcctctatcacaaccgccgcggcaacacaactcgtctttctcgca

SEQ ID NO: 391317 - DNA, 569 bp, Oryza sativa
gatccggttcgagctcgtgccgaattcggcccgaagggaacagcattttcttgatgcatcagttgcctacaagcgtgctgtcctcaatgccattgagtacctttccagatttgggtactccaaggagcaggtataccttttgctatcatgctgcccatgtgagggtaggatatctggaatagtagactcccctaatgcagtggcaactcttgccatccctacagcaatatttgaccaggatgtaaaaccaaaacgcctgagtgggaaacaaggaccaaagttgagaaggcttccagatgttttgagatgctcgtccgatggacaccttcctgttacacaggacccaagcggtacaaaggcaccttaactactgcaaaatgcgtggtcatattcacaatccactatatgattagtaattataaatctaaataatcatatttattattccaacatctatctagtgtaatcccataatgtggggcacatgttgtattttcctgtattgtacgtgccgcattttctgtattgctacccagcaccaactcctgttatctgaattgtgcaagccc

SEQ ID NO: 391318 - DNA, 474 bp, Oryza sativa
cccacgcgtccgcccacgcgtccgcccacgcgtccgcgcgcgggtcgtcgccgtcgccgccgcccccgccgcatcgccgccgccgcgctcagatccagacccctgagacatggtctctcgccgagcgatgcgagcgccggagatgctccggtggctcgccgcgggagcggcgctcgtggctctgctcgccgccgcgccggccggcgggttctacctgcccggcgtcgcccccaccgacttcgggaagggtgattcacttcccgtgaaggtgaataagctgacatcagtaaaaactcaactaccctatgcatattactcccttcctttctgcaagccagaaactatcgttgacagtgctgaaaatctcggtgaggttcttcgtggtgatcgcattgagaactctccatatgtgtttcaaatgagagagcccaagatgtgccagattgtctgcaaattaactgttggtgagaaaga

SEQ ID NO: 391319 - DNA, 563 bp, Oryza sativa
  unsure (1)..(563): unsure at all n locations
tcgaatcccggtcgaccacgcgtgcgccacgcgtccggcgggaggtagagtgggagagagatttagaggcgatttcgccgcggtgaggagtgcggctcgccgtggcggagagttcgtcgtgccggtgctgatctgtgtcgcgtttgagtttgtttttcgccggtgaggagctcctgctcaacggatgtttccactgcgtcagagttattcagccgttgaagattcatttggccagtttttttttgttttttttcatgttcatcactgcctcctcctctattttttcgccatgccggtgccgatctgttcgttgacatcgtttttgtcggtgaggagggtatgatgtaccacgttttccactgtgtcgagctggtcatagacgtaggttttttttttggcgatttgttcatgtcggtctccattttttccttccaatagatctagcttggacatgcanccattatgtgtgatttttttgatttttggtgaatagggtgtgttctagattcatntggttttggttttttcatgttcctncccacggncctcttcatttatttctt

SEQ ID NO: 391320 - DNA, 549 bp, Oryza sativa
  unsure (1)..(549): unsure at all n locations
cacgcttcctccggcggcggcaaggcgacggcatcggcggaaggggaggcggaggagtgggagaggcggaagagggggaggaggaggaggaggcggcagagacgagaggaccccgtggatgtgctcggggaggaggtgatggggcgggtgatggagctcctggacgcacgcagcacctggcgctgggtcgccgccgacgaccgcctctgggcacccaaggcttatttgatgagagctggggctgtcattcatagccatgggatggaaacttgcattgcaaccatgcttaatactggtgcaaaagagtttaggctatgatttgcgacctgtgggtgagcaatcaacttcttgctgaagtgtcagagaagggtacctgaaggaacagaagatcaacactaacttaaaggctcatacatcattttttagatgctcaacttatcatggcggtcacaagatatttttggagtggcatttctcttcaaggggaatgccttncctgttgtagatttgccatcgttttgtctcatttgtagatttataggngattct

SEQ ID NO: 391321 - DNA, 373 bp, Oryza sativa
gcgcccacgcgtccgcccacgcgtccgcccacgcgtccgcagcactctaaattagtagaggatacattgagtgttgttacccagaaactgagggagacaatggaagagaatactattgtacgaaataaagccaaagaaaagcacttggagtatgagaaagagatgaagtaccaggaggaatttttccatgatcaaatcgaaacaattcacacggccacagaggagaaagaaatcaagtttgagaagttgctgcaagaggagcgagcaaaggctagacaacagtgatgttgactctggagtactgaagatcgcaggcaaaggaaggaaaagattcagaacttcatagactgccagtgaaggatgttgaggaatt

SEQ ID NO: 391322 - DNA, 438 bp, Oryza sativa
gcgcccacgcgtccgcccacgcgtccggcgagctcgcgaacgcgccactgcttagcttactcccgcctcactatctgtcttggcgcgtcgtgtacacgagcgagcaccagacaatggcggtggcgcagcagcagcagcagcagcagaggcaggccaccggtgagtcgctgatgcagaagtgcaagccgtacgtggcgatggtctcgctgcagttcgggtacgccggcatgaacgtgatcaccaaggtgtccctcaaccacggcatgagccactacgtgctcgtcgtgtaccgacacgccttcgccaccctctccatcgcgcccttcgcgctcgtcctcgagcgcaaggtccgccctcgcatggtccttctgggtcttcctccagatcttcgtcctcgccctcctcgggccccggatcgatcagaatttctactacgcc

SEQ ID NO: 391323 - DNA, 412 bp, Oryza sativa
  unsure (1)..(412): unsure at all n locations
cacaatctctcctctctctcgcctctcgctctctccaaatctgtgcgcggttgtgtgcggtgatccggggtgtcccgaccgcgatcagggccgtcggcttcgggtcggacggacggatgccggtggacgtcgggcgcgccgcgcccgcgaggcggcgatgccggcggcgtgcagctcgtcctcgattgggaaggacagcgacgagtgctcgccgccggggaaggaggaggaggagggggaggaggtgcagagcgcgttcgtcgggggaggagggggcctcgcggggtttggaggcattggaggaaggcgcttcccatccgacgtagcatctccaaattctacaattggaaaatcaaaatctttcgcgtgtctcaaggaantgtttcatcttgtggctctncaaaggacattc

SEQ ID NO: 391324 - DNA, 987 bp, Oryza sativa
gttctctcgtgacaggaaaagttgtgattgccaaaaacccttgcctccacccaggtgatatacggattctccatgctgttgatgttcctgttttgcaccacatgtttaactgtgtcgtctttccacagcaaggacccaaggccgcatcctaatgagtgttcagggagtgatcttgacggggacatatattttggttcttgggacccatctctcattccgcctcgtatggtgacacctatggactatactccagcaccaacagaaacattagaccatgatgttacaattgaggaagtagaagagtacttcacaaattacatagtcaatgagagttcaggaatgattgccaatgcacatgtagtatttgcggataaggaagacctcatggcagagagttcaccatgcattgagctggccaagctcttctccattgctgtcgactttcccaaatctggagtgccagccctgattcctcctgaactacatgtgaaggaggatcctgatttcggggagatgctagacaaagtcgcctatgaatcaaaaggagtaatcgggaagctctacagggaaataaagaagcacacccctcacataaagcacttcacaagggaggtggcaaggccgtcttatgacaccgatatgattgttgatggctatgaagattacatcactgaacctatggcattgaaggacgagtacgacttcaaattgggtaatcttatggatcactatggaataaaaagtgaggccgagataataagtggatgcattcttaagatggcaaagaatttcacaaagaaaagcgatgctgatgctatcagattggcggtgagatctttgcgtaaggaagcaaggtcaaggttcagtgagatgagcttagatgataatgggcatggccatgatgcctcccaagccaaggcaatccgctggtaccatgtcacttaccaccctgaattctggggttgctacaatgaaggatatgagcga

SEQ ID NO: 391325 - DNA, 769 bp, Oryza sativa
  unsure (1)..(769): unsure at all n locations
cgacgcgagaggagacgagacgaagccatccgatccccacccttccccccctccccctcccccctcttcagcgctggaggcggcggcggcggcgtcccctggatccctcggcggcggcggtggcgcacggttatgccgagaggcacccaggttccaacaccgtgcactgccagggctctagcattctcattaaggatatggagtacaccctctacaccacaagttcctctgtattgcacatttcgctgctcgaggaagttcttggctggaggttttctctttacggagacttcctcgttatctcttttgtcaactgcacctgaagatcacacctcattcagcagccgtcttgcctggtcccatgctattgcacattagagtcgactattgattacagtgcagctgtagcacatttcttcgagcatggtgcatctcatcctcttgcatccttccggtagtttttggtgtggcactgatcagccagcaaaagttaccatcggaacttctttggacaatcggatctgacattagatcttcattgtnaggcttaatctctaggttctggtttnctttacttccgtttgctctcttctcccctacactgcttgcttttggtttgatcatcccaagatttggtgcatactacgcagttctttgtnaggctttgtgtttgatggcgtaaacaaaccgagtgaaggtgttcaagtttttttngtcagagtatgggtattgcttataggagtttttccagaagcgttgagtgggcttt

SEQ ID NO: 391326 - DNA, 315 bp, Oryza sativa
tctcgctcgctctcctcttctccacgctcccagcgccaaatcccagcagcttccccgcacgccgcgaatggcgcctcccgccactgcctccgcctccgcctcggcaccggtctccctcctcttcctctccctcccgctctccccttcctcgtgtcgcggcctccccgcgccacacacccacccccccccgcgccgcctcgcgctcgcgccggccccgcctggcgccgcgctgctctccagcctcggcgacgcgcaggaggaggaggagtacgatgacgaggaggaggaagagctagtggtggtgggatacgtgag

SEQ ID NO: 391327 - DNA, 1067 bp, Oryza sativa
gccaaatgttgatatcaaaaccgtgctgtctcaactcatggacaggttatcaagctatgctgccgcaagtcctgaagtattgccagaattcttgcaagttgaagcttttgcaaagttcagcaatgctattggaaaggtgatagaggcccaagttgacatgccagttgttggtgcagtaactttatatgtatcacttttgacatttactctccgtgtgcatccggatcggcttgattatgttgatcaagtgttgggtgcatgcgtaaagaaactttcagggaatgcaaaacttgaagatagcagggcaacaaagcaaattgttgcacttctcagtgcccccctggagaaatatagcaatattgttactgcattagagctctcaaactatcctcgggttatggattaccttgataattctacaacacaagttatggctcttgtaataattcaaagcataatgaagaacacgacttgcatatctacttctgacaagattgaagctctttttgatttaattaaaggtcttataaaagatatggatggggctcaaaatgatgagcttgatgatgaggattttaaggaggaacagaattctgtggcgcgtcttattcacatgttgcacaatgatgaccatgaagagatgttgaagatattatgcaccgttcagaagcatatacttcagggaggtcccaagcggctacctttcactgtgccatccttagtattctctgctctcaagttggtccgaagattacaaggtcaagatggtgatgtaataggggaggaagttcctgcaacgcctaagaaaatatttcagatcttgcatcagaccattgaagctctctcatgtgttccttctcctgaactggctctcagattatatctgcagtgtgcagaggcggccaatgattgtgatctggaaccggttgcttatgagttctttactcaagcattcatcttatatggaagaagaaattgcggattcaaagggctcaaatcactgcaattcatcttataattggaacccttcaacggatgaatatattcggggttgaaaatagagatac

SEQ ID NO: 391328 - DNA, 734 bp, Oryza sativa
gcgtccacgcgtccgcccacgcgtccgcggacgcgtgggtttcaatcccaatctcttctcttcccctctcgttagggttaggtttttattttctctctctcgatttctctcttcgcttccacttcccaaaattctcgagtcaaacctcgtggcgttcggccatggcgacggcggcggtgctcggatcccacgacgccctcgacaaccggatgcatctgggggccttcgccgtgtccccggcgtcgaagccgaggcggaggcggcacagcaaggcggcgtcgccgccccccaaggtggcggcggtgagctcgccgccggtggttaagtcggcggcgagggtggcgtcgcctcctcccaaggctgcggcggcggcggcggtgcctcaggggcgtcgctcgccggtggcgaggaagcaagggtcgccgacgaaggagttgccgaagcagaggctcgtgatgggggagatccggatcctcaagcgcggcgaggagccgccggtttcctcgccgtcgcctgctccggttgcggcgcaggccgcggcggttgaccagcgggcgccccgtgttccggctgtggcgcaagccgcgccgactgaccagaaggcgcctcgccccgccagatcgaagcagcagcagcacacggccgctgtgccgacgaagatcaagccgtcgccgacgcgccagtctacgccggcccggccttctcctcggcttgcctgagccgagctccctccc

SEQ ID NO: 391329 - DNA, 540 bp, Oryza sativa
gcggtgtgattccagtggttgttgacgacactagctccgagatgattgcgcctgtgagtgccgaaagtgcagttgaagagagtactgagaaggagcaaactgttgacgacactagctccgagatgattgcgcatgtgagtgccgaaagtgcagttgaagagagtactgagaaggagcaaactgttgaaagcgaggccagtgaatctgtggagattgttggtgttgagaagcctactgaggatgagagtaatgttgatggcggtgctagttctgttgtgtctcgagaattggctccagaggaaaccaaggaaaataatgttggtcaggaaggatgagatccgcacgttgaaggagatgaagaagagaggtaaaactgatatggatgcttatgggtatgctaacatcgcaggagaaaatgatctggatcctcctccagagaacgtatcagttcccttacctgatatggtgcttgcccccttcatttgactgtgacaatcccacataccggtaccgctttctggagccaaacttcgactgttc

SEQ ID NO: 391330 - DNA, 771 bp, Oryza sativa
  unsure (1)..(771): unsure at all n locations
agtacattaaacttgtcaagaatattcagcttagaaatctccacaacctggttttaganccanatcgggggattgacatggcagatgcccaaaagaaagaggggatcaccaggttcacaaggagacagaggagagaccaggctggtgcactgaccctcatcttccaccttgtgctgcctttgttgaaataatggccccggtgttctccagagatgcatggagatgtgtatggcatatgatgcagaatgacttggttcatggatggggtcttgatttcgctctcagaagatgtgtagatcctgcacatgagaaaatcggtgtcgttgattcccaatggattgtacatcaagtggttccttctcttgggaaccaggggcagtcagagcacgggagggcaccgtgggaaggggtaagggaacgttgtcggaaagaatggggaattttccagacgagaattgcggaggcagagaagtcatattacgagatgatgggcgtccccccaccaaacgtaacatttgtccactaggctactatacattacctgctgttaatccgctcacctattttttagccccaatacaatagtagcacttgtgtagagagctaagctagatatgatgatggtgatattcatgatacgtgtagagcatacgaaacgtcatatctatctattaattccattttttctgtttgatctccctgctgtgctgtgctatgctaatttcatgagttgcacaagcctcctcacttgttctaccttattttttttcc

SEQ ID NO: 391331 - DNA, 448 bp, Oryza sativa
gtttaatccaatcttttcatggtatcagagcctgcttcctcgacgtcgtgattatagcgtcgtcttcatcctcgctagccggtggcgctgctccttctctcgcgcacgcggtcacagagaaactctcccgcagcaactatcctctctgaaaggcgcaagttcttgctgcgctcaggggagctcagatggctggatacatcgacggcacaaaggaggagccgccggccaccatcatcaccaagaaggacgacaaggatgtgcgggtcaccaatcccgcgcataccgagtgggtggcgcaagagcagcaggttctcagctacctgttgctctccctctcacgtgatgtcctcatccaggtggtctcaattcccactgctgttggggtttgggatgccataaaggggatgtttgcatctcactcccgtgcgcgtgtgatgaacacacgcat

SEQ ID NO: 391332 - DNA, 479 bp, Oryza sativa
cggacgcgtgggtttaggtttaactctgaatactcctggtgaccttgcaattagccttggtactagtgatactgtttttgggataactgctgaagctaaaccaagtcttgaaggccatgttttccctaaccctgttgaacctgatggttatatggtgatgctgtgctacaaaaatggttcattgacccgagaagatgtgcggaacagttgcgcggagaaatcctgggatgttttcaacagttatctagagaaaactccacctctaaatggcggaaaattaggattctactacaaagaccatgaaattctgccgccacttccagttggcttccatcgatacattgttgaaaacctcaatgatgtcacatccaacaatctggtggaacgtgaggtggaaagaatttgatccaccatctgaggttcgcgccataatcgaagggccagctgctgtcaatgcgaggccatgccgagagattcgg

SEQ ID NO: 391333 - DNA, 784 bp, Oryza sativa
  unsure (1)..(784): unsure at all n locations
gaataacaaaggtttgatcaaagaaagcgagggtgctaaagtgatattcatagaaggccatcaaatccctttgatagtggttaaaagggacggtggctttaactatgcctcaacagacttagctgctctatggtaccgtcttaatgttgagaaggcagaatggataatatacgtaacagatgttggacagcagcagcactttgacatgttctttaatgctgccagaatggctggctggcttccagatccaaaagaaaagaaatatccaaaaacgaatcatgttgggtttggtcttgttcttggatcagatggcaagcgtttccgaactcgtagtaccgaagttgttcgattgatagagctacttgatgaggctaaatctcggagtaaatcagaacttctccagcgactaacagaaaatggtaaaattgttgattggactgaggaggaactggaaaagacttcagaagcagtaggatatggcgctgtcaagtatgcagatctgaagaacaatcgtcttaccaattacacatttagctttgaacaaatgctgagtgataagggaaatacagctgtttaccttcagtatgctcatgctcgcatttgctctataatcaggaaatccaacaaggatgtagaagagctgaaaatgagtggtgccatttctcttgatcatccagatgagcgtgtcttgggactgtacctgatccgatttgcagaggttgtngnagangcgtgcaccaacctacttccgaatgtcctgtgcgagtacctgtacacctttctg

SEQ ID NO: 391334 - DNA, 390 bp, Oryza sativa
  unsure (1)..(390): unsure at all n locations
nnnnnnnnnnnnnnnnnnnnnnnnnnnnnnnnnnnnnnnnnnnnnnnnnnnnnnnnnnnaacaaaataatcacccccattgtttccatgacgaaataggcaagaattgcaacggttttgacatacaaacaccaattatatttaccctcaacaacttattttcttgaatcaaaattacagaatggagaccagaccacagtttgagcatttaacagactgtaataaggagtcaagagatccagattaaattattcatttagcacaaaacagatgaattgggagatttaacgaccaaatgacttggtgcctccttgtccttcttgatacgaaccactgtttctactttattatcacaagattcacaacgccatattaaaaaacccagacgaag

SEQ ID NO: 391335 - DNA, 389 bp, Oryza sativa
  unsure (1)..(389): unsure at all n locations
gcgggacacgcacctagaaagaaagagatagcgccacagccacaccactgcgagagaaattcctctctctctctctcgctcccgcgcgcgcgccccgcgccgcccgcgccacgaacacccaagaaaagaaacgccacgccacgccatctctgcttcgccattggtgtggattggagcttgctgcgatatcgaggagagtcgcgtgcagtaatactactgataaatttggttgacggggttaaagataggagtagcaaagaacgtggaacgatttcttgggccgcgggagggagcgatcttggtggatggcggcgccgccgacgccaacgacgccgccatccgcgtngtcgtcgncgacccacccggacgccccttcgggcgcgccgcga

SEQ ID NO: 391336 - DNA, 630 bp, Oryza sativa
  unsure (1)..(630): unsure at all n locations
cgcagatctaattggcgctgctgcctccccacggagctccatctcgcgaagctacttggcgccgccaccgcggtgttccgccccgtcgagctcgcggggctggccggcgcccttgccaccttgccgtccagctcgcagagctgctcggcgctgcagcggcgttccatcccgtcggcctcgcggaaccagccggcgccatcgccacctttctgtctggctgctcagcggcgccgcccccgcggtattgcaccccgtcgagctcgcgcagctggccggcgccattgccaccttgccgtccagctcgcagaactgctcggcgctgcagcggcgttccatcccgtcgagctcgcggaaccagccggcgccatcgccaccttgctgtccggttgctcagctttcctctcctcttcagtgctgcttggagattaggatcacagatgtttgagcaagcagtaaatcgacagaaggtgctcactttctggacttaatttgtttttgtcatagatcacgaacacactgagagatataaatacgagggttcgtatgtaagttgtatcttaccaactatntaccagtttgtcagtgggtgctaatctctgttaaaagaaaataaatgatttcactttgcag

SEQ ID NO: 391337 - DNA, 853 bp, Oryza sativa
  unsure (1)..(853): unsure at all n locations
cccacgcgtccgcccacgcgtccgcccacgcgtncgcccaaactccgtctcctcgcgcgagttcgcccgccgcctgcgccgatctccatccggcgaggcgccgccgtccgcccggctgcttccgccgattgcatgattccaccacaatcagaaattgtaggtgagaacaacgcatccaagagtgctgctaaagagcagattctntctagtacaaatgagaaaatgactactagtgttcccccagggtgctagctcctcaaaatcaccaaagggtgcacaggagaaggctagttttttgggtaagggggagaacaacctttctaccaacccaatgtgtacgcacctcagccacaaacaatctattctggaggatacctgaaccatttgggcccaatgggaagaataccccccattatgtcaatatggaaggactctcattctgtatcaccctggaatttacaacgacaaccagtcaatcatggtatctcctggatatgcaaacaaccctcaaatgatgtatggagcttattctcctggcgttggagatggccagccatacctcccattgcactttcccttctcaagtccttactaccagccaccagcctctcctagcatgggatactctaattccgccactggaatgtctcaaggagatcctatgctgcagcaggagtccttccttcctgacggccttctctcctcgccaacaccaggttatcatcaaccattcgggtcttttgacagagcatccacccaaccaagcagcactcctggtttgtttggtcagaggaacacaccgctggctcttggaatgcatcatgggtcaatgtatgcccctggttcctataag

SEQ ID NO: 391338 - DNA, 504 bp, Oryza sativa
  unsure (1)..(504): unsure at all n locations
ccccttcctttatttttttttttgggaggggccgaggcaaccgtcgccactccgacgatcccgtcccatccgccgccgccgccggagatttcctcgagataagccatgggtcaagcactcggtttggtacaagtagatcaatcgacagtagccatcaaggagtcctttgggaagtttgatgaggttcttgagcctggatgccactttttaccctggtgcatagggaagcagatcgctggatatctttccttgcgtgtgcagcagctggatgtccgttgtgaaacaaagactaaggacaatgtttttgtcaatgttgtggcatctgtgcaataccgtgctcttgctgagaaggcatcagacgccttttacaggcttagcaacaccagggagcaaatccagtcgtatgttttttgatgtgatcaagggttagtgttccaaagatgaacttggatgatgcatttgagcagaagaatgagatcgcanaagctgtggaagatgagcttg

SEQ ID NO: 391339 - DNA, 769 bp, Oryza sativa
  unsure (1)..(769): unsure at all n locations
cccacgcgtccgcggacgcgtgggctgggataattttcagtctcttcctgcacatggtaccaacaatggtgcagactctgctacagctgcctcacctttacctgaacagggttctgttgcaagtcctcatgacgaacagatccctcaggtaaatattaatcaagaagttagtgatgtagatgtttcagatggtacaacagaaggcctaagttcttttgataaatatcttaaagaaccctccacttcacatttctcagatactgcacaacaggtcgagagcaaatctcaagagttctcctgtaaggatcatgaggaatccccaaaacatccaaaagttcattgcacaggatcatcagctcatgttactaaagaagagacggatgatgaatcacagcagattcacggtgaccaatttgtgagtagggaaagcaagaattatgacttgtacttatcgaatgagatcgctggttcagcaggtgaagaggaaaatgatacctctggagaaattagaagggccacgggtgatgcgctggatgaaaatatttcttccgtagatggattccaacttgaataatatttcagatggtacagagggataaatcaaatnaagggcttgtggacaaggtgttggttgccaatgaaaaatctggaaacggttatcacagactctggggaaaaggtgtctgcttcatctgatgaagtaaaatcagatttgtatcctgaaaatgtgggntaccaaaccaggatcatctggtgggtgaaatcgcgg

SEQ ID NO: 391340 - DNA, 495 bp, Oryza sativa
cggacgcgtgggcggacgcgtgggcggacgcgtgggaacgtggttgggacactgaacatgcttggattggccaagaggattggggcaaaatttctcctcaccagcaccagtgaggtatatggagatcccctccagcaccctcaggtggagacttactggggcaatgtcaaccccattggtgttagaagctgctatgatgagggcaagcgcacagctgaaacgttgaccatggattaccaccgtggtgccaaccttgaggtgaggattgctcggatttttaacacatatggtcctcgcatgtgcattgatgatggccgtgttgtcagcaactttgttgctcaggcactgaggaaggaacctttgactgtctatggtgatggcaagcagactaggagctttcaatatgtctctgatttggtggaagggttgatgagcttgatggaaggggagcacataggaccatttaaccctgggtatcccggtgagttcaccatg

SEQ ID NO: 391341 - DNA, 476 bp, Oryza sativa
agaacatccaaatcatcattctggtcaggactcacgtactagaagttatcatgaaaccatgtgcagtactcctcaaacaggcaatgggaggtttccttattctggatcaattcagagggagaaatcacagaggcaaactagtatccttggtgaacggcaacctttaggaggtgacggcaataaaggatttcaggatgggacttctggttatccatgccggcgcaattcttctcaaattaggccaaatacatatgaagccggtgctcctgaacttcaaagtatgaataagcacagggagttcagtagttatccacaacaagcaccatataggacttttggtggtcggggtagagggagacctacatatcatggtagaggtaggggaggatggtatggacggaccaataaccattgggtgggaggacctcatcaggtgcaggatgccacctgtacatgccagtactatgcacaaggga

SEQ ID NO: 391342 - DNA, 525 bp, Oryza sativa
agaagagcgagttgttgggagggagaaaggccaagaagaggaggaggaggaggaggaggaggaggggatcaatggagatggagagcccgcggagcccggaggcggagatcgggcacagggtggaggacctgtgggaggtggcggacccgcagctgtcgccgtccgagaagctcaactcctgcttcgaggacatcgccgtcgcctccttcccccgcccccttggctcgcaagtaatcgagataccttcaaatgctagtctggctgatactgttgaaatattatccaaaaacaaaattttgagtgcacccataagaaatgttgatgctccagaagatgctagttggattgacaaatacattggcattgtggaatttgctggtattgctatgtggttgctctatcagtctgaggctgcagctaatggcacggctggttctgccgtagggtcaccagtagccaatctagtatctaggctaggctctttcacattcagaaggacatcatttggcagggtagaaaccacca

SEQ ID NO: 391343 - DNA, 562 bp, Oryza sativa
ggttcggttaattcttgttgcagcgccagctgtttgccttattagtgccattgcagcatcagctacaataaaaaatctgactaccttgattcggacaaaaagcaaaagtccacaaactgtctctggaaaatcatctggctcaaaggcagctgcaaagggtgcagttgatcaatccttgcctttccagcagaatgtggccattgctttacttctgggtgctttctacttgcttagtagatatgctgtacactgcacttgggtgacatctgaagcttactcttctccttccattgttctggccgcaaggggtcataatggaggcagggtcatatttgatgattatcgtgaagcgtattattggcttcgtcagaacactccttctgatgcaaagattatgtcatggtgggattatggataccaaatcacagctatggggaacagaactgttattgttgataacaacacatggaataatacacatatagctacagttgggcgtgcaatgtcatcctatgaagatgaagcgtatgagataatgcagtcactggatgtgaattatgtg

SEQ ID NO: 391344 - DNA, 388 bp, Oryza sativa
  unsure (1)..(388): unsure at all n locations
cccacgcgtccgcccacgcgtccggcgggactacccgctgagtttaagcatataaataagcgaaggagcgaaagtttgaggagaggtaccaaattgcttttgcacttgagcaaaagcggattgatttggagagagacaagttcgagttcaagagaatgacaaaagaagataagcttttgaggactgatactagtgcaatgagcatcgtggagcaggagtactataaaaatgtgaagaatcaaattctaagtcgtcgttcagctcaagcataaattagtcttattactcatcaattagcattcaaattttgttagatctttagctatagagtctacttactggactagtaaattttactatctngttttggtacngttttatgtagccg

SEQ ID NO: 391345 - DNA, 504 bp, Oryza sativa
  unsure (1)..(504): unsure at all n locations
tttcatatctacatataagcacggctcatcactttgccatccaacaatgtgggcaatatagtatatatcgaggtgccacaaataaatggaaggtatccatgcagggacggtgacgatggcctgcagctggcttgttctcacggccgccatggctgtgctagcctcttggttgatccgtttggtttcactaaaatggaacagcagccacccatgcaaagctgatgaaggcagcaggctgccgccagggtcgaggggccttcctcttctcggcgagtcgctcgagttcttcacttcgagcacctctcttgagctgcccgtcttctttaagcgccgtcttaataggtacggtccagttttcaggacgaacatggtcgggcaagacctgatcgtgtgtctcgatccggaggtgaacagcttcgtgttccagcaagaggaaaggctcttccagtgcttggtaccctgaattcgttcatgcggatcatcgggncngacaacatcatcacg

SEQ ID NO: 391346 - DNA, 641 bp, Oryza sativa
gattcttggtgagcatccattcttgaccacttccacagtatcaagggagtatcaaaattaaaagcatttgggcagctatatatctctctgtgatccaagctcgcttctgaactagtttgacatgagcagaggtactgcttccatggatgcaatcagcctagatgagtgggagctcctgcctgacaacaagagttcctacttcatggaggagtgcaccagtgaccatggcactgttgttgatgatgagaccaagaatatatttctgcctatccatctatcagaagaggtctatgtgggtgatcctgtcatcaagttcaaggacatcgatgtcgtgaagattgaatcgtaccgagaagagttcgtgcctaaggtgactgagatatttgatgcagaagaggaggcagagatgatcaagagtcctcgtcagtgcagaggaagttgatgtcgacgatgatgatgaggtgatggctatggttgcacctgatcaatgtgttgaagaggaagaaggtgcccagaaagacaaggaacacaatggtttcagtgtggggaagcttgaaatgaatgggttggggcactctgctcattttgggttgcggctgccaccttgtgcatctttcttgctggtggcaggcagcaacagc

SEQ ID NO: 391347 - DNA, 507 bp, Oryza sativa
  unsure (1)..(507): unsure at all n locations
aagtacgaagctgcccctcctcgccggagcagagaaacctctagaccgcctaaacctacgcaaggatgcaggcgctcctgctctccccggcggcggcgccacggccgcccctccccgctccgaggcggccgtctctaccccctcgagccacctcgatcctcacgccggcgccgcgctcccccgctctccgtgtggtggacgccttcgccgccggccgctggggaggacgcgctgcgtcgcgcctcccggctgctgctgctgctgcggcggcggcggctgaggccggtcctcccgaccccgcgccttcccccgccgaggacgaggccgagcgcgccatgctcgcccaggttagcaagaggctagaaaaaacagcacagtatttaaagactttgggaacctgggattctggtctaagttagtgtganaactgtctaagaaggaattttgtaattttggantcgtanagggaatgaacatttcnttaaattgttgaaattaaattgtatt

SEQ ID NO: 391348 - DNA, 808 bp, Oryza sativa
  unsure (1)..(808): unsure at all n locations
ctctctctctttcctctcgtctttctcggcggcggcggaggcggaggcggcggcggcggagatggctcaccggctgctgcgagacgcgcaggcggacgggtgggagcggtccgacttccccatcatctgcgagtcctgcctcggcgacaacccctacgtccgcatgttgagagcagaatatgataaagagtgcaaaatatgtgcacgtccgtttactgtcttccgttggcgacctggccgggatgcaagatacaagaagacagagatctgccagacatgttgcaaactgaaaaatgtctgccaggtctgcctgctagatcttgaatatggtctaccggtccaggttagggatacagcactcgctattaattcaaatgatgcaatcccaaggagtgatgtgaaccgtgagtactttgcagaagagcatgatcgcaaggccagggctggaattgattatgattcttcccatgggaaggcacgtcccaatgacaccattctgaagcttcagaggacggcaccatattacaagaggaatcgagctcatgtctgcagtttctatgtgcgtggtgaatgtacaagaggtgctgaatgccccttatcgacatgagatgcctgaaactggagagttatctcagcagaacattaaagatcgttactatggagttaatgatccagttgctttgaaactnttgggtaaggccggtgagatgccatccctgacacctccagacgatgagagtataaggacactttaccatggtggccttaataatcgaatcaccgagcaagatttgtaggatcaatttta

SEQ ID NO: 391349 - DNA, 714 bp, Oryza sativa
  unsure (1)..(714): unsure at all n locations
gtgtntcttgctgctgctgctgttcttcgtgagcctcctcgacgacctcgatctgcttgtttcttcccggctccatggcggcacggccgggccgtagtggattttgtggatttcattatcaaaacgggaaatagactatggattccaacgagggctctcatcgtataacacgaatggnattgttagggcaaaacctgctgtcacggccgatggtaagattgagcctgctggggaggggttacctcatggatggttgaaagaatacaggcctcggaagaaccaatctgggtctagagtcaagggtgatacgttctatattgatccaaccaatatgtatgaatttccgttctcaaaaggatgttcaacggtatcttgaatctggagatgttactaattgtgtaatgatacaaaataagaggaaattggaagacctgcacactgcaagaaaccaatctcatcatacacgaagaccatctgatcacagacaacttgatgctggtgaaggggctactcaatgtgatctaccaatagcaagaggtaatagtgcacggagnattttttggtaaatgcaaacagttcagacaattctgaagatatgtcatcatcagtgcccaagggtgtgtccgaagggaaacttacacggttaaagcttcagaaggcaagggtcccgaatcatccggggagcatgaatcttccacaggngaagtagccaat

SEQ ID NO: 391350 - DNA, 1017 bp, Oryza sativa
  unsure (1)..(1017): unsure at all n locations
cggacgcgtggggcgccgcgccgcgccggcgacttcgccctgcgcccgcgcacgcccgcccgtcgccccgtcgcccgtcgcccgtcgccgcgtcgcgctttgccaccgtcccctgtcccagtcgcgcggtcgccgcttcgctgcttcggcccctccacgcgccagcgccggcggcccgctctaggtgtctcggcgcctccagtccatgcgccagcgccagccccagcggcgccgtatccggagctccagacgaagcccgagggacgaagtaaatttctgccatggaaacaactcagaaagctgatccagtggaaccagcagctaagattgttcgacaaacctcacagttcaaacggtggggacggaaacatccatttgttcgatatgggctgccacttatctctttgacagtgtttggtgcagtaggactcgctcatcttatacagggcagcaaagaagtaacaaaggaaaaggaggacatggaatgggaggttgtagaaacaacaaaagccctgagccgaacaggaccggtggaaggagcctacaagcctaagaagctttcactagaggatgagctgaaaggctttgcagcaaaaggtggacataaacaactatgactacaagaggattcccagacccaatgagaaataaattgaagtaaagcatcatttaccaccctgagaagcaaagtaaaagtctcatcattttttccttcgtgacatctgtttaatgctgactgcccaaatgagatgaggaaattccagcattgtagccggcaacaacctccagtattatcatgagaactctatgttctttctgccaccattgtagagaattaaggtgatgattcttgaactgtacgaatcagcgtttntaacgacggcactaggnatgataaacttggctgtagctttgtatgtctactcttgtgagatttttttggtgttggaatactgccccaggaatgggtgaataaattgcaagactactcttgnnnnnnnnnnnnnnnnnnnnnnn

SEQ ID NO: 391351 - DNA, 812 bp, Oryza sativa
  unsure (1)..(812): unsure at all n locations
ctctctcctctctctctctctagctctagctctagctcgtcgccgccatgaacgttccaagcaaatgcatggctcctgcaaagtaaaaaaagaagaagaagcagcagctgcagcttctcttcagtatcgatctttaactgtatcgagctagcttagcttagcttagctctctgccattaacttgtgcttcactgagcttgagctagctagcttcttggctgtgtgactgagtagctctagctcctcgtcgtcgtcgtcgtcgtcgtcgtcgcggcgtcggtggtggtgtgaattgatagaattgatacgatggagagggcggctgcggcggcgccggtggtggtgaggcatggaggagtggtgtttgccgcccgggttcaggttccacccgacggacgaggaagctcgtggtgcagtacctccgccgcaaggcgttcggcctgccgctccccgccgccgtcatccccgacctccacaacctcttcaagctcgatccctgggacattcctggtgcgaacagcgaaggggacaagtacttcttccgcccgtgcggccacctgcggcgaaggggaaagaagcacatgttgacggcgaacggtgggttgctggaaacccggcgggcgggcgggaaaanccggtggtggtggcccgtgcggcggganccacctcctccgngtcaanaaaggcatggtgttcctcccacggcaanggaagaaaggcacccgcggcggcggcggcggccnccggcggtggctgctgggtcttgcacaattacagccccccctgccgatgcncaaaaaaggttgcttngc

SEQ ID NO: 391352 - DNA, 1179 bp, Oryza sativa
  unsure (1)..(1179): unsure at all n locations
ccggtacaatgaataccaaaatccaacttcttgancttcctggtatcattgaaggtgcatcagaaggcaaggggcgtggtagacaggtcattgctgtcgcaaagtcatcagatcttgtgctcatggttctggatgcctcaaaaagtgaaggacaccgccaaatattaactagagaactggaagctgttggacttcgtctgaacaaaaggcctcctcagatatatttcaaaaagaagaagactggtggaatttctttcaacagcatgattcccttgacccatgttgatgagaagctctgctatcagatactgcatgagtacaaaattcacaacgcagaggtgttattccgcgaggatgctaccgtggatgactttcatcgatgttattgaagggaaatcgggagtacataaaatgtgtttatgtatataacaagattgatgttgttggtattgatgatgtggataagcttgctcggcaaccaaattcgcttgtgatcagctgcaatttgcagctaaacttggccgggctactagcaagaatgtgggaggaaatggggctagtgagagtgtatacaaagccacaaggacagcaacctgatttcacagatccagttgttctttctactgatagaggtggctgcacagttgaagacttctgcaaccatatccataggagtttggtcaaggatgtgaagtatgtacttgtatggggaacaagtgcgaggcattacccgcaacattgtgggcttggccatgttcttcaagacgaggatgtcgtccagatagtaaagaagaaggagaaggaggacggcggtcgaggccgcttcaagtcgcacacaaacgcgcccgctcgcatatccgacagggagaagaaagctcctctgaagacctgaatgtggacatgaaacacgcagttttgtcggctgtgccaacatcaaaatagagctacttttttgcctggagctggttgagctgtgcgctacttttttcaatgtggagccctgttttgtgccttcagaagggccatacttgagtactcgcctggttccgttcctcctgtatctctctgcagaacacacctttgcagtgcaactatgaacatcattgtgtatctgtgcacnnttgnnaatacgggcggnaaatggntgtctgcgcttgtgttaaaaaaaaaaaaaaaaaa

SEQ ID NO: 391353 - DNA, 458 bp, Oryza sativa
cctttccccctcttctcgtgctcatcttcctctcctcgcgtgcttcctcctcctccttcctcggcgagcgtgttggttgatccgtgagagcggcgatggcggcgacggcggcgcaggcggtggcggtgaaggggagcgtggcggtgccgccgtgcgggagccgccgccggcggaggggcgccgtggcgtcggtgcgcatggcggcggcggcggcgacgtcggcgttgcggatcggcaggaggagccccttcctcggccggaggctggcggttgggccgaggagatccaggcccgtgccccggaatctcgtcgcgccggtgcagatgaatctcgcgtttgcgaaagccacgaagtggtgggagaagggattgcagcccaacatgcgggaggtcgagtccgcgcaagacctcgtcgactccttgaccaacgccggcgacaatctcgtcatcgtcgacttc

SEQ ID NO: 391354 - DNA, 526 bp, Oryza sativa
  unsure (1)..(526): unsure at all n locations
cccacgcgtccgcccacgcgtccgatctcttgctatcttgcaattgcaaattagttatactcgtagctactgcgcgcgcactaattgactacacaagcaaatatgggttctccttctgccaagtacttgctgtttagccttgcaatcctgctggtcctgagtagccagcagcaagctctgctgccttcggcattcgcccgccagttggttccgatgcccacgaacactgccgccggccacgcagatgtcacggaggaaaagcctagcgtcccgccgtcgagcgtaacaaagatctgccgagttttacgtatctgcaaacgatcatcgtcggccgcaacatcggccaagccgtgatgtgtcaacgacggcaaatgcatgcacgcgggaataaataatggaggcaccgattaggatcaacaatatggttagtccattaaatatgtgtgtaagctcgatcgatatggaataatgagnnnnnnnnnnnnnnnnnnnnnnnnnnnnnnnnnnnnnnnnnnnnnnnnnnnnn

SEQ ID NO: 391355 - DNA, 473 bp, Oryza sativa
ctcgtcgtctcctccgctccttgagccatctcgcggccgaacaggggagggggcgccgatctccatctggcgagaagagcaggggaggggatcctggtgaggactacaaaggagggattcaagtttgagtctggattaagttggcagcatgtcgtcaaacaagatagagcttgaccacaaggacatggtccatgattctgccatcgactactacgggaagagccttgccacagcctcctcagactccaccgtgcagatcagcagcattggaggtgcatccgcgccatcccagctgcttgcaaccctcagcggacactatggacctgtgtggcgtgttgcatgggcccatcccaagtttggttcgattcttgcatcctgcggctacgatggccgtgtcgtagttttggaaggaagggtgcagctgggcaatggtctcaaggctcacgtattcgacaaccacaagtcttcactca

SEQ ID NO: 391356 - DNA, 445 bp, Oryza sativa
gcgcccacgcgtccgctcgctttctccctcgccaactcgcctaccctccccacccccgcgtcggcggcggcggcagcggcagcggcagcgacggagcctcgccggcggcaagcgtactcacccgacaaaacaatgaggaggtatagtccaccttatcgcagtccaccaaggaggggatatggtggcagaggaagaagtccccctaggaggggatatggaggacggaaggaacagggttctggcagtctcctggtccgcaacatccctttaagctgcagagcggaggatcttagagttccttttgaaaggtttggacctgttcgagatgtttacctgccaaaggattattataccggggaaccgcgagggtttgcattcgtggagttttgttgacccttaatgatgcttctgaggcccaatatcatatgaatcgcaggtggttttt

SEQ ID NO: 391357 - DNA, 727 bp, Oryza sativa
agaagaagcatgttgaaaagcaagaaaagaacagactagaaaccttgaaaaaagcagccaaagttggtgctttgcctagtcatatacaacttgctgcaacagcgttgcctatcacgggaactaaagcagacatacccaaaaaatctagaaagaaagatctcgaggatgttgctggcatggcttcatcagcaacagctagtggtgggaagttcgatgaaaaattgcctggcgagaaacctccaaaaaatcctggcaaacatagaaagttcctccctgttgttgaaggaaaaggaatgggcaaccaggagaaacagcaaaatgacaaaatcttgaatgctctgctggccaaaagttctgaggatcaaatggatgttggcagggcaattacgatgtacaaggtgaagaaggagaaacaaaggaggaaagataaggaaaagtcttcttcatcgaacaagctgaagccccagaagaaaacactcaagaaatcttcgaagaaaaaggcttaggttaattacattcttcggacctgctgtaggaggtgagcatagttttcgagactcaaggagaattggcaaattttgctgtctgtttgtccaatttgaacacatcggagaaatcttgttattgcaattgttggttatgatgtaagaacctgaatgctattataacatggttgtcatgaatatgcaatacatatgcattataatttcaaaaaaaaaaaaaaaaa

SEQ ID NO: 391358 - DNA, 712 bp, Oryza sativa
  unsure (1)..(712): unsure at all n locations
aggaaagaaacctaagcccatcggaaatctctcctcctcccagcaaagaggaggtggtggagatctcccaatccgcgggaatcactcgctgttcaccccgattcggcctccgctcgagctctgaatctcgggagctcctgatctggaggatgccaaatgtatgaaccaaagcccttctcaagcattgtactagctcacaacgatccagtttcccacaatcaacaaattgaacgtattaacaacaatgtagtatctaatagtggtgggaacagctcaaacagcaactttgccgccagacagcgcttacggtggactgatgacctccatgatcgttttgtggatgctgtaacacagctcggtggacccgacagggcaactccgaagggaattcttagaataatgggtgttcaagggttgaccatctatcatgtcaaaagccatctgcaaaaatatcggcttgctaaatacattccagatcccacagctgatggtgccaagtctgacaagaaagatctcggagatttgcttgctgacattgaaagctcctcgggaatggaaataggggaggctttaaagttgcagatggaggtgcaaaagcggctacatgaacaattagaggtgcaaaggcagctacagctccggatagaagcccaaggaaggnacctccagaagatcattgaggagcagcagcggctcagtggtgtgctgggtg

SEQ ID NO: 391359 - DNA, 473 bp, Oryza sativa
gccgtgcggctctctctcgtgagcaacagcacgcgccgcggtcggcctccccttcaattccttcggctttggcccgggcgggtgtgtgagtgctcagctcctatcgcgattcgtcgtcctcctcctcctcatcctgctcgatctggtaattctagtgttgagggtctgaggagctgaaactagcacgggtaccctggcagcatgcggtggctggctctctcggtagacatcttccgcaaagggatctccttgaacctgtactgccgggttattctgtaaattgcctccattattgctctactccaatcctgatcttctagtctctgaagtttgggattgaagatctggttgctggcattgctgtttggggttctgtggttgcctggcaattctttcaaggagaacgggcaggagtactaatggtgtggcaaccggtggctcaaacgagatttcgcgtgtttaaacatgagaat

SEQ ID NO: 391360 - DNA, 400 bp, Oryza sativa
tccggtcgaccacgcgtccgtttcgattgaccgcggcgggaaagggccttcgagacttgggaggtgggagcgtgcaagctcggccatggcgaagctctcctgccggctcagcgtctccttcgccgtcgtcgcggcgttggcggccacggacgacgacgcggcggcggcggctgaggggatcacggtggcggaggcgtcctcggacccggagaacaagtgcgtgtacacgatatacgtgcggacggggacgatctggaagggcgggacggactcggtgatcggcgtgacgctgctgggcgccgacggctccggggtgcggatccgcgacctggagcggtggggcggcctcatgggcgacggccacgactactacgagcgcggcaaccttgacatcttcagc

SEQ ID NO: 391361 - DNA, 520 bp, Oryza sativa
caaaccctggccaaccccacctccaaccccccgcgcagccgaaggaatcctcgacggcgacgacgatggccgccgcgacggagaagacggccgaggagatccgccgcgagctccaggagctccagcgccagcaccgcgagatcagcgagcgcctccgagacccccgcggcctccgccgcggcgcgcccgccgctgcaggacccggcgggccccgcccacttcgcggattccctagaccagctgtggatttggtggaccagtctgcgcctaagcggaggattctatctgcagtggttaaagtggaggatactgaagctaaggaggatgtcaagaaggaagcggaggcagaggggccggagggcggttcggctgctgctgaaggcggtgagaggagggatggtgggttcacgagggatgggagccaccgcatgcccaggagggtgtgtaggctggaactataagggattgcgggttgagtttgcttaactgtattggtttggctgcaggagtttgatatgtc

SEQ ID NO: 391362 - DNA, 552 bp, Oryza sativa
  unsure (1)..(552): unsure at all n locations
gcagccagcagcagcggcgtggctgcgcgggccgcctcgctccctctccctctccgcttggccgcttcccttgcccccgccattaactcctcactcgctcgcctcacctcacgcgccgcacgccacatctctcgccagcgagcgcacctcgtcctcgtcgctatatagccaacgcctccgcctccgcctccgcctcgcgcttggtgtcccccaaaaccctaggtggagctctcctcccccctcaccccatgcggcgccgccgggtcgggacggcgggagggttggttcgatcctgactgggctcgggcgccgcgggcgagtcgcttgttggaggggggatggggaattgctgtgggtggggcgcgcggatcaaggatggggagcccgcaaccgggagcctctgggatgttctcaaggagtggtgctaaagatgggagtaggcttagtggctgcagtagtcgagcctcttcagcttccatgcctccaactgcgaaaactgaatgtgagatacttcagtcanccaatgtgaagatcttcanttttaagtgacct

SEQ ID NO: 391363 - DNA, 413 bp, Oryza sativa
cgcctccttcgcttcgcttccattggtggtggtctccattgctcccttcctccctgcctttttcttccataagtagtagtagtagcgggagtggcgcgccgccgcagccatagatctgcggcgccgcgtatctcgcggctggtttggctggtgcggttagcggctagggttttggttgtttcgtctgatcgatcctccccgattttgcggcggcggtggtgaattggtgtgtgatctgatatgcgctggcggcggcggtggcggggaagggggggaagggaggggaggcgggaccggggaagagggagaggatagcaatacggaggatcgacaacctggcggcgaggcaggtgaccttctttaagcggaggatggggctgttcaagaaggccgaggagctctccatcctctgc

SEQ ID NO: 391364 - DNA, 1409 bp, Oryza sativa
  unsure (1)..(1409): unsure at all n locations
gggnnnngnnnnnnnnncngggctgcaggattcggcacganagcgaagggcgattgaaggngaaaaaagtgccgcattccagctccatgttgcaacgagatttttgattgtcggcattgccaccatgaaacaaagaattcaattaaaattgatgctgtgaagaggcatgaactcccacgccatgaagtgcagcaggttatatgctcgttgtgtggcacggaacaagaggtacggcaagtatgtttcagttgtggtgtatgcatggggaagtacttctgtgaagtgtgcaagctctttgatgatgatgtttcaaaacagcaatatcattgcaatggttgtggaatatgcagaattggtggcaaggagaatttctttcactgctcaaaatgcggatgctgttattctatagtattgaagaacagtcatgcatgtgttgaaggagcgatgcatcatgactgtccaatctgctttgagtacctttttgaatcaaccaatgatgtttccgtcttgccctgtggtcataccattcatgtcaagtgcttgcgagaaatggaggagcactgccaatttgcttgcccgctttgctctaaatctgtctgcgacatgtcgaaggcatgggagagattggacgaggaactagcaacgatatctgacacctgtgacaataaaatggtgcgcatattgtgcacgattgtggggcaacatcagaggtgcagttccatttgattgcgcacaagtgccagaagtgcaagtcctacaacacccgccagatctgaagtggcgaagttttgatgtgattcattttgtatgggaagagagccccgggggatgctcattttgcaacacaaatcccgctaacgcctctgggaatctgatgagctctcggtcgttttcttgctcattggatgcctcagccgaggcaaatcactcgcatctgaaattcatctatgaagtggatgctgttccctcctgtgttcaatttattacctcaccatgtcgcagactcagagtcctgttcagcttaagtttctactagcactagccgagataataagtgcacgtctactcaagcttctgggcataaatggtggctagcttgtgtgttatggtgtgtacttgttgagtctcgggcaaacactgtaacggttagtggcatagtattacttcttgctcgtgtgcgtgtgtagtaggatggcggattgcaggacgtgggtgttatttactggtaggaactgtggtacttgcagtagccaccatttctcatgttcaatgccggtcccatatgccggtcttgttcagttcctataccttgctcggttgagaaaaatggcaaatctacctcagttcattttgttctgattatttaacagagggccaagtattgaattctaaaaaaaaaaaaaaaaaaa

SEQ ID NO: 391365 - DNA, 646 bp, Oryza sativa
  unsure (1)..(646): unsure at all n locations
ccagcgtccggnaagtcgcaactgaaagcccgaantgtggaccctgatgattatgagaaacttgaggaagggataatgcagtatgggtgtgcacattatcgaagaaggtgccgcattcgagctccatgttgcaacgagatttttgattgtcggcattgccacaatgaaacaaagaattcaattaaaattgatgctgtgaagaggcatgaactcccacgccatgaagtgcagcaggttatatgctcgttgtgtggcacggaacaagaggtacggcaagtatgtatcagttgtggtgtatgcatggggaagtacttctgtgaagtgtgcaagctctttgatgatgatgtttcaaaacagcaatatcattgcaatggttgtggaatatgcagaattggtggcaaggagaatttctttcactgctcaaaatgcggatgctgttattctatagtattgaagaacagtcatgcatgtgttgaaggagcgatgcatcatgactgtccaatctgctttgagtacctttttgaatcaaccaatgatgtttccgtcttgccctgtggtcataccattcatgtcaagtgcttgcgagaaatggaggagcactgccaatttgcttgcccgctttgctctaaatctgtctgcgacatgt

SEQ ID NO: 391366 - DNA, 461 bp, Oryza sativa
catcaagctgcaatcatgcctgatgttcctcctccagaagagctcctgaatctggaagagatacgggaaagaagacttactgatcctcgcttcccaatgcaatataggaactcagctgccaagaaaaagttcgtaccttggcccatagaaatgaggttttgtgaagattcagcatctcaacataaaccaagcttaaattattggtttagagccagaggaaaactttctgatgatccagcactgcataggtgtgttgtagcatatgcttcggatctactatattctggtgtcagcctaaatcctcatagggaggagggtctgaagacatactcactcagtcttgatcactcgatttggttccacaagcctgtgaaagctgatgattggcttttatatgtgatcgacagcccatctgccacggtggcggggttttgttacagggcgaatgttcaaccgacaag

SEQ ID NO: 391367 - DNA, 409 bp, Oryza sativa
  unsure (1)..(409): unsure at all n locations
gtgagtagtacgcccggagctcgcatcgcatcaccggctgagagagatcctaattccgagatggccacgacgcgggggcagctgcccgtcgaggacgtgctgcgcgtgaacgggagccggcgattcgccgccgcgctggccgccgcctcccccttcgcctccctcgccgacgccctcctcgccgcccgccgcatctggctcaacgaggtggacgtcaaccgggtcgggctggaaaggccttcgctcgcgcactccggccatcaggcaccaacctcgctcctccgcccccaagtggtgcaaggaggagcaatcagcagcgcttgcaactgccactgattcgaccgcgcaggagttggcagattggaatgccaggtatagggagaattttggtttgtgttcatgatatncn

SEQ ID NO: 391368 - DNA, 648 bp, Oryza sativa
ggcataaccatcattttgatgcaggagccagcagcgaagttctgccgggcaaaagtagtacaccattttggaacccacggttgcatacaaagttactccagaaaatacattgcaatgcagttaatattgctcaaatcagctacaacagaaagaaaacacatgatgcatgcgtgttctcttctgctcacagcgcactagcgcagtgccactctccttcctactgtacaagttacaagaagcaagcggcctcatcagctttcagccaaatgatatccccaatgctgatcgattatcatcacatcatgatggccacagcaacttcagccatagctcagcctggaatcgaaggaccgggcttgtgtgtgccgtcttggtattccgatctcgcaagcatttacccttgaagcgaacctcagtgaacaaatcgtctccccaacggatgatgcctccggagaaatgttgacaaacatcagcgttttggaatcacctccaaggcaaggctgcaaaaggtatgtaagttttgagttcctgaagggcacatgatcgtctcctttcgcaattgcaaagataacatcgctaagagctgacaagcttttattgattgcctgagtttccttcaaacgatcacccgtggagccacttttagca

SEQ ID NO: 391369 - DNA, 717 bp, Oryza sativa
gtctacatatcaaattatatgccgagctgtacttcaaaacaagagaaaatatatcccatatttgggaagaaaatccatcatgcaaaggtttcatacaaatgctatgctccaggctagatctaagaaacatagcagactaaccaagaggagaacaaacaaattacagcagaataagatcacaacagaagaaacttaattttgttacctgtgaactatgagttaaacattcaaggcttacacctcctgatactggtgtaaaattgtgaaccatggcatacacagcaagaaaactctgtacaccaaacttatatatcaacgtcacccccagagctggctgaatcaccatcactgccgtcactatcactgctgctgcttccactaccactcccacttccactgctactactgctgctgctgctcccgctagagctagaggtttcctgctcatcctgctgcccttctgcattgacttgagctcgcagggcctcggctgcattgagtccctcatcagcctcatcactgacatctacatcagcaatttcatcatctatgtcaagctggtttggtatgttgatgtcaaaaccacgaacaggagctccttgtccagaggacatgttattcggtgagccattgtcatcatcaccaagtatgtctagggtctcctcttgatcatttggatcaggcggaaatggaaatggatttgtgggaacagggtgg

SEQ ID NO: 391370 - DNA, 1036 bp, Oryza sativa
gatcagaaacagcagccggcagatgctacatccagagtgatgaatatccaggatgtagttcataaatatactattcataactcagaaacactcagattgttacaaacaacagtctagcatctttggggtggcatagaaaaattgagcaaatacgtttacagggaagagtggtaaaagaaaatctaccgacaaatcagggtgaggaatttcgcgatatcctacagcttttgttcaaaaatttttcttgccaaactaatgctgcttcggtggcaatccgagtgctgaactccaagaattccagtttcatatgctattctattcatataataaacctgttaaacctctcttgtgagtatggctgtatggtgagagttgttttccttgtagcaagttcattattgtctcaccccataatttagagttcatcatggtcacgctggttcgaagatgccttgagcttctgttccaattccttcagtttttgttcatcgcaaagcgctggagtcgataatacagccacatactcgcatctactaggctcatcgacaccattaagttcattgttcagcccgcatcgaagcctaacctttagactttcgggtcagggccattccagcatctggtctccatttgaaaattgcattaccccggaagggatcctccaaatttggcccagcgccccagggctggtggtactatgtccttcaacctgcgaagctttcttgaatggacataccttgtaaacatacttgccctccttgctctcaaagcactgatcataaaagtaatagaactccttctccttaccaaagtcgtgttttagcttatctgtcagagtggatatcctagactgaatcttggacagctttgagcttgcatcatcatactccttccgaacacgagaagcctcagataaatccacaggggtcttgaaaaagttgaatgttcgtaaaacattctgtacagtttgctgaattttatccagccatgatgcttgcccagaggcagtgaaatctgaatggtcatcacctttctg

SEQ ID NO: 391371 - DNA, 611 bp, Oryza sativa
tttgtttgacaaaagtaatcgggatggaagaataggccacgaacaaaatttctgacaacaatgctcttataaagtttacatttccaaagctaaaaggtcatatgaaacctcgccacatttggcgatgtatggaatacagaaaacctaccagcatatttacatggcatatatagaccacaaaaatgtgaggataaaagaagatattatctggggggaaaggacaaaagaagatttggttcaaaaccaaaaaaaaagtttccaaccagattttgcctgttgtttcaatgcccctatcgatgttggaagttcaacttcttgatgcaaatggcatacatgaacgcgaaaaacacagcgaagagcacgagcaccggcgcaacaactggcataaatttcctgtgatatccaaaatgatgagtaacatagcagctgattgtctggttggattggccagggactgagatgatttgttctaggtctccatactgtgtcactatgagcccatacactgtccatgccaatgggcaaagccagtagtaccagatccaccatttgggaatccttggtctcggaatgaagaatcctgagaataggttgaacaaggaatagaacgc

SEQ ID NO: 391372 - DNA, 711 bp, Oryza sativa
ttttttttttttttttcttgcattatcaattgttactatcatgtattgcattttccagcaaggctggctggttcattgacaaatgaaagtgtgaagtccataatattacagagtattgctgcatgtttagaactaccataacattaccgaggactcaccatcccagaaagcacgccgctactacttgcatcaacactagtaaaagtttgagatgaggccaagtaattcccatttgttgaatttgatgtagatttactcatagggtccttgctcatagcacgtcctgagtatgtctgtggagtttccagctggataagatcaccctctggcattatcttcaagatggagctcaagttctctaacaatctctggtcatggatggccgagcgtcagtctcatcccgagagcacttcattgcaagttggaggaagctatccacacactctggagaacacaagcccatccgggtatccatgatttcagatatattgcctgatcggtaagctttttttacctctctcactatgtttttaccatgctcaataggcttcatcccggtcaacaattcaagaaaaacaaccccaaggctgtacacatcacttttatccgtcaatttatgagttaggaagtattctggatcaagatacccaggggtgcccttaacaacggtggagacatgagctggtaaagccccttcaacatctggtactg

SEQ ID NO: 391373 - DNA, 774 bp, Oryza sativa
gactagttctagatcgcgagcggccgcccttttttttttttttttttttttttctttcttgctttttatcagtgccagaacgctgaccacagttcaattaaaatttttcagggcgcaccctgttaagaaggcccagtaactttacaatattaatattccctcaaggccagctaagttcaatcccggatttaaatatttctacgcatcgcttgaactacaaagagctagtagtacaatccagacttgttaccacactgacagccaagctgtgtaacgagccaaaggaatatatgaataaggacgcaccactgtttcatgtgcaagcaaaatgacggagatttaacccaaaaaacaatgtcggacagggaaagggcaaatgaccctggaagacttaaacctaggccacgtacatgaaatctccgaacggttgtttgggttgttgcaaatgtttaccgcgcggaatgattagcaccatttgacaatagctggaccccatgtaagtccagcaccaaaacctgatgctgcaataacatcgcctgccttcaccttgccagctcgaacagcctcatctaatgctaatggaattgaggccgcactggtgtttccgtaattagcaagatttgaaataactttgtcagatgggatatccaacctactggcagcagcatcaataatccgctgattagcttgatgcagcaacaaccaatcaatactggaagcaggtaaaccagcctcttccaatgccttctcaatagattgtggcacacatcgcac

SEQ ID NO: 391374 - DNA, 647 bp, Oryza sativa
gcagcaaaagatttccaaattggcataacaggaggggaaatctgagtaatttacagtacattgtgtttttccacttgattttttttgtttgttttgacggtaaaaatacattacaaatcaagttatatttgatttccactgaaataacctacgacacaacataatttatatgatacaacagtacattttgcccgattgtgctccggccatggctaatccctgcagctgctcccgaactatacataatctaacgatctagaatacgaccctgattgaaatcggggaagatctctttgctccccatttatcatcagagaagggtaaggaactttgtttatctcgataatggttgactgctcctgtaggagtggttgtttccatggctctccatccatctgaacatacgcacgattccattggccacccctcatttcaaacttgatggctgcagcctgagcaatgtgctttgctttaattagctcagccataacgaatgaagcatgccaaccttctttcagaccgaatatttcaagcaatccatcatcggaatgagcttcgacacaacctttcttttcaaggtaatcaggtttaagatcaccccatggatgccttccactgccgtagttgtataatttcccacgcgtccg

SEQ ID NO: 391375 - DNA, 671 bp, Oryza sativa
gaataactcaaagacagcagttctattttatcaacatccaagcaccatattggcgtcaggaagttcagaaacgagtaacatcatcagaatatcagtcagacatgttgcgcccgagtataacttcgaggcaacaaactaagagactatcataacactttgaccattgtatctccaaacctggagatcaaaatcgaatatatatacatggaacaaaaggaaaacaggaaaaaatttaaccgcaaaaaacaaaatcccacatgttgggcttcttctgttgacaagcatgcaccccatagacctcgtgccggattcggcgcccaggccgcgttgctgtgcagttctgacccaaagaatactcatatgacgcaataatatttgtgtgcaaacaatgaacgaacgcatcatgtgtggctgggattcagctgggtaaaatcatcatactaggcctgaccagggccttcaataactcacaagatttgcatgacagtaacagcctccccttcatgattagtatgggttaggataccgaagtttaaaaggttctgccaggaaaaattgcaatgtcggcagcagttcatctgctgtgtcgaaaagaaatgaaggtaacttcattgggaaatccagacagaacaaaactgagaaagcggagtttcatccccatggttgggaga

SEQ ID NO: 391376 - DNA, 665 bp, Oryza sativa
gagagaaacacccaattgaacatgctattacatacatggtcttttcaatcaccagcaaatattattgacatcaagcagtatctaacggagtttcttttccaatgttgcaaattagtacactacatttatgtacaaaaggatcgcacaacacaactgctgactctgacagtgtttgggcatgtcctaatcctgttttttcctaccgttttacacagctgctggtgcaatctgctctgactgctgcaggtaaactatgataccataccagggagggcctgagaccaaacaatctaaagttagatacaaaattgtccaaaaaccgatggcgcctacacagatttggccgagaaagctattggcagagtggttagtacggtgaaggtgtcgcccggaggcgtcaaattcaaacgactttcacccatgtcccaccgcacattgggcaagcatgggtccatcggctgatccaccatgcctcaagctcattcgacgtgttcggagctagagcaccaggctgagcaaatgcacaggtttgcctcaaacatcgtatgcacttgtaccattcaccttcgaggcctgttttccacacagctgtaataacatctctccgagaacccatcacacctagaaaagatcccagccccacggatgttttcagaccaaatgct

SEQ ID NO: 391377 - DNA, 736 bp, Oryza sativa
ggcgttggtcggcggcggcggcgggtgcggtgggtgcggccagctcatgccgccggcgttgccccacccctgctgctgctggggaggccagtgcccggccatgcctgcgccgatcgtcagtgacaggcctcccgctgtccccggatcaccattgctcaagaattggtgatgatgcctgggactgaatggcaggtgggtgacctgcaggaccggaggcatctggggatggttcgagttctggtcgaacttagctttggtgctcctcgccgccgccgtttgccagtcaaggtcgaacgccatagggacgcgctggtcggagcccgcgccaccgccaccgccgccggtgatctcgtcgtccccgccaccgtcaacgttgcccctcttggagcccgccgagctcccaagcgagaggtccaggttgtgctcggcggcatcacccgtggccgctgccggcggctcgaactccccggcgtaaatgcttggatcgaagttcgtcaccgcatccttgccattgcacttgatggcagcgcggtcgtacgccctggcagcttcctcctcggtgtcgaacagccccaagtagacgtacttcttgccgaggaattggcccattccgagcctcccatctcccgcacttgtggagcgtcacgcccctgtacttggagcttccccgggggaaccccgtgctcttgccgccggagcacgtggacgaactcctccttggtcaggttgctcatct

SEQ ID NO: 391378 - DNA, 1781 bp, Oryza sativa
  unsure (1)..(1781): unsure at all n locations
agccaaaagtaaaacatggacagcagatattgtctcacattccatcatgatgtttataaatatagtataacaggcaggaaactaatcactgtaactcagctgaaactctaaaccagaagtatctttgcatgtccagacataggagtgagtgattacaggcccagctgttctgaaaccaatagaactactgaagagcaaatccgaacacactgagcaaaaactggggcagcagttgagcatattgatatgggaggttctaagaatgaaacaaatgaagaagtaggttgtgcttacattacgcttaacacgacgatgggttcgacaaaaactaggatagggtagagctagagagagacaagaaaaagcatgacataataactgataagcgtgctcgttgagcctctcagacttgggccgtgccttgcgtgaacaagggatcctcacaccggtacttcccgtcagggccaattccaaagcccttgggatctgagaacacgttttccagaagctggctccggggagggagcgggcttgcgtcagcgaactccacggcctcttcaacaacatcatcgatctttttctcgatgctcttcagctcggattcagttgcaaggttctgttcgatgatgtacttcttcaaggctgtaatggggtcccttgcggcgtaatgagatttctcatcaggcctcctgagctcatctggatcagcaagagaatgtcctctgaaccggtaagtctcacactccacaagagtcggtccttcacctctccttgccctctcaatggcctccttagccacctccctccccttcaggacatccatcccatccacatgcacgccgggcattccaaacgctggacccttcttataaatctctgggtctgaagtagccctaagatagcgacatcccaattgcccataggttgttctccgcagcaaacacaataggaagcttccaaagctgagccatgttcagcactcaaagaattggccatgttacagtaccatcaccaaagatgccagggaacatcaagtccatcagggctagactgctggagcacttcatggcggatttagcagcaaaggcagcaccagtagcaacagggatgccttctccgaggaaggcaaaacttccaaggaggttgtgggttcaagagaacatgggcatagaaccaccttgtccacggcagcagccagtgcccttaccaaaaagntcagccatgacagaacgtgcagggacacccttggatagggcatggacgtggtcacggtatgtgctgacaacacagtcagcttggttgagcagcttgatgaagccagtggagacagcttcttgcccattgtataaatggacaaaaccaaacatcttgccacggtagnacatttgcgcgcacatatcctcgaaaatacggccaagaaccatgtcctcgtacagctccaaagcctcttccccgcgtgacagcggagtgggcggcggcggcgggggcggccttgttcccggggagcacgtcggaggagacggcgagcgcggtgcggaggcggggcgcgggcttcctcccgggcctgagggaggcggaggccgggagcgggagcggcggcttgtagtccccggcggatctcgcggccaccggcgccaagaacttggcggcggcggtgaaggaggacgcggcggccatctctctgtctctactcctccgccgtcgccgtcgtcgtcgtcgtcgtcggggtggcgagcaatgcggcgatggagaggaggagaagaggagtatctcgtgccgaa

SEQ ID NO: 391379 - DNA, 1043 bp, Oryza sativa
  unsure (1)..(1043): unsure at all n locations
ttttttttttttttttttaaaaataactttttctttaaccaatgctaacctcttacgatccaatggctttggctgatacagtgaatagtccgccacaacagtctgatattaaataaattatcttaccatatataactgcatttgatagagaagaaatagatacaagtacaaattaaaactcctgtcgatgaaagctaatgcatgacttcgatctcaaactgttattatgcagacaatctgacagggggcaggacggcatgatcaaacgtccagtgcggatcatattcatcagttctttgccggagggctcgggttgtggtactccggcgcaggctgcggcttgggctctggcttgggctctggcttcggctctggcttaggtggcactggcttcttgtggaagtggtcgaagaagtgcttctccttcttgtggatatggtcgaggaaggggtgttccggctcaggcttcggcttgggtggctccggcttcggctccggcttgggtggcaccggcttcttgtggaagtggtctatgatcttcttcttgatgggaccgcagatggtcgctgacgcgcacaacgctgatgggtagtgtgtcttgccggcaacggcgacaaaggtgccctccgacattggcacgatcttggatggctcctgcccggggcatggctcgttggttgcgctgtggagctgagcgatgcagtcggagctgtgaaggtcggcgtcgagggggacgctgaaagcgccggtgccgtcgagctttccggcggccttgctctcgtactcaccgttgccgttcttgcacttgatcgccacctggaggttcttgaaagcatcctcagctttcatgttcttccgggtgcagtcggcgcacttggccgtgccgacgacgaccgacgccgcctctcccccgacggcgaccgccatcaagacggcacaaacgccgaggagaactagtcctcgaggagcacctgccattgctgagctaatcctagctagctctgtgtagctaaatattgctgtcctgngnantnncacgtccg

SEQ ID NO: 391380 - DNA, 1035 bp, Oryza sativa
  unsure (1)..(1035): unsure at all n locations
nnnnnnnnnnnnnnnnnnnnnnnagatcaaacaagttgcacatatattatgcacatccctgattatattaattacttgctgataccaaacaaatagacacacacacacaaattaaacttgtgagtaaaagctaatgcatcaaagaaaaccattattctgcagacaaactgacatgacaggaaatcatatgcaacaacaccaaacgtactaaccaaacgaaccatgcatgcatgcaaacttccattgcttaattcgccggagggctagggttgtggtactctggcgcaggctgcggcttgggctcgggcttaggctcaggcttgggtggcacgggcttcttgtggaagtggtcgaagaagtgcttctccttcttgtggatgtggtcgaggaatgggtgctccggctcaggcttgggcttgggtggctccggctttggctccggcttgggtggcaccggcttcttgtggaagtggtctatgatcttcttcttgattgggccgcagatggtcacggacgcgcacaacgccgaccggtagtgggtgtcgccggcgacggccacgaaggtcttcttcttgtcggcggcggcgttgacgatccacgacggctcctgcccggggcatggctggttcgacgccgcgctgtgcagctgcgcgaagcattgctgcctcagctcgccgtcgtcgccgaggaggtccgccgcgaggggcacggcgaacgcgccagacttgccgacctcgccggtggccttcgtctcgtactcgccgttgctgttcttgcacttgatcgccacgcgaacacccttgaaaacggcctcagctttcatgttcttcctggtgcagtcggcgcacttggccaatccgacgaccatggacgccgccgccgcggcgtcgccgtcggcggcaacggcgagcacgttcaccagcaagacggcggcgcaaacgccgaggactagagcccttggcagagcccccattgctgaagctcacaagagatatatgatgatcagtcaaccacgcgttctcgtccancgttcng

SEQ ID NO: 391381 - DNA, 458 bp, Oryza sativa
gaggtcgggtacgataagctgatatcgaattccgccgcaaataaattattttaccatatataatttcatttgggagagaaaaatatgcaaatagtacaaacatccctgctgatgcccgataatcaagtacaaattacactcctgtgctgagcaggatcatcatctgcggcatgatcaaacatgctaatgtccatccaatgcagatcatattcatcaattcttcgccggagggctcgggttgtggtactcaggcgcaggctgcggcttgggctctggcttgggctccggcttgggctctggcttgggcggcacgggcttcttgtggaagggatccgaagaagtgcttctccttcttgtggatgtggtcgaggaatgggtgctccggctcaggcttcggcttgggtggctccggcttcggctctggcttgggttggcaccggcttcttgtggaagtgggc

SEQ ID NO: 391382 - DNA, 1022 bp, Oryza sativa
  unsure (1)..(1022): unsure at all n locations
tttttttttttttcatgtgaatttatgtttgtcctttgtggttaacttcatttaggtagagaaataaaaacaacaggcagatattacagtacacatcgtgccctgctaatatgcatgcgatatccaataaatgaacccggtcacactttaaaaaaaaaactcctgcggttgaaagctagcaagtacattatatttcaatgtataatctcacacgggggtagaaagcgttattctgcggacacactgatatggcacgaaatcatacaagaccaaacgtagataatgtttagtgcttcgctggtgggctagggttgtggtactcaggcgctggctgtggcttgggctgtggcttgggttccgactttggctcaggcttgggtggtacgggcttcttgtggaagtggtcaaagaagtccttctccttcttgtggaagtggtcgaggatggggtgctctggctctggcttcggcttgggcggctctggcttgggatccggcttcggtggcaccggcttcttatggaagtggtcgatgatcttcttcttgatggggccgcagatggtcgccgacgcacacaaagccgacggatagctgggtcttgccagcgacggtgacaaagttgccctccgacaatggcacgatcttggatggctcttgcccggggcatggctcgttggttgcgctgtggagctgggcaatgcagtcagagctgtgaaggtcggtgtcgagagggacgctgaaagcgccggagccgtcaagctttccagcggccttgctctcgtactcgccattgccgttcttgcacttgatcgccacctggagattcttgaaagcatcctcggctttcatgttcttccgggtgcagtcggcgcacttggccgtgccgatgacgaccgacgccccttcgccactgacggcgagcaccatcaggacggcgcaaacgccgaggagaactagtcctcgaggagcacctgccattctgagttccctacacgtccgcccaccgtccncngnccgtnccgc

SEQ ID NO: 391383 - DNA, 810 bp, Oryza sativa
tcatatgcaccaacaccaaacgtactacccaaacgaaccatgcatgcatgcaaacttccatgcttaattcgccggagggctagggttgtggtactctggcgcaggctgcggcttgggctcgggcttaggctcaggcttgggtggcacgggcttcttgtgcaagtggtcgaagaagtgcttctccttcttgtggatgtggtcgaggaatgggtgctccggctcaggcttgggcttgggtggctccggctttggctccggcttgggtggcaccggcttcttgtggaagtggtctatgatcttcttcttgattgggccgcagatggtcacggacgcgcacaacgccgatcggtagtgggtcttgccggcgacggcagccaagggtcccctccgacattggcacgatcttggatggctcctggccggggcatggctcgttggtggcgatgtgcagctgcgcgatgcaagtcggtcggcgccgtggaagtcgtcagcggcgaggggcacgctgaaaggcgccgtcgcccgccgaggtcgccgatggccttgctctcgtacacaccgtcgctgttcttgcacttgatcgccacctggagacccttgaaagcatcctgcgccttcatgttcttcctggtgcactcgccgcacttggcctggccgacgacgatcgccgccgcctcgccgtccgcagcggcggtgacagccatcacgagggcggcgaagagtagcgctcgtgctacatctgccattgctgaatcaatcctcaaactctgttgttatttggactatgtggcaagaggctagagagctgtg

SEQ ID NO: 391384 - DNA, 561 bp, Oryza sativa
ataggcaactgaacaatgctgtgtgatcaaatgtgtagcaatagtagcatagttacgagcaaacaaaaatcttttaatcctgtgagaaaaaggaagaaaagaattgaaagagagagagagagagagatacagctgaggagcaccccagcatgttcagatgacaagaaggaagttcttttagctctattcgaacaactcaactgaaaactctgaataattttctatgacaaaggggcctcaggattaatcctgaaagctgttagatgatgctcctttattcctattgatcatgcaccaacaattccctcctcttttgagtatcaacttggtttaatttgggggccaattaaatcttctcttgcttgtctcctacgaggggaagcatctccatccggctcctcggcgtgcgtgggctcgaattaacgctctgctgcgagatgagatgcctcacatagccatagaaggtgcagccgacgagcgtgattgcgcacccgacagcgttcatcgcggagatcgggttccggaagatcatccacgacaccaacacagccacagcaactt

SEQ ID NO: 391385 - DNA, 921 bp, Oryza sativa
tgtttgctcctaaattcccatgctctctcatgcttctcttccattcccagctccctccacagctttcttcacctgtgataccttcaagtagcacaaaacaacaaaaaggaagcagagctagcttaaattttccaaaatcactaggaaaagagcttctttggtccctaggttgctggcattttggtgcctacttttttgctcgctgttgccgccttctctaatcccaagaggggagaaatggagtagaaggctaaaataattcagatgcagctttgctcatggcttcctcaggcagttagggcctaggggtggagaagcctgaagctttgcctgattgcctccccaatcttcttgcctcctctcctttcacttcttctctcctctccgctgtggtttcttgctggttcttggaggcctccacttggttaaatgatgggtgtaggtggtggtcttggtatggaagctactaactgtggtgctttgctcagggagcttcagcaaatctgggcagaggtaggagaaagtgaaggtgagaagaacaagggtctgtcagagatcgagagggaatgcttggaagtgtaccgcaggaaggtggacgatgccaatcggaccagggtccagctgcaccagtctgtggccaccaaagaagctgaagttgcatccttggttgccactctaggggagcataagctatatctgaagaaagacaagagtgttgttccactcacagaacaacttgcggcagtcgttccagtacttgagaacttaaaaggcaagaaagaggagaggctcaagcagttctctgacattcaatctcagatcgagacaatccgctcggagttaagtgaatatagcgatggcgatgttaagcaaatagtctcatcgtcgatgaaaatgattatcaacaagaagcttacatta

SEQ ID NO: 391386 - DNA, 725 bp, Oryza sativa
  unsure (1)..(725): unsure at all n locations
ccgtccggattccggtcgaccacgcgtccgcccacgcgtccgcccacgcgtccgggcctggtcgcaattgtatccgggctatttgcaaacctgcttgccgacaacttgggctttggtcccgtggcaccatttgatgctgctgcatgcttcctggcaataggcatggctatcataatgtcttcatggagtgaaaactatggagacccatctgaaagcaaggatttgatgtcccagttcaaggttgcagccaaagcaattgcttcagatgaaaaaattgcattactgggagccatacagtcattgtttgagggctcaatgtatactttcgtcttcctctggactccggcgttgagcccaaatgaagaagatattcctcatggcttcatatttgccacattcatgctgtcatcaatgttgggtagctcaattgctgcacgcttgttagcccgaaagctgaaggtcgaaggttatatgcagatcgtgtttacaatatcagccttcacccttttccttcctgttgtcaccaacattctagtgccaacttcttcagtgaaaggaggtagcatctcatttggaggcactctgcagctgcttggtttctgtacctttgaggcatgcgttggcatattctggccatcaatcatgaaggatgagatctcaatatattcctgaggnaggcaagaagcacaatcatggattttcttccgcataccactggaacttgt

SEQ ID NO: 391387 - DNA, 511 bp, Oryza sativa
ccaaccccgacctcctcgccgcacttgccgtcgccgtaccggccatcgttctccgcacctcctttcgcgtccgatgcaacctgaaggggccctcgctgccgtccccggctgcggaacaacggccaggaggaacccccggccgtggtggaaaagaaggagcccgttcccgtccaggcagggccgacccggcggtccatgccgtcggcgccaagatctcctaagtaacagccacttctacttactacgaactatagctaattgatcattcgattcaacaggtaattggccagatccgcctggctgttcttgataaagtcaatcttggcatagaattctttgaaaaaaaaaagagagagaaaaaaaatcatccgtagaatgtatagatagtgagagagactcaactcgatctgagaaaaggaattgagaggtttcttggtaaggcattcattcttctgtagcaatagaggattgaccaatattgagttcttgatcaaatacctaatacatttgc

SEQ ID NO: 391388 - DNA, 370 bp, Oryza sativa
  unsure (1)..(370): unsure at all n locations
nccacgcgttcgtgcactcccccctcccttctcctccgcccccgactcgctgcttccacctccacccgctgctctcctctccgccgccgccggcgtcgccgccgtcgtggaggccgtacgccaccggtctcaccgacgccgacgacctgcaggcgcccctctccatgactatgatgacgcctcccccgctcgagccggaggaggacgagatgctcgtgcctcaccaggagctcgtccctgttgacgccgtccaacctatggaagatgttgggcaaacggaggcagctagcacggctgagagccagccagctgaggacccctagacaatcatagttcacgtggacgatcgagaactttaaccggatcaatg

SEQ ID NO: 391389 - DNA, 975 bp, Oryza sativa
  unsure (1)..(975): unsure at all n locations
atcgcgagggccgccctttttttttttttgtccttatctgttacttgtcattttcagggagatagacaaagaagagttcaagaaagtaatggcactgatgcgatcctataacagacaaggagccaaccatagagatggcttacgtactggactaaaagttggtcagcctgtggaaaatggtggagtggttgaatacttctttggtaatgatgggaacgaacctctacactatgacaagtttacaaattttttgaaaggattgcatgacgacatcattcgtctggaattccgtcactatgacgtcaagtcatctaatactatcccagcaaaggatttcgcattatccatggttgcttctgctgacatgaatcacatcaacaagctacttgatagagttgataatttaggcaatgatcctgatctcaaaggagtgcgcatcaccttcgaggantttaaatcctttgctgatttgcgacgaanatggagccactagcgatggctatctttacttatgggaaagtnaatgggctgttgacaaagcaggatctcaagcgtgcagcgcaccatgtttgtggtgttgacttnactgacagagtagttgacatcattttccatgtgtttgatacaaatcatgatgggaacttgagctcggaggaatttgtgagagcattacnaagacganaaactgatgttcgtcagccagcgacaccaggctctatggggctgttgtcttactggctaaacttcaacaagtgttcttcgcttacacagatgctgctcaagtngattgttttgatccttgccagattcttcttggttgggatttccgtcccngagatgccgaancgantttgctgtnaatatcctgtgggttgtccaaagggtgcccgtccctancnctgttaatattttatancgcccttcttgcaggggttgattaatcntcctgttaattaagggctntgccnaatgttc

SEQ ID NO: 391390 - DNA, 498 bp, Oryza sativa
cccacgcgtccgcccacgcgtccgaacgagggtagcggctcgatggcaacgaagggcgcacagcggcgggcggcaacaggcgacggcatcaagggtcaagggagctgggccccgacggaaagccgtgcatcggcgggcgggagcggcggcaggcaggcaaggcccgaacaactcgccatggccacccgccgccgtgccaccacagccgccggcgtagaccccagagccgtggagcaactcagatgctcactcactcgccacggcgctctcctccgcagtaatggtcgcgcggcgtccacatccctcttcggcgaggcccgcatcaccatccgtaagtccgccgcgaagcccaagccgtccgcctttggcagcccgtggtacggacccaaccgcgtaatccgctccaccgatcggggcaggtgcgtgcggagcccggcgaggagggaggaagatgggggcggcctttgccactagctttctccccgctagccaccaccg

SEQ ID NO: 391391 - DNA, 529 bp, Oryza sativa
ttgctgcagcagcagcagccgcgcccccacacctggcctcctcctcggcttggatctcgccgcatcatctgccgccgacgacgacgaagaggaagacgaccgccatggggacggcgagcggtgaccagccggcgggggcgtcgtcggacaagctgcggcacgtggagtccatgtcggagctgccctccggcgccggcaggatctccgggatcaacgccgtcgtcctcggcgagtcactcgccgccgaggagcacgacctcgtctacccctccgccgagttctccgccgacgccctcgtgccctcccccaagaagtaccaaaagatgtatgagaggtcaatcaacgacccggccgggttctggtcggagatcgccgacgccttctactggaaggagaagtggaaccccagtgaggtctgctccgagaacctcgacgtcaccaaggggcctgtccagatcagttggttcaaaggtggcaaaacatacatatgttacaatgctgctgatcgcaacatcgaggctgggaacgg

SEQ ID NO: 391392 - DNA, 675 bp, Oryza sativa
  unsure (1)..(675): unsure at all n locations
cggacgcgtgggctcaccctcccggcgagcagcgagcgggaggccttcgtcaccgtcgtcgtcgtcgtcgtcgtngtcgcccgatggggaagccggggaagctagcgctgccctcgcacgagtcaaccatcggcaaattcctgacgcagagcgggacgttcaaggacggcgatctgctcgtcaacaaggacggcctccgcatcgtctcgcagagcgaggaaggggaggcccctcctatagaacctttagatcataatcaggtgagtctagatgatctagacgcaatcaaagttatcggtaaaggtagtagtggaatcgtgcagttggttcgccacaaatggactggccagttttttgctctgaaggtaatacaactcaatatccaggagaatatacgcagacagattgcgcaggaattgaaaatcagcttgtcaacacagtgccaatatgttgttgcatgctgtcagtgtttttacgttaatggtgtcatttcaattgctttggagtatatggacagtggctctctctcagatttcctgaagacagttaaaaccattccagagccctaccttgctgcaatctgtaagcaggtgctaaaaggactgatgtacttacatcatgagaagcacattatacaccgagatctgaagccgtcaaatatattaataaatcata

SEQ ID NO: 391393 - DNA, 714 bp, Oryza sativa
ttttgacctgcggcggcgacgcctacgaccgtcgagctctggtacccatggaccgccgacgcttccattggaagggcatgagccatcagtgctaagctccaatgctgattacgaagaatcccatgcttgggatgaccgccacagcggctgcgaaggagccacttcccgagcagtcgtgccatgatcgataagagtgatcgatggatgcgagcgtatggtgtccattgtgcagtcgtgcaggctttccctataaattaattgacaggaggaagaaatcacaggtggtttaccaatttcaatgacattttatagttcatcaaagaattgaacttctatatggtagccgggcaaatagcagggatgtttctttctctacacctgtatcttggctgatcatttagtttctttctatatatatatgctgttaattgctctatgaagcataataagttctcatggcttctggatttacacttagctgattttatctcgcagaattcaaccactttttttttttatcgtcacatagatgtaagatttcaggttatgtgatggtcacaaacttcagaattcaagttgtattagcctatgttggaacgaagaccttcagaagaactatatgtaatataaacggtgtaaatgatgtaaatgttgtgacacttagtctttccaactatattctttcaatgcttaccgaatatgtgaacaattgat

SEQ ID NO: 391394 - DNA, 545 bp, Oryza sativa
cccacgcgtcctcgccgccgcaaccaccgccgcctcgccgcagcatcacccgcagccgccgccgccgccgccatggactccgtcgcgtcgtgggggctgaccccgctcgccgcggccgacccgctcgtccacgacctcctcgagcgggagaagcggcggcagcggagcggcatcgagctcatcgcctcggagaacttcacctccttcgccgtcatggaggccctcggctccgcgctcaccaacaagtactccgaggggatgcccggggcgcgctactacggcgggaacgacgtcatcgacgagatcgagaacctgtgccgcgaccgcgccctcgccgcgttccgcctcgacgccgcgtcgtggggcgtcaacgtgcagccctactccggctcgccggccaacttcgccgcctacacggcgctccttaacccgcacgaccgcatcatggggctcgacctcccctccggtggccacctcacccatggctactacaccgcgggcgggaagaagatctcacgacgtaatctacttcgagagcctcccta

SEQ ID NO: 391395 - DNA, 451 bp, Oryza sativa
cggacgcgtgggcgcaggaagaggaggagaagaagcggaagaggagagaaaaaaaaaaaattcgcagcaaaaaagaaaaaaaaatcgcagctgcaaggtagaggaggagaagttggggtttgggagggccagcgattgagccgacgaactcaaggttcttcaaagtgatgattgggatcgaaccctggtaacctccatgtctggggcgccatgctccaaccttggacttgttcccagggatatgcatggtagtatccctattagcactacaaattcctctgggccaagcattggtgttagctctttggtgacggatgctaactcatcgctctccggaggtgcccagttgcagccaagtacgagcatgaatgctgattcattcatgcgccttcctgcttccccaatgtcgttttcatccaataacatctctggatcttcagttattgattgg

SEQ ID NO: 391396 - DNA, 765 bp, Oryza sativa
cgctacaccccaaaaacctctcacgcgctctctcccctcgcctcgccgcgccgctgcgtcgtcggcgacgggatcgtgggctcgtggagagggcaccgccgccgccgtcgccgtcggacggatctagccgtctacaccccgctccccgccctctctctcgaggcgatcgcgccgagctgagctgaggtgagggtgtagcttactatcatggcgtcagccacttggagcgtctggatggctgaggggtaaggtgaagggtgtgacttctggggactgtcttctcatcatggggagcaccaaggcggatgtcccgccgcctgagaagtcgattactctgtcatacctcatggccccaaggctggctcgccgtggtggagtggatgaaccatttgcttgggaaagcaggggagtttctaaggaaactctgcataggaaaggaggtcacattcagagtggactacacagctccaaatgttgggcgagaatttggtactgtttacctcggtgacaagaatgttgcctactcgataattgctgcaggatgggcaagggtaaaggagcaaggcccaaagggcggtgaaccgagtccatatcttactgagctgctaaggttggaggaagttgctaagcagcagggtttaggtcgttggagcaaggaacctggtgctgctgaagaatcaataagagatcttccaccatcagcaattggtgaagctagtggttttgatgcaaagggttttgcaggtgcgaataaaggcaagagtc

SEQ ID NO: 391397 - DNA, 661 bp, Oryza sativa
  unsure (1)..(661): unsure at all n locations
ttttttttttttttttatcaatgtaatcatccaggtatgaaactgtaatgatcatatacctcactattaaaagtttatttacgatataggcaattttacaacagatttcagcccatttctctcacctcacaaaagaactctacaaattgaagacagtaaagcaactcaaacttgagagaccaaaccatcttgaacaaaccaaaaaatagctcacttcaatacactcatgcactatgcctaactacatagtagtacccttctatactacaatactcttctcttgactgtctcaggctgatgctgtgattgcacttgctcagcactgggagcaactcatctgcctcctcttgcccagagaagacatggccctggcaaccctcaccttcttcaccagaagcccccacttatcgtcatcatcgccggcctttgccttcgccttcgctgccgccttctcctcctcctttctcctgaactgcatgcagagaggggtgttgcagtggccgtcggggaggtcgcagagggcggcgtgggaggcggaggagctgccaaatgcgctggcagcggggcagctggtgcggtggcacgggagaagtggcgggatcagcagctgcagtccccggnaaggcgtcgcgtaagccggggaagggggccggcggcgggg

SEQ ID NO: 391398 - DNA, 523 bp, Oryza sativa
  unsure (1)..(523): unsure at all n locations
ttctctccccncattataaatagggaagtcatctccttgaagctagctggcctaagctaactcaatcaaacctccctagcttggcagaatagttaatgttaatcacctgattaaaattagattagtcccctcctacccagctaactactgcttctatttcacggagaaaaatgtcttcctaggctttctctttcagctcgatcgatccacagctcagctagctctctctctctctagcgacaagcaagcatggagcagctgttcgtcgacgacccagccttcgcgagcagcatgtcgtcgcttgaggcggacatcttctccggcgccggccagctgccgtcctcgccgtggctggacctagacctcgacgacgatgtccaagacctctccatggcgccgacgacggagaacgcggtgtcctccggctacggcttccggcggatccggtttccacaggaagttnagcacaacgctacggagcgngaccgccggaagnagttaacggnttttattcctcctccgg

SEQ ID NO: 391399 - DNA, 525 bp, Oryza sativa
atttcttaagctccggcatcatctccatcatctcatagtcctcttcctcctcagttcatccttgcctgttgcctactccctcctcaatcctgcagaagtttctgaagagatcaattaccaagaaactgagaggaaacacacagattatctgcacacagatcatcaccatacttgcatctgtcgttgagagaagatgatcccgttcacaaagcagagaagcaccaagatgaaacgtgccctgcactaagctatgctgttcggcaggagctcggtgaggccagtgatggaagcacgccgccgcacgccaagattctgcaaggcggactcggagtcggagcagaggaagctacggcgtgtcaggctccccttctggtcgtgcccgccgaatcggccgccgggcacctgacctgacctgacctctcttcctcttcctttgcatcttccacttcctcttcctcttttctcggtgtctgaatctttcctgagttggtgaacagcctgaggaagacacgggctacgatcctt

SEQ ID NO: 391400 - DNA, 469 bp, Oryza sativa
ttgattccccatagccatagaggcctagaccctacgggactactacctcgccatgatggccgcggagccctcgccggcggcagcctccgccgttgaagacctcgaaactctccccctagactcttcctactcctccgcccccgccactgatccactcctccgcccgcctgcttccccgtccgccgcctccgccgccgctggtggggaccacgaccccttcgtcatcgacgacgacttcctcgtcgacgaggaggatgacgacgacgtcgggccccctgcgcccaccgccatcccgctggtggccgcggcggcgcgggccccggagttcgcgcggatcgccgtgtccgatccgaagaagcacgcggagcccacgtcgggggccgccggcgtgatcccaggctccgggagctacttctcctacctcatcaccacccgcgtcggggaggccgaggtccgcgtgcggcggcgc

SEQ ID NO: 391401 - DNA, 424 bp, Oryza sativa
  unsure (1)..(424): unsure at all n locations
cccacgcgtccgaaacagcacatcggaagccaagccccaggaaagaggaacgcacgagcagcatatgtcacagagggccagcgtcccacactcctcctccatagccttcgccctccattcccatctcctcgtctccagtgagatgtgccccagctcctattggcagcaataggaatagaaaagattgctcctttcttttgagctttcttgcaattttggtcttctttccttttgatttggtttctttccgtccgatttgtgaagaggaggagcaatggggttcaagggatttgtggagggtggcatcgcgtccatcgtcgctgggtgctcgacgcacccgctcgatttgattaaggtgaggatgcagctgcagggggaggcgtcggcggcggcggcggcggtcgcncggcgcaggcggcgtgcn

SEQ ID NO: 391402 - DNA, 500 bp, Oryza sativa
actctcactctgtctcctcccccgcgtcggtcgcttcgcttctactggaggagagcagaggtggtggttggtgagagaggatgcgcggcggcggcggcggcggcggcggcggcggcgaggaggccggccagaagctgaagagcatggacgtcgacaagctggagaacggcggcgacaagcccgccctcaagtaccacggctggagggccatgcccttcatcatagggaacgagacgttcgagaagctggggacgctggggacgtcggcgaacctgctggtgtacctgacgcaggtgttccacatgcggagcgtggacgcggcgacgctgctcaacggcctcaacggcaccaccagcctcgcccccatcatcggcgccttcctctccgacgcctacctcggccgctacctcgccctcgccatcgcctccgtcgcctccctcatcggcatgttcttgctgacgatgacggccgccgcggacgggctgcacccggcggagtgc

SEQ ID NO: 391403 - DNA, 602 bp, Oryza sativa
acgcgtacgcgaggtcgcacgcgaagcactggcatgctgtcagtgacgaaacatctcacgactactgctgccttatcgtggaaggggccagatttgattaagtaactgagagcgcatcatgtgtggcatgactcagacctcttatatgatgtgtggatgcgcgcagctgatgagaacgcatcacaggtgacacagtgcgtaccagatgcttgctacagggactatctcataccttgggagaggtgttgcaacgacataatgggcgctgaaggggcagaactggaaatcctcattggccttagttcacagatatgcaaactcattcctgatgaattctcccaagagctagagcatggacagattaagcggagcttcattaagaggcttgtggacaccctgaatgcaaacatgaacccaagttctcattgccctgggatccggagggtggtacttgagcaatccatacacatgatggagtacaattctcgctatgccaattatttcaatgaataccagatgatggatgcactgtcgtttgtagaattgacaccctcaagggctgagaattacatggttttcttgggttacgcggtttcatggga

SEQ ID NO: 391404 - DNA, 721 bp, Oryza sativa
cctgtccaattcggtggtctcttcaaggaagatgatcctgagttcaccacctcagacgccgttaccgagctcactatcaaaccttcatcgaaagaaaccgttgagattcctgtcactgagaattccacgattggatgggagctccgggtgcttggatgggaggtgagctacggagcacagttcactcctgatgccgagggtggatacacagtcatcgtgcagaaaacgaggaaggtgcctgcaaatgaggaaccaatcatgaaaggcagcttcaaggttggcgagccaggaaagattgtgctaacgatcaacaaccctgcatcaaagaagaagaagctcctctacagatccaaggtcaagagcaccagtgagtccgtttgaggttgcagctgcctgatcaccagattcaccacaatggcagctgaactcattccctgatggaagagaaaccttttggttttggttctttaatttattggttttgctgttttggttcacattttgtatttgtttaattaaaaaccaaagtgagcttgtttttgtgatagttggaaggagagggttgatatgatataaccccctcgtgatggtttgttgagggcagaggacaaaaattgtggaaggactgaagaatatctgctgctttgtatatctgtctgtacattgcatctctggattctcatggacatgttaaatttagaagtacttgtcatcattcacc

SEQ ID NO: 391405 - DNA, 451 bp, Oryza sativa
cccacgcgtccgccatcgccagtttctccacctgcacatctgcgcgcgcgcgcgggaggagcagaggcggcgagagagatccgggtcgggaggggtgatggacttctccggcgacgtcaagccggcgatccaccggccctctgtcgcggcggcacgcgggtgtgagggaacggtggggcgatcccgcttcctgcgtgggtggcaggcgttccggaggagcggcgcgccggcgaggctcctctgcttcgagggcggcgcgtgggcggacgtcgcgggcgaggtggtggggctgctgctgcgggcgttcatggaggggaaggccgtttgcgaggccgccttgcgtgggaggtttttcctgttttacttcatgcggatggtttgtatcgatgaggccaccgttttaggatgttctttttttgttgttattattaccattttttttcttttttct

SEQ ID NO: 391406 - DNA, 549 bp, Oryza sativa
agaatacaaaagggcacatttctgggcttaccggtggtgaatggaatcccaagtcaaaagaaaccatactgacgtcatcagaagatggatctattcgtctgtgggatgtatcagactttaaaagtcaaaagcaggtcataaaacctaagcttgcaagaccaatgcgaattccagttacctcatgtgcctgggatcatgaaggcaagcgaattgttggtgggataggcgatggttcaattcagctctggactgtcaagactggatggggaagcaggccagatatacatgttgagaaaacacatacggcggatattacaggggtcaagttctccacagatggacaaatactcctgtcaagatgtatggatagtactctgaaggatatggggatttgacggaaaatgaaaactccttttgaaagttttttgaagattttaccaaatcactatgctgtgacaaatgtgggctttcaagccccgattgggcaacttattttcacaggaacttctattgagaaagtctgtgttaatggaggcttctttgttcttt

SEQ ID NO: 391407 - DNA, 455 bp, Oryza sativa
gtcaatgtgggaggaatgccgccagtgaaattgttgttatcaagcaacctgatggcccggagcagtgggtgatcttgagcatgacatagcagattgacagtcatgaaacaggttgcaaatattatctaacggcatctttgccttacagatgtatgagcttcatatttgatttgaatagctggcttggtatggtgcctgatagctggttgaccccaaaatgactgaataaagagcagtccgaacattttccttagaatggaagcgagtgaactgaaagcctggtagatattttaagaaaggtactcacaaatgcagagcgtttgtcaaattgtccaatccagtattggttccatcagatactggaagtgatccagtcagacgattttcacccaagtcaagccagtacatatttgaaaggttgccaattgatggaggtataccttcagtaaacctgt

SEQ ID NO: 391408 - DNA, 918 bp, Oryza sativa
ctcaggagaaggccgccgagaagccgatacctgtgccggtggctcctgtcaggagagcgcagactgcgtcggcgacgctgtacgccacgcctgagagcacatcactgccggattcgccttcgtcgttcccaggaacctggtcaccgtacctaatcaaccataaaagggggggaccctgcttggtgaagacactttcccagggggatgttggtagtgatggtagccagcagccaacgctctttgtgacgctgcttctttggccgaaaggaagtaaatcctttgaagcgcaggaacctgagtttgagtttcagcaagcaagcaatggtgtacttgaaggtgacagtggtggggtggagaccctcgactggcagaatggaatgctacagaagggcaagggcactgtttcaggcgaatatgggcatgatcaggctgagttcgagtttcagcatggaaatcctgatgcgacagtgaggcctgtcaatgttggaaggcctgccaatggtggaacaccaaggaaaatcaacaatgatgccttctttgagcttcaggattcactgagcatggctagtaactctgaggcggaggatgctggtgggcatgagcggtggtggaagcctagttcccctcttgggacatctgttggcacacctggtgcagaattttatgatgcattcgaagaaatatccagtgatggtgcaactcgatcttcacaatgcatggatgatgaccttcgtgaaatgaggttgagtctgttgatggaaattgagagaaggaagcaagctgaggaagcacttgagaactggcaaaaggagtggaagaagctgagtgatcacctatcacttattgccttgacacttccacctccaagtttagctgaggacactgatgattcaagcatggatcctggagctgagttgt

SEQ ID NO: 391409 - DNA, 808 bp, Oryza sativa
ccttttgctcctgttgtcttctccgctcctgtcgtctcctctcctcccccccaaatccccctcctttttcttggtgctgctgctgctgcacgaagccacgagcgcctcgccacctcgggatcgcctccaagatccgattttgatctccccgccgccgacgaattcgtcgagacccgccctcgccgtacctgcccaacggtgctcgatttggttgtagccttctggttctggattgcaggaatataacaaaacttaagcactgagcagcagtatgccttggacccctttgtactcgacttattacagcagccgaaagtctgttcaccttgctgtgtttttccgtgtgattgtgtgaggcggtcacatttacaggagaatccttttcctttgtggttctttgttcttgacgacattgggtgtgtaaaaattgagaatgtatgttaaggttgaacttaagagattccgcattgtgaaggaggtgggaacaatagtaatgaatgttaggatctttgcttattaccagttgatgcaagtgtgccaggctgagtacttccgtcaattgcttaagcctgtcacgtagtccaaatacaggagtcgagattagtcactttatctgctatttatctttcgtctggcataaagttgcaacaacaaaagcagtgcattcatgattggctaccttgtggtaggggtggttaggttcttgttggtgcaagtcgcaaacattattgtaaatttctggtggttttgggtagtggagcttctacattagattaaggtgagggcttgactttagtgcgtttctgtt

SEQ ID NO: 391410 - DNA, 527 bp, Oryza sativa
  unsure (1)..(527): unsure at all n locations
cccacgcgtccgcggacgcgtgggcaaaagtcctcgcatcccgccgccgccgccgccccgcctcctcctcccatgcgccgccacgtaggatcgcgcgatcagatctagggtcgagcactccactctcccgcctcccacgcgatgcggtggtggccggcgctgccgctgctcctcctcgccgtcgccgtcgccggtgccggcgacgcggctcccgtgtgcacgcggccgtccgcggctgaggcgatcgtgggatcccccgaggcgtgccgctcgccgctgcgccgcccgctcggcgtcaccgagggagatgatgctatcttagcgagggccgttaatctacttcatgcaaacaaggaggatttcgctgctgggctcttctatgcttcctggtgcccattttcacaagaatgcagactacgctntgagaagttggcttgcatatttccaactattcgtcatcttgcaattgaagaatctacggtcaggttaaggacaagatatcggtatgggattcatggatacccaac

SEQ ID NO: 391411 - DNA, 666 bp, Oryza sativa
cccacgcgtccgcccacgcgtccgctcaggttctccctcctctctccgcccccccgcaacttcctgaaattgcatctaggtccccctgacgcagcgattgttccctcccttggagaggtggccgtagctctccggcggaaggcggcggagatggcttccacggccgcggcggcgtcgtcgcaggggtgcatctcgtgggcgctgcggcagcgtgggcttggtggtggtggtgcgcgggctgtcccggtgcttccccgccggagattctgcgtctccgcggcggcgggtgcggggttcgacaacgagaatcgcgagtatgtgatcgtgggtggaggcaacgcggccggttacgcggcgaggacgttcgtcgagcacggcatggctgatggccgcctttgcatcgtctccaaggaggcgtatccgccatatgagcgaccagcactgacaaagggctatcttttccctccagacaagaagcctgctcgtctacctggctttcatacctgtgttggatcaggtgggcagaggcagactgctgaatggtacaaggagaacggcatagaggtattgtatgaggatccagttgtagcgtttgatggcaaaacacataccttaaaaacttcatcagggaaaatcctggagtatgggtcacttataatttctact

SEQ ID NO: 391412 - DNA, 519 bp, Oryza sativa
  unsure (1)..(519): unsure at all n locations
gagctncaattagcacnacaacgaacccctccttttcttcccccccttctcctctctcctctttttttcctcatccgtgcgcgatactgcgcttagtttgtgggtggggggagggatcatcaccaaagccacaaagggggcgcggagagatattatatattctttgggaaagcgttggattagtttttctcgctttgggctttttatccggagttggagtgtgtgtgcgccgggagtggtggtggtgatggcggccggagaggaggtgatggatcggtcgacgtcggccgaggacgggtactgcagcgccggcacggactcgccgcgggcggagtccgtcgacgagcaaggggccgccgaggagtcgtcgccccggggagggcagaagcgggagctcccctcgccgtcggcttcgccgtcgtccccgctgccacctgccgcgaagcgcagccggaggtcagtggagaagcgggtggtgtccgtgccgatcgcggagtgcggcgaccggccgagggcgcc

SEQ ID NO: 391413 - DNA, 458 bp, Oryza sativa
tgtaagtttagctgcagctacttccttgtactcgcgtgtgtcggctagaccacccggatacttgtattcagaaccccattttggttggtgttaagtttcatcatttgacaagtgccgtgagctgtttccttgtcaacttgttcttgcttgttcttcgattgcttgcaggttcaaggttgttcttggcacggcaagaacagcaacaacgtggagtcggtgtaccggttgctaaggcgcagcacccctgtggtagttgtagtcggaccgccaacgtcgtatccttccccaaatcgaagtttatcctcctctcatcgaaagatcgggaacccccgttgctgcatcaagtggtatcagagctcaagttgctcggtgagagattttatcacttctttgtttttacctacagcccaaaagaaaaaccactaaaataggtcagacccgaaatcaccaaaacatgt

SEQ ID NO: 391414 - DNA, 502 bp, Oryza sativa
  unsure (1)..(502): unsure at all n locations
gaacaatttacgaaatggaaaggattgcgggaaagcactgatcgtgagattgtttggccaccaatggtggttgttatgaacactgtattggaacaagatgaggatgataagtggaaaggtatggggaaccaagagctaattgattatttcagtgaatatgctgcaagcaaagcacgccatgcctatggtccaaatgggcaccgtggcatgagtgtgctaatctttgacagctcggctgtgggctatatggaagcagaacgtttgcatgatcactttgttcgtcaaagaacagacaggaatacatggaacagtgctcacaaggttacattcttacctggtgggaaaaggcagctgtatggtttcttagctacaaaagatgacatggagacattcaatanacattgccacggaaaaatcccgtttgaaatatgagatgagatcttataatgagatggtggttacccaaatgaagcagatgagcgaagacaaccagcaactgaat

SEQ ID NO: 391415 - DNA, 533 bp, Oryza sativa
cggcttatctcctcccccctccccaccaccaccaccaccaccatggccacagccgcttccctctccgccaccgcctcctccctcctcgcccccgcccccgccaccaccggcgccgcggcggcgcagtgctgctcctcctcgtccaccgcgctgttccccacccccgtcccgtcgctgcgcgcctactacccgcgcctgctcctcgcgttccgccgccccgccgtcgccgccgtcgcagacccgcagggcgccgtgctcgaggaggagcagggggagcagcaggacgaggggcaggagcagtacgacgacgacgactacgacgacgggtacgagggcggacgcggccccgcgttcacgccccccacccgcccgcgcaccggcaaggccgcccttccgctcaagcgcgaccgcacgaggtcgaagcgattcctggagatacagaagctgagggagagcaagaaggagcacgacgtgcccacggccatctcgctggtgaagcagatggccagcgcccgattcgtcgagtccgctga

SEQ ID NO: 391416 - DNA, 507 bp, Oryza sativa
  unsure (1)..(507): unsure at all n locations
cggacgcgtgggcaagtatatcctctcttcttcttcttcctcctcacaactcacaatatttcagagtagtatacctttcttgctagctagctagcttgttcatcgatcttgttttgaggtgctgagatagctaggatggtggtgaagaaggcggcgacgatggcggaggcggaagcggaggaggagatgatgatgaggatgatgtgtggctcaggaggcaacgagatgatgaagacgatgatgaagaagaagaatagagaaggggaagaagaagaagaagtaagtggaggaggtaggatgaggaaggggccatggacggagcaggaggacgtncaactggtatggttcgtgcgcttgttcggggaacgtcggtgggatttcttagcataggtctcaggtttgcgcggtggcgggtgacctagctacatgcactggattgcctcctttcttcttataaataatcccttcccatcaaacatccattccatcatcgactgcctctttttc

SEQ ID NO: 391417 - DNA, 696 bp, Oryza sativa
  unsure (1)..(696): unsure at all n locations
ttaaaggcaagagaatcccttgctgtccttctttgggacacccacactacattacttcttcaanctgggtcgatcggtgtatgccancaggatttgttcttnctactttgaaaaggtttatgccagaagagagacttgcagatgtaaagggtataaccatcactgctgatgggacaggtgctgtatttgatgttccttcagcagaggttgaagactatattcaaggtgcacagaacgctgccatggtgactgtcgaggaagtgaaacaattgccacccttgcaagagagggaacagtctggtggcagccgaggtggaggaaggtttggaaacaggagattttctggtggtggtggtggccggggtggaggcggcagagggttcggtggaggcagaggcaggggaggtggcggcggcaacaggtttaacaagaggtactagctgttgctggagcactctcatttttgacctataggttgagccaaggcacagggaatcgccaaaattttgactgcgccatgtatcggttttttgtttatttgttagtgtttgtgtgttcgagattatgatgatcaattttgccatcgcaatagtgtacaatattgatctgatacttgctacatagtaactgttaagaatgaagctatatacttgtttccccatcggctnnnnnnnnnnnnnnnnnnnnnnnnnnnnn

SEQ ID NO: 391418 - DNA, 736 bp, Oryza sativa
cccacgcgtccgcccacgcgtccgggatttccccattgtatcaattgaggaccctttcgatcaagatgactggagctcatgggcatcattgcagtcttcagttaatatccaaattgtgggggatgatttactcgtcacgaacccaaaacgtattgcagaggctattggcaagaaggcttgcaatgctcttttgctgaaggttaatcaaattggcactgtcactgaatcaattcaagctgctcttgattcaaaagctgctggttggggcgtgatggtcagccacaggagtggggaaacggaagataatttcatcgcagatctggctgttggtttagcaagtggtcagatcaaaactggggctccatgccggagcgagagactggcaaagtacaatcagcttctgcggatcgaaatggagctaggcaatgtgcgctatgctggggaggcattcaggtctccctaagaaacatacataccacacaacattcggaaagagtcgcttgtgtactgttgagtagaaataaggtcttgtactattgaggcatccttattttttttcttatctttttgcaacttaatctattggatgcatggttgtatatgcatctgtagcttgtgctacaggagaagccatccgagagaccgctaatgctaggaaacgagctgtatttcctcaacatgattagtaacattttttgccatgcattatttatcaaactaatcggctgtctgaacc

SEQ ID NO: 391419 - DNA, 937 bp, Oryza sativa
ccactggggattgcccaacatcatgatgcagtctcaggaacggcaaagcaacacacaactgatgattattcgaaacgccttgcgattggggtttctcaggttgagaaaggtgttaatactgctctaagttgtctcacaagttccaaaggaacatgtacagcaacaaaatttagtcagtgccaacttctcaatattagctactgcccttcaactgaggaaggaatttcatccgcaaagagtttagttatagttgtttataatcctcttggatgggaacgtagtgccttttgtaagagttccagtaaatgatgccaacttaattgtaaaaacctctgatggaacttctctggagtcacaactagttgaagttgatatcgtgacagcacgtttaagggaagttatacataaaggcttatcttggaatcacgtccgataaacccccaaagtattggctagtttttcaagcttctgtaccaccactcggctggaacacctacttcatatcaaaatctactggaacaggatctaatggaatggggtatgtctcaaccatggtttctccaagtaatgacacaatagaaattggaccagggcctctgaagatgtcctattcatcaaaatctggacaactcaagagaatgttcaattctatctctgcagtggatttgccaattcaacagagctttctttggtatgcttcaagcaccgggagattctgaagattcacaggcatccggagcatatattttcagaccaaataggactacaccgactatagtttcaggaatggcgccattgaaagttatccatggacctcttggtgcgaagtccaccaacagttcagctcatggattatcaggtcacgagactctacaagaataaaggagcacgctgaagtgatatactattggaccaataccctgtgatgatgatgatg

SEQ ID NO: 391420 - DNA, 602 bp, Oryza sativa
  unsure (1)..(602): unsure at all n locations
gttttcagacaccgcagaccatggagatacatacattgttgtgagtggatctacagatggtagcattactttctgggaccttacagatactattcatggatttatgcaactagtatcagagactcaaccacacatggttattgattgccaaaagcggcccagaacaggaagaggaagtcaaggcggtcggcgcaggtggagaacactgccgggccgttctttgaaaaagataaataaagagacatcgatccctgatgggagcatcccgaatactccaaatgccactgaaaatacatctgaaacttctaatgtggaagaaactgatgccacaaaccagaactatgcattctcaaatttgcaatcgtgtaatataccctgaggtgacaccaatgcacagattctcccgtgttcaccagtcaggcgtcaactgcctccatgtctcagagatgagggcttgctcgtactcgacacctggcatgtcttactgtgtcataagcggtggggatgatcaagctgttcactgtttcagntttacattaggntctcttcaggattgcgcagtaantacaagcctagactcacctgacaatggtgcagttaaa

SEQ ID NO: 391421 - DNA, 611 bp, Oryza sativa
cccacgcgtccgcccacgcgtccgtcttcttgtgctttttgtgggagacccttcactttaaatttcttcttccttcctccgcgaaccttaccccgatccaaaccgttctccactcgtgcaaccccgcacctctctagaatcttgatcctcccaagctgctcaagtgctcatcccccatggcgagcgccccctcggtcaccgccttcttcgggctgctggtgtccatgtacgccaccggattcttcccctacgtcgacctgcagtcgggtggcgagagttgcttcgttcgagctccgccgcttgacgccgcggtccacacgatgctgctggcggcggcggcggcgatggttgccttccacacatccgtcgcactcatctacgcccccctatcgggcggcggagccggcggtgccgtggacaggatgatccgcccgcaggtcgtttacctcatcctgttcttgtcttccggcgtgcttcacgtcttcttggctcctcagccaggcgccatcgacggcggccaagatttgctacccctcgccggccgcgggtggccacgtgctcccgccagctgctgcagggacgacgttcttcctctccatgacgctcatcta

SEQ ID NO: 391422 - DNA, 335 bp, Oryza sativa
  unsure (1)..(335): unsure at all n locations
cgcagttggtttccccctcccgcctccgaccacccacgtcatcaccacagcgacctctactccactctgccccgccgcccatggccgccgccgccgcggcgctcgcgagctcccccatggtccacctcacggcctcccggctccgcctccccaggcccgccaggtcccccgcggcggcgacgccctcaccctctcccgcgtccgccgcgtgctgctcgaggggcgcggcatgcggcttggagtggagacccaagtctgggctgagggccctgaggcggtgcgaggaccggctgcggtgcttctccatcgacngggggaaggggtgggggcgtggt

SEQ ID NO: 391423 - DNA, 620 bp, Oryza sativa
gaaccagatatttgtaaaccctatggctccaactatatttctagtggttcttctcttctctagccacatcatctcgttgacatctgctattggtagccaagtgatttcgcagcatttgtttggcattaatcttcctctctctggacatcatctgatactgaaggcttttgccatagttcctgctctgtactgtgctaaggttgcaggtgctgaaggaatataccaattactgataatctgccagattatccaggccatgctccttccatcatcagtcgtgccactcttccgtgttgcctcatcaagattgataatgggtgcccacagagtgtctttgcatctggagatattaacatttcttgcatttctcctcatgctggtttcgaatatcatctttatggcagaaatgctgtttggtgacagtggttggctgaacactctgaaagggaatactggaagccctgtggtgtttccatctacggttctcatcacggtggcttgtgtctctgttgcattttcactctacatggctgttacaccactgaaatcaggaagccatgaagctgaattgcagcaggaatggtctgtgccttctcagaaagagctcttgaatactactc

SEQ ID NO: 391424 - DNA, 1094 bp, Oryza sativa
  unsure (1)..(1094): unsure at all n locations
attgttgacaagctatcgttcaaagaacaaatggcctgcattttgttgaaacttggccgctttgaggaggctgagaaaacatataggtccctgcttttcatgaatcctgataactacaagtatttcatagctgttcaaaagtgccttggtctatactcagagaatggtcagtattccactgatgatgttgaccgattatgcgaattgtatagctcacttaaagaagaatatggttggtcatctgctgttaagcgcataccccttgatttcctggaaggagagaaatttcaggaggcagcagataattatgtcagacccctattaaccaagggagtaccatcactattttctgatcttagcccattgtacgagcaacctggcaacggcaaacatattgggaggaattgtttcttaagctagaacgttcaattaggacttcaggatgcttcccaggaagttcgcatacggaacctccatccacactcctgtggactctgtttttgatctctcagcactatgacagaagaggccagtatgatattgctctagataaaattgatgaggctatttcacacacgccaactgtaattgatttatactcaataaaggggaagatattgcagcatgctggcaatttctcagcggctgcagcgggggcggatgaagctaggtcaatggatctcgctgatcgttatttaaacagcgagtgtgttatgcagatgctccaagctgaccaggttggtctagctgaaaagacagctggtttgtttactaaggacggcgatcagcacaataatctccatgacatgcagtgcatgtggtatgagcttgcttctggtgagagttactatcgtcaaggtgatctcggcagggctctcaaaaatttcttggctgttgagaagcattatgctgacatgactgaagatcaatttgacttccattcgtattgcttacggaaaatgacactaagggcatatgtttctatgctgaagtttcaagatcgcttgcatgctcatgaatatttccacaaggctgcagcaggagctatcaggtgttatatgaaattgcatgattcaccatcaaaatcatccnct

SEQ ID NO: 391425 - DNA, 549 bp, Oryza sativa
  unsure (1)..(549): unsure at all n locations
cgcctccgcgaggctctccggcgacgcgccgaagacacggacgcgacgggggcggcggcggcggcgcgcggcgcgtggcgcgacccggaggcgacggcgacggcgacggcacggctcactcctccggccgccaccttctctccgattgcacacgcacccattagacttggagaagaccagcctcctccttcctgggaccttggaccctctccttcctgggaccttgtgccctctccaagagttaatatgcttggaagaggttctccaaggttgaccatgcttttagcgaaagctgcacaaaagaagaactctctgaaaggtcgtcctacaaaaaagcatggaggttctccaatagaaaaaacaagagcctcttggaacccagccctagagaagattcttgttgagttattgcatgagcacaacactcctgagtataggggtcagaatggatggacttcanaagcttggaacaaaatcgtgaaggaattccatgagaaggacatatatgtctgcttaacaaagtcccaaatctaagaaaaggagaaagag

SEQ ID NO: 391426 - DNA, 716 bp, Oryza sativa
gagccgaccgcgtcacgcagtcggttgcatcgctcgcctgtatgtcctctccaccgctgcgcatctccacagtcggcgacgccctccctctccgccgctccccctccccctccccccaccggcggcacccctccctctctgcccccttcctccttagccacggcccaaggcggcgagcagcgccctccttctgcaggcgacgccctccccccagccggcggcgccctttcctcagcgacatcattgtcttctccggcacagtggaggcaaccccttccgttagtgcctcggcgacaacatcctccttgcggcgcacggtggggcgctcgccaagccgccacgacctcggggcagcgggtgcttgcctctgatattgcacgtgcacccattagagttggagaagaccaacctcctccttcctgggaccttgtaccctctccaagagattgctcgtgaaccaactatagttggagaagaaattttctggggagcgaaataaaggaaatgcaatgtgttgctgactttgtggggaatgggaggaagtcctgatattttttttatatgtagggtaatacttatgatcttttcaagacattcttgaaagcaagcatggggtggctttctggtatggacatgcaaggaagagcacttctattcaagggtgaagacatccattgggagcaagcatttggtgtttggatgtaattggttgccat

SEQ ID NO: 391427 - DNA, 611 bp, Oryza sativa
ctaatctctccttctcttaacccgcctcccctcccgttctccccgcagatcgcagttttttcaccgtcctccgcccgtgcagtggacgcttccgcctcccacactgcgtctgcgtgcgcacacagcaccaattcgaaacccctccccgcactccctccccctcccttccttgccttgcctaggcggcaacgcctcccgtcctttataaccctgcggctcctcccgcgtgaggcaccgaggcccgggtggtagaccgcgggacccgagccgagccgtgccctgccctgcccttcctccgcccagggtcgcagccaggtcgtcgtcgtcgtcggagggggaagagagccgcggcggcgtcaggaggaggaggaggggcgagatggaggccgaaaaaaagccgccggcggtgtccgacgtcggggcgtgggcgatgaacgtcgtcagctccgtcggcatcatcatggcaaacaagcagctcatgtacttctccggctacgccttctacttcgccacgacgctgaccggatgccactttacggtcacggcgctcgtcggatggaactgcaacgccacccgctactccggatgcaagcacgtaccgctctgggagc

SEQ ID NO: 391428 - DNA, 728 bp, Oryza sativa
  unsure (1)..(728): unsure at all n locations
aatttataaaaggcgcagcccgtcgtcgagccctctcatccctcttctttgtctgatcgatcgattgcttctccctcctctcgctactagactagagagtaggtagagctagctttctagctcgtggatcgttaagtttgtagtcctgcccgggcgccggcggtgaggtcgcgatggccggcggcgcggtggtgagcacgggggcaggcaaggactaccctggcaagctcaccctcttcgtcttcttcacatgcgtcgtcgccgccaccggtggtctcatcttcggatatgacatcggtatatcaggtggtgtgacgtccatggacccgttcctgaggaagttcttcccggaggtgtatcggaagaagcagatggcggacaagaacaaccagtactgcaagtacgacaaccagctgctgcagaccttcacctcgtcgctctacctcgccgccctcgtctcctccttcttcgccgccaccgtcacccgcgtcctcggccgcaagtggtccatgttcgccggcggcctcaccttcctcatcggcgccgccctcaacggcgccgccgaggaacgtcgccatgctcatcgtcggtcgtatcctcctcggtgtcggcgtcggcttcgccaatcagtcggtgccggtgtacttgtcggagatggcgccggctcggctgcgggggggatgctgaacatcgggttccagctgatgatcaccatcggcatcntggcg

SEQ ID NO: 391429 - DNA, 781 bp, Oryza sativa
cggccgcccgggcaggtgaaagccaggcaggaggaggcgcagcagcactagccgcggtataaaacatccaagcgctcctccatcgtcgccaccgctccggtttgcctcccgcgcgagccctcgtcgacgccgccggtatattgctgaaggaagaagagcaccaacctatttatcatgtcaggaggatcttcaccaaggtcaagacgaagcagctttaattctttatcaagagatctcgaactcccttcagagcaaggttgtctctctgttattgtcctcggggcttctggagacctagccaagaagaaaactttcccggcactcttccatctttttgcacagggatttatacaatcaggtgaagtgcatatatttgggtatgcgagatcaaacctttctgatgatgggttaagggaacgcattcgtggatacctcaaaggagcctcagaagaacatctctcagactttttgcaacatataaaatatgtcagtggttcctatgacagcggagaaggatttgagaaattgaacaaggaaatttcagagtatgagaagtcaaacaaatcagaaagccctcgcaggctcttctatttggcattgcctccatctgtctacccttcagtctgcaaaatgatcagaacatattgcatgaatccatctggatggactagagtcattgttgagaagccatttggaaaggacttggactctgcagaagattaagtgcccaacttggggagctatttgacgaaaccaactctacagaatgatcactacttgg

SEQ ID NO: 391430 - DNA, 817 bp, Oryza sativa
cccacgcgtccggacaagactggatactctgatcgcacaggaaggcctacatgcagaagctcagatctgtcatagcagaagttgccgacatcttactcatatgtgtcagtcgagaacaagctggcttggctattgcacagaatgatgtcagaagttagcatgacaatgcatcacacagtcattatgtcacacggctcctagcatgtcaggtcgcactacctgacgttcgcaaacttgccgatgaggagctaactagcttggtaaatattctgactaacatcagacgtttaacatcgacataattcttggactaattccggctgaactgattaatcttggggattacaatgttcatttggcgaagattattgatggcggtagatacaaggctgcaaccgagcttgctatatcacttgtccagacattgattacccaagaatctattagcatcgcagaggtttataatgttgttgatgccttatcaaaacttgcaatcaggcccagttctcctgaatcgctgcagcagttgattgaaatcgctagaagttttgcttccgtgaaggatgaaaatattagacagtcaagggataaaaaggttttatccggtcgtcctttggtgaataaagaggaaaataatgctaatgatgttgcgttcactgatgctgttggttttcaggagaaggtcgcagtattcattctctgaatggtgtaatatatgcgatcatcccactatgggtgattcagcatacactcattacattgtgaaagctgcaacaggatggcttgctaaaaggagatgatttgaccgacccgttta

SEQ ID NO: 391431 - DNA, 655 bp, Oryza sativa
  unsure (1)..(655): unsure at all n locations
nnnnnnnnnnnnnnnnnnnnnnnnatccaaattatagaagtttatttctttttaaggacgttgagagtaggtccaacctgataaccacatacgccgggtttaaacaaaaaaagataggaaaaatgtgtgcagccaaaaactatgaatcattaccaccgactaagaatttgcaatctctgcatgcaactagcatatgtaactgattaaaaagtaggaacgtacacgcactatatgcaggcaaaggtgttagatcctaacaagtcaattgacagtatttcccacctaacgctgttaaaccgcgcaacagcaccagactttctctatccaggttcatcatacaaagaacctttttcaacgggccccgtcctcatgatcattgtcgttgtcaccttcatagtactcgtcatcgcgatgaatctgcttgtcttgggtttgctgatctacacgttcatcaggatccagctcatcttcatcaatatctgggatataaaaatctggtggaacctcttgcatctgaacaccaggcgnatgttgtatggcccgcaaactctccatgacttgnactttgattgaacttagatatgacttgctattcaagttgtccatgttcacattcgntactttcaatgtataatctggngcaaagtatttggtg

SEQ ID NO: 391432 - DNA, 870 bp, Oryza sativa
  unsure (1)..(870): unsure at all n locations
ccgcgcgcgctagagccggtgccggcgccggcggctcgcatccccactcgcattccgtccttcgtccccctcctctttgaatctcggcggcgaccacgcatgctcaagccgccggcgcgcagncgnaccgcgcgcagtcgaaccggcggtggcggcggcgaccgtgcgcgcactagctggcggcggtggctagcatcccccctcggtactccgttctaggaatctgccaggtttgtcccacgccgacgaccgccgccgctctggccttgccgctgctatggacgcggcccaccgccgaacagcagccagtgccaggatttcctcctcccgttcccaagagccggtgcctcggcccctgctgcttcccggcttaccatccgcccccaccaagtgcccttagcctcttgctgccagcaacagcacaacgacaaccaggaatgtggggatggcaaagtcaggccgcccacccgcccgaagatttgcttactgaagatgctgccagatccatctagctgtttgtggagtgaagcaaatcagaatgccagtgatgcttggaccatgttcgattagcaaactccatctagctgcttgtacatgtgttttttttaggttgctgggctcaaacatatgtgaactttgatggagaagtggccaaaatgctttggtggctgctgggtattgtcatgtgcttttgaacaggttttaattatgctgtatgagatatgctcaacaaacattatgttgtatgagatgtgaaggttgtaatgtgtttttagaatatttatgtgctgatctgatgatgatgatgagagaatgtaaattgatgatcggtaattaattttgtttaaattatgggatgnnnnnnnnnnn

SEQ ID NO: 391433 - DNA, 324 bp, Oryza sativa
cccacgcgtccgcactccattctctcatctcatccgtgaccacactccactctcatccagagcaatggcgttgcaaacgcagccggtaccaaatgcgtcacctcttcatgttcttcggtccgtatgcgtcctcctcctggccgcgtcggcgacggtggcggcgcggcgccacggcccggcggcgcccatcgccgggcagagcatgtacctggcgccgagctgccgcgcgcacacggcgtcgctgacggacttcggcggcgtgggcgacggcacgacgtcgaacacggcggcttttcaagtcggcggtggacccacctgtcgcag

SEQ ID NO: 391434 - DNA, 564 bp, Oryza sativa
cccacgcgtccgcccacgcgtccgcccacgcgttcgctcgcctccgcttctccactctccggtagatcccaccctccaccgccgccgccgccgccgtgctccggtgagccgccggtgagccggagactacagcgacgtcgcgcagagccgttgggcgggtaggcggttgggggctttgcccgagatggcgacgatggggagcctgatcgggctggtgaaccggatccagcgggcgtgcaccgtcctcggcgaccacgggggcggcggcgaggggggttccctctgggaggcgctgccctccgtcgccgtcgtcggaggccagagttccgggaagtcgtcggtgctcgagagcatagtggggagggacttcctgcctcgtggatccggaatcgtgacgaggaggcctcttgtgctgcagctgcacaagacggagggtgggcaggagtacgccgagttcctccacgccccgcggaagcgtttcactgactttgcttgctgtaggaaagagatggctgatgaaaccgatcgcattactggaaaacgaagctatatcaaatattccca

SEQ ID NO: 391435 - DNA, 910 bp, Oryza sativa
  unsure (1)..(910): unsure at all n locations
ctcggataaaggccgctccccaccaccaccaaaccaggacaaatcctcctcctccccgtcctcggcggctgatccccacccgtctccctccaccagcgcgcgcgcaattcccccccccccccacccatcctgcgtgcgctccggcctcgaggagattcagagcctacgtaatcacttagaaatggatagagggcgaaatggaagagatgacttctttggtgggagggacccgtttgccggattcggtggctttggtcgccagaggagcttgatctctggtgtctttggaggcagggatcctttcgatgatccgttctttaatcagccatttggaagcgggatgcacggtcctagcctttttgggccaatgggaggaccatttggagacataaggaatgatggattccttgagcaagctcctcccagaggtaatggcaggaagcttattattactgagcttgatgaggaggaaggagagaactcagggaggcaacgccaagcaaatcgtgagccgtttgttcaagaaccagatgatgagatgcaagggggccaactccagccacggagggatttcaacagggcaaataaagggcagccacaagctcgtacattcacatatcagagctcttccgtgacttatggtggtgtcaatggagcttactacactgcttcaaaaactcgaaggacaggaagtgaatggaataactgtggagaaagcaaggaagctgatacaccgctaaagaggtactcatagatctctcgaggattcatgacaagggcattcactaacaaggagctgaatcggtggaatgtggcactacacagtattgcncatctccatgaggtgactantgggtcgggatcatggaggggatctaggatcacttgctgnttgaccaaatctggtcac

SEQ ID NO: 391436 - DNA, 398 bp, Oryza sativa
  unsure (1)..(398): unsure at all n locations
cgcgcaccgaccccactcggatcctctcctcccctcctcactgcctctctcccgtccacgagcggttggtcgatcgatcgatcgatcggcgcggtccttcgccagccatggcggcggcggcgatggcgccctcgcctccggagccggcgttgccgcgggagctcagcctgggggacctcagggcggtgtccatgctcggccggggcgccaagggcgtcgtgttccacgtcgtgcccgcggcggcgggtggaggaggaggcctccatggcgctcaaggcggtctcgcgggaggcggcgcggcacaagaagaacgggagcggcggcgaggacgggcaccggcggatctggttcgagcgggacgtgctcatgtcgctgcnacaaccgctgcttccctccct

SEQ ID NO: 391437 - DNA, 1494 bp, Oryza sativa
  unsure (1)..(1494): unsure at all n locations
cacaactgcggcaaaaaccaaaaacaaaattctcccccgggttatcgactgcctcatctagagtttcttctttcttcgcgtgttcttggaggaggagcgaggactaggttagctgtattcggagcttcagattatccaaaaaaaaaaaaaaagaatggacggtgagcagctgatgagtggtgaattggacaattcgttcaacgcactcatggtttctggagagggtgagagtggacaggcacatcatgagggcacagggactaccttgttaggttggaaggaccttcccatggagctgctcctgcggatattatcgatggctggagacgacaggatggtaatcgtgggctctggtgtttgcaccggttggcgtgatacattagaatggggagtcacgaatctttctctttcgtggtgccaggctcacatgaatgacttagtgatgtcacttgctcagaaatttacgaagctgcaagttctttctttacggcaaatcaaacctcagctcgaggacagtgcagtggaggctgtagcaaataactgtcatgatttacgcgagttggatcttagcagaagctttaggcttagcgaccgatcgttgtatgctctggcacatggatgcccccatcttacaaggctcaacatcagtggatgttccaatttcagcgatgctgctttggcctatctcagtagccagtgcaagaacctgaaatgcctgaatctgtgcgggtgtgtgagggcagtttccgacagagcattgcaggccatcgcctgtaactgtggtcagcttcagtctttgaacctaggctggtgtgatagtgtaactgacaagggagtgaccagcttggcatcagggtgccctgaacttcgggctctggacttgtgtggctgtgttctgataacagatgagagcgtggtcgctcttgccaatggctgccctcacctgcggtcgctggggctctactactgccagaacatcaccgaccggccaatgtactcgctggcggcgaacagccggcggctgaggagcaaaggccggagctgggacgcggcggcgaggaagaacgccggcgccggcgccgacgggctggccagcctgaacatcagccagtgcacggcgctgacgccgccggcggtccaggcggtgtgcgactccttcccggcgctccacacgtgcccggagcggcactccctcatcatcagcggatgcctcagcctcacctccgtccactgcgcctgcgctcaccacccgcaccgccatgggagggccatcctctccaaccatgcctactagcaagctccctcttgtagaaactagaacagctcggatttgaggaagatgtaaattaaaaccccaggattgcttacgatggactggggaaaactgcttctgtgtttgtggatggatggtgtcatggatcatatgtttcttttggatcaaaatctctgaagagtatatgcatgaggaataagtttaaaaaaaaanannnaaaa

SEQ ID NO: 391438 - DNA, 666 bp, Oryza sativa
tcgctttacgtcttttcttaactgttcgtggttgtttgaccacattatgttctttgataacaaaagaagtgtccaatgttgaatcacaggagagaagccttagcattgacatttcacaaggattcattcttcacaagcttgttgagcttctcaacaaatttcttgaaattcccaatattagagcaagatttatgagtgataatttattatctgatgtgctggaggcttttctggttatccgtgggctagttgtgcaaaagacaaagttaattaatgactgcaataggcttttgaaggaccttcttgatagcttgcttgtagagagtactgcaaacaaacgtcaatttattcgtgcttgcatctctggattgcaaaagcatgtgaaggaaaagaagagacggacatctctgttcattttggagcaactctgcaatttaatttgcccagtaaagccagaacctgtttatctcttaattctaaacaaagcacatactcaagaagagttcattaggggctctatgacaaggaatccatactccagtgctgagattggcccactgatgagagatgtgaaaaataaaatatgccatcaacttgatttgattggtcttttagaagacgactatggtatggagttactggtcgctgggaatatagattcacttg

SEQ ID NO: 391439 - DNA, 580 bp, Oryza sativa
cccacgcgtccgcccacgcgtacgcccacgcgtccggtcgttttgattcatcagaaaaccacatggttacaggccggcaccataatatgtctgactgtgacatagatgcaacattttactggcacagggatggcaattatagctattgtcactgtattgttaccgactctcttgggtgtgactgcattatttgcgaagctaggattgatggttgctggtggtgttgtgcttgcatcttttatcacatacgcttcagagcatattgctatctctgccttttacaagggtcagagagatacaaatgtgtccagaagtagaagcatctgcttcttgttttagtcgttaacccggctcctacgcaattcatttagttcatgtaccatatgtaccatccatggtgtatcctatgtcttttacacaaaaacaaaagcgaatgatggtatacacagcgattccattgttttgatgtcaatgaagagtaaataggttccaatgatgttcatccatcacaaatgacatgaaacttgcaaacacgtattgtaaatcttgtatataagcactccctgttattattttattc

SEQ ID NO: 391440 - DNA, 335 bp, Oryza sativa
  unsure (1)..(335): unsure at all n locations
gcgcccacgcgtccgcagctcagctcggagaagcgaagaggaggaagaagagcaagacgccgatggttacgcgtgtgtgctagtggctgagcactagcggcggcggcggcggcgacggcgacgacgacctcacccacggcggcgacacatgttgagtgaacaaacggcggctagtggtagcagcagcagcagccgcggcgccgacgaccgggagattgtcatcagcaccggccgggagatcgtcgtcagaagcagcgggggtgaggagagggaggaggaggtggtggtggaggatgagctcgaggagccgggagttcanggacatccacgcgctg

SEQ ID NO: 391441 - DNA, 525 bp, Oryza sativa
ggaggtgtccacctcgagatgactgggcagaacgtaaccgagtgcatcggcggatcccgaaccgtcaccttcgatgacctgggtgaccgctaccacacccactgcgacccgaggctgaacgcgtcccagtcgctggagctctccttcatcatcgccgagaggctgaggaggaagaggatccggtcgtcgaagctgaacaacatgttgccgttgccacccttcggtgtctgaatctgaaatgggtaagggaaaccaggggaagacggaggaatgacgaacggggtagataagatagctgcagcaagaactcgacgacgcctattccatttgttggtgggatgctcttggtgaaatcctatattttgcgagcttttttttctgttgtaacttttcagttggtatatatatgctctgtaatatcatgccaggctgaaaggctttgacatttcggtttttctatggttctatcatggattagagaatagaatgcaagatagaagaaggctttgtgaataattaaaacaa

SEQ ID NO: 391442 - DNA, 642 bp, Oryza sativa
cccacgcgtccgaaaggatccagggagtgcctgatagccgcactcgataagatggcagatgcagcaggcttaccaccttacggtgccgttaatcaggtggatgccgtggtgaatgaggcgctcaagacagttaatgctgatgaaagaacagcggtagacgaggccgggttcaagaaactactgacagatatccttagggcagtgatgatgcagctgaacagacagccgattttcgtctcgaacagcaccgtagttcacgagccattgtttcagttcatccgcaattttatcctcgcctccagtgaaatcatcgccgagtgaaataaattaaaccatatatgaatgttaatgtgcttgacaagtggtctatctgtaagcagtgcctgtgatgttgcttttttgtctgatcaagcactgcgggggcatgtatagactggctacatcctggcgagatgtaaagaacacttccgtcagtcttgctaacctaattgatgaataagtttgaaataaggctttcaagctatacagattgtatcaatgggcaaatgcaactaattttgcagtttgcattcattgggggaactgtttattctccaggaactgttcagctctctaatgaaaaggtttacaatttagtaaccc

SEQ ID NO: 391443 - DNA, 517 bp, Oryza sativa
tcggtagatcaccaagtctccttcacactcccactccagcggcagctgagcagagagctccaccgccgccggccaccatgagttctcaccaccgctacgcccacctcctcgacgaccccttcttccccttcccaccgccgtcctcctcctcctgccccttcctctccccacccgccgcttcctccacctgcccattcttcgccctcgactcccccttcgctgctgaccctttccatctccaccccttcctccccacgccgcccactagctccctcctcgaccccttcctcctccacaccctcaccgaccgcgtctcccaactcgagctcgccctcgccgcccgcgccccacaccccaggcccaccagcaggaagtgcacctatgtcaccgagtccaccggccgcaaggtcaagtggaccaccgaggacatgcctcgcgccggcgagagggtgctcaagtgggaggctgagctcgactccccctacgacgatggattcgaccgcaagtggaagtggga

SEQ ID NO: 391444 - DNA, 483 bp, Oryza sativa
ggcgtttgcttctgcagttctgctgccacattgttgatttgctcccaaatcccaatccgccgccgccgccgtcgtcctcgacggtagccagctccgacaggaggttccccgtgctatccctccctctgcaatactgtggttttgctctgacttccatcggctagcctaggcgcaaagcaacccaccatggcctcgcagccgttgctcttccggtggatgcaaccccactgcaagtgtgtggatgcagattgatttttcagtttgcttcttccgttgggaccccacacaattgttcagtccagaaaatgtgagtttcctgccttgcagttgatcaggtcaatgccgatgcatctcccacgctccctccaatacccaccctcgactccacaccctctacattccaccgccttctcccacagcctcccgcctcgccgtcccaatggtcctcccccagccttcgcctctggcgagttcccaggttca

SEQ ID NO: 391445 - DNA, 685 bp, Oryza sativa
  unsure (1)..(685): unsure at all n locations
atccaaggttncctttggggcctttttttccgttaactgggncatatgccccataattaccccaagggatgtaatatncaattcggactggangaaccattagtaagatttgagggattggacaagaagaattggaaatgacaggcatctcatttgcattgaagatccttttgagacctcccatgatcttggtcgtgttgttgacaatagatcgatctgggcactccgagaggaatttgagcgagctgcggagatattgcaccttgacccaaaccccagcatcacactttttgagccttatgtgccctctgaagctgaaacatgataccacaaaatcatcatcatcatgttctgctgtgtcaagaagcccttcagttccaaaggaatcttgtcaaagcttatgtcgtactatgtgcatagcttagctgtaccatgtatacttaagttgtaaagtaactaggggcctcagcagtaggtggtgacagcatgcttctgctaagtggtaattgggggaagccagcaatatttaatcagatttctagtgctatcaattcttatttagaaagggagatgtttgaactagacactactgtccgatatttcatgatagtttagcgtgcagtagtttttttccctaatgagaagaataataaagttgctttaagcccaaaaaaaaaaaaaaaaa

SEQ ID NO: 391446 - DNA, 663 bp, Oryza sativa
  unsure (1)..(663): unsure at all n locations
tttagatctggtgcgcggggagcggtggaggctacggcggcggcggcggcgagaccggtagcagtgatggtggagaggacggatccgatggcggtggttctcgtcaaccagttcaaggacgacgacagcagcggctgctgcaacgatggataggctctgggcggctcctccactctcctcccctctctcatatccagtggctcggggtggtggggcgtggccgacgcatccggcggcggagctcggcagaaagaggatggttctagctctccggtggttgaatattgagacgtacagcccacccaccaccaccccagtcgtccccagctaagcgctcccttgcttgcctcagtagacgagctgccaactagtagcactccagcaagcagcgggtcagcggagtccggagggcgcacgtgcgccgcagcgaggtatcagcatggccaggcggcggctggctggccggccgggttcggcaagcggctaagcaggtgtttaagcggaggaaggatcgatgtccggcgccggacagagccgtggtcatcgccttggattacacattgattcggattggccagaggtcttgttgatcaatgactatgcggtgttcatggggtacctgtcgatggttgtcaccgngacggggttcctggtgctcacgtg

SEQ ID NO: 391447 - DNA, 503 bp, Oryza sativa
ctcatctctttcctgcagccaagtcagtttgcattcgcacaaagccagttgcaagcatgcagcaagaacaggcagacggccgggagatcgtcatcgccggcgccggcctcgccgggctcgcagtggccctcggactgcacaggaaaggactgaggagcgtggtgctggagtcgtcgccgacgctgcggacgtccgggttggcgttcatcacatggacgaacgccttccgcgcgcttgatgcccttggggtaggcgacaagatgaggagccagcaccagcagatccagaggttgaatgtcatgtcttcagctactggagaaatagtgcaagaaattgatctgagggcgcaaggcaaacggggaacccatgaggcacgctgcgtgagccgcaccgcgcttgctactggcgttggaggaagagctcccaagaggcaccatccgctactcccttcaaagatcgtctcgatcgaggaagacggcaacgccaaagatccttccatcttt

SEQ ID NO: 391448 - DNA, 589 bp, Oryza sativa
cggacgcgtgggcggacgcgtgggagaatatgttgcaataaaaagtttatcttacaaaatttcatccatcattagatagcttcctaatgccggagagaactactccctcatcacgcgccaggtaaatccacgggtgatccttgtacaatgcttacatgatttactcaatggaatggaatcgaatcgaatctatatatacatattcaagcagtgccaagcactgctgaatgaaaaagacctaggtacctgacttattactaccaggccttagctgagctagaaagctgggaaagaatgggcgatacatcttacactgttacatctcgctcagcagattgctgatcttgcgaagctccgtcagagcagccattgcagtgacctgtcctttgcctccaagaatgttgtttgagaagttctccacagggccaggctgaccacggtcttgctgaaatgccgactcaatcacctggatatttccaagcatgccctgtccaagaccctgtagggtgcccatgacctttttatcaccagaagccaactttaccctaccacgggagttatttgaattcccgtcataaggagaacagga

SEQ ID NO: 391449 - DNA, 650 bp, Oryza sativa
tggccgcccgcccggccgcgtacccggaccggactgggccgggccgacccacgcggtctgtcttccctaccaagcgagaccactcggcccccacaaaatctccgcttcttctccgagaccgagatggcactcgactctgttccatcctaccccagcgatcttggatccagcagggccaggacgccgcagcagcaaagggtcagccccaggaaggaggagcggacatggacgaccgacacctacgcgccgtacgacgacggccaccagtggaggaagtacggcgagaagaaactctccaattccaacttcccaaggttctattacagatgcacctacaagaatgacatgaagtgccctgctacgaagcaagtccagcagaaggacactaatgatccaccattggtctcagtcacttacctcaaccaccacacctgcaacagcagctcaaagatcgtaggcagcactcctgattctactgtgcagtcgaggaaagccatttcgatctgcttcaattcacatggccaaaccggtgaacagcccacattcttgtcatcatcagcttccttgttgtcaccgagcatgcagtcgtacagttccaaccagcaacctgacagaacacctacagtcgccaggttcagtgggcagacaca

SEQ ID NO: 391450 - DNA, 2077 bp, Oryza sativa
  unsure (1)..(2077): unsure at all n locations
cggcacgagcccctcctctcctctcctctctcccgccgaccaggagaaagaaggaaaaagaagaagaaaaatcctctgcgatggcgaagaaaaaggagagggcggtgaacgtgtcgggggaagccgcgccactcgctcgacgtcnaccgcgccaatgacaanaagggcgcgggcggcggcgccgggggcggcggcggcggccgttcggcggccacggtgcggcggctcaagatgtncaagatgaggcccctcaggggaccgaggcgggaanatcctgaagcacgacctccagtccaagggagctccccaacacccgcntcntagcccgatcgccgctggttcggaaatacacgagtcgttaatcagaaagagcctggatttcggtcgggaggaaactccagaggcggctttccaataactataatgtgatactgaaagagcggaagcttccactgtcactactgcaggatcatcaaaagcaagctagggcgcatcttcttgacactgaaccttttgagcatgcatttggaccaaagggcaagaggaaacgcccaaaactaatggctcttgattacgaatctctattgaagaaagctgatgattctcaaggtgcatttgaggataagcatgctacagcgaagttgctgaaagaggaagaggaagatggcttacgagacctagtccggcacacaatgttcgagaagggacagagcaaaagaatttggggtgaactctataaagttattgactcttcagatgttgtcgtgcaggtgttggatgccagggatccaatgggtactagatgctaccatctggagaaacatctgaaggagaatgccaagcacaaacacttggtattcttactaaataagtgtgatctagtacctgcttgggccacaaaaggatggttgcgcactttatcaaaggactaccccaccctagcattccatgcaagcatcaacagttcatttggcaaaggatcacttctttcagtgttacggcagtttgcacgcctgaagagtgacaaacaagctatatctgttggttttgttggataccccaatgttgggaagtcatcagttatcaacacgttacgctccaagagtgtttgcaaagtggctccaattcctggagagacgaaggtgtggcagtacattactctgactaaaagaatatttctgattgactgccctggggttgtgtaccaaaacaatgattcagaaactgatattgttcttaagggcgtggtgcgtgtgacaaatttggcggatgcttctgagcacattggtgaagttctgagacgtgtaaaaaaggagcatcttaaaagagcttacaaaattgaagactgggttgatgataatgattttcttgtccaactgagcaagaccactggaaagctactcaggggtggggagcctgatcttacaacaacggccaagatggtgcttcatgactggcagaggggcaagattcccttttttgtgcctccaccacagcaaggtgaagatagtccatctgaaacagctgaacctgtggagaaatccgatgaggaaggggtgagcagtgacagaactgctgccgccatgaaagcgatagcgggaataatctcatcacagcagcagatgaatgttccttgccaaaaggaatttggtgtaactaatgaagatagtgaagtcgcggagcaatcagagtgatctacaaaaggctaggaaccctgcatgataaagaacagggcacaattttgccaaatacctagagattttatgaagatttggtgtctaacaggaatgttacgatgaatgttacgatcgttcagttcaccggtgcgttctactgcaacgaaagagcgttcactgcaacgaaagactggaatcaagggtgtgggactgggaaacttctgtaacttcatatattgtgtgggcctttgttgtagaccagatagagtgttttggtagcttaatataaccattttgttccaactgtacttgaaacaaatttattccgatacattaattccgcaaagtcgttcgtattaaaaaaaaaaaannnnnnnnnnnnnnnnnnnnnnnnnnnnnnn

SEQ ID NO: 391451 - DNA, 554 bp, Oryza sativa
attcccttttttgtgcctccacccagcaaggtgaagatagtccatttaaacagctgaacctgtggataaatccgatgaggaaggggtgagtagtgacaggactgctgccgccatgaaagcgatagcgggaataatctcttctcaccagcagatgaaggttccctgccaaaaggaatttggggtgactaatgaagatagtgaagtcccggagcaatcagagtgatctccaaaaggctaggaaccctgcatgataaagaacagggcacaattttgccaaatacctagagattttatgaagatttggtgtctaacaggaatgttacgatgaatgttacgatcgttcagttcaccggtgcgttctactgcaacgaaagactggaatcaagggtgtgggactgggaaacttctgtaacttcatatattgtgtgggcctttgttgtagaccagatagagtgttttggtagcttaatataaccattttgttccaactgtacttgaaacaaatttattccgatacattaattccgcaaagtcattcgtatttgtatggggtc

SEQ ID NO: 391452 - DNA, 526 bp, Oryza sativa
cccacgcgtccgcccacgcgtccgcaacccaacccgagccccccaagcgcagccatggtgttcgacgcgggcaccggcagcagtggcggcggctcgccggcggcgccctccccgccgccgccgtggcagaaccctctccgcgtgatcctgacggcggcgttcgcgcggcaggtggcggtggggcggtggttcacggtgttcgcgagcctgctgatcctgacggcgtcgggcgcgacgtacatcttcggcatctactcgccggcgctcaaggcgtcgctcggctacgaccagcacacgctcaacaccgtctccttcttcaaggacctcggcgccaacctcggcgtgctctccggcctcatcaacgaggtcacgccgccgtgggtggtgctcgccatcggcgccgccatgaacctctccggctacctcatggtcttacctcgccgtggccgggcgcacggcggcgccgcccgtgtggctggtgtgcctgtacgtgttcgtcggcgccaacttcgcaatcgttcgccaa

SEQ ID NO: 391453 - DNA, 545 bp, Oryza sativa
gcttctctcttctcaccggaatctcgagagcacagcgccgccccgacgacgagatccctcaccggcgccgccgccgccgcggccaggaggccgaggggccatgacgaccatccgccggttctgctgcgacgacctcctccgcttctcctccgtcaacctcgaccacctcaccgagaccttcaacatgtccttctacatgacgtacatggctcgctggcccgactacttccacgccgccgtcagccccggggaccgcgtcatgggatacatcatgggtaaggttgaaggacaaggtgaatcttggcatggacatgttacagcagtgtctgttgccacagaatttcggaggcagaagctagccaaaaaacttatgaaccttttggaggaaatcagtgacaagatggataaggcctactttgtggatctcttcgtaagagcatctaacatgccagcaataaggatgtatgaaaagcttggctatgtggtttatcgaagggtgctccgctattactcaggggaagaagaggccttgatatgagggaagc

SEQ ID NO: 391454 - DNA, 529 bp, Oryza sativa
  unsure (1)..(529): unsure at all n locations
ggtgttttcatgaggaatccaacagtcgctgaattggtggaaactgtggaattcttcttggctgaggccatccagtcttatcgtgctgagagtgaaactgagctcaacctggcagctggtgactatatagttgtccggaaggtgtcaaacaatggatgggcagaaggtgaatgcagagggaaagctggctggttcccttacgactacatcgagaaaagggaccgtgtgcttgtcaagtaaagtcgcccaggtcttctaggcgttcaatgagccatacatacataaccctggtgttgtacactgtattatgatcgttcgtgatcttcaaagaccctctgatcagagaaatcacaaatattcttttgttctattattgtcattatcactaccccttttgtcaaaaccagtgcagccttttgtatgacatcttgttgcatggctagctttctgaatatttcaaaatatacagcggggaggacactgttcatatacattcattctnctaaaaaatacaccctnnnnnnnnnnn

SEQ ID NO: 391455 - DNA, 986 bp, Oryza sativa
cttccttccacggcagcgccacccactgcgccttcgccggcggggaggaggagggaggtgcggccatgggtcacggtgtcagctgcgcccgcaccggcgacgagcacgacttcttccgggcggcgcactcggcgacctcgacgccctggccgccctcctcgccgccgacccttccctcgctcgccgcgccaccctctacgaccgcctctccgtcctccacatcgccgccgccaatggccgcatcgaggtgctctccatgttcttggatcgcggggcgccgccggacgcggtgaatcggcacaagcagacgccgctgatgctcgcggccatgcacggcaagatcgactgcgtgctcaagttcctccaggccgacgcaaatatcttgatgttcgactcggtgcacgcgaggacctgcctccaccacgcggcgtactacggccacgtcgactgcctgcaggccatcctcgccgccgcgcagaccacgccggtggccgactcatggggtttcgcccggttcgtcaacgtcagggacgaccacggcgccactccgctgcatctcgcggccaggcaggggcggccggggtgcgtgcaggtgttgctggagaacggcgccattgtgtcggctttgacaggatcatatggcttccctggaagcacgtcgcttcatttggctgctcgtagcgggaacttggattgcatcaggaagctgcttgcctggggagctgatcggctccaaagggattcggctgggagaattccctattctgttgcgctgaaacggaaccatggagcatgtgcagctttgctgagaccctacatcagcagagcccatggtgtggccatccccacttaagttcatcagtgagcttgaaccagaagctaaggctctcctggaagcagctctgatggaagccaacagggagagggagaagaaaatcctgaatggcacaaagtactccctgccatccccttcgcccggtgatgac

SEQ ID NO: 391456 - DNA, 536 bp, Oryza sativa
ccccgcgtccgcccacgcgtccgcgcacgctgccgcccacgcgtccgcggacgcgtgggctcgcctcacactcactcgctcagcactacttgcaccccctagctgagatcagtagtaaacggtcagtcaattgttgcaaagcgatcagctactggcgatggctcagggaaggggcagtgctgcaggacgacgcaacgccgccgtgctggcgatggtcctcctctgcgtgctcctccacggcgagctcgccgagtcggccgtgtacaccgtcggcgaccgcggcggctggggcttcaactccggcggctggctcaggggcaagcgcttccgcgccggcgacgtgctcgtgttcaagtacagcccgtcggcgcacaacgtggtggcggtgaacgcggcggggtacaagtcgtgcagcgcgccgaggggtgccaaggtgtacaagtcgggcagcgaccgcgtcaccctggcgcgcggcaccaactacttcatctgcagcttccccggccactgccaggccggcatgaagatcgccgtca

SEQ ID NO: 391457 - DNA, 570 bp, Oryza sativa
tgatcctaaagctgatgccgagatggtgattctgtggagaatggcacacgattgaattcagaagaacctgcgcaggtagacccaaaaccagcctacgttcggcgaggacggaaaagggtggtccgaggcacgagaggaagagcaaagtagaagagcatctactgcacccacaattgtttgtataccactaatattaacggcccaaatgggtggtatgataatgatacctaggttaactagagttagcattgatcggtggattttatcgtgcacccactctttgtacccatgttgtattattgtaggcgtcatactgactacgtttcacgatttggatgtgattactaggactggtagatgcctccttttttcttctcagtgtaaaacttatgagtagtttgtgcagatggaagaacaaatggtttgtttgtagtattgttgtagcagtaaatggctagccatctaggtgactagagatgtgctgcttcagtgtcatgcagccctggacgctgaggattctcgacatgtaacccgtatttcgtaccacggatattctattcattgtgtggc

SEQ ID NO: 391458 - DNA, 594 bp, Oryza sativa
cgcgccatagcgacctctctcggggagaaagaagagcgcgccgcgccatgtgcggcggtgcgatcctcgccgatttcaccccggcgagggtgccccggcggctgaccgccgccgagctcctgccggtgaccccgactccccccgccgccgagaggagaaccacccggaagcgcaagtccgacgtcgacttcgaggcggagttcgagcttttcgaggacgacgacgacgacgatgagttcgagctttccgacgatggcgacgagagtttggccgtgtcatgtgtgtcgtcccccaagtcgaaggcagtaccttcgttttctttttcgtcggatgtctcctcgagctccaggccgcggcggcgcgtggcggcggcggcggccggtcgtcggaaggcgagcaagaagagcaagtacaggggcgtccggcgccggccgtcggggaggttcgcggcggagatcagggaccccaagaaggggcggcgcgtgtggctcggcacgtacggcagcgccgaggaggccgtcatggcctacgaccgcgaggcccgtcgcatccgcggcaagggcgcgaggctcaacttacttcgcgacggcgatg

SEQ ID NO: 391459 - DNA, 502 bp, Oryza sativa
  unsure (1)..(502): unsure at all n locations
attagagttggactcggcaacgcgacgagcaccaaaagcgagggaagaaaaccaatccgaatccggagagagaagcgcaggaggcaaaatccactccaattcaacccaatcacccgcggcgagccgagcgggcggcggagacgacgacgacgaggtttaggtaggggttcttggcttgtcggcgtcggcggcggcggcggcggaggaggaggaggagtcagcgatgcggaggaggttccaggactccgtcaaggccctcgaggccgacatcgagcacgccaatgagctggcgtcggagttcttgcgggattacgacggggcggtgatccagatgcggatggcgtacagcgccgtcgcgcacttcctcgtgcagtggatcgacttcaaacttagccggcgcgttcggcctcctcaagatcatgatctncaaaggtgtacgccgatggaccacggttttcngaagttggaaangaagccacataagcaattttacggtgtcatt

SEQ ID NO: 391460 - DNA, 333 bp, Oryza sativa
cccacgcgtccgcccacgcgtccgcggacgcgtagttataccgtgagttgaaaattaattaagatcacttaaggtcttaaagctagcagccatggcggcatcgtccaagttggctttactggtgttcactctcctgctcgccgccgctgctttcatccacgtcgcctccgccgaagaaacacatgacgatcacgacggcggcgatcacgacccgtcgccatcgccgccggaccacgaggacccgtcgccgtcgccgccggaccacgaggacgaaccgccgccgccgtcgtctccggggaaggaggacgtctgcaaaggcaaggggtgctgcga

SEQ ID NO: 391461 - DNA, 572 bp, Oryza sativa
  unsure (1)..(572): unsure at all n locations
cggaacntgtacatgaacgcgtnggcggctccacctccgcggcggcgtaatccatccaactcgcaatagatatacagtccccccaatcgacggaaccctaattctctcccgcacgcgcgtcggcgatccgaggggaagtagggtttggaggaggaggaggggagaccaccggagtaggcgaatcccccaaggccgggcaagatggtgctcgcgcagctcggcgggagcatctcccgcgcgctggcgcagatgagcaacgccaccgtgatcgacgagaaggtgctcagcgactgcctcaacgagatctcgcgcgcgctcctgcagtccgacgtccagttcaagatggtccgcgatatgcagtccaacatcaagcgcatcgtcaacctcgagacgctcgccgccgggaccaacaagcggcgcatcatccagcaggccgtcttcacggagctctgcaacatgttggatcccggggaagccttccttcactcccaagaaggggaaaccttgcgtggtcatgttcggtggtttgcaaggttctggtaaactactacttgtaccaatatgcatattat

SEQ ID NO: 391462 - DNA, 578 bp, Oryza sativa
  unsure (1)..(578): unsure at all n locations
ctctccatctctcttcccagttaagcagggagagtggtcatgatgcagaacgagggcgagagggtcgatctgctggccctgccactcgatccgttcaagtaggggtggtggtgatggagatcaaccagggctgctggtgatggagaacgacaacgaggtgatcgatctgctggcctatcgctagatccggtgggtacatgcactcaagttcgccatgaagccgatgcaatccttctccatctccacagtgggttggcgcccttctgctcaagtttgaagctccgctgccgtgcggcgccgacactgtttcgcaattgcagatctggccagcaacaggtaatctgggaaccatctgtcgtcgcctagccaagggccatttgcaattgccttgcctttgttatttatggtgtaatttacttaggggcaatggatgtatgcaacttcatcattaattgagaatccatatgtataggtattttgggaaccttttttttttttgnctttnctacttccacttnaattttactagggggtattttagtttcacaatggttcatcttgaaacttttttttaaggg

SEQ ID NO: 391463 - DNA, 693 bp, Oryza sativa
cccacgcgtccgcccacgcgtccgcccacgcgtccgcggacgcgtgggtccgcgattcccttcccatttcgccgccgatgaagggcggcgggggcgcggcggcggcgtcggcggcgccgggggactacgtctacttcaagtccgccgccccgctccacaagatctcgattggaccgaaattatggaggtactatgattttggaccaaagactgttccacctcttgtctgcatcccaggaattgcaggaacggctgatgtgtactacaaacagatcatgtctctctctatgaagggttatcgagtgatgtcaattgatgttcctcaagtttggaatcaccaggaatggattcattcatttgaaaaatttttggactccatgaatatccatcatgttcatatttatggtacatctcttggtggatttcttgcacaaatatttgctcaacaccgtccaaggagagtaaagtccttggtcctatcaaatacttttcttgagacacataagtttgctgctgctacgccatgggtctcctgttgttaattggaccccttcttttttgctgaagcggtacctattgacaggaatccgagatggcccccatgaaccgtttattgcagactcagtggattttgttgtgagtcaggttgagacgctgtcaagagatgatctctcatcaaggttgatgttaaat

SEQ ID NO: 391464 - DNA, 492 bp, Oryza sativa
cccacgcgtccgcggttctcaggctgcagaggaagcagagctccaatctgttcatgccaatggctgctggcacctgggtgaagctagagcagaagggagatgggccgggagcaagaagctcccacgccatcaccctcgtcggcggcacggcgtacgcgttcggcggcgagttcacgccgcgcgtgccggtggacaacgccatgtacgccttcgacctcaagtcgcagtgctggtcggcgctggacgcctccggggacgtgccgccgccgcgcgtcggcgtcaccatggcgtccgtcggcgccaccgtctacatgttcggcggtcgcgaccaggagcacaaggagctgaacgagctctactcgtttgacacggcgaccaacagatggacgctgctgtcctccggcgccggcgacggcccgccgcaccggagctaccactccatggtggccgacgccgcggggggcgggaaggtgtacgtgttcggcgggtgcg

SEQ ID NO: 391465 - DNA, 510 bp, Oryza sativa
ggaaagagaagagattgctctttgttgttcgcctccgctcgccgcgcctgcagatccccctctcgcctcctctcctctcctccccaaaccctagcgagcgaccaactcctgggtggggggatttttctccatggcgctgcagttcgtcgagtcgcagcgcgaggcgcggccggagctcgccgacccgtacgccgacctcgccgacctctaccagcggaagctctggcaccagctcaccctcaagctcgaccacttcctccagctccctgccgcgcagacgggtgacaccctcatacagctctacaacaatttcatcactgatttcgagacgaagatcaatcttctcaaacttgcgcatttcgcggtcatcgcttcgcgccagtaccccgacaaggatgctgctataactttcctcgaggggggtaatcactaaaattgccccaagacaaaaggacttgcccatccaatgaacccattctctacttagaaatgccaatcctgccaattgac

SEQ ID NO: 391466 - DNA, 845 bp, Oryza sativa
  unsure (1)..(845): unsure at all n locations
cgcccctttgcctaagccattgctaatcgtcaacattggaggacccacaaggaattgtaagtatggtgtcgaccttgccaggcagctcatagcttctacgtataatgttctagacagctgtgggagtgtgagagtttcattttccaggagaacaccgcgaaaggtctctgatattatatcgaaagcgttcgctggtcatccctaagatctatattttgggatggggaagaacctaacccgcacatgggggcatcttgcatgggctgatgcttttgttgtaacagctgattctataagtatgttaagtgaggcttgtagcacagggaagcctgtttacgtcattgggactgagtattgtaaatggaagttttctgcttttcacaagactctacgggagcgaggagttgtccgtcctttcactggattggaagatatttcaaatagctggagctaccctcccctaaacgatgctattgangtagctacacgtgtccgtgaagcnattgcngaacgngggtggtctgtgggatgatagcgacagttaggatgtgttgttctgtccgacagtaaattatgtagtttgattaacacagtcacttaaattcaagttacattgttcagaggaagaataatatagccatggaatggcctgtacaaaagttgagccttttcttttggtggtataccccaattttggagccattgcacagcacccnggngatcatttttggtttgagattctcttccctcttgtncttctaacgctnctggngagaagccaacatatgangtattggnattganactttattctgtgtgnnnnnnnnnnnnnnnnnnnnnnnnnn

SEQ ID NO: 391467 - DNA, 736 bp, Oryza sativa
  unsure (1)..(736): unsure at all n locations
cggacgcgtgggcgtcgtcttcttatcacccctacctcacctgcagtcctgcaccaagcaagcaatctccaaagtgcaagctttctcttcttcctgcgtctggatctcgctcaggtttcccctctgcctgccactccccatggctctggattcaggtcgctcttcagcattcactaccgtattcacttcttgaaggccaatttctggttcctcaccattgtatccaataaaggtacttgatgatccgaagatgtcgtcaaactccactctaacagactctcttcatgagagaacaattgtttttggcctgaaactttgggttgtaattgggatatctgttggagcatccctacttggtgttcttctcatccttattgtatgcctcaccatacaaacttggatcaaacggtcacgtaggacattcaaggaaattccaattacccaaataccttctgcatccaaagatatcaaggaagtgagggcagtggaggaatttttgcccaatgatttcgttgtacatgatggacttctactcgccattcagaatgaacctgttgaaccagtggataaagatgtgaatcagtttgctcaagaggacaagacgatacaaggagaagataacagttcttctgttcctcttcattatgtggacaactatgatggaattcaatctgtttccacatgtgaacagtcttnctcgcatgctcccgccgactctgttcccttgccaggctta

SEQ ID NO: 391468 - DNA, 846 bp, Oryza sativa
  unsure (1)..(846): unsure at all n locations
gcagcaccacccggtgaccacaccaaaccaccccaaacaccaccacccccacctccctccctcctcactcttgccgcctctcttcttcttcttcttctctcctcacttcgctcgctccctcggtcgctcggccgccatgtcgtcgcaaggagcaggaggaggggtaggggacccggagctgttcgcggagctgtggcgggcctgcgcggggccgctggtggaggtgccgcagcgggacgagcgggtgttctacttcctccagggccacctcgagcagctgcaagagccgacggacccggcgctgcttggcggagcaaatcaagatgttccaggtgccgtacaagatcctctgcaaggtcgtcaacgtcgagctcaaggccgagacgggaaccgacgaggtgttcgcgcagattaccctgcagcctgacccggatcatgagaatctgccaacattacctgacccgcccctgccggagcagccgaggcctgtggtgcactccttctgcaagatcctgaccccatccgacaccaacccaagagctcatcacaaaggaccttcatggatctgagtggaggtttaagcacatctacaggggccaaccccgtaggcatcttctgactactggatggagcacgtttgtgacatcgaagaagctgatttctggcgacgcgtttgtctacttgaggagtgagacaggagagcagcgtgtcggagtgaggcgtcttgtgcagaaacagagcacaatgccggcatctgttatatcaagccaaagcatgcatctttggtgtgcttgcaagtgcatctcatgctatcaagactaattcaattntcctagtgtactacag

SEQ ID NO: 391469 - DNA, 487 bp, Oryza sativa
cccacgccgtccggccgccgatccatcaatcgccgccgccgtctcctcgtgtaaccctagcttagtggattagtttaagtgtttgccggagattatggggtcggtggcggcggaggaggtggtggtgttccggtcgaagctgccggacatcgagatcgacaacagcatgacgctgcaggagtactgcttcgcgaggatggcggaggtcggggcgcggccgtgcctgatcgacgggcagaccggggagtcgtacacgtacgcggaggtggagtccgcgtcgcggcgcgccgcggcggggctccggcggatgggggtgggcaagggcgacgtggtgatgagcctcctccgcaactgccccgagttcgccttctccttcctcggcgcggccaggctgggcgccgccaccacgacggcgaacccgttctacacgccgcacgaggtccaccgtcaggcggaggccgcgggcgccagggggatcgtcaccgag

SEQ ID NO: 391470 - DNA, 546 bp, Oryza sativa
  unsure (1)..(546): unsure at all n locations
tgtagagcactttcacagaggaacgatgaccccaaaacagcatcaagaccttgggaccaagaccgtgatggttttgtcatgggtgaaggagctggagtactggtcatggagagcctagaacatgcaatgaagcgtgacgcaccaataattgcggagtatttaggaggtgccgtgaactgtgatgcttaccatatgactgacccgagatctgatggccttggtgtttcgtcttgcattaagcaaagtcttgcagatgctggcgttgcaccggaggaggtcaactacataaatgctcatgcaacgtccaccctagctggtgatctggcagaggtgaacgccattaggcaagtcttcaaggatccatcagagattaaaataaatgcaaccaagtccatgattggacattgccttggtgcggctggtggcttggaagccattgcaactgttaaagctataaccactggatgggtccatccaagcatanaccagtttaacccggagccagctgntgaatttgacacggtacctaatgtaaaaagcaacatg

SEQ ID NO: 391471 - DNA, 740 bp, Oryza sativa
ctcaaatggacagccgcaaagagaaggcccacccaggtggatttctttttacaaagtttgctagtagcagccagacgctatttgaccttttcccggatagttttggtagtcggttgcatgaaaggaacaaagaaagtccgaaggcaatgaaacatctaaataaacttttccctaacaaaatttcgatccaacttccacaggatgaaacattactcacagattggaagcaacaactggatcgtgacgttgaaacccttaaagctaaatccaatgttgggtagcattccgcacgtttctggagccgcaatggaattgaatgcagtgaccttgaagaattattcatcaaagatcaatcactgaccaacgaaaatgtggacaagatagttggctatgctgttagttatcaccttaagcacaataaagtcgagatctccaaggatggtaaacttgtattggcgagcgaaagccttaagcatgggctcaacatgctgcagaatatgcaaagtgataacaagagctcaaaaaaatcactgaaggatgttgtcacagagaacgaatttgagaaaaggcttctggcagatgttataccacctaatgacattggagtcacctttgatgatattggagccttggaaaatgtaaaagacacattgaaggagctggtgatgcttcctctgcaaaggcctgaattgttctgcaaaggacagctaacgaggccttgcaaggggatattgctgttt

SEQ ID NO: 391472 - DNA, 690 bp, Oryza sativa
cccacgcgtccgctcacagagaggtgagcatgttcttgctgcagctggggagatacatttggagaggtgtaaaaaggatttggaggaaagatttgcaaaggtcaaattggtggtctcagaccccctggtgtcctttaaagagacaattgaaggcgaaggccttgccttgatagagagcctgaaggctccacgggaattcgttgagagaactactccaaatgggagatgcactgtgagagttcaggttttgagacttcccaatgcgctcattaaggttcttgaagaaagtgaacaattgcttgggcaaataattgaggggaaaacagcaatgaggaacggcgtggtggatccacatctttctcaggatgatggtgattctgctgcaacacttaggcaacgcctgatcaatgctatagacagtgagttggaagcattttctgagcaagtggataaagaaaaacttgagaggtatagaaatacatggcttggatacctccaaagaatctggtcactcggtccttggcaggttggtccaaacctccttctcttgcctgatgtgaaatcaagtgacagtgtgataaccagtcaagatggaaggcaaggcattcttgtgcgtggtagatctcatgtctctgagagattaggatttgtgtgtggatctgatgctgaagctaacaatgatcttgatga

SEQ ID NO: 391473 - DNA, 520 bp, Oryza sativa
ctttcgtcggcctctcgactcctggaacctggaggtgttctcgtgttagtcccccctacgcctccgccgccgccgccgccgccgcaatgaactccggagacgccgaggcagcagcggcctccaagaaggcccggtgcaagaaggagaagaaaaagaagcgaaaggacgactgcggagccgcagaggcttcagcggctgacgaagaaatcgtccacgacaagaagaggaagaagcagctgcaacagaagaagaacggagatgacgtggcggttccgaatcggaagaccacggtgagcatcgccgtcgccggatccatcatcgacaacgcccagtccctcgagctcgccaccctcctggcaggacaaatcgcccgcgcggcgaccgtcttccgcatcgacgaggttgtggtcttcgacagcaattcctcagtggagaacagcggcgatgacgtagagagtggcgcgcgcttccttgttcgcatcctacagtatctggagactccacaatacctgcgccgacg

SEQ ID NO: 391474 - DNA, 848 bp, Oryza sativa
gcggccgcccgggcaggtacattcttctgtggaacagatacagaagaatcagacattccctgcttgaagaactttgattcaagtttgagttccatgcctaatttagagcagatcaaagcactgatcgagcactatggaccaactgttttcttccacccgcaagagatctacttaccatcgtcagtctcttggttctttgagaatggagctacgctccacaagaaaggtaaagaaatgggagatgtaattcttgctagtggttcgaaccttcctgctggtgggacaaatgacggtgagtactggattgatattcctgatggtgataggaatgaatatgtcaaaggtggtaatctgaagagtgctgagctctatgtgcatattaagccggctcatggaggaactttcactgacattgcgatgtgggtgttctgcccatttaatgggccagcaacaataaaggtcggatttgctagctttgctctacagaaagtcggcaggcatactggtgactgggagcatttcaccctccgtataagtaacttctcaggagagctctcatctatctacttctcacagcacagtggaggcgactgggtggatgcatgtgatctggagttcatctcaggaaacaaagccatcgtttactcagcgaaggatggccacgcaagctatgcgcaccctggatgttatctgttgggatctgagaaggctggtgttggggtaagaaacgatgcagcacgaagcgatattttggtcgattcgagcacaaggtataagatcatctctgcgggaaatctgggagatgccgttatcgaaccatgctggctgcagtacctgcccgggcggcc

SEQ ID NO: 391475 - DNA, 467 bp, Oryza sativa
cggacgcgtgggctccacacctcccctgcggaggcaaggaaggagaggcgcccctccacacgcggagagaagagagccatgggcctccaggtcgcggccgtcgcgccatccccgtgcgcgcgctcctccgcctcgtcttcgccgccctcgacatcctcctcgcgtcccgccctcggcggtgccggggctcgcaagatcccgcgccccggttaattggggcgccggtgttatggcgcggcgccgcgggttgcggcagccggcgaggtgcgccctgagcgccagtttggatggcgtggggggcggggacgcggagttctttcggcggatcgaggagctcgcggcggcggttgggtgtgcagcccacgggttgcggatggccggcgagcgtggagcgccacgcgagcagcgccgggatgcctctggcgctccggatgctgaagcggaagaagcagcagcagcagctggtg

SEQ ID NO: 391476 - DNA, 506 bp, Oryza sativa
  unsure (1)..(506): unsure at all n locations
tcctggttgcttcttttggatcctggagaggagaggaggagcccaccgtttcnccaccaaaaacccaatccttgctgcttcctccgagcttgagatcgattggttccttccagatctaaggccacccctttcggctgcgagatcgatcgcgcagggatctcgaagctaatcctagaaagaaagagagaaaaaaaaggtttcgcgaagaaacgagaggaggagagggaaggtaaaggaatgggctttgtgaggaagtgggcgatggggaggtgtcggagatgaaggatgctatctgctgcgagggagtacttgagatcttgctggggcccggcgtcgtcgccggccgggcgcccccgcaaaggatcggatgcggccggggcggcaggatgggctgctgtggtacaaggacgccggccagctcgtcgccggccagttctcgatggccgtggtccaggccaacaacctgctcgaggaccacagccggggggaatccgggccactgagca

SEQ ID NO: 391477 - DNA, 855 bp, Oryza sativa
gtttttaagctcaggataaaccgcctcctaatgggagataaatccgttaatccgagtcattaatccacggataatcactgcggcatcgtaggccttttttgagctataaatagagctcctgatcccctcctccactccacaccaaaacctctccaatccccaaatcctcctcatctcctcttccagaacctttctttttcgatttcgtgttcgagttctttgtgattgcagcgatggcgtccgtggatctgaccccgaggcaggcgaggaaggcgtacggcggcgatggtgggacctactacgagtggagccccgcagacctgcccatgctggaactcgccaacatcggcggcgccaagctgtcgctcaacgccggtggcctcgccctgcccagcttttccgactccggaaaggttgcgtatgttcttcaaggcaagggcacttgtggcattgtcctgccggaggcgagcaaggagaaggtgatcgccgtgaaggagggagactccctggcactcccctttggcgtggtgacatggtggcataacctcccggagtccccaatcgagctcgtcatcctcttcctcggcgacacatcgaaggcgcacaaggccggccaattcacaaacatgcagctcaccggtgccaccggcatcttcaccggcttctccacggagttcgtcggccgcgcatgggacctcgccgagtccgacgccgtcaagctcgtgtccagccagcctgcctccggcatcgtcaagatcaagtccggccagaagctccccgagccgtcggccgccgaccgcgagggcatggcgctcaactgcctggaggcgccgctcgacgtggacatcaagaacg

SEQ ID NO: 391478 - DNA, 888 bp, Oryza sativa
  unsure (1)..(888): unsure at all n locations
cccacgcgtccggggcaagggcctcgcccgccgctgggcggtggagctccacgacgcctcctcctcctcctcctcccactcctccatccccgacccgcccggcttcaccagatccgcccccgacgcggacgacgccgccggcgcgcggcagcggaaggattccgagaccgcgtggaaggcgcagaaagcgtgggaggtggcgcaggcgccgttcaagaacctgatgatgatgggtttcatgatgtggatggccgggagcaccgtccacctgtttagcataggtatcacgttctccgctctgtggcagcccatcagcgccctccgctctgttggcaaagtttttgaaccattcaaggacccaagggtggatactctagcacctaagttggtctttattgctctcaacttggcagctatgggtttaggtgtatggaagctcaatacgttgggtcttcttccaacaaatgcatcagattgggtgttttcactggctcctgctcgggaggttgaatatgctggtggagggatccccttgcactgaaacctttatgtgcttcagttagtacttattaaagttttaccacttggaagatggtgtctgtactaagcgaaaaattaccctgcagatgggacaagtctggtttttgtgaggatcatatttcagcacctgtactaaacttgcactatatcttgagacaagtaacttacaatttccttgaccccttttgtttaccctggttatttatacagagtcagttgattcttagtaaagctgaattatgttgttatgatgattgattgttgtcctgcagaggctcttgataccagccttcttttccttaaggcaatcttggtttgattatgnnnnnnnnnnnnnnnnnnnnnnnn

SEQ ID NO: 391479 - DNA, 769 bp, Oryza sativa
gtatacactggttttcatttcgctaaaaaagaaaataaaacaaaagaaaaaaaaaaacaccacacgagcaaaatctccttggcccgccgccgccgcctccgccgtcgtgcggcgatctccaccaccgcgacgcgagcggcggtgcccggcggcgtccagctgctcccgccgccgcgtaccctcgcctctggctcctcctcgccgcgcccaagccaatctctccccacccgccacctcggcctctcgactcgcgagcgagttcgccgatctccatccatcacccctcgagccagcggcgccggccgacggcgtgcttccggtcctcccctgccaaagtgttggtgttgatttgaagcctcaaggattcgagcgaaatgacttcttccatgagcaaatccgacaagaagaaggtgctagattttgcggcatggagtttcaacatcaccacatccgttggaatcatcatggtcaacaaggctctgatggctacacatggattcagtttcgccacaacattaacctggtcttcattttgtgacaaccaccttgatgactatcgtgtttcggtggttaggcctcagccagccctcccacttaccaataccagatctgattaagtttgtgatcttttcgaacttgtcaattgttggaatgaatgtgagcttgatgtggaactctgtgggattttatcagatagcaaagctgggcatgatacctgcatcatgtctcctggagggtgtcttcgatcgtgtacattactcccgggaca

SEQ ID NO: 391480 - DNA, 911 bp, Oryza sativa
ataccttcgagccctaatcccctcttccccttcctccgggctacggcggcggcggcgacggtgaccgccggagccgacccgatcccacccgagtccttccctgtgcgcgcaccgatccttcctctacttgccgaccgccgcttcctcccctgttggtgtgggcgcgggcggctagaggaatcgaattgaagattacggaacaactctggagacatggcagaggggtccctagttgttgccatttgccagtatggtggagaggtcacttctggccccaatggcaatttgatctacaaaggaggagaagcacacgctgttgacgtcacacgagagatgtcactagataacttcaaggatgaggtgtccaaggtgtttcatgttgaggttgcagaagtgtcactgaaatactgtctcccgaacaataacagaactcttatcacaatatcatgtgatcgagatttgcaacggatggtcgattttactgctagttctgcacaagtggatgtttttttgataagtagagtggagaacaggtatttccttttttacctttttgtgcagccttttggagtaacttttgcaagcctacagaaccttcgacaaagttatcttagaagtacagattcaagccgtaattttgcgataccatggcttaaacctatagttttcttataaattgagtgttaaatctatactttttttatactatatcttaaatttctagttttgcaaaatttactattttttgagtaaatcattcatgttctgttttgattagtatgtttctcttgctaggagtataactcagactggagcctccactgctaaacctgggtctaatgcacgaggtgataaaaggaaaacgccaacttccaaaaataaggcatcaaaaaacaaggagaagactccca

SEQ ID NO: 391481 - DNA, 529 bp, Oryza sativa
cggacggggtgggtttctttcgtcttcagttaaaaaaagaagaaggagaagaggaaaaattcagacagagatcgacatggagacgaaggtgaccgtgggcgtcgtcctcctgctgctgtgcctgtccggcggcgccgcgtgccccgcccgccgcagcggcggcgagttctccattgtcgggtactcggaggaggacctggcgtcgcacgaccggctgatcgagctgttcgagaagtgggtggcaaagtaccggaaggcgtacgcgagctttcgaggagaaggtgaggaggttcgaggtgttcaaggacaacctcaaccacatcgacgacatcaacaagaaggtcaccagctacttggctggggctcaacgagttcgccgaccttacccacgacgagttcaaggcgacctacctgggcctcacgccgccgccgacgaggtcgaacagcaagcactactcgtcggaggagttcaggtacgggaagatgagcaacggcgaggtgccgaaggagatggactggaggaagaaga

SEQ ID NO: 391482 - DNA, 715 bp, Oryza sativa
gtggaatattgaacggtggaacgcgtacttacccacaagttaggtgcatgccatggcaccattcatggcgtgcgcctcgccaccggtactcacgctggccctgctcgcgtcgtgcggtgcccttctcgccacctccatgctcccggcgcgtgcgacggcgggcagttgcttggacgtcggcgacatggtgatgatggacaggttccgcgcttggcagggagctcacaaccggtcgtacccgagcgcagaagaggcgctgcagcggttcgatgtgtaccgccgcaacgcggagttcatcgacgccgtcaacctgcgcggcgacctcacttaccagctcgccgagaacgagttcgcagacctcaccgaggaggagttcctggccacgtacaccgggtactacgccggcgatggccccgtggacgactccgttatcacgacgggtgccggagacgtcgacgccagcttctcctaccgcgtggacgttccggccagtgtcgactggagggcccaaggcgccgttgtgcctcccaagtcccaaacgtcaacatgcagtagctgctgggcgttcgtgacagcggcgaccatcgagagcctgaacatgatcaagacggggagcttggtctctctgtcggagcagcagctggtggactgcgacagctatgacggcggctgcaacttaaggtcgtaccggcgggcgtacaaaggggttgtcgag

SEQ ID NO: 391483 - DNA, 521 bp, Oryza sativa
  unsure (1)..(521): unsure at all n locations
atctgtcctggttgattatgctcaatcaaagtctgtggaaccaaaatcagagaatgttagtgaattccaaatatatcctggtgaggggatttatggtgaaatcgacggagcaggcatatatattgggaacaaaagaattttgtcaagagcttcatgcgaaacagttccggacatgaaagatatgaaaggagttaccattggatatgtggcatgtaacaatgaattgattggagtattcactctatcggatgcctgccgaactggatcagctgaggccatcaaggaactgagatcactgggcattaagtcagtgatgcttacaggtgatagtagcgctgctgccacatatgcacagaatcagctgggaaatatccttgctgaggttcatgctgaacttcttccagaggacaaagntgagaattgttggtgaactcaaggaaaaagatggccctacgctgatggttgggtgatggcatgaatgatgccccggcattggctaaagctgatgntgggagtctcta

SEQ ID NO: 391484 - DNA, 668 bp, Oryza sativa
gtattgaagtatctctctctaaagattcttggacgactcgtgctcgtgcgtaaaagaaagaaatctcccgtctcctcgtcgttcctggcgagcagagcaggagaggggaggagatcctgatctggaagaagaaggagctcttctccgaatttcagaaccctaaacctcaatacaagcaacagtttgtttgttcccccaaagtacccccaccaatgtcccaagctggatcggaatccgccgctgccaaggagccgtcgttcaaggagggcgagagagtgctcgcctaccacggcccgctcctctacgaggccaaggttcaaaagtccgaaaacaaggaggatgagtggcggtatcatgtccattatcttggttggaataagagctgggatgaatgggtcacaaatgatcgcttactgaaattgaccgacgaaaatatccgcaaacaacaagagcttgaaaagagccaagtagttgacaaaagcgtaaaatctggacggtcagcgcagcataagccaaaaggctctaatgatgcaaaaactgataaagaggacaccaagattattgtcaaggggaagaaacgcaaaagtcagcctggtgggactgaggagaaagatagaaattcatctgtgagtctcttcatgtcacattttccttcaacactaaaaaaa

SEQ ID NO: 391485 - DNA, 757 bp, Oryza sativa
ttgcatagtaagaaatgggcacataccatacagagattcaaagctcacacgcatactgcaaccttctctgggtggtaatgcaagaactgcaattatttgtacaatgagtcctgcccgtagccatatggaacaatcgagaaacactctgctatttgcaagttgtgcaaaggaagtagttacaaatgcccaggttaatgtagtcatgtccgataaagcactagttaagcaattgcaaaaagagcttgctaggttggagagtgaattgcgatgtccagcttcctattctagtcttgaatcattggtgaaggaaaaggataaccaaatccggaagatggagaaagaaattaaggaattgaagttacagcgtgatttagctcagtccaggcttcaggatttgcttcaggttgttggagataaccatgtccatgtttcaaagcagtcctcggtttctgggaggaactttaccttcgatgttccacagacgtgtgaagatgagcaatcaacaactgagtcatcagaagttgttgacagtgtccaaaattttaggtttcaaggccggcgagtggcacagagggaacataagcctcagcaggctgaaaataatgtgcagtttactaccccatctaggtactcagtcagcagtcctccgttcagtgggatgctcccaactaacagaagtgatcatctctcacagatctctaatgaagattcagatgatatctgcaaagaagtacggtgtatagaaaccaatgaaaca

SEQ ID NO: 391486 - DNA, 706 bp, Oryza sativa
cccacgcgtccgggctacattgccagctttgatggaatggtggaacatgtcattgaacaatactcacggataaaaggcaggaaggaggtccgtgggctcccacattttctattgggacaatcaatgggaggtgcagtggctttgaaagtacacctgaaacaaccaaaagaatgggatggagtgcttcttgttgcacctatgtgcaagatttcagaagatgttacaccaccagcgccagtgttgaaggcattgagcatattgtcatgccttcttccagaagcaaagttatttccacaaaaagatattggagatttggcatttagagatccaagtaaaagaaaagtagctgagtacaatgccatttcatatacccaacaaatgaggttgaggacagcagttgaacttttgaaggctacaaaggacatagaatcccagttggagaagatttgttccccattgctgattctccacggagcagcagacttggttaccgacccccatgtcagcgaattcctgtacgagaaagctagcacaaaagacaagactctcaagctctacgaagatggatatcattctatcttagagggtgaacctgatgaccggatttcaactgccattaacgccatcatttcatggctggattcgcactgctgaataccattatacattgtcttgttgatcttgctgtgctgtctcaatttaagta

SEQ ID NO: 391487 - DNA, 1137 bp, Oryza sativa
  unsure (1)..(1137): unsure at all n locations
gtctntttttgttgctcgtgctgttgtggatgaaatactgcctcctgttttcctcactcgagccagagcactgcttcctnaattttctaaaggtattgaagttctgcaagtttctgagaaaagctacttgtcagccccccatcatgctgagctagttgagcgcaagtggggtgggagcactcactttactgtggaagaggcgaaaaggagaatccaggatattctgaaggagtatattgagagtggagatattgatgaagcttttagggggataagggagctgggccttccatttttccatcatgaggttgttaaacgcgctctcaccttgagcatggagaatctgtcatcacagccattaatcctgaagctgttgaaggaatcaactgcaggttgcctgatcagttctaatcaaatgtctaagggtttttgtcggctagcagagagtattgatgatctgagccttgatattccttctgccaagattctctttgacaagctggttctgactgctacatctgaaggatggcttgatgcttcattcactacatcttctgcccctaatgaagatatgcgaaatgcaagtggtgaaaagatcaagcatttcaaagaagaatctggacacataatccaagagtattttctctcagatgatgtcccagaactcattataagccttcaagagctttctgccccagagtacaatcctatcttcctcaagaagcttatcaccctcgctatggacagaaagaatagggagaaggagatggcttctgccctgctttcttcactcagcttggaacttttctccactgatgacatcatgaagggattcatattgctcctgcagtcagcagaagacactgccctcgacattgtggatgctcccagtgaacttgccctcttccttgccagggcagttattgatgaagttctgattccactgaatttggatgagatcggtaacaggcttcgccctaacagcagtggtagtcaaactgtccagatggctcgtgcccttcttgctgctcgccactctggtgagaggatactgcgttgctggggtggcggcactggctgngctgtagaagatgcggaggacaagatcgcaaagctccttgaagatacaatactggc

SEQ ID NO: 391488 - DNA, 998 bp, Oryza sativa
  unsure (1)..(998): unsure at all n locations
gaataatataacatattattgtttaattgtgttaaactaaggtgtgctgatgagcttgttagagaagttacttaacaattaatgattgtagttacatgtcttgattacattaatgcattgcacattacagaatggtcctgtacttaattcactctggacttctggagagccaggaacaccacaagtttgagataaaagcataaggcagtgcaagtcgcagccgtggcagatggacgccacgacgagcagtggagcttcctcctctctacccctccaccttatcatagatgatgctcttgcccttgtttctccgttgcagcagtcgtttcagaggtcacagcgccattgctttggtggctctgctcctggagaattccccttggctgcaaacccatcaattgtcctccatgtcctcacatcatgcaatctggaacctgatgacctcgctcacttggaggcaagtagtgttttgttcttcctctccaatgtagaattgatattgccactgatgaaatttgtgcttgcgataggcaacatgctcgtttttccggaagcctgccaatttccctcccgattttcagttgtcaatgtcagaactcgcagcgttggatatgtgccagaaacgggcgatatttaaacctatgactcaacaagaaagagaaatgtttaagcaacgttggcgggcgggagttgcgaagctggttcttaggtttataatggcaggtgaagcatgttgccggagggaaaaatctcaggcaatcgctgggacctggtcacagcatcgctgtgacaacaagcggtggcagtgtatacttttgggtccaacagctctggtcaacttgggccatggtaagttgtagaagaaggagtgggaaggccacggattaatcagatcattgcaggggtattagaattattcaagcggcagcaaggaagcaggacgcacaatgcttggttagtngatgctggtaggggctaaggcaatttgggaaagggat

SEQ ID NO: 391489 - DNA, 522 bp, Oryza sativa
caatctcaaaaaaaaaaaaaaaaggaaaaaaacctccactacgcaaatcgtcgtcgtcttcctccgccgaattccccaccccaccggcggcgcgaccgggcggagatgtaccacccgacgagaggcggcgtccgcggcggacgggatcaattcaaatgggatgatgttaaggttgacaagcaccgagagaattacctcggtcatagcattaaggctcctgttggaagatggcagaaagggaaggacctgttctggtatacaaaagataagaaatctgactcagaagatgctctcaaggaagaaatcaggagagtgaaggaagaggaggagcagtccatgcgggaggcacttggcttagttcctaagcgtagtagtcgacctaagggcaaccgattagataagcatgagtacgcagagcttattaagcgaggatcaactgcagaagacttgggtgctggacatgctgaagcagcacaagtgcagggtctaggtttatacaagggtcctcgcagagaggaagaa

SEQ ID NO: 391490 - DNA, 452 bp, Oryza sativa
ctagctcatccctgatctggtgggtggtcatgtgaccaatgaccaatggatatcactcaagattgtcaagatatgaaggacttcacttggcaataacagttgaagatataatcaagaggagaatggggttggaagaatcatcaaggaaaggtgatgctgaactaccaatatcaacatccgtcaacaagtttaatgctgatgaactgcctgatgaaaagcaagtcttagtagatgaagtggagcacattaacattgatgggcaagaacaacctggaggattatatgtgcatcgccctggcactggagttcccaagacatgggaatcacggaaagggcgagcacgtaatccttgacacggagatttacaaagaagttgacaaatcaaaggatgcgccttaccccaaaaagcagtgtaccaggtggtttttttgcctcttttttcctgaagagct

SEQ ID NO: 391491 - DNA, 603 bp, Oryza sativa
  unsure (1)..(603): unsure at all n locations
tgtcatggtgctgggggtgccagtatttcatcacactatttcgacctcctagtcaagctgaaaaatgatcaagaacatctcttcagaaatattcaaaggagtgaataccataacctcttcaactttatcaatggaaaacacttgaaaataatgaaccttggagatggtcaaggcgcaactggtggggttacagctgttctacgagacactgatgatgatgctgctgatccacatctagaacgaattaaaaatcaggctggggatgaggaaagtgatgaagaggatgaagattttgttgcggataaggatgatagtggatcacctactgatgattctggtggggaggattcagatgctagtgaaagtgggggtgaaaaagagaaattatccaaaaaggaagctagtagttcaaagccacctgtgaagaggaagcctaagggaagggatgaagaaggttcagacaaaagaaagccgaagaagaaaaaggatcctaatgcccncaaaagagcaatgacaccattcatgtacttctcaatggctgagcgaggaaatatgaagattaacaatcctgatttgcctacaaccgagattgcaaagaagctc

SEQ ID NO: 391492 - DNA, 620 bp, Oryza sativa
  unsure (1)..(620): unsure at all n locations
tgcaaccgtctctgtacctccacctgtgccgcccgttcgcagcaacgcgncggggcacagagaatctccgcgtccctggacaccacatcgaatcaaccgtcgccttcaacggtttcgctcccacgcaataaaatccccccttcccccgtgctcctttccccccaattgcttccctcttatctctcgattgatccacgaacagtgacaccgccgcgcacagggaatccgccatggccgccaagcagagcctctaccccgaggtgaaccagtcccaccccgacctcaacaccgccttcctcgccaaccccaaccgcgccgccactgccagccctggcggctcgctctacccctccgtcgacccgcagcagctcgccgagaacctcttccccgacgccgccgatgacgccgcgccgccgcctcccaccaccgaggaggccctcgtcgcggttccgggcgcgcagctccacctcgtcgaccccgaccgcagcatggacctcggtgccggcacgctctccgtcgtccgcctccgccagggggaccactccgtcgccgtcctcgcgaggctcgtcccggagaagcgcagccagcgccgcggcggcctcttcggcttcttgagcggc

SEQ ID NO: 391493 - DNA, 605 bp, Oryza sativa
  unsure (1)..(605): unsure at all n locations
gcgagcgaaaaaaaaaagaaaagaaaaaaagagaggaagaaaacgagaaaaatctcaccttcctcttcctccgttatctagctcgatccccgcaagaaattcgccccggaatctctcgatccgctcgatccattcccccgatctgtcgatcgttccttgcgaaccctcggttcccggggtcccgatccggtcttcgccgcgtcgccgtcgccgccggagtcggagtcggagtcggagggggaggagatgaacggcgccggcgggaaccaccagcagcagcagcagcagcagcagcggctcaggcagcagcagcagcagcaggccctcctgatgcagcaggcgctgcagcagcagcagcagtaccagtccggcggtcctcgccgccgccgccgcggcggccatgacccagatggagcctatttcaaatggcaatcttccaccagggtttgatccatccacatgtcgcagtgtgtatgttgggaatgtgcaccctaatgttactgagagccttctaatcgaagttttccagagttctggccttgtggaaagatgcaagctcatnccggaggagaagtcttcctttggttttgttgactattatgatc

SEQ ID NO: 391494 - DNA, 1007 bp, Oryza sativa
  unsure (1)..(1007): unsure at all n locations
ctccccaccccgaccagcggcgccagagcagaggcagtgaggccgagctcctcgcctcgcctcgccgtctccgcccgcgcggcgctgccgccgagccgccgccggcctcctcctcctcctccttcccggttcggatcgggcccaagagccggactgcagccatggcagatctgcaggagcccctcgttcgtccgaagaggaagaaggttttggtggactacttggtaaagttccgatggattctggtgatctttgtggtgctccccatttccgctctgatctacttcaatatctatttgggcgatgtctggtctgccatgaaatctgagaaacgtcgccagaaggaacatgatgacaatgtgcaaaaagttgtgaagcggctcaagcagaggaacccaaagaaggatggccttgtttgcacagctaggaagccctggattgctgttggcatgcgcaatgtagactacaagcgtgctagggcattttgagggtgacctttccgccttcaggaacattcttgagattgacagagagagaatggttgccaaggttgagcctcttgtcaacatgggccagataaccagagctacatgcccaatgaaccttgcccttgcagttgttgctgagcttgatgaccttactgttgggggactgatcaatgggtatggtattgaagggagctctcacctctatggtcttttctctgacactgttgtcgccgtggaagttgttcttgcagacggtcgagttgttagagccactaaggataatgagtactctgaccttttctatggaattccctggtcccagggaaccactttggggntttcttgnttttccgttgagatcaaaaactcaatttcccattcaagggnantacatnnnggggtntacataataactncccgnttaaaaggggccanctgattggtggttagcnccaagggtttatttgttgaattccaattttaacccccggggatttgtngccccttaaaaatggcccc

SEQ ID NO: 391495 - DNA, 479 bp, Oryza sativa
ccaaaagccaagccatatagagagagagaagaggcaaaggccaaatcttgagcttcttcttattcctcctcctccatctcctctcctccgatgcttcacctcgtcgccctaaatttatcacccagaggcgacttggcaagaggaggccgcggaggagagagagattgataggtagacagatataggtagtgatcgatactagcttcaaaaggagggattttttgttgttcttggatctttagagagagagagagagagagagaggagatgccgaccggggcgatgaagaggctgttcgttgagtcgtcgtcgtcggcggcggcgtcgaactccggcagggaggcggcggtgctgtgcgcgccgcggccgaggagggtccaggtgcacccttgcagcgctgacctcagcctcggcccttctcctttcctcctctcctccaacaacaccaacaagcaaagggaagggaagagtaaggagga

SEQ ID NO: 391496 - DNA, 1254 bp, Oryza sativa
  unsure (1)..(1254): unsure at all n locations
cccacgcgtccggctgctgctgctgctggtggtggtagtccgcgaacccggcgaaccacctcggtttcgttggcatcgtcatcctccaggtccacggccactagctaccatctagaagcttccggaagcttcgggaaggaagccgccccccgcgccgccttgccgggcctcgcaatgccggaggagaaggagtacgcgcccgtgcccctcggccaggcgccggaggcggtggaccccgaggacccggtcaagtcgccgccgcggcccacctcgccggcgaactccacccgcaaggcatgttttgctgttcttcaaagctgggtgtcaagaaaatttatgacaggatgcgtagttcttttccctgttgctgttacattcttcatcacctggtggtttgttaagtttgttgatggatttttcagtccactgtatgcaaagcttggatttgatatatttggccttgggtttttgacttccttgctattcatattcctagtttggaatatttgttttcttcatgggtgggntcaactgtctttgggattggagaatggtttattaagaaaatgccttttgtaaggcacatatattctgccatccgaagcaagttagcactgctgttttcaccagatccaaaatacaacggcatttaaagaagttgcaataattagtccatccccgtattggtgaatatgcatttggattcataacatcgacgatgatccttcagactgacaaaggtgatgaagaactgtgccagtgtatatgtgccaaccaatcatctatatatcggtgacatcttcttggttaggtctgaggagattataaggccgaatttgtccattcgagaagggatagaaatccattgtttctggaggaatgaccatgccgcaggtgattgccagcaccaggacaaacaccccataagggtcagagcacccgtttaaacagaatgatgagtgcgtgagtacatcaggtctgcccagagttgctgagagagggcaaatcggtggatgacaaagctggaacaaggtgattgagaagcagcattgctggtagattaggcagatcaaaatacgaaagtcagtgttgactagtccgcatcgcttaggtttgctcgctgagtgaaaagttgtgtaatctttcaatcacgctccaaatgtatatcagtactgtgaccaatagtatttatactcctttcaaaagaaaaaaaaacgatagcatttgtaccttgtttaaaaaaaaaaaaaaaaa

SEQ ID NO: 391497 - DNA, 687 bp, Oryza sativa
  unsure (1)..(687): unsure at all n locations
cccacgcgtccgggaaaggacttctgctacaactgttgagtcattcaaagaagcactctctgaagtccgattctgctctagaatggaagagcttttactgaagaaaaaaacatctactgccggagactcccttgagattcgttcccaaaaggttgacaaattaaaggtcttagcaacttccctctctaattcatcttccaaggctgagaagcgtattttggatcacaggcgccagaaagaagaggctcttaacttccgtgctaaaaaggagaatgaagtgagtgcagttgaaaaggagttgacggctgagatttctgaattggagaagcaacgtgacgaacttgaggctcggttgaagaaggtcaacatttcactgaatgctgccattggacgtctcaagcaaacaagggaagagagggatcaatttgatgaagcaaacaatcaaatgatattttagtttaaaagcgaaggataatgaactttcaaaatctattacctcatgtaatgtggaggcttgcgtagtcaagacttggnncaatttccttgaggatacgtngcagcttcagtcatcatataatgaccaggagggaaaggggaccccattgatgagctttaggaggttttccaggcaatttncctgaaatttgncttaaatatcaccctttntacattcaaggggaattcttt

SEQ ID NO: 391498 - DNA, 674 bp, Oryza sativa
gtttccccaattcggaggccaagcctgcaccggcaagcggcggcggcggcggcgacgaggcgagagggttcccttccgcggagccggcggagatggaggccacggcgaagtacaaccggggcaacccggcggtgaagcggatccttcaggaggtcaaggagatgcagtccaacccgtccccggacttcatggccatgcccctcgaggaggacatcttcgagtggcaatttgcgatcctggggccacgagacagtgagtttgagggaggaatctaccatggaaggatccagctgccatcggactatccgtttaagccaccatcattcatgctgctcacgccaagtggaagatttgagattcaaaagaagatttgtttgagcatatccaattaccaccctgagcactggcaaccatcatggagtgtgcgcacagctcttgtagctttgattgcattcatgccaacaccaggtggtggggcattgggttcgttggacttcaaaaaggaagatagacgggcactagctatcaaatcacgtgaaacaccaccaaagtttggctctgcagaacgccaaaaagtaattgatgagatccatgagcaaatgctcagtagggctccccctgttcctcagctgctgacaaatgaaactaatgaggagactaaccaattgccttgc

SEQ ID NO: 391499 - DNA, 287 bp, Oryza sativa
ttctactccaccactccactccccaggccaaccgccccccgaacaaccggagaagagaggctgcactccactcgccgccggcgaccgatgctccgcgccgccctcctccgctcaggctccggcctccgccggcctcccatggccgcgccgctctccaccgccgccgccgcctcgtggctctccgacagcgcctcgtctccgcctagggtgcgcctcctcatcggcggggagttcgtcgagtcgcgggccgacgagcacgtcgacgtcaccaatccggcgacgcagga

SEQ ID NO: 391500 - DNA, 497 bp, Oryza sativa
ctccacgtggccatctccccccatccatcccccactcctccgctactcgcaccgcaccgcaccgccgattgatttggagaggaaaccccctcctcttcctcctccacctacctctcctccttcccagccagatccgcctcctcctcctcccctgctccctcccagatctcacactccatctcgcgagcgcgccgacgcgggacagctcgccaccccgcccagatccaccgtctcgccggagccggagagaccgagcggcgggcggcggggaggaggatggccgtggggaaggagggcggcggcggcgctggcggcgaggggggcatgtcggattcggtgatccggaaggtgctggtgccgctacatgcacgcggcggtgtggatcttactctccttcacggccatcggccacaaccagtacatcctcgaccccaagatgtacaactgggccttgaccatctcgatcaccatggtgcacacggccgtctgctcggccc

SEQ ID NO: 391501 - DNA, 435 bp, Oryza sativa
tgttttttcctctccctcagtccctctctccggccccctcctcccccaccggcgacgccgcttcccctacccttcagccagcgcgccctccctctccccccaccgacgacgtcgcttcccctaccactcacccagggcgcccttcccttcccttggcagccggcgtctcagccgcggtgccctccccctggctcctcggcggcgtcctcaccctcttctccgccacaacacaacggacggtatcgacagcctcggcggcggcaccctcctcgtagaagcggcgtcctcgcctcccatgaccagtggcgtcgcttatttagttttttggtgcgcagtactgtgctgggctggtgggctgcttctcctccgctctgggggctcgctggtgggctgcggctgctatctgtgccggcctgctgctgctttgggtgggct

SEQ ID NO: 391502 - DNA, 702 bp, Oryza sativa
  unsure (1)..(702): unsure at all n locations
tttaattaagcgagggagtgagagctagctaactcaggctcagccaactgatcgcgagctgtgacgaggtgatcaccatggcgtcctcgtcgtcgcttcttgttcgtgggagagcgttcgcgctggttgtggctgtagctctggtggctgctcctcgccggattaatggcggcgccgccgggccggcggcgaggacgaacgaccccaactggcacgtcttcagcgtcagctcgctgctgccgagctcggcctgcactgcatcgaaagcggcgtccaactcgtcggctctcggcgtcgtgcaccggcacgggccgtgctcgccggtgcaggctcgtcctcgcggcggcggcggcgctgtcacccacgccgagatcctggaacgcgaccaggccagggtcgactccatccaccgcaaggtcgccggcgccgggggcgcgccgtcggtggtcgacccggcacgcgcctcggagcagggcgtgtcgctgcccgcgcagaggggcatctccctcggcacccggcaactacgtcgtgtccgtcgggctcgggacgccggcgaacagtacgccgtgatcttcgacaccggcagcgacctgtcgtgggtgcagtgcaagccctgcgccgactnctacgagcagcaggacccgctgttcgacccgtcgctgtcgtcgacgtacgccgccgtggcgtgcggcgcgccggagt

SEQ ID NO: 391503 - DNA, 613 bp, Oryza sativa
  unsure (1)..(613): unsure at all n locations
cccacgcgtccggatttaagttgttctctaaattatgtaactaatgtattgagctgtctcttgtgaatgaaaacagaatggctaaaggaaaggcgaaggctgatccttttccaacctctcatgagaggtccttgacttggcatgaggatcaaacaaaattcatgctagagtggtacatggaatacttgaaaaaacaacatgcaggttttaaggtaaaaaagagtcaccacatgttgtgtgctgatgctttaaacaagaagtttggtatgggggtgactgccgatcaagtggatcgtcactacaggtatcacaaagaaaattggaagtatattgcagcagcattgagcaagagtggcaacgcatttgaccatacaagattcttggtgactatttcagaatctgaaaaggcaacgctatgtgatagagcaagacgcctactctctaagcccatcagattctttaatgagatgcaggagctattcacgggatctagtgccgatggttctttggctatggatcaaaacacatgcatgaacgatagtgatggttcaaatagcgatgattcaagagatatgctngacctcaactgctacacacaacctgaagagcccac

SEQ ID NO: 391504 - DNA, 645 bp, Oryza sativa
cccggtcgacccgcgtccgcaatgaacatcaagtcgacacggctgcaaaaaatgttcgaaggaaactaagggagaaaaggcgtgaaaagagggcaatggatttgtaaggaaagatgatgaagcacgtgttaagctggagaatgctgctattgatcgatcaaagattctgctgtccttgggaaatacagcatttggagaaaggagaatgagaatgagaactcagatttgacagttagattgatgagagaccagattattatggcacgtgtttattctgtgcttgctaaatcaaagaacaagaatgatctttatcaagagctgcaaaccaggatcaaggaaagccagcgggctgttggagaggctactgctgattctgaccttcatcatagtgcacctgagaaagtcagagtaatgggtcaacttctatccaaggctagagaagatgtgtatgattgcaaggcggttactcagagacttagagctatgcttcagtcagcagatgaacaagtcaggagcttgaagaagcagagtacatttcttagccagttggtgcgaagacaattccaaacagcattcattgtttgtcgatgcgcttaacaatagattactatctcctcccgttggagaaaaggaagttcccgaggt

SEQ ID NO: 391505 - DNA, 460 bp, Oryza sativa
cctagtgagcttcccaagccgacatcgaagcaaggagaggagcctcctagtggtgaaggtgctgtgtttgatcttgtagtgccagctgaatctgcagaggccaatgaagccaaagagcagcagcagcagcagctaaactcaccatcttcaccgccacctgatctcatcagcatatgaagaaatgctgaactaaattgttacagttcagtttgatttggtgaagtttgggtttctaatctggaatgcttagggtgtgtggtatgtaggccttcgcatttagggtgtgggaattggaggccactgaatttcttgggtggcatgtatccttgggatcttagggatttgtgttgtaaatataagcttcgtaaacctccagtgtcctgctacaatcaaggaaactttgtaggaagttaagagcttagttatctgaatccattttagcttcttttttttttctttc

SEQ ID NO: 391506 - DNA, 687 bp, Oryza sativa
  unsure (1)..(687): unsure at all n locations
gtcggagagccgagagcgtctcgccgcctaccgctcgctcatttgggcagaaaccctagccctaggcgagcccctaaaccccaacctcgcccgcgatttcctccccgagggcgtcgaggggaggtaggttggcgccatggatgcgatgaggaagcaactcgacgtgctcatgggggcaaaccgcaacggcgacgtgcgggaggtcagccgcaagtactacgaccgcgacgtctgccgcctcttcctcgccggcctctgcccccacgacctcttccagctcacgaaaatggatctcgggccttgccccaaagttcattcgctgcagctacggaaggattatgaagaagtaaaggcaaaaggaacagaaaattatgatagggaacttcgaggaaatgatagacagggctcatcgtggangtgcgagaggaaaattcagagggcgctgaagcgtcttgctgatgaggatgccaaggctgctattgcaatatctgtttctgagggttactcagacagatgaggtgttgcagttgtcaaaggagatcaaggagaaaggaaagaagttgatacctatgattttgaagggaaaactgatgataaaatcaagaccatggnagtggtggaagaattaaagatcttaaaaagggcttgacattcaaggcnacccttctgcttgatgccttttaacaa

SEQ ID NO: 391507 - DNA, 817 bp, Oryza sativa
  unsure (1)..(817): unsure at all n locations
cccaatcttaaattcatcaaagggactgttgaagttaagctgacatcagttgcatcaacgaagttgatctgtgaatctgcactgctgttggatggtgcagcagcccaaacttggggcaaattgcttgacagtattgttgcattgctgtccagaacggatcaagatggggcacaacaagatcagaatgatggtgctgatgcagatagtcagaggacatcaggttattctgtctcatttgtacgtcttcaatatgctggaaagagtgaagatgatctgttgaaagaggtaaatgatccaaagcagtttctggtcacctccttggctactctttctgcgcaatctccagggagatttggtcctatcattgagcagaacgtggatcctgcaaacaaaggcgctcttattcaactttgtgcagcttacaataccaacattgtctaggagccaatggctttgctgtaaggcatttgcattgtttccatggggttttgtcaaaggatgtctcaggggagtctatcggtcggtcggtctatcgggtcaagctggtcttcggtttcatccttgcaatatttctggcatgtgtaggttggtcttgggagaggaaggatgtcgaaatcatatagtggtggaaaaacatgaacattgtggtggaggatgtctctttgattggaatttggaattttcttttttggtgtggaagaggtttgtttcccccggaaaacatgaacattgtggaggataccccgagaatattgccagcgtaggcatgtgccatcctggtggaactttgctgtnnnnnnnnnnnnnnnnnnnnnnn

SEQ ID NO: 391508 - DNA, 963 bp, Oryza sativa
  unsure (1)..(963): unsure at all n locations
tgtcggaaagaagggaaatctcccgtcgctttgtctcctgccaagacgagtcgcggctgaacaggggaggggccgcgatctccatctggcgggcagagcaggggacgggaggggatcctgatataataccaagataatacacctgcttgtcaaatgatgatgggtttgctagcgtttgagagcaaccaagggctctggaatagtggatattattcccagctgtttgggattggaggagttatggtcactgtcgccattctttggttatcgacaggctactttggaggaattggtgctccttttgccccatatttttggccatatctaggacaacttccaaagaagaaggaacggaaaaggcctgtgagagtgtacatggatggatgctttgacctcatgcactatggccatgcaaatgcattacggcaggccaagttgttgggagatcaacttgtagtgggagttgttagtgatgaggagattgtggcgaacaagggtccacctgtgctttcaatggaagagaggttgacacttgttagtggattgaagtgggtggacgaggtcattcccaacgcgccctatgagatcacggaagaatttatgaataccctcttcaataaatataacattgattacattatacatggagatgatccttgtcttctacctgatggaacggatgcttatgcgttggcaaagaaggttggacgctacaagcaaatcaaacgcactgaaggtgtctcaagcactgatatagtcgggaggatactactgacattcaagcagaaagaggctggcagtatggaagctaccacagatgcaaatgttgctgtcaatcagaacactggagctgatacatatgataaaggtgaaaagtcagctatccaattttcttccaacatctcgccgggataatgcagttttcaaatgggcaggttccttttgccaggtgctcgggttggn

SEQ ID NO: 391509 - DNA, 355 bp, Oryza sativa
gcgcggctctctcctcctcctaaaccgggcagcttctctctctcgcgttgctgccgcgcgcggggcacacagctaagctagtgtcgccattgccattgtcttggaaggaggttggttagcatggctcgcgtgtcggcggcggcggttgccgtgctggtggtggcgttcgcggcggcggcggcggcgcaggagagctgcaacaccgagctgccgggcgggctcgtcggcaactactccggcctgaattgccagccggtctggaacaatttcgtgctccggtatcaccaagacaagaacaacgtgctgagggtggtgctgtcgacgatgtacagcacggggtgggtgggggtggggt

SEQ ID NO: 391510 - DNA, 452 bp, Oryza sativa
  unsure (1)..(452): unsure at all n locations
cacacgacacgaccgtataggagtagtcgtgtagcagctagctagctagcaatggcggcttcttcttcttcttcttcctctctggcggtggtggtggtggcggcggcggtggcgctggtcgccggcggggcgcggcggtggcgcagctgtgcgaggagtactacgactgcacgtgccccgacgcgtacgacatcgtgcggcgggtgctgatcgatgcgcaccggagcgacgcccggatcttcgcgagcctgatccggctccatttccacgactgcttcgtgcaggggtgcgacgcgtcgctgctgctggacagcgtccccgggatgccgtcggagaagacgtcgccgcccaacaacaactccgcgaggggattccccgtcgtagaaacgtcaaaggccgtgctcgaggacggcttgcccnggcgttgtcttctncggcgacatcttggcctt

SEQ ID NO: 391511 - DNA, 545 bp, Oryza sativa
  unsure (1)..(545): unsure at all n locations
cagttgttacaaaacccacacacctccgcgcagcgcagcctcccacacacgcgcactcgattccccactcctctcgcgggtcgcggccacttcgccgccggcgctcgcatcggtcaactcgacgccacggccacacacgcaccggccatggccgcggcggcggagcagcagcagcagcagcagcagcagggcttccgcccgctcgacgaggcgtccctggtggcctacatcaaggccacgcccgccctcgccgcgcgcctcggcggcagcctcgacgccctcaccatcaaggaggtcggcgacggcaacctcaacttcgtctacatcgtcctctccgacgccggctccgtcgtcatcaagcaggcgctgccgtacatccgctgcgtgggggattcgtggccgatgacgagggagcgcgcctacttcgaggcctccgcgctgcagaagcaccgcggcctctgcccggaccatgntcccgaggtctaccacttcgaccgggccatgtcgctgatcgggatgcgctacatcgagccgncgcacattat

SEQ ID NO: 391512 - DNA, 530 bp, Oryza sativa
ggacagtacagtattgtagtgatggctcttcatgtactagcatcgatgggagatctatggagaaggtacgcgccgcacaatctgatgatactgtcgcagctgtgctacacgctcatgtacttcatcaccgaggccgcgttcaacaaggggctcaaccctttcatctacgtcacctaccggcatctcgttgtcgccgtcttcctcgcgcctttcgcctactaccaagagaagaaactgaggccgagaatgacgctgatgctgtttctggagatcttcgtgctctcacttctaggggtgagcctaactctgaacatgtacttcgcgagcttaatgtacacatccccaacctttgtcacgtccgtggtgaacaccgtcgcctcgatcacgttcgtcatcgccatcgtcgtcaggatggagatcgtccacgtgaggagcatacgagggctcgcgaaggtcgccgggacggtggtgtcggtcgcccgggtgaccaccatgaccctgtaccaaggcaccgtgatttcagcccctgg

SEQ ID NO: 391513 - DNA, 289 bp, Oryza sativa
  unsure (1)..(289): unsure at all n locations
cgcgaggcgcgcgactcacctgccgagccacgcgtcgcgcacgctgcggagatcgcctcctcctcgccgccgccgccggggggaatggggagcacggggcgcgacgcggaggtgacccgcggcgacttccccgacggcttcgtcttcggcgtcgccacctccgcttaccagattgaaggggcgagacgggagggaggcaaacgagataacatatgggatgttgtcacagaaaacaaagacgtatcttagatgggagcagttgagaagttgcanttgatcattaccatcg

SEQ ID NO: 391514 - DNA, 445 bp, Oryza sativa
aatttatctaaatccatccatcgatctctcaattaattaacctcaagagagaagtaattaattgagctagctagctagatagtgagataaatagtgatcaatagctaagctagctagcttcgatcgattgatcatgatgaggtcgccgtggatggtgtttgcatgggcggcggcgatggtggccgtggcggcggcgtcgccggtgccgacgaagctgaaggtggggttctacgagcacagttgcccgcaggcggaggagatcgtccgcaacgccgtccgccgcgccgtcgcccgtgaccccggcctcgccgccggcctcatccgcatgcatttccacgactgcttcgtcagagggtgtgacgggtcgatactgataaactcgacgccgggacacgtggcggagaaggattcggtggcgaacaaccctagcatgcgagggttcgag

SEQ ID NO: 391515 - DNA, 522 bp, Oryza sativa
cccacgcgtccgcccacgcgtccggcgagcaagcaagagcggttttagccatcaaagccgaaagccatccgggcattcgctctcccctcgctgctagctagctttgcttgctaatctagagctaagcaccaaatggtcctgattgttcttctcgcttctgaattgttgtgacctgtaactacaaaggcatagttaggtagatatagaaagagggggggagaggggccggaggcccggagcggcgggggcggcggcgagatgaagctccacttcgtgctcaggttcctgttcggccccgtgccggtgtacttctcggcgctggccatcctcatcctgctgacgaacgcgcagtacttcgggctggtgggcgtcaccgttccccgcgcgacgaagcttggcgtcgtcggcgcccggtgggtgagcgtgattgaagtacttgcgacatcttccgcggagaggtgggtgccagacttcgacgcgccctactacaaccacaagacgtgctacatgatccatgagcac

SEQ ID NO: 391516 - DNA, 475 bp, Oryza sativa
ccgtaaactcctctgtcagaagaggaaagctgatcttggatcgttaacatcagatgattgtttgcgtgcgataagtaagctgaaggtccttggtagtggttttgaagtaatttctgttgggaagaaaaagcttgtgcgttctgttcctacagaactgaataaagatcacaatgggatacttgagctagctcaggctgaaggttttgtcaccgtagagcaagtcgagagaaagttctcgtggtcaactggccgtgccatttgacgtccttgaaactttgctcaaggaagggcttgcgatgatcgacgatgggcacagggatggcaagcgcagatactggttcccgtgcgtcactctcagctctgactctactggtgcggatgccaagtcatgacctgtgccgtgcctgttccaacttcgtgttgtcacctgtatccttttccatttggtcatttctggaggcacttgagcacatat

SEQ ID NO: 391517 - DNA, 522 bp, Oryza sativa
tgtttgaccccctcttttctctccgattctgcgaggcgacatcggcggcgagaggcgggctagggtttcgagcaccgccaccgcgcgccatggccgaggccaaccagtaccagatcctggtgcggctcctcgacggccgcacacgctgcctccgcttctcgacgacgaccgtctccggcgcggcgctcctcgacgccgtctcggcgctctcccgcgtccccgccgcgtccctccgcctcgtcaccggccgcctcgacgtctcgccgtcctccgtcctcgcctcctccgccgacggccgattcccctccgcatccgcgctccttcgcctccgcggaggcaagggcgggtttggctcgctcctccgtggcgccgcctccaaggccggccagaagaagaccagcaacttcgacgcctgccgcgatatcaacggccgccgcctgcgccacgttaacgccgagccgccgctcgaggagtggaaggccgaggccgcagatcgccagctcgagaagctcgcggaggatt

SEQ ID NO: 391518 - DNA, 484 bp, Oryza sativa
ccgccgcctcgccaacctccccacgccggccaccgccgcacgggctccggcgacgaacgagggcgctgctctcgagcgcgatggggggccggaagcgcgcgctgctggtgggcatcaactacccgggcaccaaggcggagctcaaggggtgccacaacgacgtggcccgcatgcgccgcgccctcgtcgaccgcttcggcttcgacgaggccgacattcgcgtcctcgtcgacgccgaccgggcggcgccgcagcccacgggggccaacaatccgccgggagctcgcgcgcctcgtcggcgacgcccgccccggggacttcctcttttttcactacagcggccacgggacgcggctgccggcggagaccgggcaggacgactacacccgctacgacgagtgcattgggccctccgaaagaaccttatcacagacccagatttcacagaactcgttcaaaagtcccagatgactgcttattcacc

SEQ ID NO: 391519 - DNA, 762 bp, Oryza sativa
  unsure (1)..(762): unsure at all n locations
tttgtgtactggtgtccaattcttcggcatgctgctggttacgatgatttttgcagttctgggtttcctttctccatcaaatcggggaggattgatgaccgcgatgcttcttgtctgggtcttgatggggttgcttgctggttatgcttcttcacgcctctacaagatgttcaagggttcagagtggaagagaataactatgcgcacagccttcttatttccagggattgcttttgttatcttcttcatattgaatgctcttatttggggggagaagtcatctggtgccgtccctttcaccactatgttcgccttggtcctcctttggtttggtatctcagtgcctcttgtgttcgttgggagctatcttggattcaaaaaacctgccctggaacctccagttaaaaccaacaagattccaaggcagatccccgagcaagcttggtacatgaatccaatcttcactattctaattggtggcattctaccatttggtgctgttttcattgagctatttcttcatcctcacctctatctggcttcaccaatctactatatctttggcttcctcttcctcgtctttgttaatnctcatcatcacctgtgccgagattacggtcgtgctctgctatttccaantgtgcagtgaggactacatgtggtggtggagatcttacctcacttcgggatcctcagcactttnaactcttcttaatatgctgctttcgactgcttcaacgaagctgcagattactaagctgg

SEQ ID NO: 391520 - DNA, 437 bp, Oryza sativa
ctcctctccgcttctccattcgccggcgccgcccgaaccaatcgccccgaggaggaggagacctagggtttcctcgtcctcgtcgtcgtcgtcttcccccgcgccgccgcccgctcctcccttcgtctatccccggaggtttgagaagagttgcttgtcctaaaatgaggccagttttctgtggaaaccttgactatgatgctcgccaatctgagattgagcgcctcttcagcaaatatggacgtgtggagcgtgttgacatgaagtcgggatatcatggagcatttttgctcttcctggatgatggactgggctctacctttcctgcctgagccccgctcattttttgtccatttccaggagctcagagtccctcctggcatctgttcacttggaaacaaccaccttgtgaatgatgcccttcttttaccatcagc

SEQ ID NO: 391521 - DNA, 408 bp, Oryza sativa
ccaaaaatggtaggatcgtaggagatagggagaaagaagaaacagtttagatttgtgggatggggtgaaatgtatcaagtccacagcatctccttttgcctgtggcaccagcacaggtgttgattgatgatgatgatgacatgtctaaattagtttttggttcttttttcccacccccagaaaatcttgacctcccctggcggctcccccagtgtgtgccggaaatggctgccatctttccctcctttgtaaagcttttctagctttgagctagtggtggttggtcccttaaaaaatgttcttttgttcctgcccttttttgcggggtaggaaggtattcctagtgtaaaatatggttggcatgttggatggtggtatttgtttggcctaatgcgactgattcccccc

SEQ ID NO: 391522 - DNA, 389 bp, Oryza sativa
  unsure (1)..(389): unsure at all n locations
nccacgcgtncgtccaaggctactcgcctagcgcccgccacctaggccgcggcctcatcccccccacctcttctgctcctctccccaataaaattccccgcacgaatcgatccccccctcggatccggatcgcctcgcccaccccctctccgccgctcgtcgatcgcgattttttttttcttcgccggatttttttttctcccgatcggtggggagggctctctctctctctctctcttcaccctagggttagggggagcgccgccgcatttcggtccgccgccgccgccggagtcgaggagctagggttttcgtcggtcgggggggaagaggggtgaagtttaatttttatgtcacgaatgctcgtttttaagaaactcactaacccc

SEQ ID NO: 391523 - DNA, 512 bp, Oryza sativa
cgatcacttcgatttctcctctaacttcccgcgacaaagctctagtttctttctcgatcagaccacgtacgacaatggaaaaggacaaggggctcgtctccaacctcatgcacggcgtcgccggcggcggccatgcctatccgtaccctcctcagcagggctactaccctccgccgcccaccgcatatcctcctccggctggctatgctgcgccataccagggttatggaggtagccatggtggaggagggcacatggctccgatgcttggagcgggtgcagccgtcgccgccgcggcgtacggtgcacacaagctttcttcccatggcggccatggaggctacggttacggttacggcggtcaccatggcggcggcggcttctttggcggcgatcaccatggccacggcggccatcacggcgaatactatggaggccatcacggacacgacgaccaccatggcggcttctatggcggtcatcacggacacgacggccaccacggcggcttc

SEQ ID NO: 391524 - DNA, 518 bp, Oryza sativa
tacccttcttcatcttcttctttttcgtcttctggttcttcttcttcttcttcctctgatcctccattgctgcaaaagaagaagaggtagacgaaggaggaggagatcaggtgatcatggggactcaggtggcagataactacccaccggccaaggatggccggagcgcgcaggagaaggcgatcgacgactggcttcccatcacgtcgtccaggaacgccaagtggtggtactccgccttccacaatgtcaccgccatggtcggcgccggcgtcctcagcctcccctacgccatgtccgagctcggctggggacctggcatcgcggtgctgatcctgtcatggatcatcacgctctacacgctgtggcagatggtggagatgcacgagatggtgcccgggaagcggttcgacaggtaccacgagctcgggcagcacgcgttcggcgagaagctgggcctctggatcgtggtgccgcagcagctcgtcgtcgaggtccgcgtcaacatcgtgtacatg

SEQ ID NO: 391525 - DNA, 753 bp, Oryza sativa
  unsure (1)..(753): unsure at all n locations
cggcgccacgcgtcgctgcacccgccgcgtcgacccgccttcggttgactcctaccctctcggcgggcggcggcagcagcggcggcagagtcagcagacctcgccgggaagctaaagccctaaagctcgcggaagggtttatcgcaacgggcgatggcagcggcggagcataaggggaagaagccgatgaccgacggcgcggaggccgagcccgtcgacgccgccctgctgcagtccatcgagaagctccaggagatccaggacgagatcgagaaggttaatgaggaagcatgtgataaagttctggagttggaacagaaatacaacgaggttcgcagaccagtttatgttcgacggaataaaattatcaagcaaattcctgacttctggctgacagcgtttcttagccatcctatgcttggtgaactattaactgaagatgatcaaaagattttcaaacacttggagtctatcgacgtggatgactcagaagatatcaaatcaggctactccattactctcacattctcccccaatccatattttgaggatacaaagcttacaaaaacatattcctttagtgncgatgaagcagtcaagtaaaggctacctccatcaggtggaagaaggatngntattgccatatcgtgcgtcacgaggaaggggcaagcgatcttaattgatgaagtttcttacttggtcatagtnaagacagagtttctcatggctatgataggngcaattctcaggagt

SEQ ID NO: 391526 - DNA, 438 bp, Oryza sativa
  unsure (1)..(438): unsure at all n locations
cggacgcgtgggcggacgcgtgggcaaatcctgagaaatttgacaaaatggacaccgaaggtattgaaacagtgagaagggacaactggttattagtaaagaacctggttactgagtgccttcataaaatactagtggacagagatgttcctggtgcagttcaatatgtcaagaacaccatttctgttctactaatgaaccgtgtagacttatctcttctagttataacaaagggtttgactaaaacaggagaggattatgctgtcaaagctgcccatgtggagcttgctgagagaatgcgaaagagggacgctgctactgctccctactggttggttgaccggggttccttatggttataatccaaagcagccaaagggggccaanggcatatggagaggtccagaagtcctatttatgttttgggataattaccat

SEQ ID NO: 391527 - DNA, 855 bp, Oryza sativa
ctcgcagacggagatctggatcaagaccgggatgccgacgagcaccctcaccaagcacctgcgaggcctgccgctcctgctcgcccgccgccatcctcgtcgcgtcgttttcccaaccgccgcgccgcttcgccatcttcgccgtcttcgccgtgccgctcctctccttccacttcatctccaccggcgagtagatctccacgccggtgaggttggaggcgcgcggcgtcatggcgttggacgcgccgtacgctcgggacacgccggagcgcgccgcgccgccgcccgtggtggaggttgacgcggagcagcggatgacggcgtggactcgaccgtcgcgccccgccttcggcgtccgcctgcagcgccttccctcccgttgagcgagacgacgtcggagtcgacccggaacgtggcgatgcttgcgtcgacgtccggcgggaactgctcggagatgatggtcgtcacctgtccgctccaccgacccacctgctcctgcgtggccgccgccgcatcgccggtcgccggccaccgccgccgatcctcctcctctcccgtctcgccccgtcgacttcctccccaacacgccggtcagcctgcctaggagaaaaccgagagaagaggaagggatagatgatgtggcactctagcatgtggggcccacgtgggtcccatgctgactcagccaccacgtcggacaaaactaggttcaaaaccaccaaaggacctaaagcgaatggttttgatagttaagggatgcccggtatctggttttgcgattgggggatgattttgtatctcgatgacaagttaagggaccttgggtgtactttttccaaaaaaaaaaaaaaaaaa

SEQ ID NO: 391528 - DNA, 554 bp, Oryza sativa
cctagaatccccatagctcaagcaaagggagagagcagcagcagcaagaggagcacgcggggagctagctagctccgccgccgccgacgagctccggcggctcgccgttatccgctcgctgatcgagccgtgtgcgggtgagaaagaaaaagaaaaaaaaaagatcgcgcctttttggcggcttcttggggtgtgaatccacggtttccccggggtaggatcttgatggggctcgaggaaggcggcgcgatgagggcgctgatgcggcggaagcaggtggactccgaccgggtccgcgccgccggcggccaccagctcgccaaggagctctccgttacgcagctcgtcgcgattggtgttggttcaacaattggagctggagtatatgttcttgtgggaacagttgctcgggagcatgctgggccggcattgacactttcatttctgatagctggagtggcagctgcactctcagctttctgttatgcagagcttgctagtcgctgcccttctgcaggaagtgcctaccattattcgtacatctgcgttggcga

SEQ ID NO: 391529 - DNA, 654 bp, Oryza sativa
  unsure (1)..(654): unsure at all n locations
ggagaagagaaggtggtttccggtgaaaattgtggcctctttttcggaagtttttttgtccttcccctctcgttctctttttattccaccgctttgtcgttctcgcaatctcgctgtccaccttccccacccccccccccccatttactcgatcatcacaacgtgccaatcaattaatcgatcgatcagttttgtgcgtacgtgagcgtgtggagagggagagaaatggacatggaaatcgtggtttttctgaggtaatgtgctggaggaggaagaagaagaagaagaagaagcagctattgttgctgctgctgctttctgggattccgaggaggcgatatgcttcgcaacagatcgaggagatcagtcggtgccaagcaaggaggcgtcaccgccatggcgcagcctgagccgccgccgccgtcatcgcaatcttcgtcgtcgtcttcctcctcttctcccgtggttcccttccccgaggccgttcatggcgctcccgcacccgccgcagtagggttcttggacggcgccgcgaggggccctcgtcgtcgatgagccccacctccattcttgagaccaagcagttctgctgctcgtccgncatgccgncgttcctgtcggagaggagcctcaggaaggcccacgtggagatgg

SEQ ID NO: 391530 - DNA, 485 bp, Oryza sativa
ccagcacgctttgaaatatgcttgggcattgcaagaggtctggcttatcttcatgaagagtcaagcatccgtgtcgtgcacagggacatcaaggccagcaatgtcttacttgacgccaatctcaatcctaagatctcagattttgggctagccaaactttatgatgacaagaagacgcatgtcagcacgaaagctgctggtacattcggttatcttgcacctgagtatgccatgagaggtcatatgactgagaaagttgatgtctttgcatttggcgtggtcttattgcaggctttagctggacggccgaactacgatgatacacttgaaggagataacatttacattttcgaatgggcctgggagctgttcgagaacatcaaccctctgggcattgtagacccaaatctcagagaattcaacagggcggaggtgctccgggccatccacgtcgccctcccctgcaccccgggcccccctcccca

SEQ ID NO: 391531 - DNA, 487 bp, Oryza sativa
gaaagggggatgtgctgcaaggcgattaagttgggtaacgccagggttttcccagtcacgacgttgtaaaacgacggccagtgagcgcgcgtaatacgactcactatagggcgaattgggtaccgggccccccctcgaggtcgacccacgcgtccgcccacgcgtccgcgacttcactttgcccagtggctaccttgcacctgagtatgccatgagaggtcatatgactgagaaagttgatgtgtttgcattcggcgtggtcgcgttggagactgttgctggtgaatcaaactaccagaatacacttgaggaagacagaacttacatatttgaaagggtctgggagctgtatgaaaacgggcacccgctcgacttcgtggacccaaaactctcggaattcaacagcgaggaggtgatcagagtcatccgcgtcgccctcctctgcacacagggctcccctcacaaagggggacgacaccgtggtgga

SEQ ID NO: 391532 - DNA, 488 bp, Oryza sativa
ggggatgctcaaaatggggcagctcgacctcaagaagggcgacgccggcgaggtcaggacatcttgcagggtcgtcaactgacactccttgatcataccaacaatctatatgtcctgaattgcccgccttagctctttagcttaagcttttgagtttaactggttggtgcatgcaactcaataataacataccgtatactcgacgtctttcgtggccgcgtctttgtgaacttaaaattgcagctagctagtttgccggaaatgctacagtacccaaggtctacaagtagtgtcagtttgtattgtggcatggaggccatgtatgatagtagtaagtatagtaagcttgccagaaatgctacagttagcagctggtataattgtggtactgtataggaaagattgtaaaacaatcatgcatgtcactagtttagatatgtatgcatgtacaataatattgtgatgctccaaacaaagaacaaggagag

SEQ ID NO: 391533 - DNA, 670 bp, Oryza sativa
  unsure (1)..(670): unsure at all n locations
ggcagattatcaaatggcaccccagtggctgtcaaaaaaatccttaacaatctaggacaagctgagagagaattcagagtggaagttgaagcaattggtcatgtccgacacaagaatttggttcgccttttggggtactgtgttgaaggcactcaaaggatgcttgtgtatgagtatgtcaacaatgggaatctcgaaagttggttacatggagagttatcccaatatagttctctcacttggctagcgcgcatgaaaattcttttgggtactgcaaaggcccttgcttacttacatgaggcaattgaaccaaaagttgtgcatcgtgatatcaaggccagtaatatattgattgatgatgagtttaacgccaaaatatctgactttggtttggccaagatgctaggtgctggtaaaagtcatattgctactcgagttatgggtacttttggctatgtcgcgcctgagtatgctaacagtggacttttgaatgaaaagagtgatgtctacagttttggggtggttctgctggagctattacaggtagagatcccatttgactatgatcggcctacagatgaggtaaacctagttgactggcttaaaatgatgggttgcccacagacgatcttaagaagttgttgatcccaacctggnggagaggacntcg

SEQ ID NO: 391534 - DNA, 942 bp, Oryza sativa
cccacgcgtccgtatcagcaggatgaagcagttcagggcaatgaacaagcttaagaaagttgcattgaaggttgttgcagagaacttgtcagatgaagagattacaggctcaaaagaaatgttcagatccttggatactgataacagtgggacaataactcttgaggagctaagatctggtttaccaaaacttggcaccaaaatttctgaatcagaaattagacagctgatggaggcggctgatgttgatggaaatggaaccattgactatgctgagttcatatcagcgacaatgcacatgaacagattggagaaggaagaccacatacttaaagcatttgagtattttgataaggaccacagcggatacataacagtagatgagttggaagaagctctgaagaagtatgatatgggggacgataaaacgattaaggaaatcatcgctggagtagatactgatcatgatggaagaattaactaccaggagtttgtcgccatgatgaggaacaacaaccctgagattgctcccaaccggcggcgcatgttctaacttcctttacaattgttgaaagaatactgtttgtctttcctcattatattccaagaaccccttaagaggcttgatcatctgagatccatacacctgttgccagggcttggacccatttgtactcaaatggagttgcgcgatatatcatttgtagatgcctggaccatcatggatttctgagtgctgctttgttattcgttgcctcatcattcaatttggagtgtaacctcaacgggatgatcagttcaaatgctcttccgagcgtgttgcgacttgtgactatatgccacttgatcgtttgtattagatcaggtgttgtaaaacagattttagtgataagatcaggaaaggttatattattctggagaaacagtttaatcttgcttctg

SEQ ID NO: 391535 - DNA, 516 bp, Oryza sativa
ttctcgtttcgatctccattgaaatcaaggcaccttaataatttctagtaccatattaagctaagaacagtagtgtacatggcttctcgtagaagtgcagcagctagtccggccatggcagcagcagctgcggtagtagctgtatctgtatacttgctggtgtgcagtgctccggcggcggcgacggcggcggcggtggcgaagaagccgtcgtacccgccggtggcgaaggggctatcgttcgaccactacaagaagagttgcccgcaggcggaggccatcgtgttcagcttcctgcgcgacgccatcggcaaggacgtcggcctcgccgcggcgctgatccggctccacttccacgactgcttcgtccagggctgcgacgcctccatcctcctcaccaagacgcccggcgggcccgacggcgagcagcaggcgatacccaacgagtcgctgcggccggcggcgttcaaggccgtcaacgacatccgcgccctgctcgacagggcgtgcggccgc

SEQ ID NO: 391536 - DNA, 689 bp, Oryza sativa
  unsure (1)..(689): unsure at all n locations
cagatgttgctcgaaagcccttggcagcttctggtggaatntcgagagngcaacagactggatttttngccnccctgaggcttttagctcagtacctactgattcttcaacaagcaatatggaagatgatgatgcacacataccagatggaagtggcagatacaaattgatngcgtttgtgagccatatgggcacctctacccattgtgggcctacgttncccatgtcctcaaagacgggaggtgggtaatattcaatgatagtaaggttgctgcctctgtcgacttgcccaaggatatgggatncctgtatttctttcaaaggatataaagcattagcagctgaaagacttcacaggcaagaaatacattcgctcgctgacttgagtcttagttatgggcacctatgatcaaaagcacggcggatagtcggtgaacttgcatgcagatggacttagagcgagtgttggtcacatcctgtcgtgctgactttagactgatcgatcagctgggatatcactttgttccatggcattatgcattggcacattcaattcttctttgtcgatctatcatcttagcgttaacattctgccatgaaaactttggactggctcaactttttacatatgaaatggaaaacaaaaggcaagggacggtccctgatgccgcataaaaaaaaaaaaaaaa

SEQ ID NO: 391537 - DNA, 437 bp, Oryza sativa
  unsure (1)..(437): unsure at all n locations
cggacgngtcatgtngctactgtagctttccaatctctccccctccggcccctcttccccttcgattccggcggcttgccgcacggcgagggttggaggaggggtccggccacctccccctagtagtattgtgtcaggtttgtcctgtagttagggtctgtcctgtgtctcttttgccggtgaggttctatggttgccggagttattgatggcgttggcgttggtcgatggcgagctgtggatgtttcctggcagcggcgtggtctcgtcgtcgtcggtgttggtgtcttgcagctagtggaagtggaggatatgctggatttgaagcttgaggtgatggggcggtgtctggtctngccgccgccgtggtcaattgctgctgcgaatggaaggtgctgttggtgctctacgagaaggttaattgcttgtgggtctct

SEQ ID NO: 391538 - DNA, 521 bp, Oryza sativa
  unsure (1)..(521): unsure at all n locations
gcacgttccgcccacgcgtccgcccacgcntccgcccacgcgaccagcagacgccaccaccgcgattcgaatcgccgccgtctcaaactcaaaactcacagatcgatcagatcatgggggacgtggtcaaggacctggtggcgggcaccgtcgggggagcggccaacctcatcgtcggccaccccttcgacaccatcaaggtcaagctccagagccagcccacccctgcccccggccaattccccaagtacgccggcgccgtcgacgccgtcaagcagaccatcgccaccgagggccccaggggcctctacaaggggatgggtgcgccgctcgccaccgtcgccgccttcaacggcctcctcttcaccgtcagggccagatggaggccctgctgcggtccgagcccggccagcctctcacggtcaaccagcaggtcgtcgccggtgcgggtgctggtgttgccgtcttcttcctcgtttgccaattagttataagtaaaggtttaaggccaagtntttagc

SEQ ID NO: 391539 - DNA, 446 bp, Oryza sativa
acgcactccagtggccgccaccagctagtgttgtgtactcctatactaacatggtcgagagatgaatctgccgctgcgttcatgatcaactgcatgcatgcacgcatcgctcatcatcatcaaacgccaaagttaaattaaacagtgtggattggcatatatatatgtatgtagcctaggtagttgtagatccatggaatattacatagatccgtgtttttttgccatcttcattttgtttgttttgtggttttcacacggttccatgtgtgatcagttgaggctagctacggccatggattggtaaattgttaattagattttgggatcagatcttgcatagttgcatatacatatgcagggtttgttaatttctcttctacacaagagatattcagatagatggaagagagatctgcagggatatgaaattaccacttaattgc

SEQ ID NO: 391540 - DNA, 464 bp, Oryza sativa
cctgaagctgatcaagatcaaacagcagaaagacgtcgctaattgagaggaccgtccgcgtcgctccccgcgtgagagaccgggcgggcgtcaaccctagcgccgccgccgctttccctctccctcccccaccccgccgctgccggagcggccgggcctcggctcagtgtgcaaggacggcggcggcggggcagtttgccgtggaacggcgggcccggtcctgcgcggggaggtcggtcggcgttcggtggtggctgcggcgacccgacggcgagtcactctagcgacggcggcggggtgggacgacgaagagcagcagctccttggagacggcgggaggaagttgaaggccggagacggaggggacggccagatccggccgtctcctttctggatctggaggtcgtcggggtgggggtgacggccccgcgtggtgaaatcgtgcccgcgccagggcttgaaga

SEQ ID NO: 391541 - DNA, 758 bp, Oryza sativa
actcattgggtcactgtgtattaaaagcagagaacccagaaggttaaaaggaacttgcggtgtcactatttcagagcgtggttttgatgtccacaatgacccacaaaaactaagcttcctcgatatcaaggaatcgactggtcttgaggataaagaattgcgaagaacgctgcaatcacttgcatgcggtaaaggtcggcctctccaaaagatgccacaagggcgagacgtagaagataaggacgaatttgtatttaatgaagaatttagtgcccctctctatcgcataaaggcgaatgctattcagatgaaggagacggttgaagaaaacacatgcacaactgagacagtattccaggacagacagtatcaggcggatgctgccatagttcgaataatgaagacacgtaaaaccctcagccacacgcttctaataactgagctttttcagcagctcaagttcccaatcaagccatcggatatcaagaaaagaatagagagcctaatcgacagggagtacctggagagagacaggagtaacccccagatctacaattacctggcttgacagcgcttgccgtcataacatgaaagctcgtcgtcttcatttcattgtcagagacattgtaaagtagtaattgaatatgtctgcctcttgttggtccagcctttttctccttggaagctgtagcaatcgcaacatttctgtatacaagaaaaatgaattttcgataatatcagccatgcatcatccatac

SEQ ID NO: 391542 - DNA, 603 bp, Oryza sativa
tttcgcagcctcccttctcctctgctcgccccgccgccgccgccgtctccgcgccaccgccgcccccgagatggccccgaagaaggacaaggccccgccgccgtcgtcgaagccggccaagtccggcggtggcaagcagaagaagaagaagtggagcaagggaaagcaaaaggagaaggtgaacaactcggtgctgttcgaccaggccacctacgacaagctgctctccgaggtgcccaagtacaagcagatcaccccctccgttctctctgagagactcaggatcaacgggtccctggctcgtagggccatcaatgatttaatgacacggggcctaatccgcatggtctcggttcactcaagccagcagatctacaccagggcaaccaacacctaagtgtgagggtgacatgcatctttgtttgccctgaatgtgtacggggggcttgcctactctagaacagctgttacctttgtcgagtttgctaatgttatgttaaatgagctacttgtgatggtcagcatctctatatggctgaaacatttcatagattttggttattagtttagaaatgttgttgtttgccctaaaaaaaccaaaaa

SEQ ID NO: 391543 - DNA, 676 bp, Oryza sativa
  unsure (1)..(676): unsure at all n locations
cggacgtgncggagnacgctnngggtcaccacctgtttgccgccgccgccaccgccacttcgccggaaccctaaaccagcccggcctcctcccatggcgccgaagaaggacaaggccccgccgccgtcctcgaagccggccaagtccggcggaggcaagcagaagaagaagaagtggagcaaggggaagcagaaggagaaggtgaacaactcggtgctgttcgacaaggccacctacgacaagcttctctccgaggtgcccaagtacaagcagatcaccccctccgtcctctccgagaggctcaggatcaatgggtcgctcgctcgacaggccatcaaggatcttgagtcaagaggcgccatcagggtggtgtctgtacattcgagccagctaatctacaacagagccaccaacgcttgaggcataagctttcactaaaaaaaaagcttgggacataatcagtctagactcgcaaccaaaaaaatcgtattgtacgatctttgttgatcttgagatcctgaagaaaaaaaattgggagttctgattcccatgacaattgcaacatgaaattgcttatcttcactgaaattcaatgttcaacaagctggctattttattaaatggaatgcagtgattgttttatcttnnnnnnnnnnnnnnnnnnnnnnnnnnnnnn

SEQ ID NO: 391544 - DNA, 422 bp, Oryza sativa
gccatccttgccttcgcctgcgccttcttccgccgccgcatcgcgtcgtcgaaatggccccgaagaaggacaaggccccgccgccgtcgtccaagcccgccaagtccggcggtggcaagcagaagaagaagaagtggagcaagggaaagcaaaaggagaaggtgaacaactcggtgctgttcgaccaggccacctacgacaagctgctctccgaggtgcccaagtacaagcagatcaccccctccgtcctctccgagcgcctcaggattaatgggtccctggctaggagggctatgaaggatctgatggatagggggcttatcaggatggtgtcggttcattgcagccaacagatttacacctgggcaacgaacacatgatgttgtcttatccatttgttagtcttatagacctgatgttgt

SEQ ID NO: 391545 - DNA, 527 bp, Oryza sativa
tttttaaggaggaggcggcaatgcaagaaggacgggcgaaacagcttgaagaagaaataaaggagcttcgtactaggcacaaaaaggagctgcaagatgcagcagaacacagggagctgcttgagaaggaccttgaaagagaaaaggctgccagggcagagcttgagaaaacatcttcccgtgatgcaccaaaaattccgcttccagatcagacaagaaatgctcctctcagaaagctctctagttctggcagtatcaatagtctggaagaaagccatttccttcaagcatcattagatttgtcagacaacgcttcattagagaggagaatgtctgctgaaagtaatatgtcgtattatcttcggagcatgactccaagtgcttttgaatcagcactccgtcagaaagatggagagctagcttcttacacatcgcgtttggcctcattagaatctattcggaattctctggcagaggagttggtgaaaatgactgaacagtgtgagaagttgcgtaccgaggctttt

SEQ ID NO: 391546 - DNA, 203 bp, Oryza sativa
tggaatcatcataaaacacacagggtgatactctttcttttttttttgtactagtattaaaatcttcacaatataatgaactggagtagcacgggtcggcctgagtacagtgcttacgtttctgcatccaccgccacgtgtgttgtttatgccatcaggtaaaattcattcttgattttagctgtgtttgactcttgtgagcc

SEQ ID NO: 391547 - DNA, 1610 bp, Oryza sativa
  unsure (1)..(1610): unsure at all n locations
cggacgcgtggggtctccggccttcctccaccgcgagctccgaccaccaccgacggcgacgatgcaggcggcggcggcgtggaggcgtcacctcctcgacggcaacatctcccccaccaccgcggcggcgatctccgccttcagatccgcctcccagccggcgctcgcaccccaaggattgggtggagcggatggcgcgaggtacatgtccgcgagggcgccggcggtcaaggggacggggcatctcgtccgcaagggaaccggagggaggtcgtctgtgagtggaatcatagctacggtgtttggagctactggatttcttggccgctaccttgtccaacaacttgcaaagatggggtctcaagtgcttgtaccattcagagggtctgaggattgtcaccgacacctgaagttgatgggtgacctgggtcagattgttcctatgaaatacaatccaagagatgtggattcaattaaggctgtcatggccaaatccaatgtggtcattaacctaataggacgcgagtatgaaacaagaaactatggatttgacgaagtaaatcatcatatggctgaacaacttgcaatgatttcaaaggagcatgggggtatcatgagatttatccaggtttcttccctaggagcatcggcctcttctccttctagaatgctgagggccaaggctgctggggaggaatctgtgttgaaagaatttcctgaggctacaattatgaggcctgcaactatgattggcacagaagatcggattttgaatagatgggcacagtttgccaaaaattggggtttcctccctcttgttgattctgggtctacaaagattcagcctgtttatgttggggatggttgctgctgctattgtcaactccctcaaggatgacggcaccagcatgggaaagacctacgaacttggtggaccagagatttatactgttcatggagctggctgagctgatgtatgagccaattacgtgaatggccacggtacatcgatgttcctcttcctattgcaagggctatcgcatctccaagggaaatgctgctaaacaaagtgccctttcccgttgccaaccccatcaattttcaacaaagatcagattaatgcattttctgtagacaccctagtgtctgataatgctctcaccttttcggacctcggaatcgtgcctcacaaattgaagggttacccggttgagtttcttgtgtgctaccggaagggcggtccagcttttggttctactgtcagtgagaagatacgaagttctgagctgtagtcttccactcctgaagacactgtagaattaatcttttagttgcagaaacgttgttgtgtttgttttcttactatctgctgctgctgctgccagccgcccaacagcgagcaggaccatattcgatgcatatgttggttcctgctcatgtttttcaccaataagacgcacaaaatctttgtcaattttttgagttgcaaatgcaagtgaggcgaatcgttgcagtcctacgacacaataacaaagatatgtttctttctttaccctatacatatatgctcgctggtttgcattgcttgcnnnnnnnnnnnnnnnnnnnnn

SEQ ID NO: 391548 - DNA, 555 bp, Oryza sativa
cccgagcacgcaaacaactgttaatgtctgaactggatagagtgactcaggattacaagattcatcgagatgaaattcacaccaagctagtccagataatgagagagagattactagcaaatctgagaaaattaccgcaaattgtggaaagttggaatgggcctgaagatactgatttgcagccaagtcaatttgccaagtctgttacgaaggaagttagttacttgcatcgcatcctttctcaaacattgcttgaggcagatcgtgcaattgatattcaggccaagtagttcaaatattccattcacatatcacagaagcgcttttcggaagttagaactcagtagcccccctcaggccaaagaacacgattgtgccgtggatgtccaacatacttcttgtattgcacttcggaagttgcctgctgaggactcctctgcgcaagctattccgaattatggtcttcttgatgatttcttggctgaaaagtttgggaccaaaagtgatgaatgactgacctgtacattaggaactgactgtgtctgcaatgtcagt

SEQ ID NO: 391549 - DNA, 921 bp, Oryza sativa
gagctcgtgccgaattcggcacgaagtagcaacatcttccaacattgaaagatccctgtccagttcattagcaatggccaaagccgtcgccctactccttgcagccatcgcggcatcggccgtgttagtgcaagtggaatgcgacgcccccgtcgagaagagcttcaacaaggccctcctcgcccctgtcgataagcgcttggatgaggcagctcaggccatcaacgaggccgccgactccgttgtggctgctgccccaccagcaaaaaaggatgaagttgaagctgccacgtggaagcggagaatgttcgcctttgctgctctcgggatggcccaaggagatgagaagaaagttgctgcaacttcacttgcctacaagaaagcagctaaagctgtcctcgatgccgccccagctgacaagtttaagttgatggatgaatccttcaaagtggctgctatggaggtaatcgcatcatgagccacacgccaaccttcaataaaggtctactgctacaccgccgacattggtagacgaccggacacgtaccgagtatcaacggttatttatgtaataaatgtcgtgcaatcaattctactcattccattctctccatttgtaagagcaccaggtggaaaaaaaataatccggtgccatctaacatttctagttcaaaatgtcgatccttggcacttggcggaacttttttttttccatgaaatcctttgaatgattctttaaacaaaagtatggagtaaaaatgtcttatgtaagaaataacataatccggaccagcttgcgttcatcaacgcttcgatatatgcacacatataagactgttgttgggcgactgttatttgccgagattccatgtaaaataaccacagcccttgtgacgagacctttcggtttgccctatttaa

SEQ ID NO: 391550 - DNA, 938 bp, Oryza sativa
  unsure (1)..(938): unsure at all n locations
ctcgaggagaagattgaaaggtatgagaacgagaggaattcaatgtgtgtggatgaggatgcagataccaaagcaaagcaggagaaagagatcgcagctgcagcagagaaacttgcagaatgccaggagacgatattgattcttggtcgccaactacaatctatgcgtcctccagcagaatcaatgggttcctcgccaaaccagcgaatggaagatttcctgcaggacgcggctggaacaaccgaaggtgttgaatactcacagaagccaacaggtcaactggatacagatcaggaaatgcatgcatcaggaaatgaatccccagtgaatgggtacaagacacacaatgccccctctgaagcggacggaagccctttcctttcaccaaacggatccaagcgcccaaagcatagatcgagatcatcttcctcaatttctaaccaattgcccgagaaacaaaaccggggtttcagtcggttcttcgccaaggaaaagatctaaaaaaagctgcttgcaagatgctagcgttggcctgctgattctttactgtgaatgacgggatgatgcaagccacgagttttctgtagagctacttgtgtattcttcgaggtgacgccttcagttgctggaataattcttcttcgctcgaagtcgagcggttaaggccagatttatttgtgagaatgtttagccatccgtacctccgtcccgctagagtgttctgggttgccgtgtgtttgaaacctcactgagacctcactgtacatgtgcttacttgcatgaagataatcgttgttggtttgtgtgtcagtgtcacacacctcttgtgaattaacctgtgtagtttgctcaaaccaagcttgctgtacagttaacctggattaatccgaaggttatttgttgtgctnnnnnnnnnnnnnnnnnnnnnnnnnnnnnnn

SEQ ID NO: 391551 - DNA, 1082 bp, Oryza sativa
cctcccccaccccaccccgatcccctccccgccgtacgggcgcagaaggaacccgtcttctagaaggaggaggagggctacctctctctctctctcttctgccatggggagcttcgcgaggaaggagcaccagttcctcgccgagcttggcctcgcgccgcggaaccccgggtccttcgcctgcgggcctggggcggctcgggccccgtcgtcacgtccaccaacccgacgaacaaccaggtcatcgcggaggtcgtggaggcgtccgcgcgtgagtacgaggagggcatgcgcgcctgctacgattgccgccaagacctggatggcgattccagctccaaagcgaggtgaaattgttaggcaaattggtgatgcattgagagcaaagctccatcacctgggcaggcttgtgtcacttgagatggggaaaattcttcctgaagggattggagaggttcaggaaatcattgacatgtgtgattatgctgtgggcctaagtcgccagctaaatgggtccatcataccatctgaacgcccgaatcatatgatgatggaggtgtggaatcctcttggagttgttggtgttatcacagcattcaattttccttgtgctgtgctgggttggaatgcctgcatagctttggtatgtggaaactgtgttgtctggaaaggtgctccaactactccgttgatcactattgcaatgacggaaatagttgccagtgtattggagaggaacaacttgccaggctcaatttttacagcattctgtggtggtgctgacattggccaagcaatttctcttgacacaaggatacccttggtttcattcacaggaagcacaaaggttggtctaatggttcagcagcaagtgaatgcaagatttggcaaatgccttcttgaacttagtgggaacaatgccattattgtaatggatgatgcacacattcagctagctgtccgttcagtgttgtttgctgctgttggaacagcaggacaacgctgcactacatgtcgtaggctgcttcttcacgaaagcatataccgaacatttcttgatcaacttgttgaggtttataaac

SEQ ID NO: 391552 - DNA, 441 bp, Oryza sativa
  unsure (1)..(441): unsure at all n locations
cccacgcgtccgcgcgtttttcaggaaataagtgatctactacagtatgaagaggctattcaagtggcacaggtaatggatcaatctcttgataatagtaacatggaaatggtgacaagatgcattgagttatctgagaatcgactaagcacagcaccaaaagaagaaaatgcaactagggctgaacctcccccatcattcttctcacgtttttcagcttcctcggtctattcgaagatacttacgttaggtgtatctgtttatgaacgagaccgtaggtatactgatgcaataagagttctaaagagactactcagtactgttgcttcggatagaaagcgaggatattgggctttgagactatctgttgatttggagcacatgaatcggtccaatgagagcctggcaatttctgaagcagggggaatngatccctgggtc

SEQ ID NO: 391553 - DNA, 463 bp, Oryza sativa
gtccccccggcacccttatcaccaccaccaccgggaccatgctctccctctcggagcccccacccccaccccgactacaccacggcggcggcggcggcgcgccaccaccaccgccggaacgcccccttcgcgccgcaccaccgccgccgccgccgcttcgcgcacctgacgacctccgccgtcatcctgggccccgacgggcggcccatcggcggcgggccgcgcgacaacaagctccccttcacccctccccccaccgcgccgcccgaccagctctaccagccggtccatccgccgccgtcgccgctccccgacacgtacaaggacctcgacctcggccagcgcctcgctgggctccgggaccgcctcgggctttggcacgagtacgcgccgctcatctccccgctgtcgaggggcgggttcacgccgtcgtcgatcgaggaggccacggggatctccggcg

SEQ ID NO: 391554 - DNA, 658 bp, Oryza sativa
cggacgcgtgggcggacgcgtgggcgcaaacaaactagggtttttaggcgtcagctcgccgagggcaggaaggagagcgcgcgaggtcgaggagaagcgaactccgccgccatggcgtccaccaaggtgcagaggattatgacccagcccatcaacctcatcttccgcttcctccagagtaaagcgcgcatccagatctggctcttcgagcagaaggacctccggattgagggcagaatcatcggctttgacgaatacatgaatttggtcttggatgaagctgaggagatcaacataaagaaggacactagaaaatctctgggccggattctcttaaaaggagacaacattacattaatgatgaacacgggaaagtgataacagctcgccgtgccctccattgcaagaattactgataacctatctatcccaaccttctatgaagttagaatttgagcctgtagtagtctttttttgtttgttcatctaaatcgattgtaatatacagtatcagcgagagatgatgagttctgtgaaagccagtgtttaaccaggacatgagttctggttactatatcaggtctggttttgctctatagttgagcaaggtatcaatgttctgccgctgttctgtgactttaaaaaaaaaaaaaaaaaa

SEQ ID NO: 391555 - DNA, 490 bp, Oryza sativa
cccacgcgtccgcccacgcgtccggaagcttctagacgctcgtggggggagcatccgccgccgcagcagccatggcgtccaccaaggtccagcgtatcatgacccagcccatcaacctcatcttccggttcctccagagcaaagcgcgcatccagatctggctgttcgagcagaaggatctccggattgagggccggatcattggctttgatgagtacatgaatttggtccttgatgatgctgaggaaatcaacgttaagaaggatactaggaaatcattgggtaggatactattgaaaggcgataacataactctgatgatgaacactgggaagtgaattttctccccaaggttggcgtttgtgactttgtgtcgattagtcccgtgatactttgtactccatctagataatcagagaatgaaatgcatgtagcatgtcatcgtcatcgtcctcaattgaggatatgtaacggctgttagcaacctatg

SEQ ID NO: 391556 - DNA, 823 bp, Oryza sativa
ttcaaatacgttgcactcccaatcccaagtgatcaacaagaggattaaattttctaaattacaagcaaatcaaagctcatcgaagtatagctatggcattggcatcagacaagttcgtcctctccgccatcgtgctcgccgtcctcaccgtcgcggcagggcggcggggctacggcggctacggcgacgtcggcgagtactgccgcgtggggaaggcggtgtcccggaacccggtcccatcgtgccggaactacatcgcgcggtggtgcgccgtcgccgggggccgcctggactccggcaagcagccgccgcggcagctcctggagccgtgctgccgggagctcgccgcagtgccgatgcagtgccggtgcgacgcgttgaggttgctggtgcgtggcgtggtcacggaggagggcgaccgcgtcgccgggatgatctcgcagcacgcggcgcccgggtgcgacgccgcgacgatcgccgggatggcgagcgcgctgacggactacggccggtgcaacctgcagcacactggtttctttggctgccccatgtttgggggtggcatggattaacttccttagtaattaattaattaggcctttgcttaattaattatttaattagttatccgggttactggataattaattatcgatatttgctagtagcatctatcatgtttggatgctgctttctccgtgaatgtgatgataataataatcagaagaaataaataagaagagttggattcaaaaaaaaaaaaaaaaaaaactcgagggggggcccggtacccaattcgccctatagtgatcgtatacaattc

SEQ ID NO: 391557 - DNA, 704 bp, Oryza sativa
  unsure (1)..(704): unsure at all n locations
gcaaaaatcaacgctcacatattcatggcatcagcttcagacaagctcgtcctctcggccatcgtgctcgccgtcctcgccgccgtggtggcagcggcgtcgggctacggcgacgtcggcgagtactgccgcgtggggaaggcggtgtcccggaacccggtcccgtcgtgccggaactacatcgcgcggtggtgcgccgccgccgggggccgcatggactcccgcaagcagccgccgcgggagttcctggagccgtgctgccgggagctcgccgccgtgccgatgcagtgccggtgcgacgcgctgaggtgctggtgcgcggcgtggtcacggaggagggcgaccgcgtctccgggatgatcttccagcacgcggcaccggggtgcgacgccgcgacgatcgccgggatggcgagcgcgctgacggactacggccggtgcaacctgcagcacacggccggttcctttgcctgcctcatgtttggtggtggcatggattagattaattatttcattagtgattaattaattaattaggcctttgcttaattaattatcgatgtttgctagtactagctagcagtatcatgtttggatgctgcttctctatgtttgtgataatgataataaaaagaaataaaatgaggaacggatgttcctctttgttgttattcttggnnnnnnnnnnnnnnnnnnnnnnnnnnn

SEQ ID NO: 391558 - DNA, 464 bp, Oryza sativa
ctgccaagtaaacctactcaccaataatccatcctcgaatcctcgatttatcatggagataaactcggcagccaccctcaccctcgtctctctcctcaccctccccattcttctggcgttgctgacccgcaagtcgtcgtcaaagaagaggaggcctccagggccatggaacctccccttggtcggcggcctcctccacctcctccggtcgcatccgcaggtcgcgctccgcgagctcgccagcaagtacggcccggtgatgttcctccggatggggcagatcgacacggtcgtcgtctcatcgccggcggcggcgcaggaggtgctccgcgacaaggacgtcatgttcgcgtcgcggccgagcctcctcgtctcggagatcttctgctacgacaacctcgacgtcggcttcgcgccctacggcgcctactggcggatgctgcgcaagctctgcacggtggagc

SEQ ID NO: 391559 - DNA, 854 bp, Oryza sativa
attaagctttgcaggagtagtgtggagtagagagaagaggctctcttcttgctcctccttctcttccttcttctgctctggaccaccgggttaataggagcccccccatccctcttggttttctgcaaacacgcaaaactctaataatcctgtctatgtttctctctctccatagcacttactctttgtgtgagtgtgtgaaggagagatattatattggaggccattaacttatcttcagcaagaagatctgtgaggaggcctctcttgtgcttgtgttggtggggggagccgcacttgaggtggtcagggatgagtaaggaggaagtcctgaagattcagacttgtgtgctgaaagtgaacatccactgtgatgggtgccagaagaaggtcaagaagatcctccacaagattgaaggtgtgtaccagactagcattgacgctgagcaggggaaggtgacggtgtctggcctggtggatccggccaccattatcaagaagctcaacaaggccggcaagccggcggagctatggggttccaaggtcggggtggcggcggtgaacaaccagtttcagaagctccaccttgacggcggcggcggcggcaagggccagcccaaggatggcggcggcaaggggcatcccaaggacgccggcggcaagggccagaagggcggcggcggcggcggcggtggtggcaacggtggaggcggcagcaaagacgtgaagatgatgatgccgccgcagatgccgcagccgacgccgcagcagcttcagcagctgcagcagcagctgcagatgaaggggctgaagctcccgcagttcatggacccccccaagatggcgccgttcgc

SEQ ID NO: 391560 - DNA, 1836 bp, Oryza sativa
cggacgcgtgggcggcaccaaggtgacgagggaggtgctggaggccgggcgcgggcggctgcgcgtggtgggccgcgccggcgtcgggatcgacaacgtcgacctccaggccgccaccgaggccggctgcctcgtcgtcaacgcccccacctccaacaccgtcgccgccgccgagcacggcatcgcgctcctcgcctccatggcgcgcaacgtctcccaggccgacgccgccctcaaggccgggaaatggcaaagaaccaagtacgttggagtttctctggtcgggaagacacttgcggtcatgggctttggcaaggttggttcagaggtagccaggcgggcgaaagggctcggtatgcatgtgattgctcatgatccgtacgcccctgccgatagggctcgtgccattggagctgaactggtctctttcgatgaggccattggcagagccgacttcatctcccttcacatgcctctcaccccagcaacatccaaggtcttcaacgacgaatcctttgctaagatgaagaatggagttcggatcatcaatgtggccaggggtggagtgatcgacgaagatgctcttgtcagagcccttgactctggcaaagttgctcaggcagcccttgatgtcttcactgaggagcccccagccaaggacagcaagctagtcctccatgagaatgttactgttacaccccatcttggagcaagtacagtggaggcccaggagggcgtcgctatcgagatagccgaagctgtcgtcggtgcactgagaggtgagctcgcagcaacagccgtgaatgctcccatggtcccagctgaggtcatgtcagagcttgccccgtatgtttcactggcagagaagctgggcaagctggcggtgcagctcgtcgcaggcgagagcggcggcatcaagggcgtcaaggtggtgtacaccacggcccgtggcccggacgacctcgacacgaggctcctccgtgccatggtgaccaagggcattgtggagcccgtgtcgagcacgttcgtcaacctggtgaacgccgactacacggcgaagcagcgcggcctgcgcatcaccgaggagcgggtctcccacgagagccccgccgcggaggcgccgctggagtccatccaggtgaggctctcacacgtccagtccaagttcgccggcgccatcagcgacggcggcgacatcgtcctcgaggggagggtcaagtacggcgtgccgcacctcaccgtcgtcgggccctacgaggtggacgtcagcctggagggcaacctgatcctgtgccggcagatcgaccagcccggcatgatcggcaaggtcggcaacatcctcggccagacgaacgtcaacatcagcttcatgagcgtcggccggaccttccgcggcaagcaggccatcatggccatcggcgtcgacgaggagcccgacaaggagaccctcgagcacatcggccacatcccggcgatcgaggagttcgtcttcctcgagctatgatgaacagcagcagcagcagcagcagctcgtcggattcaagtaggttaagctaagctaagtagcagcacgtaatttgggccaagtggccacaggtggcaacttgggggcttctgcattttttcctgtcacgagtaagtatatatgtgatcatgtgaaggggtgccttcgcttggcccctgcttaaataagcagttaagcacggtgtatgtctatgtacgtatgtgtaactgcgtattattattgatgaatgcttgtgctgtatcagacatatattgtgctgcttgatgctatgaaaatagtcgctagttctaaaaaacaaaaaaaaaaaaaaa

SEQ ID NO: 391561 - DNA, 454 bp, Oryza sativa
agcaaaagcaaaagcccagaaagaaggaagggaaaccccacgcggaggcggagagcggagtggacggcgggatggactccacctacgccctccacctcgccgtcgccaccctcctcggcgcctccttcgccgccgcctccgcctactatatgcaccgcaagaccctcgaccagctcctccgcttcgcccgctcccttgaccgcgaccaccgccgccgcaaccgccacctcctcgacgccgacgacgacgatgacgacgaccctcccagagaccacgatcgccgcaccacccttcccatcccaccgggccttccggcacttcacaccggccgagaaggaaagccaattatctcaccagcttccaccaaaagaggtggacctttggttagacctactacaccaagatcccctgttcctactcgcagtgcatttgaaactattgaagattcagatga

SEQ ID NO: 391562 - DNA, 706 bp, Oryza sativa
cctcttctcatccctcaccacaacaagcatggtggcaaggagatacgtgtggatctatgcgacaattcagtttctgttcgtcgtcttcttcaccccatctcttctacagatatctccatttgcaagcggtgatatcaatcatcctggccacgtttgccgggttcggcgtagggatgaccggcaactccatcatcgtggagattatacggtggagggcggcgagggcggcggcggcgccgccggctcaaaacccgtcatcgtcgtcgtcgtcatggtcgcaggcaacaacagccaccacctgcacaaccagctgcttcttcagctgccgtcgccgacgttgagaacccacctgtataatactcatcgatcgttacctgaaaggaaggttggaggccttgcaaactgtataaatttatttcaaactaggaagttaagttaataagtaggcatggagttgatttttttgctcaggatcgatgcatggatgcatgtcaattttatactatattttttcaggtctttttattttttttggagcttgtgtgaaagaatcagtcttagtatagtatactagtataaaatgtgtcctggtgtacaaagtatgtcagacatgtatatctgcttgaaatcttgtattagtataaaactcttgagatgctctgctcttggcttggtgaaattgtaaaccatgcatcctccagacatt

SEQ ID NO: 391563 - DNA, 540 bp, Oryza sativa
  unsure (1)..(540): unsure at all n locations
cccacgcgtccgcccacgcgtccacagaaacctcacaaccctagttcggcgagagcggaaagctatcaagctaagcgagatacgaaggaaagcggttcttgcagcagaaatttcaaggctttgccgccaaatttggcccaagtttggctcaaaatccaccattgcaggcccctgcccctcgggaggctaaagcgagacgaaggccatgtcgcggcggtctgggtatcgcgcggcggagcaggaagaccgccagttgatctgatgggcgactccgacttcgacgacgacgagtacggacaacctatagagtccaaagaagatacgtcggcggtggatgtgaagaaagggaaggacatacaaggaattccatgggataatttgagcttctcaagggacaggtataggaagactaggatggtacagtacgcgaactttgagaatgtacccaactccgggaaaaattcagagaaggtatgcacacctgtagataaaggggcactctactatgagtttcagtacaacacaagatcggtgaacnac

SEQ ID NO: 391564 - DNA, 1035 bp, Oryza sativa
cccacgcgtccgcccacgcgtccgccaaaccttttagcttctcagccttttgcctctctttctactctctttcttggccgtctctcttatatccctcaatttaaccatcgagggcggccaaaaaaaagagagaaaggaagagcaaaataacacattacaccatggcgcgattcgtcatcatctccgtcgtcgtcgtcgccgccttcgccgctgccgctgtcgttgaggcccgggttggacctatcgacgtcgctccgaccaacctgatcaccaacccactcggtgccatcatcgacaatggccgcaagatcaccggcgccgtcgtcgacgagtgcgcctggacctgcgatcatgtcgcggcgggtaacaagaagatgtgcaacacgctgaggaagctgccgggggtgagctcgccgaaggagctcctgacggcggcggtgaagctgtcgatgaggaaggcgaaggcggcgagggcgaggttcgaggcggcggcgagggcggcggagaaggggacgccgatggagtccatcctggacacctgcaaggaagggtacgacagcacggtgtcggcgctgcaggaggtgcagcgctgcatcgacgccaacgacagcaaggcgagcctcatcaccaagatgtcggcggcgaccaccttcaccggcgactgcggcaacgcctaccaggagcgggagctggagcccagcctcgcgctcaaggccaccaagaacaacgtcaaccgcgtcgtcaccggcgccctcgccatcgccgccaagctcaagctataattagccaactgatcatcaatcgatatgaatgattgatcaactataaaattacacctagctcatgcatgcgtccgcgcgttatgtgtgtacgcacgcatgcatatgtgtaagatcgatcaacagatcacagaagtggtggcgtatctcgcacttgtgaaaaaaaaatataaaaaaaaggctggagaacaaaaatgtagtatgctatcttaatttttaaggtgattaatatatatggcgaattcaacgaaaaaca

SEQ ID NO: 391565 - DNA, 633 bp, Oryza sativa
  unsure (1)..(633): unsure at all n locations
caggagctagctggtggcattggcgtgacatctccagcaagtatagaacctggtaatgtgggggcacctccagtaattattgaacctgatgtaggcatggaggatgtggcacctccaaaaatcgtagaacctgatgaaggcatggaggatgcggcacctccaaaaattgtagaacctgatgaaggcatggaggatgcggcacctccaaaaattgtagaacccgatcaaggcatggaggaggtggcatctccaacaatcaaagaacctgatgaagacattgaggtgatgcctttaggaactgcagaacctggcaaaggcatggaggaggtggcacctggaggaatttcagaacctgagaaaggtatggagaatttggtgcctccaggaattgcagaacctgtcaaagatggcatggatgatgtggctgctccatctgcagggcctgctgccggccttggggatggtgtgccagaagttactgttgaactagctgatagcgcgnaggtgaaancttcagncatgggnngaattnggtgatggcatggaggttatgccancnncanttanagnanttggctgggaaggnggnttttctnnttgttctngttttntgngttnngggtcgtttcggat

SEQ ID NO: 391566 - DNA, 709 bp, Oryza sativa
  unsure (1)..(709): unsure at all n locations
gcaatccagaagggaaagcccggggcgacctctcctggaaaacctaaacagttcctcaaaaactacaaagcaagcttaagattccttgattttntggaaggttactgttcatctaagcctgctgtaacaaagttccgctccgagcctgcttatgccgatttcatgcgacagtggcatgttgctgtctacttcacattgaaatttcaggacattgctggtggtcttgattctgtgcttacagccacaattactcctgctggaatgcatgacaatcaagcgaagccgcagacactgttgttgaaacaaagcgttaagctcttagaaagtttgcaggcctgctggagtgacgatgttcttgttttctcccactctgataagttcctccgcttgtctttgcagcttatttcaaggtatacaacatggctttcttctggtttggctgcacggaaagcttctgatgggggctcaagttctcctgcggatgctgaatgggcactatctgtacctgtggaggatttcatttatgtaatgcatgatgtaaatgctgtaataagcgagcttttgggaatcaggccaatttgtggaacatgtaaaccaattgctagcatcatgcccaaccgaaggtacttgctctcgtgaaacacagtatactgcaagctgttgagcctttaaaaggagttgttgcctgctataatgaatgtcatgatnn

SEQ ID NO: 391567 - DNA, 620 bp, Oryza sativa
  unsure (1)..(620): unsure at all n locations
ggactacccgctgagtttaagcatataaataagcggaggagaagaaacacgagaccagttggctgatgcactataccaaaagggtcttgcattggcagagattgagtcgctaaagactgatgagtcaactgaggcatctgctaaagatgtttttgaagagaattacaaagaattaattaaatgggttgatgccaaaactacaaaatacggctctttaactgtcctgcgtgagaggcgctgtggaagacttggcactgcattgaaggttctgaatgacatgattcaagatgactctgagcaaccaaagaaaagactttatgatttgaagatccaattgattgaggagataggatgggtccatgtatcggcctacgagaagcagtggatgcatgtccgatttcccccatctttgcctccgttttaattgttaggactatttttcactcatttttcatcaccatggattcagtattttactatttttgtcattgttggtagcaaacttgctggtttggtagtttttcactaggtattttatttcttcaaatggtaataagaacttaagaaggctgcctgctactgctaagctcatcggtttgtgcnnnnnnnnnnnnnnnnnn

SEQ ID NO: 391568 - DNA, 898 bp, Oryza sativa
  unsure (1)..(898): unsure at all n locations
tcgttcacgcgtccgcccacgcgtccggagaggagggaggggggacaaggaggaggagcgcaccaccctctcggagaggtcgcctccgttcttgcatcgttttctttggatagggcagcgctttgacagctttggggagttagtcgagaagtgtgcacatggagtccaacagtggtgaaatcgaggagttgccacctcccccacctttgccaccaaatgctgagccaattaaaactgatgatacaaaaaagttatcaaaacctaagagggccttgatggctcgctctggttgtggcaaaaaagggcagccgatacagctgctgacgaaccacttcaaggtttcactgaaggcagcagacgaatttttccatcactactatgttaatctgaagtatgaggatgatagaccagtggatggaaagggcataggtagaaaggtgctggacaaactccagcagacctatgcgtctgagctggcaaataaagattttncatacgatggtgagaagagcctgttcaccattggtgctcttcctcaagtgaacaatgagttcacggtagttctggaagacttcaacactggaaagtcatctgcaaatggtggcagccctggcaatgacagtccaggaaatgacaggaaaagggttagaaggccatgtcagacaaaaacttttaaagttgagctgaactttgcagcaaaaattcctatgagcgccattgctcaggccttgagaggccaggaatctgaaaacacccaagaagcaattcgtgttattgatatcatattaagacagcattccgcaaaacagggttgccttttggttcgccaatcctttttccataacaatccttcaaattttgttgacttgggngctggtgcgatgggctgaaggggatt

SEQ ID NO: 391569 - DNA, 640 bp, Oryza sativa
  unsure (1)..(640): unsure at all n locations
gaacaaggaaaaacctatatatacacactcctccatttctggtcacgccgcaaggtttgctccaacaccaacagggaggtaggctgcagcttatcatggcggcaaggagggctgcttcctccctcctctctcgcggcctcatcgcgaggccttctgctgcctcctccactggcgactccgctatccttggagcaggctcagcacggggcttcttgcctggatcacttcacagattcagcgctgcaccggccgccgctgccaccgccgcagccactgaggagccgatccagccgccggtggacgtgaagtacaccaagctcctcatcaatggcaacttcgtcgatgcagcatctgggaagacgttcgcgacggtggatccccgcaccggcgatgtcattgcccgcgtggccgagggcgacgcggaggacgtcaaccgcggccgtcgccgccgcccgccgggccttcgacgagggccccttgccgcgggatgtaccccttacccatcggttccgggtgttcttgcggtttcccgggaccttcatccagctncacgccgaatgatatctccgcgctngaaaacttnggnactgcgggaaaacgccttgatcttataactgggnaccgaagttgcctatggtgg

SEQ ID NO: 391570 - DNA, 463 bp, Oryza sativa
  unsure (1)..(463): unsure at all n locations
ggacgggncagagtacgcgtggggaaatcttcttcttctcccatcaaaatcttaccggtcccctttttctcctcctctccccttccaccgaaaccctagggatggcgtcgccggcgtctcggtgcgtcctgctggatccaggtgtgcccgactacgtgttctccatcggtccaacagaacaagggtgggcgtctatcgacttgaagaagaagaggtaccaagggtgcgggaggtacggccccttgttggcggagagcgtgaagctctatgtgcgcctcgccgaggagcacccggctctctctcggttggccatctgcgccgacaagaatatcatccgcaacatcgtggcggaagaactcaagaagaagaaagcttccaaggccgccgaatcttcatcccccggcctcatggtgccggatctggcgattcgcgcccatcgagttcgacaagatcgatgagatct

SEQ ID NO: 391571 - DNA, 351 bp, Oryza sativa
gttcgacgacgacttccccacggccagagttcccctctttccccctcccgttcctccgagctcatcccccggctccggcgacgcggcggggcgatgcgtagctgctgagcgcgcggcgccacgaccccccccacctcgagagcgcggccatggacgagggctacgccaacctccccaccagccacctcctcggctccgtccccgccgccttgacccccgaagagaggaagccctcacccgtcgccgaagttggcacctcgcgtctgcagcagtttcctcctgctcttggtggtactgggggtgttggtggaaggaggaggagggtacccagcctccagggaccccctgcag

SEQ ID NO: 391572 - DNA, 570 bp, Oryza sativa
cacaaactccaaacccattactctcctcacgacattctcgcgctctcccctcctgtaaagatcggtggttgcgagcggcgtcacggtaaagcggagcaaattactcctatatattaccctgcagcgtagaccgatcgatcgggcggcggcggcggcgtatggctgggagcgcgaggtcggcggcagcgaagcacgcctaccggatgttcgcgccgtccaggggcgcagcggcgaggtgccccggaagccccggggcggacgagttcgacgagtcggacgtgtggggctcgtacggcgcggccggcgtggagtccagccccgccgagctaggcgcccggggccgcgcgatcccgtccgcccgcgccggccggaaggccccgctggatcgggccgccggctcgctgccggtgaacataccggactggcagaagattcttggggtcgagtacagggatcaccaggccgctgctgcggagtgggagctccagggcgacggcgacgacgactacgagtacggcaaggtggccggcgtcggcggcgtggtgataccgccgcacgagctggcgtggc

SEQ ID NO: 391573 - DNA, 467 bp, Oryza sativa
cccacgcgtccgcccacgcgtccgcccacgcgtccgcccacgcgtccgggttgctctcacgtcactatgcgagctctcctctcccgcatccacccgcccggccccggatcgatctccaccacttccttcctccagtgcccctcctccaccgccgcatccgcctccaaaaccctagccccgaccctcaccttccgccgcttcgccgccatggccgccgccgccgcggaggagttcgtgaagggccgcgtcacccccaacggcgtcgccgtcatcaccctcgaccgccccaaggccctcaacgccatgaacctcgaaatggaccttcgatacaaggcatttcttgatgaatgggaaacaaatccaagtgtcaagtgtgttcttggggaaagcagttcaccccgtgccttctcagctgggatggatattaagggtgttgcagcagaaattcaaaaggacaagagcacacc

SEQ ID NO: 391574 - DNA, 458 bp, Oryza sativa
cggacgcgtgggctcatcttttccccacttgcttgcttcctgaaattttccttttccctctctccttcctgcgtcgccgccggtcacctgagtcgcctcggtgtacttcccttccagcttattgtggggaaaccttgaagggctccctggggtcagatccgtttgctcatggatcggaggtgtgcggcactggggatattgatgtgcgacgaaccgtcgtcggtatcggaggaccttcggcacagcaagggtcctttgacgaagcatctcgtttgctgtccatgattggagcagtgcctcatgggttcagtgtgaagctggcagtcttccgttggggatatcattaggattgattcatttgtctcttttattgaaggaaaagtgtactgctctttgacgcactccatcaaaaatattttacatcaagaagtttatcttctcaaaaaaaaaaaaaaaaa

SEQ ID NO: 391575 - DNA, 516 bp, Oryza sativa
  unsure (1)..(516): unsure at all n locations
atcccaattcccaacctcacatccccacctctcctcgactcgacgactcgagtttgagagcgagtttaaacccaaaccctagctcaaaaccctagttcgcggcggcggcggcggcgatggacggcggcgggggaggaggaggaggcgggggcgtcatggcggggcccggtgtcgcgggagggggaggaggaggagggggaggcggcgttgggggcgacgtggagctcgtcagcaagacgctgcagttcgagcacaagctgttctacttcgatctgaaggagaacccgagggggaggtacctgaagatctccgagaagacgtcctccacgcgctccaccatcatcgtccccgtcgccggcgtcgcctggttcctcgacctcttcgactactacatccgcaccgacgagcgcgacgccttcagcaaggagcttcgccttgacaccaaggtgttctacttcgatatttgggagacaagaaagccgtttctcaaggtttaaaggcatntttaacagaaac

SEQ ID NO: 391576 - DNA, 1029 bp, Oryza sativa
  unsure (1)..(1029): unsure at all n locations
cccacgcgtccgctctcccttcttggttcttcttctcatctcctcccactccagctctgcccctgagccaagaactgagcagcagagagctcgtggtctctttgccagcttctcctcagtcctcaccaagctgttcttgcagagaaaacatagccaaagagctaatttgagctcccaccatgaagtacgtgctggtgacaggaggggtggtgagcggcctcggcaagggcgtgaccgcgagcagcatcggcgtcgtgctcaaggcctgcgggctccgcgtcaccaccatcaagattgacccatacctcaacactgatgctggaaccatgtctccgttcgagcatggtgaggtcttcgttttggacgatggtggagaggtggacttggaccttggaaattacgaacgttttctggacatcaaattgacccgtgataacaacataaccacgggaaaaatatatcagtcagtcattaacaaagaaaggagaggagactacttgggggaaaaccattcaggttgtgccacatattacagatgaaattcaagattggattgaacgtgtagcgatgaatccggtcgatggtaaagaaggacctcctgatgtttgtgtcatagaacttggtggcaccataggggatattgaatcaatgccctttactgaagcattaggtcaattttcctaccgtgttggacctggaaacttctgtctggtccatgtcagtcttgttccagttttaaatgtagttggtgaacagaaaactaaacctacccagcatagtgttcgtgggctaagaggccttggattggcacctgacattttagcatgtcgcagtaccgagccactggaagaaaacgtgaaagcaaagctctcacaattttgtcacgttccagtctcaagtattattaatctccatgacgttacaaacatttggcacatncncttgttgctaagggaccaaagggcccatgaagctattctgaaagttctagacctttcaattgtcggtaaagtaccacgagaacccaag

SEQ ID NO: 391577 - DNA, 610 bp, Oryza sativa
gaaggagcggcggagatccccaaccacaactactctccctcccgccgccgccaccgtagtctaccctactcccgcaccgcagccatggtgtccgacgccagcaagaagaaggcggctcagaagaaggccgccgccgccgccaagaggggcgccaaggcctcctcctcctcctcctcttcctcctccgccgccgataaagcggccaacggtatcgccgcgcttaagctttccgatcgcacctgcaccggagtcctcgcctcccatccgctctcccgcgatatccacatagagtccctctcattaacatttcatggccatgaccttattgttgattctgagttggagctcaactatgggaggcgttacggtttgctcggcctaaatggctgtggcaaatctactctgctcacagccataggctgcagggaactccctatccctgaacacatggatatttaccatctctccagtgagattgaggcttcagatatgtctgcgctacaggctgttatctgttgtgacgaagagaggatgaagttggaaaaggaagctgaaattttgtctgctcaggatgatggtggcggtgatgctttggatcgtatatatgagc

SEQ ID NO: 391578 - DNA, 834 bp, Oryza sativa
caatcatgtacaatgatctctctgtgatatatctctggagctgatgtttgatgtgctctattgtctttatcaaggtgagcagcttacttttaagaatgttgtaggactgaactgatagtttcttttacaagcagaacttatcagcaatttttgtcaagggggagttacatggatgctattaacgttttctgttttattgtgattaacaaagctactatagattaacagtgacaaaatcagtttgtgggaacagtctgtgcaatgcttccgcggttttggttcacttacgatttttatgtggcgctgtaacagaattgtcttgaattgttgttaaaatggatttgaggagctctgtcctctctttccaggcagaagatgagtttaaagttacaacacctatcccataaaggaatcaccgaggtgatcaaaatctttcttgtttgttactcttggaagattggaagaatcatcatcagattgggctgtgaagatcttcgatttaaataatggtgcaaaagtttactcaagaataaaggctgagatgctcttcaagtgataacaataattgttttggacttggaagacaatgtgacagctgcttgctatgcataaaacagagtgtcttattcaatataattggacgaaattaccctctctgaagttattggaagcgacgttgacttgtgacagcttcagatccttacaaatggacagcaatcatggatttctgttgagtcatgtggaatattatcttcattttgccaagtgcgtaagcaaaatgaatggttatcagttgcagttcattctagtatccatatgaccacagtttgatgc

SEQ ID NO: 391579 - DNA, 832 bp, Oryza sativa
  unsure (1)..(832): unsure at all n locations
ttgaagtcccagatatcccgatggatggacacntgttgacaaaagtttcggaaancgccttgccaagcatgctgggnttcaattccagttccaccccgcaatggcttcagagttcccgccgagcacaggaaaatctgttgtcccactttagtgctgtcaacccgagtagctctatcccgtgtcactgcaggcattatccaactcggtggtatcacttttactggtagcaccgagcacctgcagaagaatggagatttcaatttgctcctctctttcactgtcgagggcgacgtctcaaccaaatccattggttttgaaccggatacgcagatgagcaccacgccaatggtgttgcgcagcggcatgtatcttttcttcgtatcggcgatgattctcatgttgagctacaaagttgggctgtgtatctacagcaggtaagttatagtagtttttgttgccccaggctgtttattaaattgaaggagtcatacagagtccactcgacgtagagggaactgcctgcgatttggacagtttggttctttacattgttatagttggtataccgttctgacagttgaaagatacatagcaataaactctggaattggagaaactagagttacacgaatttggtgctgaaacttttgttggtggcatgtactgtataatttactctatttatttatttcacccaattctgggaggctgtaagcgttccccgatcgatgtaagctgatctgaaacctgaatacgcgctcttcatttttcatacccaaagggccgagaggcacagtttgcagttactgttgatcaaaaaaaaaaaaaaaaa

SEQ ID NO: 391580 - DNA, 405 bp, Oryza sativa
agttcctagtgatcagggacctgctggtgcaggtccttggagggaagtctcagaatcaggaacacttctgaattggtcacaccggtatgaaagagaagttccatctagatctggtcaagttaaatcaggaaaatctcgtaaatggggtcttggaaaagctaaagatttgcagacagagtggtcaaaaaacagatttcctttatatgctgctgcttttatgctccctgttatgcaaggatatgataaaagatcacatggtgttgacttgctcaatcgggactttgttgtcctaggtaaattgatatacatgcttggtgtctgtatgaagtgcatggcaatgcatccagaagcatcagctgttgccccagctcttcttgatatgatcagatctagggctgtttcgca

SEQ ID NO: 391581 - DNA, 715 bp, Oryza sativa
  unsure (1)..(715): unsure at all n locations
ancttataaggaaaagnggttcacgngggcgcgtttagatatgatcccgggngnaggattngcangagtgggcggattggcaaggttggcncatgtcgcgtggcggtntnggggggtcngcacgnnaccggcncngtctnantcggacaaccaagcgggtcgntngtcccgcagccngantangtgtggcgcatcatcttcatgttcggcaccgtcccggcggcgctcacctactactggcggatgaagatgcccgagacggcgcggtacacggcgctcatcgcccgcaacgcgaagcaggcggcggccgacatgtccaaggtgctgcacacccagattgaggagagcgcggaccgcgccgagaccctggccgtcgccggcgagacctggggcctcttctcgcgccagttcctgcgccgccacggcctccacctcctcgccaccaccagcacgtggttcctcctcgacatcgccttctacagccagaacctgttccagaaggacatcttcagcaaggtcgggtggatcccgccggcgaagaccatgaacgcgctcgaggaactctaccgcatctcccgcgcccaggcactcatcgcactctgcggaaccatcccgggctactggttcaccgtcgccttcatcgacatcgtcggcaggttctggatccagatcatgggctttctttcatgatgaccgtgttcatgctcgcgctcgg

SEQ ID NO: 391582 - DNA, 494 bp, Oryza sativa
  unsure (1)..(494): unsure at all n locations
ccacgcgtccgcccacgcgtccgcccacgcgtccggctttctctttccctcgaaaaccaaaaccaaaaccaaatcgcgggaaagcgggcgcggcggagatcgccgccggtcgccggagatgtcgtcggtggtcaacaagctcactaacgccgccgagagggagtcgtcggaggcggaaacccttatcgcggagattcgcaaggcgatcggcgaaatgaagtccatcgccgtcgattacgagagggagaacaagtccgacaaggtgaagcagcttgaggcggcggcgctggaactggtttgcttcgtgcgaagatttgcacgtgctacgccgacgcgatccggaaggtgcctggggcgtaccagccatctaatcagatgacggatttcgaaaagctgatcgaggctgaggtttacaaggtcaaggggaactcatcaacatcagtagaggaccatctgctcattcggaattcagagaggcagtttngatttttcac

SEQ ID NO: 391583 - DNA, 456 bp, Oryza sativa
ttttggtataagtttcatgaaggatgtttatgttctttatccatttggggaatctgatgggtcttattggctcatgaaaatatcgaatgggtgaagttttggtgatgacctggatgccctaactttgcaagaaaggattcatctttcatttatttagatgtatctgcatccatcatacatgctccaagtgaatgcattttttttacatcatgccaatcgcatgttgcatttgccacaagacataaatcgtcgtggacagcagaatccaatgttcatgggctttatggagtagcttttcttgtcttcaactaaacaatcctgattgattgatgattggactggatcctcataagggaagtagcggtgctataggaatggtatgtgtttgatgcctataaaatctatccacagaatatttgggttctcctttttgttagttacacattggaatgacct

SEQ ID NO: 391584 - DNA, 520 bp, Oryza sativa
cccacgcgtccggcgaagcaaatccatcatccaccaaatcaaaggcacgtaagtgagcaccaacagctgcatcggccatggctcgcgcgctcgttctcgtcgtgatcctcctcgccgccatcgcggtggcgccgttcgcagaagcctcgacagtgagtgccgcctccagggtattgttggcctccgaagcgcccgctgagagcccggctgggcctgcgccggccccaggcccaacggaagagtccagcagcacatctgccgagtctccaagtgctgatgcctgaatgagtaagagtgaagctcaagtgaatgattcctaatacctggaatattgaccaaacatatatatgccagacatcctttgttaaggctaacatagcctcattttttttattttttttttggttatcactaccctctacctatgttgttgattgatcatgttaatcatgcaacattatgattaatataaggtggatgaagatcttcgttttccgttgttcaaagggtatgttaaaaa

SEQ ID NO: 391585 - DNA, 820 bp, Oryza sativa
ctcttttctcctcttcctcctccccccacccgccttgtcgccgatccgatccgcctccgcctccgcctcgcggcccggcctgcctgcctcgccgccggtggtcccgatccgaggttgctcttgctgggcatcaaacatgggtctggtgaaggatggcgccgccgatttggaggaggggaccctggagatcggcatggagtacaggactgtttctggtgtggcaggacctctggttatcttggataaagtaaagggcccaaagtaccaggaaattgtaaacatccgattgggagatggcaccactcgccgtggccaagttctggaagttgacggtgaaaaggctgttgtgcaggtctttgaaggcacttcaggaatagacaacaaatataccactgtgcagttcacaggagaggtcctgaaaactcctgtctcacttgatatgcttgggcgcatttttaatggatctggaaaacccattgataatggcccacctattttgccagaggcctacttggatatctctggaagttcaattaatcccagtgaaagaacctatccagaagagatgatccaaacagggatatcaaccattgatgtcatgaactccattgctcgaggccaaaagattcccctcttttctgctgctggtcttcctcataatgaaattgctgcccaaatttgtcgtcaggctggccttgtgaaaagcttggagaaaggcaagcatgcagagggtgggtgaagatgacaactttgctatcgtgtttgctgcttgggagtgaatatggaaacagcccaattcttcaaacgggattttgaagag

SEQ ID NO: 391586 - DNA, 1017 bp, Oryza sativa
  unsure (1)..(1017): unsure at all n locations
tgattttgtagtaagcaacagagtaaattaagaaagctgtgactgcaatagtggatggctcgaccggcagctcgccgcggcgcaaggcgcagcgcngcccgcggcctgcctgctcctngccgccgccgccgccgtggcgtggtggtggtggcggcggcggcggcggcgggtgaggaggagcgccaccagcagcagcagcagcagccgggagggacgttcgagttcaacctgcctggccatggcaacgtcaaggcctcgtggagcgtggccgacgacgaggagagccggtggctcgaccgcttggccgccgacgccgagtcgtcgtcgtcctcagcctcggcggcgggcggcggcggcggccaccgtatccccttcggcgacgacagcgtcaagttcggcagcgacgcgtacgagttcatcgccgacctgctcaggcaaggcaccgacgacggcgagggtgagaagccgacgggttactgggagaaggttgacgaggaggggagccggatgctggaccgcatcgccgcgaacgcgagacaccgggcagaggccaacggcgacgacgacacattggtggctttgttcacaacgtcttctctggcaagtccaagcagcacggcgaggagccgtctcatgtcgagagtgacaaggagttcagtaacagtaagctccctcctcatgacgacatgtaggagaatggtactgcaacaagtacttggggtgtgttgatccgtggtgtcaactgtcaactgctcagcaggaagttggaaggaagcctatctactaaagcaagaaggttaacttgcataagcctgaaggtttaggaggatcatgctgtcaagctgaataattgtagcagtctagttcatgtcttagcttcctctaattatcacaatctggaacgagtgaaacttgcacaatcatatcactgtgatatttcaatttgcttnntactaaattgatgtgggtttttattcnnnnnnnnnnnnnnnnnnnnnnnnnnnnnnnnnnnnnnnn

SEQ ID NO: 391587 - DNA, 364 bp, Oryza sativa
  unsure (1)..(364): unsure at all n locations
ttttctctctctctctccatccgcgacaactcgtgcgggatatttatgagcgctggtggagtggcgtggcgaggtgaggaggtggctgatctctctcatcaatctcctccgtcgcggtcgcagctgcgggagtgaagccgccccgcggagctagctaaaccctagccactgcccgggcggagagttggggtttgggttggtggcggtgggccggtggcggcttgttggcggtgctccggtgtggggtggtgtggaatgatgnggaagctattcgatgatttcccaggattttgactaggccacaaatggttacaagttgcattcatggtccaaactgtgtttgaacatacagattctttgcagt

SEQ ID NO: 391588 - DNA, 422 bp, Oryza sativa
aaaacatcgatccaaaagcacttctcggacagcaaatcgtctcgaccctgctattagtattcaggcgccatggcagctggcagctcccatgtttctgctgatgcaaggaagctggtgggcaaggtggcggtgatcaccggcggcgcgagcggcatcggcgcgtgcacggcgcggctgttcgtgaagcacggcgcccgcatcgtggtcgccgacatccaggacgagctgggagctagcctcgtcgccgagctcggcccggacgcctccagctacgtgcactgcgacgtcacgaacgagggcgacgtcgccgccgcggtcgaccacgccgtcgccacgttcgggaagctcgacgtcaggttcaacaacgccggcgtaaccggcccgccgtgcttcaggatcagcgagttcaccaaggaggactt

SEQ ID NO: 391589 - DNA, 457 bp, Oryza sativa
  unsure (1)..(457): unsure at all n locations
tttttnntttttttttaggacacaatccaatacaagttcacatcataagcatagtacaggtcattgagacttgagagagcatggcagggaacaaaaagcgtggtggcaggaacatggatcaggtcaagaaggcggcagtgagatcggatggggtgggaggtagtgcgaccaaccccgagctgccgatggccaacctcgtacgcctgataaagaaggtgctcccagggaaagcgaagatcgggggagcagccaagggtctcacccatgattgcgcggtggagttcgtcgggttcgtcggcgacgagcgcctccgagaaggccaaggcagagcaccgccgcaccgtagcgccggaagactacttgggctcattcggcgaccttggcttcgatcgctacgtcgaccccatggatgcctacatccatggttaccgtgagtttgagagggctggtgggaata

SEQ ID NO: 391590 - DNA, 420 bp, Oryza sativa
gtccatgagaccatgacccattctaccgattcattttcttcttttgagtgaatttgttcccaaatcccaacccaccccacctccaaatctccaatcccctcgctccctaaatcacgctcgtcaaccgcgtcggcctctccaaccgccgcggcctcggccgccgtcgccgtcgccgtcgtcccgtagctaagtggtgatttggagcagctcggcggaggggcagattcccgggcatggcgacggcggcgaaggcgttctggaacagccccgtcggccccaggaccacccacttctggggtcccgtcgctaactggggcttcgtcctcgcgggcttagttgacatgaacaagcctcctgaaatgatatcccggcaatatgacagcagccatgtgtgtgtattctggactctttatgaggttt

SEQ ID NO: 391591 - DNA, 571 bp, Oryza sativa
tctcacctgcgtttgtcgccggcggcgaggaagaagaagaagagagagagagaagatggtggggatgttgccggagacgaatgcgcaggcggcggcggaggaggtgctgggcgacgcgtgggactaccgggggcggccggcggcgaggtcgcggacggggaggtggggcgcggcggcgatgatactggtggcggagctgaacgagcggctgacgacgctggggatcgccgtgaacctggtcacctacctgacggcgacgatgcacgccggcaacgccgaggccgccaacgtcgtcaccaacttcatgggcacctccttcatgctctgcctcctcggcggcttcgtcgccgactccttcctcggccgctacctcaccatcgccatcttcaccgccgtccaagcctcgggggtgacgatcctgacgatctcgacggcggcgcccgggctgaggccggcggcgtgcgcggcggggtcggcggcgtgcgagcgcgcgaccgggtcgcaaatggggtagctgtacctggcgctctacctgacggcgctgggcaccggcgggctcaagtcgagcgtc

SEQ ID NO: 391592 - DNA, 902 bp, Oryza sativa
  unsure (1)..(902): unsure at all n locations
cacggatcctcctccgccattaagccgagggcgctcgtcgtagtcatgcacgggttgaacgagcacagtgggagatacgatcatctagctaggaggttgaacgacatcggtgttaaggtttatgggatggactggactggtcatggtggaagtgatggtcttcatggttacgtgcaatctcttgaccatgctgtcagtgacttgaaaatgtatctcaagaaaattttagctgaaaaccctggtcttccatgcttctgttttggccactcaactggtggaggcatcattttgaaggctatgcttgatccagaggtagattcttgtgttgagggcatcttcctgacatcaccagctgttcgtgttcagcctgcccatccaatcataaaggtcatggcccctgtgtttgccctcatagccccaagataccaattcacggcttcacacaggaacgggccaccggtatcacgtgacccggaagccctgaaggctaaatattcagaccagcttgtgttcaccgggtccatccgagttagaacagggtacgagatcctacgcctgacgtcgtatttgcaacagcacttgcacagaatcactgtcccgatgctggggatgcatggtgccgatgatatggtgaccgatccccaaggatcacagaaactgtacgaagaagcttcatcctcggacaagtccctcaatctgtacaacggtctgcttcatgatctgctcatcgagcccgagaaggagaagatcatggacaacattgtggattggctgagcccgacgatttgacagctgatatccattcatangacgcagtctgatcgtccgcggaacgcgggggcaggatgancatcccgggctcccgatggtgatgacccgtctttgatctctgcaaacntccn

SEQ ID NO: 391593 - DNA, 750 bp, Oryza sativa
attctgtgtgtgtgtcttggttgcaaaaaccaagacatacacacagaatcaaataataacaaaggtttcctagcctcaaaggatacatatatatagtttccctacaatacaatggagcctgtcaatgatttccaggaaggcatttcaacagagcatgcctttgaggcagagcctgtgccatcattgtcggaaacaataacgccacgatcaatggtggtgagcttcatccttagtgtaactctcagcatcgtcgccatgaaggtcaccttgagctctggcttcattccgtcgttcagcatcccagccggcctcctcggtttttgtgtatcccgtgcgtcgatccgcattcttgactacttcgcagtggcacaactaccattcacacgccaagagaacaccatcatccagacctgtgtcgtcgcatgcacctcgatcacattcaccggtggctttgggacatatattcttgcaatgggaaagaaagcagctgtaggggatgtcaatgcccaaaataacgttgaggagccaagctttgccaggatgatcaccttcctcttccttatcaagctttgctggcatgttcatcatcatgcccttcaggaaggtcatgatcattaggcaccggttgacattccccagcggcacagcaacggcgcacctcatcaatagcttccatacacctcaaggtgtcaagcaagcaaggaagcaagtgacattattgtttaaatcgtttggaggaaccatcgcatg

SEQ ID NO: 391594 - DNA, 812 bp, Oryza sativa
gttatcccaaaccctaaaccctctccccatggccgccgccgactcgcccaagcgcttgagggtctactcgtccgtctcgggcgacggccgctccgcgaacggcgcggggagcggcaagcgcgtggggacccacaacggcagcttccactgcgacgaggcgctcgggtgctacctcatccgcctcacctcccagttcgccggcgccgacgtcgtccgcacccgcgacccccagatcctcgatactctggatgctgtgcttgatgttggtggtgtctatgatcccagccggcatcgctacgatcatcaccagaagggctttaatgaggtctttggacatggctttaacacacaacttagcagtgccgggcttgattacaagcactctggtaaggagataattgcaacggagcttgaagctagtgaagaccatgaagatgtgcatcggttgtatcttgcaatatataaaagctctgttgaggcgcttgatgcagtcgacaaccggatcaatcaatatgacacagaccaacccccaaagtatgtgaacaacacacacttgtcttcacgcgttgggcgtcttaatccagactggaccgatccagaccagtcacctgagaaggaaaatgctgcatttcaacaggcaatgatgcttgctggaagtgaatttatggagagtgttcgctttcatgttaagtcatggttacctgcgagatctattgtcttggagtgtttgttgtcaagaagaaaggttgatccaagtgaagaaattatggttttggatagattctgcccatggaaacttcatctgtttgagc

SEQ ID NO: 391595 - DNA, 800 bp, Oryza sativa
  unsure (1)..(800): unsure at all n locations
cggacgcgtgggatctacttctcctgaganttgaatggagtagtgtctgaagtcaaacaggtattacctggtttgattcggcgacatcgacattctgatagcactggcagcacaacttcctcaagaagtaatccaatgcgagaggacatgttgaaccgatcaaacacacaccgtgccggaggtgaatttttagaaaatcatctagcaaaattattcgagcagaaaatggaaatattcaccaaagttgaatacacacaggaatctgtaatttctgctgtcctcaagctctgcctgaaaagcttgcaagaatttgttcggcttcagacattcaacagaagtggatttcagcaaattcagctggatatggaatttctcaagacatcccttaaggagtttgttgatgatgaagcagctattagctttttacttaaagaggtgaacaatgctgctcacgagagatgtcttgacccaatccctctcgagccgcccatattggataagctcatcagtgcaaaactagcaaagattaaagagcaaagtccaaatatgcagtagctacgcccaattggttattccttcccctagcaatcagtttcatctggtcatacaccgttcacagctatgtgcatatgtaaatctgtcaaacactcaaactgaaccaactcaccccgaaaatgtaatactatgttgagctctcagcatcgagaaatgctctgttagtcctgtgtgcattgtctcgagttcaggggaaatattgatgatcaagggacttgaattaatcaacgtagtccaccgccaca

SEQ ID NO: 391596 - DNA, 510 bp, Oryza sativa
cccacagctatacaattaattaatcatcactcgcgttttaaccatggccccctccaagctctccatagcgtcgttcttcctcgccacggctcttctcctgctggctttcgccagcggccagaccaccaatgccccacccccaccaccgcctccgaacacgcagtcccccggaggagtcatatcagatctcgcgaactacacgaggtgcatcactgcgatattgttcggacgccccaatcccgagcagttctgctgcccggcgatctcggagctccccaacaacgtcgccgccagatgcgtgtgcgccgctctcagggccaccggactatcaatcggtataaccgcgagcaataatgtcacaggtagcatcctcaagatctgcaacaaagcttccctgggacctcttgactgtcaactgcagcagagcctagctgatcgggatctggctctagtaataaagcatgcatgcactacgcgcgtactctacccttaatcgtaattatatattgt

SEQ ID NO: 391597 - DNA, 887 bp, Oryza sativa
tccggccggattcccgggtcgcccgcgtccgcccacgcgtccggtcgtactgttgaggaatcgctcgctcgctcgctcgctcgccggcgggcggacgaggagggggcgagatgttcttccacatcgtgctggagcggaacatgcagctgcacccgcggcacttcggcccgcacctccgcgacaagctcgtctccaagctcatcaaggacgtcgagggcacctgcagcgggcggcatgggttcgtggtggcgatcacgggggtggaggatgtcggcaaggggctcatcagggagggcacgggctacgtcaccttcccggtcaagtaccagtgcgtcgtcttccgccccttcaagggcgagatcctggaggccgtcgtcaccatggtcaacaagatggggttcttcgcggaggctgggcctgtgcagatcttcgtgtccaaccatttgattcctgatgatatggagttccaatctggggatgtgccaaattatactacttctgatggatcggtgaaaattcagaaagatagttaggttcggttgaagattattgggacacgtgttgatgcaacagaaattttttgcattggcacaataaaagatgacttcctgggcgttatcagtgatcctggtgcggcagtgtaaattatccggtgacaagattacgcctcttcatgctcttgaacgggaatattccgatgaattgtagtgttaaaatatggaagccccactggaaggggctgtaactgggttggaccctgtattttcatcactataaatggctctttaccaagttggcactgttgcttgagtgtgttgtgggattcaactttcaagcagtcatttaactaatcaagctgtgacctttttacggcctgaacaacaaaa

SEQ ID NO: 391598 - DNA, 466 bp, Oryza sativa
  unsure (1)..(466): unsure at all n locations
tttactttagccatcgccaccaccgccattcctggaacccccttccctcttcctccctcggatctctcctcgctcgcgcgttcgcgccgccgccttcccccttcccccgttgattgattgggaggaggatcaatggagtgcgtccgctccggctccggggttcttgatcccaggtgctctccgcggttcctggggaagaagggtggttcgctcacgtcatgtggtaaagccacttctacaaatcttgccatttgtaccaaacacgagcaaaacttgcatgggaatgttaaaccctcacagttagcagcaagtggatcctcttattctgttcacagaagtccagtgcttaagcagagacagaatctttctgctaggtctacctcttgcagatgtatatactacttttgatgaaaatgtcagagctgtatcttcacatgctgctgangaaaaggttgggnactcttat

SEQ ID NO: 391599 - DNA, 574 bp, Oryza sativa
cccacgcgtccgcccacgcgtccgtttttttgcaaactgaagccttcacgtgattacttgcagaataaaaagaacaacaaatatctttgtatcctcatcactaccacatatacacacattcataaagccaacaggaagccgcactgcaaccatcaaacgtaaatccaacactaatgaccaattacagcaagaaaagaatagatcagtggaagggaataacgacatgagatgatatacaagcgcaaaagaattgtcacgacgtgcatagtatcttctcccaaacatctcggttgcctcccactcgcaatgctcagaggcttccgaaagattctatggacaagagcttcctgttctgcgcaggtggtgccagtcctgggatgtctctgatgttcttgttgtgagggttgacaatcttaacaacaatgattgcaatcacaccacagactatcagaaataggaatgccatgatgcatttgtcagttgcaacctggcgaccaatctctttcaccatttggctagccttcttcagtgaaaagtgaaccgagtctagctcattgccaattctcttcatttg

SEQ ID NO: 391600 - DNA, 1278 bp, Oryza sativa
  unsure (1)..(1278): unsure at all n locations
cccacgcgtccgggagaggagaggagagaggaggaggaggagcacgcgttcttcgcctcgcctctctcgcctcacgggaggagaggaggagggcgattcgcaggagggcggttgcctttgatcccattcccctcccccatcttctcccccgggttcggattcggtcggtcggttggttgatccgcaaccgatcgatcgaggggggggtggcactcgcggatcctctcgtgttcttcctccagtgcgctgatctggacacggcgcgatttatagtctatcggccagatcacaaagtttttcctcgccgtacattcaaaagctttctctgaagactttctacattctgaagattatattgggaataacattttaacatgaaggccgatcggttaatgttgtccaatctcgaccatgatttgggatacctacacaagtttccctcagattttccaatgtctcatgatcttgggttgagcttgtttacgcatgccggtacaatggtgggaagttctttgcgacagcacaggcagatctgttcttcaggaaatttgattgttcaggaagcatttgatcgcctcaacaagtttgccagagctttctgctactggctttctagagtgtctaatcccaagaatttacgtaggctaatgagtatggaaggccctagctctggagcttgccagtcacatatcaatcatttgagctcccgtatgcaaaatttggctgtattgcagtttggttatctagtaagagaagagcatgctgtacaactgcttttagctaacttcgcaagcacaacacttgggcgactctggaatgattttcagcagcaacatgcctgcaatgttcttactctggctggtgccatggctattgtaccccctcttgaaaatatatcactgaagacgctcgcagagtcaatggcactgggaaatatcaaggactatgtcagcagacctatggataagccttatctggaggacaaatgcataaaaagtagatctgttgcagtgccaagcacaatatttcagggagatgcaattgaaccaaaaactggaatcaagtttcctgcatttctcgaagatgactccagtccatctacaacggtccttgtgggaatgggtttaaaggtgtgaaagtaatgagggtcaaaaatttggatctgtacgcttttggtttatatctgcaaccgaatactatttctgagaagctgggacctaagtatgcttctgttccaaccatcaactntgaggacaacccagatttctatgatgatct

SEQ ID NO: 391601 - DNA, 773 bp, Oryza sativa
  unsure (1)..(773): unsure at all n locations
gtgctgctcttcaaattctgccctgctcaactgcattttgaggtgggcctgtcgtatatgtgatatgagctcaggacgtttaaggccatgtgacttcaagtatactaaactattagcttctcttcaaactttcagatgcacatataattttgagataagactgccagttgttcaagctgagccttttaagaaggttatttcgaaggcaatcagtcatctcacgaagcaagtgcagaatgccaaagctttgattgatggagtcctgggagatcactaccgccaatggctccactgggagtaacatggattgcccattctcaatggagaagacattgtccaacatatgcaagagaactttttatgatatctttgattaagcatgtgacatttacttattcgcatgctcatattctaaactttatatcaaacatgattgcattggtttccagtagtccatttgtgtgttggttaataggtggaatacggcgggggagggcggacggcagtcccgcggcagcggccccaccctctacctttgacactggctagtttgccatcttccccagcggtcgacggtcgtggaacattttcactctcaacaggtggagaaactgaatagaataggtttgatttggattagagatttttaaccacctgtaaagaggtttattgagccacgctgcattcagtcacatttgctgtttgtccaatattatctgctgaatgtttattttggtgaaaaaaaaaaaaaaannnnnnnnnnnnnnnnnnnn

SEQ ID NO: 391602 - DNA, 318 bp, Oryza sativa
cggacgcgtgggcggcccccccgaaataaagccgtcgtcgacacctcccccgagccgcaagcaaccccgcgattcccccgcatcgccggcgaatcggcggcggcgacgacgaggacgacgaggaggccatagggttgtggaggaggggtgggggacctgtcttcgatgcgcggcgcatggcggcggtgaacagcctctacgtcgccgcggcatccaccgcggccagcgccgcggcgctgcaagttggtgggcggggtccctcctcgacggggatgtccgacccggcggagcgagggaggaggaggagtaggaggggct

SEQ ID NO: 391603 - DNA, 661 bp, Oryza sativa
  unsure (1)..(661): unsure at all n locations
cacgcgtccgatcgcctattggcgtccatgaaggcaatctaaagatcaaagaaatataccacttcactcaagatgatctgatgacagaagatgtattcattctggactgtcactcagatatatttgtttgggttggccagcaggtagatgtcaaagtgcgattacaagctctggacattggtgagaaattcgttaagcttgatttcctgatggaaaatctatccagcgacacaccaatttttgttatcatggaaggaagtgagcctacattnttcacaaggttcttcacttgggactcagcaaagtcacttatgcatggcaattcataccagaggaagctttccattgtaaaggggtggggttctcctgctttggataaaccaaagcgacgaacaccaacatattcagggagaagcactgtacaagacaaatctcagcgctcgaggagtatgtctttcagccctgaacgtgtccgtgttaggggaagatctccggcattcactgcattggctgctaactttgaaagtgcaaacagcagaaatctttccacccctccacccgtagttaaaaaactttacccaaaatctgccacacctgactcatcaagtgcaccgtctaagtcatctgcaactgcttctctcactggttcttttgatcgccc

SEQ ID NO: 391604 - DNA, 884 bp, Oryza sativa
  unsure (1)..(884): unsure at all n locations
cgaacacccgacgaggagaaagaaaccacctgatcgagcccgtatctttgcagccgcaggagaggaggacgagtcgttcgttgtgcagcaggaggcggcggcgaagatgtcgtggcagacgtacgtcgacgagcacctgatgtgcgagatcgagggccaccacctcacctccgccgccatcgtcggccacgacggcaccgtctgggcacagagcgccgccttcccgcagttcaaaccggaggagatgaccaacatcatgaaggacttcgacgagccggggttcctcgccccgaccggactgtttcttggaccaaccaagtacatggtcatccaaggtgaacctggcgctgtcattcgtggcaagaagggatcaggaggcatcacggtgaagaagaccgggcaggcgctggtggtcggcatctacgatgagccgatgaccccagggcagtgcaacatggtggtcgagaggctcggcgactaccctcgtagagcagggcctgtagatcaccgtcgccatcatcgtcgtcgttgccacagttcaattcgtcagcaacaaattaaacggagacgaatgagagacacacacagcacatagtagatctctatgctatgcatttttctagccaccgtgcatgcatgcatggggattgtggtttaattttcctctcctctttccttgtccacctccgcaagcatgttctggatcacctcttgtacgttctgccatattttgtttgatcccatttcttcatgccgtttttggctaataactttttgtatttctttctgacgtggtcatttcgatttccattggagtttggaaatgtaacaacaaatgtaattaacatgagaaaattcctttgacgccgctaaaaaanaaaaaa

SEQ ID NO: 391605 - DNA, 457 bp, Oryza sativa
gttgtgagttagcaagagacaaacctgaccaaatccaccctagctacaaattttcttggccgcgcgcggcaggcagatcgagcaggcgagcgaagatgtcgtggcagacgtacgtcgacgagcacctgatgtgcgagatcgagggccaccacctcacctccgccgccatcgtcggccacgacggcaccgtctgggcacagagcgccgccttccctcagttcaaaccggaggagatgaccaacatcatgaaggacttcgacgagccggggttcctcgccccgaccggactgtttcttggaccaaccaagtacatggtcatccaaggtgaacctggcgctgtcattcgtggcaagaagggatcaggaggcatcacagtgaagaagaccgggcaggcgctggtggtcggcatctacgacgagcccatgaccccggggcagtgcaacatgggggttgagag

SEQ ID NO: 391606 - DNA, 492 bp, Oryza sativa
cccacgcgtccgcacccccgatccgccgctcccctcgccctcctccgcgccgcgaccgatctccacctcgacggccgcctgcgcgccgccaccgagtcctccgcggctgccaccacctcctgaatccggcctcccaccaccccatcgcacggtggcctccgtcgtcgacagtttgtctcctttctccccttcatcaccgagggacatctccatctaggaaaaaaagacactgcactatggcgtctagacgcaatgttcgggggtatgctccccttcctacagaggacagggatgacagcaatcttactgatgatgttgaccttcggttcacttacaccccaaaatccctcaggaaattcccgtggaagtcaattgccctggcactattcctcctcctcctagggatggtcgcttctcttcctgtcatattttatattcacaggtcacatggagggggataactctcagcatatggtctctggttcctgggca

SEQ ID NO: 391607 - DNA, 514 bp, Oryza sativa
ttaagcatagccatagctagtgatcgatgtgtccgtgcattcctgtataaaaaagataggcgttgtagcgagcactatcactaagccgtatataaagagagcagtttagtactaaagtgagtgtgctagtgtgagcttagtggcaatggcgatgagaggcggtggtgcgacgatgctgtcgtggtacttgcaggtggcggcggtgagcttgctggcgatggcgacggggctggaggcgcagctgcgggtggggttctacgacaactcgtgcccggcggcggagatcatcgtgcagcaggaggtgagcaaggcggtgtcggccaacccgggcctcgccgccggcctcgtccgcctccacttccacgactgcttcgtcagggggtgcgatgcgtcggtgctgatcgactcgacgaaggggaaccaggcggagaaggacgccgggccgaacaccagcctgcgtgggttcgaagtggtcgaccgcatcaaggcccgcgtcgagcaagcttggtttcgg

SEQ ID NO: 391608 - DNA, 725 bp, Oryza sativa
cccacgcgtccgcccacgcgtccgcccacgcgtccgcggacgcgtgggttcataactagtccaaaagggtttgcccaatgggaattggatttattataccggcaccatgcatgttccaatcttttgtcctgtctcaccaccttggaatccctttccagtttggtccaatcactccccagaatgattgttatggatgaaattgggaggcaggttgagctttctcttgaagctgcaagtttagctcaaagaaacgcaagcctcggaataagtgactcttcagcagtatctgcaacaagagcgagggctttggctgaggatgcattttttcatccatctggtatgtctatcagttatgcttcaatagagcactattttgcgatttacatgccattctttgcgccagtttccttgcatgtgctgttggcggtaatgaaagagctgaaacgatacatggtagagagaaggaaatattcagcatttcttgcttcccaggcgacatcttcctgatcttttggtgattatcagcagccctgtttcatgcctagtactatcatccacaccaagtctgatatagatggtagataatctgcaacggggttcagccacagctgggggacgcgtcttcttaccatcaagcaactgctgggcagacaggtagaccaaatggtgtgtgcctgtgaactcgcagaccaggcgaagatgtgagggaaccccgtttttgtcac

SEQ ID NO: 391609 - DNA, 445 bp, Oryza sativa
  unsure (1)..(445): unsure at all n locations
cccactcncatcgccgacgaatttctcgctagggtttcgcggatcaaggcggcggcggcggctagggtttcgaggcgggccacatggcctcgccggcggggagaggggacgcggtgagcgcggggttcgcggagctggagcggcacagcagctgctggcgagctgcacgaggctgtacaagcagctggaggagcacttcgcgtcgctggagcgcgggctggcggcgaggtcggactcgctccgccacaagcgccgcgcggcggaggcgcgggctctcggccgccatggactcgctccgccgccgcgaggcctccatcgatggctccgtctcccgcgcgctcgaccacctcgacgacctcgcctccgcctcgtcggtgccgtccgacgccgccgcggcggcggagggggtggccgagagcctgagggcgatgtgcgccaggatgga

SEQ ID NO: 391610 - DNA, 730 bp, Oryza sativa
  unsure (1)..(730): unsure at all n locations
cccacgcgtccgggggctgcaactacaaaatctccttggaatgcacctgagcttttcgatctatctcttcttgaaggtgaatctcttagagaatggctattctttgacacaccaagacgggcatttgatagcggcaatcggaagcaaaggtcattgccagattacaatggccgtggatggcatgaatcaaggaagcaagtgatgaaagattttggaggtctgaagaggtcctattacatggatccacaaccatccagcaactatgagtggcatctttttgaatatgaaaccaatgattctgatgctctagcgctgtatcggcttgagtacaagtcttctgatactaagaggagtgttaaatcaaaattggcaagcagtccactgagtgaaatacagcagcaaatggtcaggcttagtgcagacagtcctgtggaaagcaaacggactgctaggagcagggcaaaggctaatcaaaaggataacaattcaaacgcctatccagctctcaatacccctgttcaagtcagtgcttcaaatgctcatcaaacaatgtctgtcaacacccctgatcaggtcaatgtttcaaatgcatatcaaacaatgcctctcaacacccaaatcaacccggtccttctaatgcttatcatgcagcatcacagatggcccagatgacgtttctggatggcagtgttgtttatggncctcatctcccatatggatactccaccga

SEQ ID NO: 391611 - DNA, 1881 bp, Oryza sativa
cttttgtgtgggcggagatatcactactactactcctctttcccactcctctggctggcttcctcctcctcccctgcttcgtcgccgcgtgctcctccgccgccgccggagaagctccaagcctcctcctcctccgggccgccgggaatggcggggaagcaaggagatgggcgcgaggaggatggcgctaaggtcggcctcccggcgctggatatctcgctcgcgtttccgcaggccacgccggcatccatcttcccgccatcagcatcggactattatcagattgatgatttactcaccactgaagagcagtctatcaggaagaatgtcagggctataatggagaaagaaattgcacccattatggcaacgtactgggagaaagcagagttcccatttcatgccattcctaaactttcaagcctcggtgtagctggaggcacaataaagggatatgggtgcccaggactttcaataacagcaagtgctattactatgggcagaaattgcacgggtagatgcaagctgctccacgttcattctagtacactcctcccttgcaatggtcacaatagctctttgtggatctgaggttcagaagcacaagtacttgccatcccttggctcaacttactgctgttggttgctgggcattgacagaaccaaatcatggaagcgatgcaagctctttgataactacagcaaccaaggtacctggtgggtggcacatagatggacaaaaacgctggattggtaacagtacttttgctgatctgctcgtggtattagctaggaatgccaatacaaaacaactaaatggatttattgtgaggaagggtgctcctggcttgaaagctacaaagattgagaacaaaattggtctcagaatggttcagaacggtgatatagtttttaataaagtatttgtccctgaggaagatcgactgccaggtgtcaattcatttcaggatataagcaaggtccttgctatttcacgtgtcatggtggcatggcaaccgattggtatatcaatggggggtgtttgatgtctgccatcggtatctgaaagaaaggaaacagtttggagttcctctagtagcttttcagctgaaccaagaaaaacttgtgcgaatgcttggtaacatccaagcgatgcttcttgttggctggcgactatgcaagctttatgagtcagggaaaatgaccaccagggcatgctagtttagggaagggttggacttccagaatggctcgtgaggtggtttctctcggtcgagaattgttgggtggaaatggaattttggctgattttctagttgcaaaggcattctgtgacctggagcctatatactcatacgaaggcacatacgacatcaacagcctggtgactggtagagaaataactgggatcgcaagcttcaaacctgccgcattagcaaaagctcggttataaccatcattttccgaaaaggataaagctacagctcactgcaatttcttctcagattgctactacaggaagcaaataaaaatcaggtccccatgcaccgattattggccggctaatgcagcatgatgcagaccaaatagactccttggaaaattctctggtcaatcttggctggctagaaggctgtgccgtgcgagaggatatctaacgtatccgaatcacctcgttggaatcgtgtccggtggtggaggacagcatgaataaaagctccgtcctgtatgccaagtcttggcatttaactgttgtatacatttgtgaacgctgtaaaatctgaataaaggtcaagaacagtagtgtcgaattttacctctttcaaacctacactgcctgttcttgttttggtttgtttcaagcatgggtccagagaatac

SEQ ID NO: 391612 - DNA, 983 bp, Oryza sativa
  unsure (1)..(983): unsure at all n locations
cggacggtgctgtttttcagtgttcacgtaggttgtagagagcacaacaacgtacgtacacagcagcaaagactgagactagctagcttagctgacatggctccaaggtgcgcgacgctggcggtggtggtggtgctggtggcggccgtggtggcgccgccgacgggttgcgcgcggctatctcgtgctcggcggtgtacaacacgctgatgccgtgcctgccgtacgtgcaggcggggggcacggtgcccagggcgtgctgcggcggcattcagagcctgctcgccgccgccaacaacacccccgatcgccgcaccatctgcggctgcctcaagaacgtcgccaacgggcctccgggggcccctacatcacccgcgccgccgcgctcccctccaagtgcaacgtctccctcccttacaagatcagcaccagcgtcaactgcaacgcgataaactagggcggccggcctgatgcgtacgtgtgtgcccgcgcctcccgtacgagaggagaataaaatgtcattagtaccatcaaattaagctagctagttaagctttacgaaaatcgatccctttcttcctctgtggtgtttagcagtttagggatcgtatgtctccacagttcctactatagtgtcgcttgggcgatggtggagctatattgtgcactttataaggtggtgttattatgtaacgcctgtgctagctttggtcctgatgttctccatgtgaactgtgtcaaccgtccattgttctgcaaatctgcagtatgtactgtgtgtgatagtatcaagctgaacttctgaacatgcatatgaaccctcttcacatgcncgggaaaagacattccgaacgccatcatttagcaataccacgctcttatcacncgatcattgttacggattatctagttgattgtaagggtgaatattataaaaaataaacttaaaaaaacagcttnnnnnnnnnnnnnnnnnnnnnnnn

SEQ ID NO: 391613 - DNA, 621 bp, Oryza sativa
  unsure (1)..(621): unsure at all n locations
tcacgacnttntaaaacgacgccccgtnagcgcgcntaatacgtctcactttagggcgaattggttcccgggccccccntcgtggtcgacccacgcgtccggcctacggcgcctccgggggcccctacatcacccccgccgccgcgctcccctccaagtgcaacgtctccctcccttacaagatcagcaccagcgtcaactgcaacgcgataaactagggcggccggcctgatgcgtacgtgtgtgcccgcgcctcccgtacgagaggagaataaaatgtcattagtaccatcaaattaagctagctagttaagctttacgaaaatcgatccctttcttcctctgtggtgtttagcagtttagggatcgtatgtctccacagttcctactatagtgtcgcttgggcgatggtggagctatattgtgcactttataaggtggtgttattatgtaacgcctgtgctagctttggtcctgatgttctccatgtgaactgtgtcaaccgtccattgttctgcaaatctgcagtatgtactgtgtgtgatagtatcaagctgaacttctgaacatgcatatgaaccctcttcacatgcacgggnnaagacaaaaaaaaaaaaaaaa

SEQ ID NO: 391614 - DNA, 619 bp, Oryza sativa
  unsure (1)..(619): unsure at all n locations
gcggacgggntntngcnaaaaggcttgggcataggctttcanacaaccattggnagcttagagacttctctnctaatttggttggttcagtatgtcgaaggtttggtcatgcgtatcacaacatccaaacccgggtgacaaggacgttggtccagggatttcttgatcctcagaaatcattgacacaacactatggtgcgattcaagggatatctgcattggggcccagtgcaattaggcttctgcttttgcccaacctcgagacatacatgcagcttttagagccggaattacaacttgataagcagaaaaatgagatgaaaagaaaggaagcatggcgtgtttatggtgccctgctgtgtgctgcaggaaaatgcttatatgatcggctcaagttgtttcctaatttgctttctccatcaacacggcctcttttgaggagtaataagagagtcgtgactaacaacccanataaacggaagtctagtacagatctctccacatcccagccacctctgaagaagatgacaacagatggtgcgatgaattctatgacttcagctcccatgccaggaacccatggatggcttctccacccaattaccaaccctagcatgac

SEQ ID NO: 391615 - DNA, 573 bp, Oryza sativa
cccacgcgtccggttatcttcaaaaatatttacggattatattcacaaaacttcatctgattatttacaggcaatgctgaatgctcatgctgaaaaaatgctggatgtagctcataaaccagcagagcgtgccagcggcccccaaaaggttttcaaggactgccaaaaccccgtatggacaatgatttcccttttcccccgcttatatatatttccacgggtttaactaaccaacccacaggaattaaacatgtgaacgaaaacgttatttccccatgttcatttcttttcatagcaacaatcttcttggtgtagaatatccatcctataacataagacaatgtcctccatcctctatacgccttgggcttagatatcgctgcaatgaagcctttcaatgcagctccaaggtcttgtgtgtcaaaggatacagatggatctgaacaacgatagtaatcttcactgaatgaggggtgactggtgcaatcctcataaaccaaagaatttgagaacttgtccactgtctgtgatacttgcggtggtgcatggccaccaagtgggggtaactctgac

SEQ ID NO: 391616 - DNA, 419 bp, Oryza sativa
cccacgcgtccgcttgtgatcacgagctaaccttgcatctctcattgtctttggcaaggatcgatgggccaggctgctgccaaggcgaagcaaggtggcgatcaggcagagaacaagactggcaaggacgagaaggttgcgaaacctaaggatgccaaggatctcaccgacttcatggaaaaaaactacgactcgatcaaggacgtgacaagcttcgaagatttctaccatgccttctacgagctcatcgaaaaattctgtgaggaacgtgggcaattgcagtacaggataccggaaaaagcggaacttcagaagcagtacgagagggtgaacaagagcccccagaaggggcagaacctgagcaggaagcagttcatggagctggcctggcaagggatcaagtgaacagcttcaccttc

SEQ ID NO: 391617 - DNA, 501 bp, Oryza sativa
  unsure (1)..(501): unsure at all n locations
taaccaacaagcatggggagaagctcgtgggagtgctgcatcacacgggttcaagcaagatcgtcgtattgtgtcatggttttatatctaccaagaacgacagtctcattcttgacctgatggctgcattgacaaagaaagggattagtgtctttcgctttcttgacaaatatttcagagaaagtgaaggagaattcgagtatggaaactacaggaaagaggctgatgatttgcactccgttgtatcatatctttgtaaggaaaagtatgatgtaacagcaattgttggccatagtaaagggggagatgtagtaactctatatgcttctatttatgatgatgtacgcttggttattaatgtatctggtagatttgacttagagaaaggcattgaagaacgtataggggaaggatcaattgatagaataaataaagaaggctaccttgatgtcaaggataaatcaggaaatgtacagtacagggtanctaaagagagtttat

SEQ ID NO: 391618 - DNA, 850 bp, Oryza sativa
caccaacctctccctcctccctcccctctcctcgcctccgcctccgcctccgcctcccaagaaggcgaaccctattccgcccccgattctcccggagcggggggccggactcccgttgcgcgattgggcggtgaaacccgaatccccctgcgggcggcggcgtccgtttctcatctaccgtcggcgttgggggggacgccgccccatgggccggtcgccagcgatatatcactatcagctcatcgaccggcggaaagggcttggataaaatcttattgcaaatttccccttgtacatgtaacatcacatgtaatttctattaaaaatgacttcactcaataaagttgtttccaatggagatacaaggtcaatgttgccaaataaagtcacagcattgaatcccaacgcagcagaatttgtaccttcatgtattagaccatcttttgagagtagcgctgtctcagatgtaagtaaggcagatcttagggcttctgggaaaactatcctagataggtccgagtcatcaaagtcaaataactcggatgatgaggcacaccagttttggcgtaagcagcttcctgatgacattattccagacttcagttttgagaaaattgaacaagaacctgaagaattgtctcttgctggattatccttgaatgcaccccctttctatggaacaacagctagccgcttttcaagagagcatgatttatcttctcaagctaacaagagcctggaactggggcttaccagtttactttatgaagataattcacaagcatcgtttccaactatgggttcaagcaattgggagcaaaaatttgtaaggggatctcattttacgaat

SEQ ID NO: 391619 - DNA, 590 bp, Oryza sativa
cgacgggttcgactgcaagcgatgcacgcgtgtcggacgagccggtctactgcggcggcggctgcgtctgcccgaagccggtggtggagaagggcggcggggtggtggccaggcggttcgggtgggcggagatcgagtcggtcacgggcggattctcgtcccgggtgatccggcagggcgggttcagcaccgtgtacctcgcgtcgctcacctcctcccgcctcggcgccgtcaaggtgcagcgcagcagcgagcgcctccaccgcgccttctgccaggagcgcgacgtgctcctctccctccgccacccccacgtcgtccgcctcctcggctactgcgacgaacgagatgagggtgtattggggttcgagtacgcaccgaacggcgacctccacgagaggctcccccaccggagcggcgggaagagcccgacggtgctgccgtgggcgcggcgcatggccgtcgcgttccaggtggcgatggcgctggagtacctccacgagagccgggaccccggcgtcatccacggcgacatcaagtccctcaacgtgctgctcgacgccaaccacgacgccaagctctgcgacttc

SEQ ID NO: 391620 - DNA, 722 bp, Oryza sativa
cgatcttaatttaatttctctctttatcatcttttcgctctcgatctcctacagaagcaatagtagccagcaaatcaatcgatcgatccgtacaatggcggccctgaagatgaacaggatggccgtggcggcgctgttcctcgccgccgtggtggtggcgggcggcgctggcgctagcgcccacgtcggggttggggctggggctggggccgacgccggcgtcgccgccgccgtcggggctggcgctgacgcgccctcggggttggcgccggcgccgccggcgccgccggggctggagttggagctggaattggagccgccgccaacgtcgccgggtctctcaccggcgccgctgagggcgccgccggcgtggcacccaaggtgcatgtgtgagatcgatcgatcgatcgagcgcgccgcggcttccatctccacgactccatccgcccgcagcggctccggcgatccatatttttataaattcgcagtcgattgtttgttgttaatcaaagtttggttaatttatccgtcgagtgtttggttgtttatttcatatgcaaacctcgcgatttgtgataaataattaccgaaatgtatgtgtgtgtggggtgctaattcatccttccctccattaatttgttataaatatatatccttgtactagtgtaaatgtaataaagatcttaagttatgggtggatcatcatatactccccccgtccc

SEQ ID NO: 391621 - DNA, 659 bp, Oryza sativa
gcgatcttaatttctctcttcatcttctcgctctcgatctcctacagaagctatagtagccagcaaatcaatcgatcgatccgtacaatggcggccatgaagatgaacaagattgccgtggcggcgctgttcctcgtcgccgtggtggtggcgggcggcgccggcgctacgcccacgtcggggttggggttggggctggggccggcgccgacgcgccctcggggttggcgccaacgccgccggcgccgccggggctggagttggggctggaattggagccgccgccaacgtcgccgggtctctcaaccggcgccgccggcgtggcacccaaggtgcatgtgtgagatcgatcgatccatcgatcgatcgagcgcgcggcggcgtcatctccactactccatccgcccgtagcagcgccggccatcgatccacgaccattcgccgtccattgtttttgttgttaataatcaaagtttggttaatttaaccgtcaagtgtttggttgtttattttatactccatccgtactgataaaaaaatcatttagaagaatgtttaattcaaaccttaggaatataaatcatgaataactctcaagttgttgagtttgaaaatgtaaaaattatatgaataaatttgtcttgaaaaaaaaaaaaaaa

SEQ ID NO: 391622 - DNA, 541 bp, Oryza sativa
cgctgttcttcgtcaccatggtggtggcgggcggggccggctctatcgcccacgtgggggttggggctggggccagggccgactcctgcgtctgtgcctccgtcggggccgggcgctagacgccgccctcggggttggcgccaacgccgccggcgccgccggggctggagttggggctggaattggagccgccgccaacgtcgccgggtctctcaccggcgccgccgagggcgccgccggcgtggcacccaaggtgcatgtgtgagatcgatcgatcgatcgagcggcgcggcgtacatctccacgactccatccgcccgtagcggcgccggccatcgatccacgaccattcgccgtcgattggttttggtggtaataattaaagtttgggtaatttaacccccaagtgtttggttgtttattttatactctatccgtactaataaagaaagtcgtttaggataatgtttaagtcaaatcttggaaatataaataatgaacaactctcaaattattgagtttgaaaaaaaaaaaaaaaaaa

SEQ ID NO: 391623 - DNA, 691 bp, Oryza sativa
tctactaaccaactttcaagcacataccaaggggtggtttgctgacatttgagacggctcacttgagggaattcttaagaaactctctgaattcaatgcaacactttcatctaatttggaacagagggaactatctttggctgagatcgagttgtccagattagctgccatagcaaaagtattgaaagaaacatcattttatcatacaagtaagcttgcagatgctgacatgaccttgctgctgaaaatgttgaagtcttggcctacacaaatgatgtttccagttattgattttctgaggatgtttgtgttgcatcctgatggagccactctacttctcaaggctattgaaagtggaaatgatgtacttgccgagactttccataaggttgtaacgccacctgtgcagccaccaaatgtgcttacaacccttaaagcagttactaacttatttgacaagccatgcttgcaccaatggttgagaatccatggcatggagattattgattcagtatcaagctgtaagacaacttttagcaagaatgctcacctggcatattccacacttctactcaattatgctgttctttcaatcgaatcaaaggatgaacaaagtcaggcacagatactttctgctgcccttgaaatcgctgaagacgacacccaagttgctgattcgaaataccgggcc

SEQ ID NO: 391624 - DNA, 918 bp, Oryza sativa
tcgtgaagaaggagagaaacatctagagtgaataagaaagatggggttcgtccgtgccctgttcctgctggcgatggtgtgcgtggcggcgcacgcgaaggactaccccaaggaggagggcgcgaaggcggaggggccggccgccgcctcggggggcggcggcggtggcagcacccacgacgtggtgaagctgggcggcaagggcgacggcaagacggacagcaccaaggcggtcaacgaggcgtggacggcggcgtgcgctggcaccggcaagcagacgatcgtcgtccccaagggcgacttcttgacgggtcccctcaacttcaccgggccatgcaagggcgacatcgtcatccagctcgacggaaacctgctcggctccaccgacctcgccttattcaagtcgaactggatcgagatcatgcgcctcgaaagcctcgaaatcagcggcaagggcaagctcgacggccagggcgccgccgtctggagcaagaactcctgcgccaagaaaacgactgcaagatcctccccaacactttggtgctggacttcgtgaacaacggtctcatcagcggcatctctctggtgaaccccaagttcttccacatgaacgtgttcaagagcaagaacatcaccatcaaggacgtgaccatcaccgcgccgggggacagcccgaacacggatggcatccacatgggagactcctccaagatcagcatcattgacacggtcatcggcaccggcgatgattgcatctccatcggccccggcaccgagggcgtcaacatctccggcgtcacctgcggtcctggccacggcatcagcgtcggtagcctgggcaggtacaaggacgagaaggatgttgacggatgttaccgccatgaactgcgtgctcaagaagtctaccaatggcgtccg

SEQ ID NO: 391625 - DNA, 875 bp, Oryza sativa
gagagaagcaccggcggtcaataattaaaaaaaaaagagaaggaaatggctttcagaaaccatgacgctgccatggtcctcttcttcttcctcctcatggtgactacctacgccaacgcgcacggacacagcaagaagcccgaggagatcactcagggcgtttacggggcggcggcggcggtggcggccggccccggcggcacgttcgacatcaccaacctcggcgccgtcggcaacggcagggcggacagcaccggcgcggtgatggcggcgtggaggtcggcgtgcgccggcgccgggaagcagacgatcctgatccccaagggagatttcatgacgggggcgatggagctcaggggcccctgcaatggcgccgtgaccatccagctcgacggcaacctgctgggctccaacgacctcagcaagtacccgggcaagaagatgcccaactgggtcgaggtccgccatgtcgacaacttcgtcatctccggcaagggcaagctcgacggccagggccctcgccgtctggagcaagaactcctgcgccaagaactacaactgcaagctcctccccaacacgctggtgctgaacacggtgaacaacggggtggtgagcgggatcacgctgctgaacgccaagttcttccacatgaacatctaccggtgcaaggacataaagatcagcggcgtgaccatcagcgccccgggggacagccccaacaccgacggcatccacatgggcgactcctccaagatcaccatcgccgccaccaccatcggcaccggcgacgactgcatctccatcggccccggcaccgacggcgtcaacatcaccggcgtcacctgcggccccggccacggcatcagcatcggca

SEQ ID NO: 391626 - DNA, 944 bp, Oryza sativa
accgaaccaatcatcagccatggcgcgaaggctctcgctgctggccgtcgtgctggcgatggtggcggccgtgtcggcgagcacggcggcggcgcagagctgcgggtgcgcgtcggaccagtgctgcagcaagtgggggttctgcggcaccggcagcgactactgcggcacggggtgccaggcgggcccctgcgacgtgccggccaccaacgacgtgtccgtggcgagcatcgtcacgccggagttcttcgcggcgctcgtcgcccaggccgacgacggctgcgccgccaagggcttctacacccgcgacgccttcctcaccgccgccggtggctacccttccttcggccgcaccggctccgtcgacgactccaagcgcgagatcgccgccttcttcgcccacgccaaccacgagaccataaagttctgctacatcgaggagatcgacggaccgagcaagaactactgcgacgagacgaagcacgcagtggccgtgcatggcgggggaggggtacttacgggcgcgggccggctgcagatctcgtggaacttcaactacgggccggcggggcagagcatcgggttcgacgggctgggcgacccggacgcggtggcgaggagccccgtgctggcgttccagacggcgctctggtactggaccaacaacgtgccacgacgccttcgtctccggccaggggttcggcgccaccatccgcgccatcaacggcgcgctcgagtgcgacggcaagaaccccaccgccgtcagcaaccgcgtcgcctactaccagcagttctgccagcagttcggcgtcgaccccggcagcaacctcacctgctaattacagggattgacatatgctatgtatctgattttgtacgaataataattgtcataagtaatcaaataaaatcgtattgcattacgtcaaaaaaaaaaaaaaaaa

SEQ ID NO: 391627 - DNA, 475 bp, Oryza sativa
cgccacggaagcgcagcatcaacaaaagcagcagcagcagcagcagcagcgttggtggtggtggtgtgtcatcaccaacattttcacgagaggagaaggatggaaatggcggcggcggttgggggcagcgggaggagggacgcggaggcggagctgaacctgccgccgggcttccgtttccacccgaccgacgaggagctcgtggtgcactacctctgccgcaaggttgcccggcagccgctccccgtcccaatcatcgccgaggtcgacctctacaagctcgacccctgggatctccctgagaaggcgttgttcgggaggaaagagtggtacttcttcacgccgagggaccggaagtacccgaacgggtcgaggccgaaccgcgcagcggggagagggtacttggaaggcgacgggagccgacaagccggttcgcgccaaggggagctcaagacgttgggataaaaaggcgttc

SEQ ID NO: 391628 - DNA, 542 bp, Oryza sativa
taacaccgtaattccgttccgttccgttccgttccgtcgccccccccggccggcgagggcgagggcgatgtccttcttcttccgcatggcgtcgcggctgcggccgtcgacgccggaggaggtggtccgctccatcaaggactccttccaggccctccacaccaagaacggcgccagggctctagaagaggttgagaaaaacctctcgtcattgaggcaaatgctgtctggtgatggagaagcagaaccaaatcaagaacaagtcttgcaaataacccttgagatttgcaaggagggatgtcctttccctctttgttcagaatctgccttcgcttggttggggagtacgaaaagatctggctcactgctggtgcatttgggctcaggccagaagtttgatgagagctactgctgtgtgaagtacattgagaaccatctggagcttttagatttcctagttggctgctacaagaacttgggcgtgcactgaattgcgggaacatgttgagagaagcataaaatacccaacactacaaaataca

SEQ ID NO: 391629 - DNA, 455 bp, Oryza sativa
  unsure (1)..(455): unsure at all n locations
cgctcgtcctcttgcgcatgcgcatcttcctcccgatgcgccgccgtcgcgcacgtgctacgcccgtcgctgccttgggccgccggccccgatgcgccacgtcctcgctgaagctaccgcacaccgccgcctccctcgccgttctgcgcctgcgccaaccccgtgaagagccgctgcaccgctggacctcgggaagccgccggccctgcaagaaatcgccgcgccgccttggagcgccgtcgccgaagaccccgacgccgactcctccgccgggagccgccgccgccgccgcaagctcctgcccgagttgcgacgaaaaccgcgccgagcaccacgccgctgcgcgccgctgcaatgacgctccagtcgccgtgaaatcgcagcccaaaccaagtgccacaaattagagaagtgaantttggaaattcgtnttgtggaattgaaccgtcatttgg

SEQ ID NO: 391630 - DNA, 344 bp, Oryza sativa
ctcgaaacgataaaaaagagcacaaattcttctcctgttagtaattctgttcgaattcctctccttccccaaaaaagattggggttcatctccgccacgcggggttaccgataaaaatccccaaaatttccgctcccaccccgtcggattctccccccgaatccgagagttcatcgttttccgccgatttatttttatctggttttgtaaaccagcagcccaattgctctctgccttcgtctacctcgtggaagattccgggtcaaattctagactttttggtgggttgcgtgcgaggggtgggggttgcttcgaaggcaagcgtggtgtgggggggggggggg

SEQ ID NO: 391631 - DNA, 829 bp, Oryza sativa
attatgagcaccgtgagaggcattgccctgtggagcctcctacctgtgttgttccacttcctgaaggatataaacgcccagttgagtggcccacgagcagggacaaggtgtggtacagcaatgtcccccacactaagcttgctgagtacaaggggcaccaaaactgggttaaagtttctggggatcatctcctatttcccgggggtggcactcagttcaagaatggtgcacttcactacattgatactattcagcaggcattacctgatattgcatggggcaaacgaagccgtgtcattctagatgttggctgtggagttgctagctttggagggtatatgtttgagagagatgtactcacgatgtcatttgccccaaaaggcgacccggtagctcaagtacagtttgcacttgagagaggtattccagcaatatcagctgtcatgggcaccaaaaggctcccataccccagcagggtctttgatgtcattcattgcgctcgctgcagggtcccttggcacattgaaggtggcatgctattgctggaactgaaccgcctattacgccctggtggttacttcgtctggtctgccactcctgtttaccagaagctccctgaagatgtcgagatttggaatgccatgtcttctctaacaaaggccatgtgctggaaaatggttaacaagactaaggataagttaaatcaagttggtatggccatatatcagaagccaatggacaacagttgctatgagaaaagaccagaaaacagcccaccgttatgcaaggaaactgatgatgctgatgctgcattggaatgtacctttgc

SEQ ID NO: 391632 - DNA, 742 bp, Oryza sativa
catccacacctgagatgacgcgtgggcgataaggcacgaggagactatctcctccgctgagaactgtaagatggttgaacgtctccgctagcaatactgttgttccataagcgaaaagggactggagcagatcgcaacctcctgccctacatctaaagagatagacctcactgactgtggagtgaatgatgcagcattgcggcccttggccaagtgctctgaactgctcgtactgaaattaggcctgtgctcaagtatttctgacaaaggtcttgcttttatcagttcaagctgtggaaagctgattgagcttgatctctatcgctgcaattctattaccgatgatgggctggcagctttagctaatggctgcaagaagattaagatgctaaacctatgctactgcaacaagattaccgacactggtttgggccacctaggctctctagaggagctcacaaaccttgaactgaggtgcttggtccgcataacaggtattggaatctcatcggttgccatcggctgcaagaacctgatagagatagacttgaagcgttgctattctgtcgatgatgctggcttgtgggctcttgcccgatatgcgctaaaccttaaacagcttactatatcctactgccaagtcactggcctgggcctgtgtcacctgttgagctccctgaggtgcctccaggatgttaagatggtacacctctcatgggtctctatagaaaggttcgagatg

SEQ ID NO: 391633 - DNA, 571 bp, Oryza sativa
  unsure (1)..(571): unsure at all n locations
cccacgcgtccgcccacgcgtccgcccacgcgtccgcactcccatcccccctcccaccgctggcagcctcccccgcccgacgccacatgtcccctgtctccccaccggcgccatctctcccctctagtggcgcagcttcccttcttctcccctctccccactggcgcgccgctccctctccccctttccctcccatctcgcctgcacggcgcgacgatggcggngtgcggaggagacgacggtgatagtcgtccctcctcctcctcctcctccctctccccgtcggccccgatggccgtcccttcctcttagggacggcaccctctccaccctcaagatccgacggcgtcggtggtttccctcgggcagatccagtgccgacggcttcctgcggcggatccaacggcaacgtagaaatcgccgatccgcttcaccgatggcgcctcgtggacggatctggtggcgacgacgatgttggtggctttcccgagcggtggacctgagcgtagtgagagaacgncgcacggttccagagcgagngcgaatctcgatccttccacccagctagaag

SEQ ID NO: 391634 - DNA, 792 bp, Oryza sativa
gaaataggttaattagcaaccagtcgcctctccccgccgcacgcacgcacacctctcccctcctctcctcctcccgccgccgccgccgccgccgccgcaaaaacccgaggccgagaggaggagacgggcgcgggggctgatctcgtcggcgaggcgagcgggcgatccggtgcggtgcgggccgggtggacatggcatcggaggacgtggtggggaagagcaggggggacaccgcggtcaccaccatcgtcaacctggcggaggaggccaagctcgcgcgggagggggtcaaggggcctggttaccaggtgctctccatctgcaagtctctcttcgccggtggcgtcgccggtggagtatcacgtactgctgttgctccgctcgaacgaatgaagattctgcttcaggtccaaaaccctcacagtatcaagtacaacggtacaattcaaggtcttaagtacatatggagaacagagggtctccgtggactttttaagggcaatggtaccaattgtgccagaattgttccaaattctgccgtgaagttttttagctatgagcaagcatcaagtggaattttatggctttatcggcaacaaacagggaatgaggatgctcagcttagtccactattgcgccttggagctggtgcttgtgctggtatcatagccatgtctgctacttacccgatggatatggttaggggtaggattaccgtgacagacggaaaagtctccttattcagtaccgtggtatgtttacatgcttgggttcagtataccgtgaagaagg

SEQ ID NO: 391635 - DNA, 197 bp, Oryza sativa
gtcaccgagctccgggtccccggcgccggcctcatgggcaccctcccgtcgaacgtgctcggcaacctctccgcgctccgcacgctctccctccgctacaacgcgctcacgggccccatccccgacgacctctcccgcctgaacgacactccgggaccatactactccccagcaacaacagccttcgtccggcagag

SEQ ID NO: 391636 - DNA, 464 bp, Oryza sativa
aaccagaggctgcccaagaaggcgaccacgccggcgcgcagaaggtaccggaagaggaaaagcgcgtggatcctgactcggttcaggttgcagccgcggcatcatcaacaccatcaccaccatcatcagctgatgatgatgaggaggagaagagcaaggaagaagctgctgctgatgtttcagctccggcggcgcctgatgaaaactgacgcctctgcgcttctgcttccgcgagttcagcgttttctgaactctgaactctgaagacatttgttttgtttcctttttcttgtttctgagagatactactacctggatgcacatttggatggtctgagattggttcaaatatgtcgtgcttgcttgcacaaatctttgagaagtttggtactcttcccttttttttgtgttttgtgttctaagtgagtgtatcaatctgtattcagtttattgaaccatttagt

SEQ ID NO: 391637 - DNA, 404 bp, Oryza sativa
tgacttcaactcaagggcagagtacttctggtcccatgggctgatttcagactcaacatacagaattttcacctcagtttgcaactattctcgctatgtcaccgagtactatggcgggtcgcttaccccgctttgcgcaagggtgatgaaccaagtgacaagggagactagccgattcgtcgacaaatacgacgtcacattggatgtctgcctgtcatcagtcctctctcagtccaagatcctcactcctcatcaacaagtaggacagcgaattgatgtttgcgtcgaggacgagacggtgtactacctgaaccgggaaggatgtgcaggaagcactccatgcgaagctcatcggtgaaagaattgggcagtttgcagcagtgttcttgagtatgagctactca

SEQ ID NO: 391638 - DNA, 1053 bp, Oryza sativa
  unsure (1)..(1053): unsure at all n locations
ggacatttcatcctttcatccttcataccaagcgcttctacactgttcttatntggcgtagagttcttgccttcttatgtgcttctcaattcttacggatagtcacattctattccacacaacttccagggcccaactatcattgccgtgagggctcagctcttgccagattaccacatcctcaaaatgtagcagaggtgcttctcattaatttcccaagaggagtatattacgggtgcggtgacttggatattttcatccccacatgattttcactatagtccttcgttgtaacatcccagaaatatggcaatataaggtttataaagatgcttgcatggtgcatagctattgctcagagtcttcttatcatagcctctcgcaagcattacagtgttgatgttgttgttgcatggtatacggtaaacttggttgttttctttgtggacaagaagcttacagaacttcctgaccgatcagctggatcaacatctgtactacctgtgagcataaaggagaaagacagcaagttgaaagaggataagactagaatgttgaatggtaactctgttgattctgctgattggagaccatggacacaaatgaatgggaagcacattgagaatgggaaccatcttgataccgaaacaacaaaaacatgatgttttatgctgttggatcaatgtttgctattgtaatgctttatcccaaaggtctagggagtatacgtcgaatggcatctaaaatctttcatacctagaaatgtgatggcttcagtcctatagttcagaaggaagaggaattggtgccctgtgaattggttctatcctgtagaagtttttttttcctacgcattatctcactgttttttgatagcatcagccctttctctttttcttttttggttccctaatctttcaacatgtaattagattatgcattatagaaaatgtctattgttttgaattcattcagattctttgccaagtgtaattacctggaaaagcttaccctggccccctgaaattggaagtcccattaaccttttgattt

SEQ ID NO: 391639 - DNA, 400 bp, Oryza sativa
  unsure (1)..(400): unsure at all n locations
tccacgcgttcggtgaccccaatgcatgtgatgatgatggactaaagccaatacaggttgctgctttgaggaataaccgtgaagttgtggaacttcttttacctgtgacatcaccaattccaggtgtttcgagttggagtattgatggaattatagaatacactaaatcagtcgaggaaaaggcacaggtaaaggaagctacaactcagaaagcagacagattacaagtaccacaacttgttgaggtgtcatctgaggcaaaagagagatcattggaggcaaaatcgagaggtgatgatgccttcagaaataaagactacctagtagcagtagatgcctacacacaggctattgagttaaatccaaacgnncgccacgttgcattcaaacagaagccttt

SEQ ID NO: 391640 - DNA, 427 bp, Oryza sativa
acagaacaacgcgacgacccttgcagcgcacgaccccgcggactcgatccagatctagggcttctcgtcggcggcgatggcgggcaagggaggcaaggggctcctcgcggccaagaccacggcggcaaagagcgccgacaaggacaaggacaagaagaaggcccccgtctcccgctcctcccgcgccggcctccagttcccggtggggcgtatccacaggcagctcaagtcgagggcgtcggctcatggccgcgtcggcgccaccgccgccgtgtactccgcggcgattctcgagtacctaaccgccgaggtcctggagctggccggcaacgcgagcaaggatctcaaggtgaagcgtatcaaccccgcgccaattctccagctagccatccgcgggggatgaggagctcgacacgctcatcaaggg

SEQ ID NO: 391641 - DNA, 709 bp, Oryza sativa
ctccttagcgccgccgccgccacacactcccccacacctccccttcccttccactcctcctcctcctcggatcgggaggcggagcgagcaatcccccaaggaatttgtatttgtagcgtgatttgcaaagctagtcaagatggtgaagttcacagtagaagagctccgccggatcatggacaagaagaataacatccgtaatatgtccgtcattgctcatgtggaccacggaaagtctacacttacggattctcttgtggcggctgctggtattattgcccaggaagttgcgggtgatgttcgcatgactgatacccgtgcagatgaagctgagcgtggtattacaatcaaatccactggtatctctcttttctatgagatgagtgatgaatcactcaagttgtacaagggtgagagagatggaaatgagtacctgatcaaccttattgattcacctgggcacgttgatttttcttcggaggtcactgctgctcttcgtattactgatggtgctttggtggttgttgactgtattgagggtgtctgtgtgcaaacttgaaacttgtgctttcgccaagcccttggtgagaggattaggcctagtccttactgtgaacaaggatggacagagggcttccctttgagctttcaaggttgaaaggtgaggaggcctatcaaaccttttcccgtgtcatttaggaattcccat

SEQ ID NO: 391642 - DNA, 425 bp, Oryza sativa
gaacagagtttcaaaagagaaagaagcatagcccttcaggctgtcacatgcactcgcgtctaagagctccacctccatcacaccaggactgcaacgttggcactgctcgccagccttcttctcctgctccaactggtgccgccatcctctgccgcggtgttggagctccacgcgaacgcctaccctattggccatttcttcatcacacatgaacatcggcgacccggcaaaatcctacttcctggacatcgacaccggcagcaccctcacctggctgcagtgcgacgccccctgcacgaattgcaacattgtaccacacgtgctgtacaagccaaccccaaagaagctggtgacctgtgccgactcactctgccctgacctgtacactgatctgggcaagcccaagagatgtggatcccagaagc

SEQ ID NO: 391643 - DNA, 440 bp, Oryza sativa
ggcaagccaacataaacctctattcttaccaggtgttcctaatgcaaccgctctggagcctcggttccttgtagagtcttcgcgttccaatcttcaatccttacggttcactgaacccgctgagatgatctatcctgatgagatgatgttaaagcaccgcctgacttcagctagtgagagcacaattgtgccaggacccgatgagaagtcggctaggcagaacacatacatgatgaatgctgatcgtttggatagatatgcactcagcaaagaccagttgcagcacattatgccgaaaaacacagaaagtgtacttgatatgccacacttgcaaagattataagctgacgattcagcttccaatcttggacaggttgcataaccagtgacaccaaagttagggtcgagggcagatccaaagtataacccctgatctaatt

SEQ ID NO: 391644 - DNA, 500 bp, Oryza sativa
cccacgcgtccggcggcgccgtcccccctctctctctctctctctctctctctctctctctctacactgctcacgcctctctctctctctgctcccaaatctgcgtgggagagagagagagagagaaatccagtggggggagggattggtctctggaggggatctagcagcagcagcagcagcagccatgaacatcttcaagaagaaggtcgaccccaaagaggctctcaggaccagcaagagggagatgtcagttgctacacggggagttgagagagagattggctccctgcaaatggaggagaagaaactagttgctgagattaagaaaactgctaagacaggaaatgaggctgcgaccaaaatcctagctcggcaacttgtgagggcttaggcaaacaaattgtcaatttgcaaggcacgcgggcacaatacgtggagttgctactcatacacaggcatgtacgcagcacttcatatctgcagaatgaaggtgcaag

SEQ ID NO: 391645 - DNA, 500 bp, Oryza sativa
  unsure (1)..(500): unsure at all n locations
ccggatgaagatgatcttttggatgaaccggtagcaaagaancctaaagggcgaggttctgatttganatcaaatatagggaaaaaatccaagangcttatcactgaggtggacacgagatgatgacatgggtatcagacgaaggacgcgaatgtgagttgtgcgagcactggcttcaattgcatatgccacggggtgctgtgctgtcagttttggttgtacctgagattggcttagacttagttgctgagaaatcaagatgagttgtggcatagaacattatatttatatgttggcaaactattaggtttagcgttcaaattgcaagataagtgtaacattattttgcagcaagcactttacaggaagatgctcactctggcctgaggcagttgtttagggttgtttgtatcaacttatccatcgacggataagccatccaatttggctcttaggcaagcgggtgttttgcggttncacaggtcttaacagttccaacg

SEQ ID NO: 391646 - DNA, 961 bp, Oryza sativa
gtcgtcgcgcctcgactgcttttgctcccctctcccccaccgcctcctccggccgccgccgccgccgctgccgccgcccgacgacgtagtcaggggggctcgtcaggagtaaggagggagatggggctgagggagaagaagcggaaccagaggcgcgtgctcgcccggcgctcggccgctccccgctccggggagggcaaggacttcctgccgctggaagaaaggcctgggaagaagagggcccgggaggagcagcccgaggagccggagaacacgtccaccgtcctctacatcgggcacatcccccatgggttctatgaggaacagatgcaaggtttctttcagcaatttggaactgttaaaaggttgaggattgcccgaaaccgcaagacaggaaagtccaagcattatgggttcattgagtttgagaacccctgaggtagcaaaagattgtggcagatgagatgaacaactacctgctgtttgagcacactttgcaaattgcgattgttccacctgagaaaattcatccaaaattgtggaaaggtgtgcgacgggggtttataccaattgatcgggtagcaattgaacggaggaggctgaacaaggataaaccaatagaagagcacaaaaagttggttgacaaaatcgtaaaacgggatgagaagcgtcgcaaaagaatcaaagctgctgggattgattacgagtgtccaccccttatcggcagcgttcagccttcagctaagaagatcaagtttgaggattagtgccttttgaccagtagtgacaggacagtcgagtaaaatgactggtttgtttttagtgacgaagacgtgtcaacatcattttgttgcgtgtttaatcggtgttgtatcagtgtgaccaaaattgcacaacgaagcaggaaatttctgagattacgactggtatatctttgagaaaatagaaatcatactgtgtt

SEQ ID NO: 391647 - DNA, 846 bp, Oryza sativa
  unsure (1)..(846): unsure at all n locations
gagagaaagcctcaccctcgcgggccggagagtgagggatcgacgaaggcgccccgtacgtcgggccagcatatatatactcagaagccggaggaggacggtggaggcgccaccaccaccaccacccttcgccatgcaggaccaggccgcccccgtcccatggtccaccgacctctttgactgcttcgacgacagcagcaactgttttatgacgtggttgtgcccgtgcatcacgttcgggcagatcgcggagatcgtcgaccgggggtcgtcgtcgtgcgggacgagcgggtcgctgtacgcgctggtgtttctcgtcacgggctgcaactgtatctactcctgcttctaccgcgccaagctgcggtcccagtacggccttgcaggagacgcccttgccccgactgccccgtccacttcttctgcgagccctgcgccctctcccaggagtaccgcgagctcaagaagcgcggcttcgacatgaacctcggatggcacgcggaacatggagaggcagggtcacaaagccggcgatgaccatgccgccgcacatgttccccgggatggacacgctgatcgattcgaagtgatcaggcggnttcttctggcaagagatggggcaaggcaggnncagggcaggggcagcttgctatatatgccctacatacgactatacggagccagatttttcttgcgggtttgtaaaaaataattcaaaatgtctataacttattacgcgtaatgcaaattgcaagangaatttgaatgggntcgtagatcacatagcnaaggcttaagnagaatgggggaacttggttctggttngggttttccctcgggtccttt

SEQ ID NO: 391648 - DNA, 761 bp, Oryza sativa
  unsure (1)..(761): unsure at all n locations
ctcacgcgtccgctttttttttttttttgcacaaaaagtggaaatttgtattatattgaattcggttgaattaagaaagggcataatcgaaatcatttctttgatatgccatatgctttacgaaactgcatacacatcaagaaatgaaaattgcatacatgcataatacaactaccggctggtaggtatatataaaaagggaccttggaaaaccaacaagaacaagttccccatctgctaagcctggctacgtgatctatgaaccatcaaattcttctagcatatatatatactcagaagccggaggaggacggtggaggcgccaccaccaccaccacccttcgccatgcaggaccaggccgcccccgtcccatggtccaccgacctctttgactgcttcgacgacagcagcaactgttttatgacgtggttgtgcccgtgcatcacgttcgggcagatcgcggagatcgtcgaccgggggtcgtcggcgtgcgggacgagcgggtcgctgtacgcgctggtgtttctcgtcacgggctgcagctgtatctactcctgcatctaccgctccaagctgcggtcccagtacggcctgcaggagacgccctgccccgactgcctcgtccacttgtggtgcgagccctgcgccctctgccaggagtaccgcgagctcaagaagcgcggcttcgacatgagcctcggtaacaggaagtttaacagatggcacgcaaacatgggagaagcaagggcaaaacccgnct

SEQ ID NO: 391649 - DNA, 832 bp, Oryza sativa
  unsure (1)..(832): unsure at all n locations
cggcccgatgactaccgtatcatagaatagagccacaatatacaggaccaagagttgatggagacacaataacattagattttgtcaaggctatgttggatgagtttgagaaacagaaatgcatacacaaaaggtacgcctaccagattgtgttacaaaccgtgcagctattgcgttctgtaccttcgcttgttgatgtgaacgttcctgatggaagtcattttacggtttgtggtgatgtgcatggtcagtattttgacttgctcnatatatttaagctcaatgggcttccctcggaaganaatccttacctcttcaatggagactttgtngacagaggatctttttctgttgaagtcatactcactctttttgctttcaagtgcctctatccgacaggtatgtaccttgcaagaggaaaccatgagagcaagagcatgaataagatatatggttttgagggagaagtgaggtcgaagttgggagaagcatttattgaactatttgcggaagcattctgttgcctaccccttgctcatgtcatcaacaacaaggtctttgttgttcatggaggtctctttagtgttgatggtgttaagctttcagatattagagccatcgatcgattccgtgagcctcctgaagaaggtctaatgtgtgaagtattatggagtgatcctcagcctcaacttggtagaggtccaagcaaacgcggtgttggtctttcgtttggtgcagatgtgactaagaaatttctacaagaaaataatctggaccttgttgttcgatcccatgaagtgaaagatgaaggctatgaaattgaacatgatgg

SEQ ID NO: 391650 - DNA, 302 bp, Oryza sativa
  unsure (1)..(302): unsure at all n locations
cccacgcgtccgatcaccactttggttcctcccatttttcatttcaaagtgatactaataagcaagtgcaaggatagctagcttgacagtgtggaagtagtagtaggagcaagaggcaaattaaggggaagctgcaggtggtagatgcgtaatgcgagcggcagcagctgctgctctcgggtggcggcgccgttgcatgcgcaagtgcttggctcgccgtctccttctcatggcttacgcggcgccggcnacggctgncttctgcaggcacctcccccggcagncgnctgtggggagatgct

SEQ ID NO: 391651 - DNA, 749 bp, Oryza sativa
tcgccggccgttgctttctcctccgttcatccaccacaggcgaccggcctgacgtcagcctgccgccgtggaagcctaggaggttctctcgtgcgcgccccccctccgctccgccggttcgttctggtggagtggacttggcgtggcggtggagtggggggatccatcgggggcttgcagtgattcccttcttccttcggctttcctagcgcctccgccggcctagccgaccgcctcgagagccgccgtacacctccgcttcgcgccgccggaccccgtaaggagcccccgcaccgccgacctcgggaacccgccgcctcgcgcacctgggtgttaggattggagtacttcaaatgacaagggtcatccatgactctggagaaggcatgcagaaggaggcacttgctatggtatcttctgatgttaacttccccaagggccattttccagactacaagattgggccaaacaaccaaatcattgatccagaagagatacatgaggctgtccctttgaaggagatcgttgcgaaggaaacagcacagctgctagagcagcgaaggcggctttcagtgcgtgacctgaaggagaagtttgagaagggtctatcaggtgcctcaaaactgtctgaagaggctaagcgccgagaagcagcttcgttggacaggcaggttcttctgaagaagcttagagatgttttagacactctgaaaaagcgtgtggctggtagaaatagagacgatgctgat

SEQ ID NO: 391652 - DNA, 744 bp, Oryza sativa
  unsure (1)..(744): unsure at all n locations
aaggagaagtcttcctttggttttgttgactattatgatcggaggtcagcggctcttgcaataatgacccttcatggtcgtcacatatgtggccaagcaatcaaggtgaactgggcttatgcaagtacacagagggaggatacatctgggcatttccatatttttgttggtgatttaagttctgaagtgaatgatgcaactctttatgcctgtttctcagcatatccttcttgttctgatgctcgagtcatgtgggataacaaaaccggacgctccagaggttatggttttgtctccttccgtaatcaacaggaagctgagactgctataactgaaatgactgggaaatggcttggaagcagacaaataaggtgtaattgggcaacaaagaacaatgcagaagagaaacaagaaactgacaaccataatgcagttgtactaacaaatggtagttctagtaatccaggaatggaggcaagtcaggacacccgaaagtaaagagaatccagagaacaaccctgattgtactacggtgtatgttggcaaccttggacatgaggttaaccgagatgagcttcaccgccacttctataatttaggtgttggggctattgagggaagttcgcgttcaacaggataaaggatttggggtttgtgagatacagtaaccatgggcgaacagcatttggcctattcagatngnccaatggattggtaatncgtgggaaaccgnttaagtcccct

SEQ ID NO: 391653 - DNA, 900 bp, Oryza sativa
gcaaaatttgtaaggtggattctgtaacacaatccaccttacaaattttgcaccaaaaggaaggtggattgtgttacagaatttaattttggtgcccatattggaggaaaaaaacacaaggcaaaaaagctggagattcttggtaatagaaacaatgcaagacctgccactggcaatcaatgtacaggtaatagaaatcccagaccaaatggcaacgcaggttctggaagcagaaacaatgaaccaaatgtgtttaatagcaatattgcccaaccaagcagtgacactttctctggaagtcaaaccaacggaacaattggaaatcctcacaaggaaatgtcatctgatggtgatggaataagcaatagcaaactagagcaaaattgctgatactggatcatctgaacacaagtgatgaataaagatacttgaagcttatggttgaaccggttatagcatacttcaggaacatcttcccagttgtccccatgtgtgtgtcatgccacaagtgcagccaaggatttgagcaccacactttgggcaaagaaacgggaggtactgcagctgaactgtggcgtgctgtcattcagtaaagaaacaaacttggctggaaccaaacaggtctttaacctgctgatgtacatagttttctctttacactagttgtcttattttttgttgcaaatcatgtagaaataaaaaaaaatccttgcttggatgatggtatcttgcatgctttagcttgaattgctctggaaattttatctggtcagtaagacagtttctggttatcactcttctgtcttctccagttttctttggtcataattttgcttttagtttgtatagttcaaatatcataatttattgcaatgtacctttgataaaaaaaaaaaaaaa

SEQ ID NO: 391654 - DNA, 542 bp, Oryza sativa
  unsure (1)..(542): unsure at all n locations
ttcggcccggtgctctactgcctcgaggtcgccctgtaccaacgcggcggcggcggagacggcggtggccccgtcggggtccagagggtgggggagatgatgcggcagctcaagtacgtgcggggcctggagttcgcggcgggggtcgggtacgtggacttcctctcgcgcgtgaaccgggtggaggacgaggcccgccgcaacgggagctgggccgcgccgcacccgtggctcaacctcttcatctcctcacgcgacatcgccgccttcgaccgcgccgtcctcaacggcatgctcgccgacggcgtcgacgggcccatgctcatctaccccatgctcaagtccaagtgggacccggccacgtcggtggcgctgccgaatggcgagatcttctacctggtggcgctgctccgattctgccggccctacccccggggtggcccgccggtggacgagctggtggcgcagaacaacgcaatcattgacgccctgcggtccaacggctacgactacaagatatacttnccgagctaccacgccca

SEQ ID NO: 391655 - DNA, 714 bp, Oryza sativa
  unsure (1)..(714): unsure at all n locations
gacggggaagctggtctntttgtcggagcagcagctggtggactgcaacactattacggcggcttgcaacttagggtcgtacgggccgggcgtacaaatgggttgtcgagaaccgtggccttcacccacggaaggcggactacccgtacacggcgcggcggggcccctgcaaccgcgccaagtccgcgcaccatgccgccaagatcaccggcttcgggaaggtgccgccgcggaacgaggcggcgttgcaggcccgccgtcgctcggcagcccgtggctgtggccatcgaggtcggtagcgggatgcagttctacaagggtggcgtttacacgggcccgtgcggcacgcgcctagcgcacgccgtcaccgtcgtcgggtacggcaccgacgcgtcttccggcgccaagtactggaccatcaagaactcatggggccagtcatggggcgagcgcggctacatccggattctccgcgacgtcggtggccccggcctgtgtggcgtcacactcgatatcgcctacccgaccctgaccctgtgaacgaagtcaacgaacggcatgaaaagacgcgcagatatgactatatcactgtacacacgactaccctactataccgtgagtgtctgccaacgagacgtatccactatacatgtatgaattgtggaccgtgcctaaataaaatgcatgctgcgcgcgtaaaaaaaaaaaaaaaaa

SEQ ID NO: 391656 - DNA, 636 bp, Oryza sativa
  unsure (1)..(636): unsure at all n locations
gcctatttgttaccttctcgatagcctcctcctctaccatcatctctcccacaaactcatcatcgtgtagttttaggccatctgagggcctttgaatggctctcggcctccttcatttttcatagcatttgtgtagtgtgtgcaaatccatcatcgcatcttcatatctgaagaaatgaaggtgaccactcagctcaagcccatggcctcctcgtcgacgtcgccgtcgccgtcgcggctgccgcggagcgcgagcggcaaggcgcccacctcgccgccgtccagctccaacgcctcgcgccgccaccaccagcagccgccgcgggcctcggcgtcgacgcccgccaccccggcgccgtcgcgccaccacctcaggtcgctgtccatcagctgcatgacgatcaggaccgacgacgactcgccgccgccggccgccacccacaaggacaaggcggcgacggccaagccgctgtcctactactcgtcgatgctgtcgccgaggaagctcatgcagcgcgcgtcccgcgcgttccgccgcagcaagtcgtctcgccggaggaagagcaaggacgacgtcatcctcggcgtcngcggcggcggcggcgacatctcggcctcggtcaacggcaaggggct

SEQ ID NO: 391657 - DNA, 464 bp, Oryza sativa
cgaccacctttcatcccaacgcacatacgcacctacgcatcactcaatcgatcaacaatggcgtcgtctccactgccggcgttcacggtgcggcgaggcgagccggtgctggtgacaccggcggcgccgacgccgcgggaggtgaaggcgctgtccgacatcgacgacggcgagggcatgcggttctacagctcgggcatccacctgtaccgcaacaacccggccaagaaggggcaggacccggccatggtgatccgggaggcgctggccagggcgctcgtcccgtactaccccctcgccggccgcctccgcgaggaggccggccggaagctcgtcgtcgagtgcgccggccagggcgtcatgttcgccgaggccgatgccgacctcaccgccgacgacttcggcgacgtgcagagcccgccgttcccttgcttcgagcggtcatcctcgagagcccaccgtcg

SEQ ID NO: 391658 - DNA, 384 bp, Oryza sativa
  unsure (1)..(384): unsure at all n locations
cggacgcgtgggcgaagcccccgcgacgatccatccatcgatcgcgacgccgagggagcgagcagcgccggcggcaactccggtagctcgctcgcttccccggcccggccggaagatatggccgatcacgccgtggtggtggacgacggcggttcacgaaggatgaggccggcgtccctgtcgtcgtcgtcggacgccgaagacgacgacgccggcagcaagaagcagttcctgcgggcggcgggacgagcgctggaggcggcgccgcccgtccgcggaaggccggggaggccgtcgcggccgntgaggatgttccacaccatgtcccggtcgctcccggtgctgacgccggggtgcgggcggttgcagccggccgggggcggc

SEQ ID NO: 391659 - DNA, 841 bp, Oryza sativa
cgatgacactggtggtagccccgagaatgatgatgatggagttttggatgattgggaagctgttgccgatgcactctcagtggatgacaaccataatcaccaggatccagtgccggcagatccaccagttgtacctgcatcttgtccagtgcccgctaatgcagcaacaaggcaagaaccaatcaagagtagtacaagagcttggagcccagatgatgcattccgtccacagagtttacccagcctctccaaacaagtcagctttccagctagcatgggtaactgttgggtggcaatggggataggatctgcacaaaagggagtcccctcaaagccgacatcctgccctatatgctacgaggaccttgatccaacagattcaagcttcctcccttgcccctgcggttttcatctgtgtctgttctgccacaagagaattcttgaggcagatgggcgctgtcctgcctgcaggaagcagtacatctcagcttcttcaggtggagaaacggttggaagtgaacgtgagatggggaatttgcgtctgtcccgttcttgtagtatgggtccaagatactaagatggcagggttatgacctagttaatcatcacagttcttctctatgcatggtactgtttggtatgttacctacgtttgccttttcatataaagaaatgtgaatatcggcataggctgtttaatcgtaatagaaagttccccagtaatttgttgacttttgatgagtttgctttgtgtatggtgaatatgttgctgagaggaccctttgttattcatggtgtgggagtctataaataatagctacacagggtgttaaaaaacaaa

SEQ ID NO: 391660 - DNA, 1225 bp, Oryza sativa
  unsure (1)..(1225): unsure at all n locations
aattcggcacgagtggaaaatggttccttgtgggatcttctccacggtccatcaaagaaagtgaagctcaactgggacacaagactgaggatcgcggtcggagctgcacaagggctggcctatctccaccatgactgcaaccctcgcataatccacagagatgtcaagtcctccaacatcctgctcgacgagaacttcgaagcgcacctctcagatttcggcatagccaaatgtgtcccctctgccaagtcccatgcctccacttatgtgctaggaaccatcggctacattgatccggagtatgccaggacttccaggctcaatgagaaatctgatgtgtacagcttcggcatcgtccttctggaattgctcacagggaagaagccctcgcaacgaatcgaacttgcatcaattgtactctccaaagctgatgccacacagtcatggaggcattggcctcggaggtgtcagtgacgtgcacggacatgggactggtcaggaagccttccagctcgcccttctgtgcaccaagaggcacccttcagaccggccgaccatgcacgaggttgcaagggtgctgctctccctgctgccggcctccgccatgacaacgcccaagacggtggactactcccggttgctggcgtcgacgacgacggcggccgacatgcgagggcacgacgtgaccgacatcggcgacaacagctcctccgacgagcagtggttcgtcaggttcggcgaggtcatatccaagcacacaatgtgatcttctccaaacctccaaaattttctcctccccaagatgctaaaaggatagtagccacagtgccaggaaatagtagctagatgtaggatctgaagttagatgaccatgatgatgatgttaatgccattgttcttgactctttcttcttcttggtgttgatctaggattgcccaaagattgtccctaggaatttgcagtgacatactagtgttgttcatggtattcaagagagagtgagtagatcagtgtcaggttcagagatgtctcgtgagcgccatgaagtcgccgtctttatgatgtaatatattttgatcagagaggcagagggaggccatcagttcttggatcctggggtgtgtgacgacgccgcattgaattgaaaccatgcattcctgcatcgacaggattgtgctaatgtaaatgccctttttttgacggtnnnnnnnnnnnnnnnnnnnn

SEQ ID NO: 391661 - DNA, 561 bp, Oryza sativa
ccacgcgtccggtcgatctagggttagtgaggtgaaggggggcgattttgctcatcgccctccgcctagatcgaatccgaatcccgcctcctcctcctcctcctcctccccccgcgccgatcttgccccgctccctcgccgcagctgcgggcttgccctagcccgccgcatcgccgacgtactacgcccgctcggctccaggctccagatccggcctccagggcgtgcccgctgctggacggcgctctcccgcgtccgtggctacctcctcctccgggtttgcgttgccgtcgccgaagcgatccgttggtggattgtgtgtagctctgtaacaaaggatcttggtccataggagtgaaccagaaggtacaaaacttcttggctattatgacatcggtgggtctagtagattcttcatcaggtttcccggaaacgagtactagtggagccactgatcgtctgacagatgatatcagcgagatgagcataagagatacggaagttgaagctgtagtggtcagcggcaatagtatggacataggtcacactattgtgacaact

SEQ ID NO: 391662 - DNA, 477 bp, Oryza sativa
cccacgcgtccgcggacgcgtggggtttgcttctgcacacgtcgctcgaggccgcagaaagctgcgtcctttacagctggccacggtggagttgatcggttgatggcagcgagcggcggtgggtcgctgctagagagacgaagctcggtgcgacggtcgcagagtatggtgagcgaggagggccggggcacgccggccgatgaggatctcggcggcggcggcacgctcaagattggcgccgggcgcgacaaggacagcgcggcgcccaagtcgcggctcgccaagggcaccggcgaacacggcggcggaggaccttccgagatggagctgatgaaggagaagttcgccaagctgctgctcggggaggacattgccgggtccgggaagggcgtgccgtcggccctggccgtgtccaacgccatcaccaatcttgcagcttctgtggttggtgagcaacggaagctggagcccatggcg

SEQ ID NO: 391663 - DNA, 620 bp, Oryza sativa
  unsure (1)..(620): unsure at all n locations
gttcactgagggaaatgagaggggtgtttggttgaatgacttccagtatgctatttttggtcttggcaatcggcagtatgagcatttcaacaaggttgccaaggttgttgatgagctcctagttgagcaaggtggaaaacgtcttgttccggttggtcttggagatgatgatcaatgcattgaggatgacttcaacgcatggaaagaaactctctggccagaattggatcagttacttcgggatgaaaatgatgtttcaacaggcactacctacacagctgccattcctgaataccgggttgaatttgttaagcctgatgaggcagcccatttggagagaaatttcagtcttgcaaacggttatgcggttcatgatgctcagcatccttgccgggccaacgtggctgtgcgacgggaactccacactcctgcttctgatcgttcatgcactcacttggagtttgacattgctggcactggtcttacgtatgaaaccggtgaccatgttggtgtatacacagagaactgcctcgaggttgtagaggaggcagagaggttgttaggctactccccagagacttntttcaccatccatgcagacaaagaggacggtacaccac

SEQ ID NO: 391664 - DNA, 514 bp, Oryza sativa
atcgaaaccaccagaccagatctcatcccgacttcccgagcaccagcaccatccgaggaagaagagtcttcttcccacgcggcttgtccgagccgagcgaatgcgattgtaaagcaccgtcgtgaacctgacgacgagctccaggcggcggcgatggggtgctccttctccgggctgaacgcgctctacgacaccgtcggcggcggcggaggcgacatctgggtcaacgactaccgcttccgcgtcgtccgcagctcggtgacgccgggccagcggggtccttcgtcttccttgtcaaggaggttgtcgccgccgccaccgcctccgacggcactggtggggcggtgcccggcgcctctgggctcgccaagaagaagggcatcgatccatcccacatctcagctgatggaacatatgccttgcaagaaagttcttattcagaatgaacagcacttagagcaagttcgacaggagatccgagtgtcctctcaattcagtcatccaaatctacttc

SEQ ID NO: 391665 - DNA, 887 bp, Oryza sativa
  unsure (1)..(887): unsure at all n locations
cccacgcgtccgcccacgcgtccggttctggacggtgtacgcccagatgaccaccttctccgtgtcccaggcgaccaccatggaccgccacatcggcgcctccttccagatcccggcgggctccctcaccgtcttcttcgtcggctccatcctcctcaccgtgcccatctacgaccgcctcgtcgtgcccgtggcgcggcgcgccaccggcaacccgcacgggctcaccccgctccagcgcatcggcgtcgggctggtgctgtccatcgtcgccatggtgtgcgccgcgctgacggaggtgaggcggctccgcgtggcgagggacgcgcgcgtcggcggcggcgaggccgtgcccatgaccgtgttctggctgatcccgcagttcctgttcgtcggcgccggcgaggcgttcacctacatcggccagctcgacttcttcctccgcgagtgccccaaggggatgaagacgatgagcacggggctgttcctgagcacgctctcgctggggttcttcgtcagctcggcgctcgtcgccgccgtccacaagctcaccggcgaccgccacccctggctcgccgacgacctcaacaagggccagctccacaagttctactggctcctcgccggcgtctgcctcgccaacctcctcgtatacctcgtcgccgccaggtggtacaagtacaaggccggccgcgccgccgccgccggcgacggcggcgtcgagatggccgacgccgagccatgcctccactgatccacaccgtccatccatccatccatcagacggctacgatttcttcttcgcatcttgtactatatatatactagtatactactagtacgtacgtacgaagtgtgtaccaagcgaggcggtatncgatacgata

SEQ ID NO: 391666 - DNA, 1179 bp, Oryza sativa
gcttggcctcggaaacaccgaggactccttgctcccacaaaagattcaagcttttgagggtgtccgtgtaaaaatgattgctgctggtgccgagcacaccgctgctgtaacagaagatggtgatctctacggttggggctggggtcggtatggcaacttgggactaggcgatcgcgatgaccgcttaatcccagaaaaagtttcttctgtgaatggtcaaaagatggtgcttgtagcgtgcgggtggcgccataccatcaccgtgtcctcctccggtagcatctacacatatggatggagcaagtatggtcagctagggcatggtgattttgaggatcacctggttccacacaagttggaagcattgaaggatactactatatctcaaatttcaggggggtggaggcatacaatggcacttgcagcagatgggaaactctatggatggggatggaacaagtttggacaagtcggtgttggcgataatgaagatcactgctcccccggtgcaggtcaatttcccaaacgaacagaaagttgttcaagttgcttgtggatggaggcacactcttgccctgacagaagccaaaaatgttttctcatggggaaggggcaccagtggacagcttggccatggtgaaatagttgataggaacatacccaagatgatcgatgccttgagctcggatggatcagcttgcaagcagctggaatcatcaaaagccgtcccaatgtcagctaaaggttgggtctcgccatcagagcgatatgccatcgtgccggatgagaaggctggaaaaggcatccctgctggcaatggaacagagactcatgtgccccaaggagatgtgaagaggatgcgcgtctgattcagcaacatatacgatccagtgctcttcttccacttgatatcctctattagttaaccttagaattagcatcatatatacatataataaccttggggcagcatttatcctctaccatcttatgacatatgctgcccagtctttaattagtgtgttgccttttcatttcttaaaataatcagtgatattattcacagtgaggttggtcatgtatgacagtatgagtaactatggactgtcataggtatcaccatgggaaaaaaatcagtcagtttattattctgcttggcattgcaaaaaaaaaaaaaaa

SEQ ID NO: 391667 - DNA, 492 bp, Oryza sativa
gctctaataccaccaccgccgcgccggaggtggaagacggacggggtagagttggggtctcgcggtgagccgattcctctctagtggtcgcgcctggtgtgttcgccgacgacgccggcgtcgcgtcagccatgggtgggctcgaggagatcaagaatgaggccgttgatctggagaacataccgatcgaggaggtgttcgagcagctgaaatgtacgcgcgaggggctctcctccgaggaggggaaccggcgtatcgagatgttcggccccaacaagctcgaggagaagaaggagagcaagatactcaagttcttggggttcatgtggaacccgctgtcgtgggtcatggagatggccgccatcatggccatcgcgctggccaacggcggcggcaagccaccggactgggaggacttcgtcggtatcattgtcctgctggttaatcaacttccaccatctccttgattgaagagaacacgccggcaacgcg

SEQ ID NO: 391668 - DNA, 495 bp, Oryza sativa
  unsure (1)..(495): unsure at all n locations
cggacgcgtgggcggacgcgtgggggaagaagaaataatcaatggagtgttgggagaagaagccaaggaatctgggtggctcgctgccggtgcccaacgtgcaagacctcgccgcccgcccggaccacctcacgcccaccctcctccgccgctatcttcgcccgcaccacctgtccctgcccgccgacgaccaccatgccatggctatgatacctgtcgttgactttgccaggctcatcgatcaccatgaggaggccgccaagctgaggcacgcctgcgaggagtggggtttcttccaggtgatcaaccacggaatcgccgacgagacggtggaggagatgaagcgcgacgtcatggccttcttcaacctcccgctggccgacaaggcggcgttcgcgccagcagccggaatggatcgagggctacggcccaggcgttcgtcacgtcggaggaccagacgctggactgggtcgacctctacttnctcaccacgca

SEQ ID NO: 391669 - DNA, 580 bp, Oryza sativa
  unsure (1)..(580): unsure at all n locations
gcggccacgcgtccgcccactcggtcgcaaagcagaagcagaggcagaggcagcacagcttgatcgttcttccatcgatcgatcggcagctagcgctcacagtactctcgatcgctcgctcgcgctggtccgttgattcgttgtcctagatagatagctaaaggggggccatggcatcgacgacagcgccgtcgaggaccaactctcgggtgaactactcgaacgagatccatgacctctccaccgtgcagagcgtctccgccgtccccagcgtctactaccccgagaaatccttcgccgacatcttccctcctaacctcctcaagaaggtgatatcggaggtggtggcgacgttcctgcttgtgttcgtgacgtgcggggcggcgtccatctacggcgaggacatgaagcgcatctcgcagctggggcagtcggtggtcgggggcctcatcgtcaccgtcatgatctacgccaccggccacatctccggcgcccacatgaacccggccgtcaacctctccttcgncttcttccggcatttnccctggattcaggtgccgttctactgggcggcgcagtt

SEQ ID NO: 391670 - DNA, 322 bp, Oryza sativa
gtgtgggcacacgttgcacacaggagtttgaggttgaggaggagatcgagatggtgcccgcggcgaggagcgggtggccggcggcggcggcggtcctggtggtggtgctggtgctgtcctcgccgccggggactagcacggtggtggtggcgagggcggcgctgtcgtgctcgacggtgtacaacacgctgctgccgtgcctgccgtacgtgcagtcgggaggggcggtgccggcggcgtgctgcggggggatccggagcgtcgtggcggcggcgcgcaccacggccgaccgccgcgccgcctgcaactgcctcaagaacgt

SEQ ID NO: 391671 - DNA, 478 bp, Oryza sativa
gcggaggcgcggaggagagaggaggaggaggaggtccgggttggtctccgccatggcgagctcgtcgtccgaccccgacaagctcatgtccaaggccgacaagctaacaaaattgagcttcacgagatggaatgccgattggaagagtgctacctccttgtatgagcaagctgctattgcttataggttcaaaaaggagaatgagaaagcaaaggatgcctttgagaaggcttcaaaaggacaggaaatgatttcttcaccctgggatgctgctaaacacatggaatctgctggtgctttagcgaaagagcttggacgctggaatgaagtttcagatttttatcgcagagcatcagaattctatcgtgaatgtggaagagcacaacctgcctctgatgctcttgcaaagggtgccagtttcttggaggataacactccagacgaagcaataaaaaatgtatgatgagggctgttcaat

SEQ ID NO: 391672 - DNA, 866 bp, Oryza sativa
gccgggcggtggccaagcacgtggcggcggcggcggcgagcagcatgaggaacggcgtgccggtgttcgtgatgatgcgcggtggacacggtgagcaagtgcgggagcgcgctgaaccggggggaggcggtggcggcgagcctggcggcgctgaacagcgccggcgtggaggggatcatggtggacgtgtggtggggcatcgtggagagcgagggccccggccggtacaacttctacggctacgtggagctcatggagatggcccgcaagaccggcctcaaggtccaggccgtcatgtccttccaccagtgcggcggcaacgtcggcgactccgtcaacatcccgctcccgaggtgggtggtggaggagatggagaaggacaacgacctcgcctacaccgaccaatggggacgccgcaacttcgagtacatctccctcggctgcgacgccatgcccgtcttcaagggccgcacgcccgtcgagtgctacaccgacttcatgcgcgccttccgcgaccacttcgcctccttcctcggcgacaccatcgtcgaaatccaagtcggcatgggccccgccggcgagcttcggtacccgtcctacccggagagcaacggcacctggaggttccccggcatcggcgcctttccaatgcaacgacaggtacatgcgtagcagccttgaaggcggcggcggaggcgaggggcaagccggagtggggccacggcgggccgacggacgccggcggctacaacaactggccggaagacacggtgttcttccgcggcgactgcggcgggtggagcaccgagtacggcgagttcttcctgtcgtggtactcgcagatgctgctggagcacggcgagcgc

SEQ ID NO: 391673 - DNA, 283 bp, Oryza sativa
tttacatgctgccactctcaagaacctgactttggatcgctatcccttttgcttcttattagtgctcacggaaagaaagctatagcagtagctaaataagccagagagaggctaagagagagagagaggtgaggggagagaagaaatcctcgcagaattcgagcaagaaccgagggagatcgatcgcctcttgtcctcgttccgaggcagagatcgacctgaagtgagctgagctgcggcaaggaggaggaggaggaggaggagaaggagattggagatgatg

SEQ ID NO: 391674 - DNA, 657 bp, Oryza sativa
  unsure (1)..(657): unsure at all n locations
gccaccaccaccaccaccccccgttttctttctcccagggcccctctccgcggcctttgccgccgggcggccgtggattccccccccggtgttccggggcacaaccggtggccccggcttccggtggcccccaggatgatgctcgacttcttcgacttccgccggcgttgggggcaaaatgcaccgcaacaacgtgcggggggggccctcgcctgcagcgcgcaagacggtggtgcccgcaggtacgcccagcggcgggtgggcgagaagaagatgtaaacctgaatgtggatattcaagttttagagggaagagagccaccatggaggatttctatgatggtaagttaactgaaatcgatggacaggctgttagcctatttggtgtatttnatggtcatggaggaccacgtgctgctgagtatttgaaggaaaatttgttcgaaaatcttctgaaacaccctgagttcctgacagatacaaagcttgccataagtgaacatatcagaaaacagatacagatttcttagaatcagaatccaatgccttcagggatgatggttcaacagcttccactgcagttttggtgggtggccatctatatgtagcaaatgttggtgattncccgtgctgtngtttcaaaagctggtaaagctat

SEQ ID NO: 391675 - DNA, 580 bp, Oryza sativa
cttcctccgccgccgccctcctctccgggaagaagagaccagagcgagcgcgcgcgccgccggagcaaacccctcctcctacccttcagccatggtgctctccaacgacatcgacctgctgaacccgcccgcggagctggagaagctcaagcacaagaagaagcgcctcgtccagtcccccaactccttcttcatggatgtcaagtgccagggctgcttcagcatcactactgtgttcagccactcccagacagtggtggtctgcccgggctgccaaaccgtgctttgccagcctacaggtggaaaggccaggctaacggaggggtgctccttccgccgcaagaatgattaagatctaaatatctgaaagcaaaaaaaagaaaaggcttgaacgagcttagtttctccaggatgtagtctgaaaattttgcaatgcctgtcaagtgaaccccatgtttggtaatttaatctctgggattatgtcatgactctggtactttgttggctggtctggagagtaagatgagatgtagggctacctgaacaaacttatgcttggcatgaatgaattgatattcct

SEQ ID NO: 391676 - DNA, 449 bp, Oryza sativa
ctcacactctacttgtactaggtagatcgctagaacaatggcgtccggtggcgaggagaagaagagcaggatcctggtggtgggcggcacggggtacatcggccggcacgtcgtcttggccagcgcgcggctgggtcatcccaccaccgccctcgtcagggacctctccccctccgaccccgccaagtcgcagcttctccagagcttccgcgacgccggcgtcaccctcctccacggcgacctctacgaccacgccagcctgctcagcgccgtccgcgacgccgacgtcgtcatctccacgctgggcgcgctgcagatcgccgaccagaccaagctcatcgccgccatcaaggaagggcggcggtggcaacgtggccgggttcctgccgtcggagttcgggctggacccggaccacacgggcgcggtggagcccgccaggttcatcttt

SEQ ID NO: 391677 - DNA, 357 bp, Oryza sativa
  unsure (1)..(357): unsure at all n locations
cgttcccctgtttccctcctctcgtgctctcgtgttctacttttgctagtcctcccaccctacttcgatggcgaaggtgttggctaccgtgctctgcgccgcgctggccttcgcggcggccgtggccgtggcgaacgccagggacctcgtggtcggcggcaacaacggcggcgggtggaaggtgccggcgcaccgacgcgctcaacaggtgggccgaggccacccgnttccacatcggcgacaacctcgtgttcaagttcgacggcgcggcggacgcggtgctggaggtgacgcgggacgactacaaccactgcgncacggggagcccggtcgncacccacaaagccaccggcggcg

SEQ ID NO: 391678 - DNA, 467 bp, Oryza sativa
  unsure (1)..(467): unsure at all n locations
gcgaacaancgcgtcacctcctctccccgaacccccaaccctccagaaccttccgcctcccgccggcgccggcgccgccgactcggccgcggaaaccctagcgtgcgctcgcgcccgccctcgctcgccggccacctccggactccgcctcctccgcctgctcctcgtctccggcccctccgccgccgtcgaccggtcagatctcgacgccgtcaagccgcgatggaggactgggattctgaagactttcagcccgcagtgcctagtgcaaaagctgagccgcttaaaagtaagtgggcagatgaagatgtggaagaagatgatgtaaaagaatcatgggaagaagaggaggaggagaaacctaaaccaccacctgtagaaaagactgcaccaaaacctagtgggaaaggtgctgcgaagaaaggaaaacaacaagcatcaactagttctgaagtagttcaagatga

SEQ ID NO: 391679 - DNA, 560 bp, Oryza sativa
gcacgccctcgccgccatgtcgtccgccaccgccgccgccaccgccaccatcgccgccgccgccgcgaagctcgccgccacccccgcccccgccccctcccggcgccgcctcacgctccgcgggaaccccaccgcgcgccgctgcgtcgccgcgatggccgtgtccacccccaggtcggccgccgccgccgcgttcctcgagcgccgcgagtcggagcgcgccctccacttcgtcaagtaccagggccttgggaacgacttcatcatggtggacaatagggattcggccgtgccgaaggtgacgccggaggaggcggcgaagctgtgcgacaggaacttcggcgtcggcgccgacggtgtgatcttcgtcatgccgggggtcaatggcgcggactacaccatgaggatcttcaactcggacggcagtgagccggagatgtgtggcaatggagtccggtgctttgccccggttatagctgagcttggaaacctacagggaacacaatagtcaaaaattcacactggcgctgggcttatcaatttctgatatacaaaatgat

SEQ ID NO: 391680 - DNA, 442 bp, Oryza sativa
ttagagaagcaaccagacactgcacacatcatcatcttctcccccgagaccgggtgatcttgggttagcttagctagctaaattaagctgcgtgcagcatggggctcctcgaccagctctgggacgacacggtggccgggccgcggccggactccggcctcggcaagctccgcaagtacgcctccttctccccttcctcctcctcctcgacgatggcggcgtcgccgtcgcccatctcggcggcggcggcggcggccgacgcgccggccgtgacgcgcagcatcaccatcctccgcccgccggcgctgtccgtgacgtcgccgcgcggcagcgagtcgggccccttcacgccgtcgtcgccggccagcgtcccggactcccccttcggctcagcaccgacgctcaagggatcggagggctggaagaagctgcgccgtggggc

SEQ ID NO: 391681 - DNA, 519 bp, Oryza sativa
tttcttctaacccggagcctctcgttaccgagagagagagagagagagagagagagggcagtgcaggtgtcgctggccatggcgaggaggagcagcagcagagcgtgcgcggccatggcgacggccgccgtctttgcgctgctggccgcgacggcgacggcgtcggggctcgtacgggtggagcacccggccaagagcgacgggtcgctgagcctgctcgtcgtcggcgactggggccggaagggcacgtacaaccaatccagggtcgccgagcagatggggaaggttggggagaagctaaatatagacttcgtcatatccaccggtgacaatttctacgaggatggactcactggcgtcgatgaccaggcgtttgaggaatcgtttaccgatatctacacggcaaagagcttgcagaagccatggtacctggtgctgggaaatcatgactacaggggtgatgtgctagcacagcttagcccagtcttgcgaaagatcgaccagcgattcatttgcatg

SEQ ID NO: 391682 - DNA, 445 bp, Oryza sativa
atgaggatgcacaccattccattattgatggcagtgaagtgcttgtagattactacaggcaacaacttatgcctggatggataccgaggagatcaggaggagggcttggagggaagaaagaatctggccagcttcgatttggaggtcgagagaggccatttcgtgctcccttgaggccaattccgtatgatgaactgaaaaggcttgggatcccaccaccacctgaagggcgatacatgacacgttatcaggttcccccaccaccaagacgaaaaagcagtgatatctacagggaagagtcacctcccaagagaagatccaaagacagggttgatagcagtcactacagaagatattgtagcccaacccaagacgacgacagcacggtcagcacccataggccggaaggtagccatgaccggcgagaagaaaccgagaggaggac

SEQ ID NO: 391683 - DNA, 586 bp, Oryza sativa
  unsure (1)..(586): unsure at all n locations
ntttcggtttcgtgggcgggggagagatggcgccggtggaggatggcggcggggtggagttccccgtggggatgaaggtgctggtggtggacgacgaccctacatgcctcgccgtgctcaagaggatgctcctcgagtgccgctacgacgcgacaacttgttctcaggctacaagagcattaactatgctgcgagagaacaggcgtggttttgatgttataattagcgatgttcatatgcctgatatggacggattcaggttacttgaacttgttggccttgagatggatctcccagttattatgatgtctgctgattcaaggacagatatcgttatgaaaggaataaaacatggagcatgtgactacttaattaaacccgtcagaatggaggagttgaagaacatctggcaacatgttataagggaaaagtttaatgaaaacaaggagcatgagcattcaggtagcctagatgatacagatcgtaccagaccaaccaataacgataatgagtatgcttcatctgcaaatgatggagctgaaggtaggctgaagtctcagaaaaagaaacgggataaagatgatga

SEQ ID NO: 391684 - DNA, 518 bp, Oryza sativa
accatgggcaccctcccaccattcccgcccctcctcctcctcgtcgccgtcatcttctccttccgctcctcgtcgtgctttgctgtgaccagccatgaggcggcggccatcgcgcggcgccagctgctcaacttcgagaagcacggcgaccacgtccacatcgatatcgacatcgagatcaaggtgagcaacccgcggctggcggcggcgcacagggcgctgcacgcgctgaagcgggcgctctactccgaccccggcaacttcaccggcgactgggccggccccgacgtgtgcgcctacaacggcgtgctctgcgcgccgtcgccggacaacgcgtcggcgaggcgccgtcgcgtcgctggacatgaacgccgccgacgtcgcgggctacctgcccagggagatcggcctcctgtccgacctcgccgtgctccacctcaactccaaccgcttctgcggcgtcatccccgaggaggtcgccaacatgacgcggctctacgagctcgacgtcagcaaca

SEQ ID NO: 391685 - DNA, 492 bp, Oryza sativa
  unsure (1)..(492): unsure at all n locations
gcaaacgccacagccactccaccagaccaccaccaccaccaccaccccacccagctggtgcgcctccaagaattcctcctcctcttcctcggattccttccccctcttcggcggcgggctcccccaccggcaccggcgtccccgctcccggcgtcgccattggcctcctccctcgtctctgctcgacggaatatgaagttaaggccaaaaagacctggatggaagtcacttatgcctctgcagttgagcaggaaatctgcactgcgtctctttttgtttcccaaggttcaggctgcgggtcaatctccagatgacacaccagtttatcttaatgtgtatgatttaacacccatgaatggctatgtatattgggcagggcctggtatatttcactccggaattgaagttcatggtggttgaatatgcttttggagccatgaattccccncaagtggagtttttaagtgaaccttggnaattccctggtttaag

SEQ ID NO: 391686 - DNA, 390 bp, Oryza sativa
cttctcccttcactccgctagggttttaccccgcgatggccgccgccgccgccgccgccgcgcggaggctcctctcccgccgcgccacctccttctcggcctccgctctcctccgccgcggcggccccggtgcgccggagtcgctgctgcgccccaccgtcgccgcggtctcgcgcgtcggcttccttcgcgggttcgcgcggcggccgggcggcgatgggtactccccgatgcggtccggtggcggcggaggaggaggcggagaccgcgcgccgacggagatggccccgctgttccccgggtgcgactacgagcactggctcatcgtgatggacaagccaggcggggagggcgccaccaagcaccagaagaatgactgctacatcaaac

SEQ ID NO: 391687 - DNA, 576 bp, Oryza sativa
  unsure (1)..(576): unsure at all n locations
gattaaaaataatgatgaatttgaagttttctgtattatttcacgtgttatttctaggagcatacaaaacagcacaattcttggtgctgaatttacattgccagacaagtttgcaattaataataggnttccctaatatatatatacataccttgaacatataaaccctcatatacacccaagtagtgcagatgtccccgttgtgaaaccccttattcccaccattcaccagtagggccagttgggattggcttcagattcccaagcatctatttgaggggcattccatgaagaagattaccccttttatcaccaatcctatcaatcgcaaccgcaatggggccaaccccttactgcctttccttatgtgcaatggcccgcaattcctctgacaacaagctgtcctcgatgattacctgaattaatcgagtggcttcctgtgcaaataattcaacatcggctgctgcaatgctaaggcagcgagtgatgtcgatgacctccactgaccggccacagtatctgagcaacgataccaaagatcctcgagtgaggcacctgcaacccctgagcctgata

SEQ ID NO: 391688 - DNA, 350 bp, Oryza sativa
gaaagagaaatctcccgtcacttcgtctcctccgctccttgcgccgccgccaagacgagtcgcggctgaacagaacaggggaggggcggcgatctccatctggcgagcgagcagagcagggcgaggggaggggatcctggtcgtatattcacctaccttggagtaattcgcatacgtcacaagttaaaagatgggtatccttgagaggatcaaggagattgaagccgagatggctcggacacagaaaaataaagcaacagaataccatcttggacaactgaaagcaaaaatagcaaagttgaggacacaattattagagccccctaaggttccactggtggaggagatgg

SEQ ID NO: 391689 - DNA, 459 bp, Oryza sativa
cccacgcgtccgcggacgcgtgggcacgactcgtcgccgtcttgctctgctgcctctcgcgcccgcgcagcagtgagcagcagcaagagcagcaaaatggctctacccgggcgcctccgcgccctcatcctcgccgtcgcattgccgctgctcttcctgtccgcttcagaggcgggcacggtggggatcaactatgggagggtggcgaacgacctgcccaacccggcggcggtggtgcagctgatgaagcagcagggcatcgcgcaggtgaagctgtacgacaccgagccgaccgtgctgcgggcgctggccaacaccggcaataaaggtgtggtcgcgctgcccaacgagcagctgcttggcgcggcgtccgcccgtcgtacgcgctcgcctggtgcgccgaacgtcgagcgtatacccggcacgcaatcagggcatcgcgcggaacgaggtgtcgct

SEQ ID NO: 391690 - DNA, 511 bp, Oryza sativa
ctcctctctctctctcgacgcatcctccaacttgtgcacgtcttcctcctcgggctccatggccgagttccttcgccggccggagttttgtctgcccatgcacatatacacatcacgcggatcgaagatgggatgaacgtacgtggagcggtggaggtgcaaccggcaggcacggtggcatctcgatcgatctatcgatcgatgaggaggccacggtggcgtctcgatcgattcgcgacatgtgcgccgagatctatcgatgaagaggccggatcccgaccgtgatgcgcgtgcgggcgtgcggcgtcctcggcggcgccgatatgctttgtgggtcgggttatcaagtttggttgcatatctcggagctgatccctatcaacggaatggatttttgtgtacaacgacgagggggaagagaatcagatatccagttccggtggggttcatggccgcgagagccggatccgggcttcccattccacaagaggcctaactaggggggtcaata

SEQ ID NO: 391691 - DNA, 556 bp, Oryza sativa
  unsure (1)..(556): unsure at all n locations
ancnaagcgcgcaattaaccctcactaaagggaacaaaagctggagcttccacgnggtggcggccgctccgtccctccggcttccagtgcagcaactaatatagctgctgctccattctacttcactgcttgctacacacaagaacgtacgaagaacgaccaccaggccacgtacaactatatatctatctatgtctaatttgttccttgttcaaatcatcatatgtatctgcgtgccttaatttcctccttcatcccgtaaattaatgagatatatatgcatgcatatgattcagttccacgacgtaattaaagcatgcttcattcgtctacttgtatatgtgtatctgcataattgattaattaatttgtactcgatggatctcatcgtatatgcatcagtacgtactgcatctcgtcttttctgcatgcctgttaattctacacatactgtactagctagctcttgttcgatccatcggtcccaatcgtttgtactagctacgtactgtcttgttcaattgttcctctctctctctctaaaaaaaaaaaaaaa

SEQ ID NO: 391692 - DNA, 867 bp, Oryza sativa
  unsure (1)..(867): unsure at all n locations
cccacgcgtccggaaaaagtatcaatattggtgcattgttttcatgcctctttgcattcccgtcgtctgttctgaattggaactggcgattaatctggtggctgaagctccagaaagaaagggaaatgatgcaaaagaaggaaaagaaggaaaggaagaaagagaaaaggagacaaaagaaagctgcccagctgggtgagaaatatgagacagatgatcatcactctaagcatggccataagaagagaaagcactcaggctgtgaaatagttggcgaggagacaagaaaagtttgtaatgttaccatggagcatttggagaagagcagtctttctgaagagcatgaggctccttcctacagtcaggctttgcgttgtaccccagagagctcactggacagcactaagaggctgaggactgaagtgtcaagtagccctagtcaaaccagaaatggtgttaacattcgtgtaaagtttacacctacaaatcaaagaagagacccagaagcaacaacaggaatgtcaatgaaaccaagagttactgaacaatcaccagttcaaagaaaccgggaatgggatctgtccatgggccaataggaagagagagttccagcctcatgttcaacacagtgtcagtggtgaaacaagttgtctcccaacagaagaacatgtctataagggaatgggcaattgtttggatgagtcaagaaaagtccagtcagcagcatgatgcaaagtccatgccaagagtcaatatggtgcagagagttagaactnaagtcaacaccgnttgctgcgatgcaaagagttgatccgccttcatctgagaaggcagtgatgcaaagagctaatcctgcggcccacaaan

SEQ ID NO: 391693 - DNA, 563 bp, Oryza sativa
cccacgcgtccggttgaaatctgcacttaggcatgagaagggggaaaaggctatatactgcttgacctgtttaatttctctcatcgggcaggcccgctatcttcagtttcgtgattgtcctgttgaatggggatggtgtagagacctgcaatcatttatttttatttttaaaagccataacaggattgttcttgagcgaccggaatatgggtatgcgacatacttctttgagattgtgaaatcactgccaatacaatggcagatccaaaggatggttactgcaatgaagcttagtggttgtggcaggacagctctgattgaaaataggccattattgattggtgaagatttgacggaaggagaggcgcgggttttggaagaatatggttgggtaccaaattctgggcttggcacaatgctcaattaccgtgaccggtagttcatgacaggtggaacgagagatctggcacagattggaagacaaagataggaaagcttctgatgaatggtattccgagggccattgtcctatctactttcaactaaagtgggaaatggagatg

SEQ ID NO: 391694 - DNA, 457 bp, Oryza sativa
gcgtgcttttgcccaccgcttctccccccctcccgtccgcccttccctttccctcccggcgtgtggtggtcggaggttgccattcattggccgcccccaccatcgcgcccgccggtgaggagggacaccgccatcacattcttgctatatccaacgacctccattgattagctacgtgcgtgtgagaaactaatcaaccggccggcttgctggctttcctcatcttcaagatgcaccggtggttcattgccagctgcggagacatacgtgcggcggcggcgcgctcatcccgccgccgaggaggcgatgcgattgcgcccaagtcggcgccgccgtcgccgtcgccgccgccgaggctgaggaagacggtgtcggagacggcggcggtgatgctggccgtgcccaaagacgtgcaggagttccggaccatgccggcgtacgggaccaacctcgagca

SEQ ID NO: 391695 - DNA, 548 bp, Oryza sativa
tcgtgtcgccatcgccatcgccttcctcctcctcctcctccgccgccgcgcgcttcctcgccaccgcgcgcccagggccatcggcggcggacgccctcgcccacgcgcgcgagagaggggggcgagagattatcggacgagtcgctttgcggagctttctagaatggtggactgggcttcagatagcgacaatgataagttcgagtgggacacagacggtgaggctgagacctcatctgccccggccctaaggaacatagatgctcctggtccgtccacgaggctgccgcaggatgcaaatgggaaggccaacgggtcaggtgctttggttgctgaatttatgggaatgggattcccaaaagaaatgatcttgaaagcgattaaggagattggggatacagatacagagcaattgcttgagttacttctgacttatcaagcaataggcggtgacgcttcagtgggtaactgctttgcttcggcctgtgccccccagactcttgaagtcgacgaggagggagatgatactaattgggatgaatatgata

SEQ ID NO: 391696 - DNA, 1182 bp, Oryza sativa
  unsure (1)..(1182): unsure at all n locations
acaatttcaacaatctgctgggcaaggtcctacctctaacattccgcaacaacaacaaccttcccaaggtttgcagcagcatgataaccatactaatcagatgcctcaagcaagcatgccaagtatgagcaccggattacaatcctcaggtgcagctggtatccaacatttacctgcatccccagcaacaaactttggtgttccagcaacacagcaaaatgtcacaaatgcaccacaggctacctctaatttggaggttactcaaggaagcaattttaattctttgcagcatggttcaatgagtggtgctttgcaacagggaagcactgggcccatgcagggtacactgaatgcacaacagcaggccagtagtagcatgttatctcacaactcagtaggtacaatgcagggctaatgccaattccatggcaagccaacgcaaattcattacagcagctgaagcagcaacagcaggagcatcatatgatgcagaatcagcatatgaagcgtcaaatgtttcagcagttccagcaaaaacaaatgcttcagcagcaactcccagcacagcaacaattacagaaacagcagcaatcacagatgcaggttccacagcatcattctggaaatgatgcaaacgagctgaaggttagacaaggagctgcaatgaaacctgggatttatcaacagcacttggctcagcgcaataacttttataatcagcaaatgaaacagggcagtgctttcccaatttcgtcaccacaaaacctccaagcatcatccccccaaatttcacaccattctcctcaggttgatcagcacaatctcttgccgtctcaagtgaagaccgggacaccattgcagtcagctaactcaccatatatgccatctccatcgccacctgttgccccgtctcctataccagtggattcagagaaaccactctccaatttatcatcatcacttactaatactggtcaggctacacatcagcaaacaaacatggcgcctcagtcacaatcaatcgccgttaacactccagggatctcggcctcacccttgttggcagaatttacaagtgttgatgggaatcaggctaacatgccaacccaagttctaaccaaatcaagtgcagcaggaaggcctttagcaccgcttacttaaagcgttgcggncaacacaacg

SEQ ID NO: 391697 - DNA, 525 bp, Oryza sativa
cttgtcgtctccgcgcttcgctccggcctcccccacacagggcgtccgtcccgccggcgaggaggccgccgaaacggagcggtaccatgaaggcgacggtggcggcggcggtgggagccgcgggcacagcgggagcttctccagtcggcggcggtccagcgggagatgcaagtgctgctgcggggaggagggttacccgccttcgatcgagggagctagggctggaggcgacgacgggcgctgggggggatgtcgcgtcggatgatccggggccggctcggaagaaggggaaggtccagccggcgacgaagggagccaagggtaaggccgcacgagcggatccccctaccccgccgccgcgtcctagattgccgccgttccctaaatccggcgatcccatggattttctcaagtgggataaagagttcaggaggatctgcgctcttccagaacctgcaggtactgtcatcccttgcactgtcaggaggaagcctacgggccctcgcaccgtcagcatcacgggcg

SEQ ID NO: 391698 - DNA, 430 bp, Oryza sativa
gcgcccacgcgtccgcggacgcgtgggctcgcctccgccgcgtgctctccgcctacggcctcttgtatcccgcaaccaaaaactactcccaaaaaaaaaaaatttctagtatcacaccaaaagaaaaaagagaaaaaaaatttcccccaaaactccgcgagatctgcccgtgccgagctatataccaatccatcagctagggtttagagcagatttttttttttgtttcgcggaaaaaaattgaaaaagagagaagggtgagggagcgaggtcgagggatcggtgggcgatggcggcgcaaatggcggcggtggcggtgaacgggggctctccgggggctgtcaccgcggcggcggcggcgggaggggtcggcgtccccgtgggcctcgggggcggcggggcgcagtcgcttgtacgtgggcgacctgga

SEQ ID NO: 391699 - DNA, 577 bp, Oryza sativa
  unsure (1)..(577): unsure at all n locations
cggacgtgncagcgacgcgtgggcaaaaaaaaaaggaaaaaaaaacaaaacacaccaagccaaataaaagcgacaatgggatcgctcaccaccaacatcgtcctcgccgtcgccgtggtggcagcgctggtcggcggcgggtcgtgcggcccgcccaaggtgccacccggcccgaacatcacgaccaactacaacgccccgtggctccccgccagggccacctggtacggccagccctacggctccggctccaccgacaatggtggcgcgtgcgggatcaagaacgtcaacctgcctccctacaacggcatgatctcctgcggcaacgtcccaatcttcaaggacggcaggggatgcggctcatgctacgaggtgaagtgtgagcagccggcggcgtgctcgaagcagccggtgacggtgttcatcacggacatgaactacgagcccatctcggcgtaccacttcgacttctccggcaaggcgttcggcgccatggcttgcccggggaaggagaccgagctccgcagggccggcatcatcgacatgcagttaggagggtgcgctgtagtccccggtg

SEQ ID NO: 391700 - DNA, 878 bp, Oryza sativa
  unsure (1)..(878): unsure at all n locations
gccattgttgccatgctatatgttgggcgagggtctatcatcacaacctctattgagtgctatgctcttacatctgttatttctggctatgacagtgctggcactctactcaaggaatggtggtcaaaactgcataaaggctatcatccttacagcatccctatatgcattcttgtgcttggcaataggctatgttctgaatacaatggctatcttctaccgatcattagcggcaataccatacggcacaatggttgtcatgttcgctctttgggccttcatttcttttccgctggagcttctgggaactgttgctggtaggaactgcagtggtgctcctaacaatccctgccgagtcaagactattccacggcctattccagagtagaagtggtaccttacaccttctgttatctcattgatgggtgggctgcttcccttcggcagtctcttcattgagatgtactttggtgttcacgtcattctggaactacaaggtttattatgtctacggcttcatgctgctggtctttgtcatccttctaatagttacaatctgtgtcactattgtgggtacttatttcttgctgaatgctgagaactatcactggcaatggacttcatttctctctgctgcatcaactgcgttatatgtgtatctatattccatctactactatcatgtaaagacaaagatgtcaggttttttccagacggagtttctacttcgggttacacattgatgttctgccttggnctaggcatactttgtggtgctattggctatctaggggcaactctttttgtgaggggaatctacaggaacatcaatgtgataggatgacncagttggaggcatagcagtcacangttgcact

SEQ ID NO: 391701 - DNA, 674 bp, Oryza sativa
  unsure (1)..(674): unsure at all n locations
cccacgcgtccgcccacgcgtccgcttcccagcttcgaattgtaagagaaaatgggattatgtcatctgccgactcggcatggaatcctggaggtggagcttcaaacaggatgaagcactctgtttctactcctaatcttatgtctggtgggtcctctgttcaggcactaagtacatctaacggtggcaataaaaaacaacagccaccacaaagcagccaaacattgcctgctgctgatgatgttcgtgctgccaataaggcccgggttgaaagaatgcgcagtgctttaggcatggatgaagataggtactctgcatttaaagaaatcgctggtgaataccgtcaaggcatcattggtacttcagaatatctttcatatgttgagcaatttggtctgtcacaccttgtgcctgaaatggcttaggctgttacctgatcctcagaagcagaaaagaacttgcttgatgcctatcacaccaatatacgcttcagaagcctccaagagaacagtgatggtttaaccattacctcaaaggagggtggccgcaagaaaaagggcaaggggaaatctcatgatgttacagaactagtgcttgcttcctgcttaaggatatngaaggttcacttagcagtagtttcctgggcactntagggagcttcagtttaacaagct

SEQ ID NO: 391702 - DNA, 418 bp, Oryza sativa
cccacgcgtccggaggagagctcactgacctttggtgatctggttctgaataatgatctcagcagtattcgcaatgactcaccactgcgcctcagaaagaatcagatgcaccggagcagctcaactccttgcctctctcctactgctcatgatgtgcaggagcaagatcacagcgaacccattgaaatccttggatgtttgagcccctcttctcggatgaagcagcttgctaaggatgttgtggaagccataaggaatggtgttgacccggtacctgttaatagtggcatgggtggcgcatactacttcaagaacatttacggggaacgtgttgcaattgtcaagccaccggatgaagaaccatttgccccaaataatcctaaaggttttggggggagaacccttggactgccaggcc

SEQ ID NO: 391703 - DNA, 1191 bp, Oryza sativa
  unsure (1)..(1191): unsure at all n locations
aacacatgttgctccgtctgaggattcaaccccaaaagaaacgcctccaaaagctgaggagacaaaaccaaaattagaagagaagtcaccaaaagcagaacctcccaagatgcctctgccacccaaaacctcccctacagaaccacagctccctccaaaagaacgagaacggagggtgccaatgccaaggctcaggaagcgtattgcaaaccgtttgaaggattcacaaaacacatttgcaatgctgaccacatttaatgaagttgacatgactaatttgatgaagctgcggtctgattataaggatgagtttgtcaccaagcacggtgtcaaattgggtctgatgtcctgctttgtcaaggctgctgttacagcacttcaaaaccaaccaattgtcaatgctgtcattgatggtgatgacatcatatacagagactatgttgacatcagtgttgctgttggtacttccaagggtcttgtggtgcctgttatccgagatgctgataacatgaactttgcggacattgagaaagggataaacgcccttgcaaagaaggctactgaggtgggcactctcaattgatgagatggcaggaggaacattcaccatctctaacggtggtggttacggaagccttatcagcacacctatcatcaaccccccacagtctgctattcttggaatgcactccattgtacaacgccctgtggtcgtggacggcaacattctcgcgaggccaatgatgtaccttgcgctgacatatgaccacaggctgatcgacggcagagaagctgtctacttcctgcgccgcatcaaggacgtggttgaagacccacggagattgctcctcgacatataaactccgcgcgcgccaccaatcgcagcctgagagctgctttgtgctttgtctggaaaataatactgcaaatttttgactgatacaaagagttgcttttctgagaaagacgaaatttgagttgaggataccgtgagggggtctctctgacaattatagacgagagcaccaaatccgaatcttaaatcttatatatcagcgcttattccattttgggatgtagttccctaaacaatttgcttttagtttcaatgcaagagcaatagatcatgcattttttgtttgatacaaaaaaaaaaaaaaaaacaaannnnnnnnnnnnnnnnnnnnnnnn

SEQ ID NO: 391704 - DNA, 869 bp, Oryza sativa
gtcattttcaccctaccaaggaatggaaggcaaagtagagaggatatggatcactgaaatagctactgatggtgttcatttggttggacataccaaaggatatatccaggtgcttgtcattgctcctgatagcatgttaggaacatcagcagatgtgaagatcacatctgttgggagatggtctgtgtttggtgaagtgatagaaggatccgttgtagcaaaggaaacacagaagcataatcacagtgaactgcaagaagaatacaggccaagtcaggttgaggaagccacttgctgcggcacggactcttgggtgcctgcacatgctctgatgcagcacagcaatgcaatcccggtccagagcgatctgaaaattcgacgccccaatcctgtggtgatgctactcatcccaggaagctgttcagtctaaacttgtgagaagaaatgttgaaaggagcggtgaaaagtagcgaaagtgatacagcgaaacaggtaggggagattcagcgactaaatgtagcagctaggaggttcccagatgttgatacgattctgtggggtggtttggccgtgagctttgccacgacagtaaccctcattgcactgctagcttacaagatttcttccacgccctcctactagtaagtctggtgcatgtgtaactgtagttgagctgtgtgttactgctcagttttgaccatttttctgtatccatcctcgatccttctgtttgccgcaaagatatgcaatggaactgtaattcattatctcaacaagttctctaataacctttccccccgacctttctaaataactagaagatacaattagtatttttaagattaatgatgaacaaaaaaaaaaaaaaa

SEQ ID NO: 391705 - DNA, 484 bp, Oryza sativa
cagagggcagggagttgtgaaagtgattggcaaatattttattcgtacacggtatcaggtcacaaatatctatcaacttaagtctcgacctcaaggagttcctctaagagtcaggaaaatgctaaaatcagcacaagctattgatgaattcaggcaagatggagtttgaacagaaaatttgagatgggagaagaacttctgtggttggaagttgagatgggaggatttagcacgacaatacatccatcaccatgtagtccgctgccatcttcaccatatggtgtaaagccttctgcagttcacttgatgcacagatattttgcatgttaacagcttgaggggtttgttaatcataaggcgtgtatctcattcaaattaatcattttttagcaaacacttcacttttgttatccttgagcaaccaagtttacaattattgtcgttttgagaatgcaagattattttgagaagacttgcttgattt

SEQ ID NO: 391706 - DNA, 548 bp, Oryza sativa
  unsure (1)..(548): unsure at all n locations
cccacgcgtgcgcgtttctctccctcgattcacggcaacctctcggagcgtggtcgcagcaacggccgcggcgttgggggcaatggaacgcccaatctccatgcttcttcttgctgtcgaacaccagatcgcaggtgacaagaatcagtgagcatgcatcatgtcgtccaacatgttcggcaagaaagggtgggactcgaatgggatggatacatctggttctgtctgcagaagttcttcagatatcaattacattaatcaacgggcaagattgaagagtgcgagcctaaactgtgtgggttcgccgccaaggaagaacaacaatgctacacagtaccggatgtttgttgccacatggaatgtgggaggaagaactcctaataaacgacttaaccttcaagactttctgcaggttgaagaatctcctgacatctacgtcttagggtttcaggagattgtccccctgaccgccggcaatgtgctcgtcctcgaagacaacnagccggcggcgaggtggctggcgctgatccaccaggcgctgaacatgc

SEQ ID NO: 391707 - DNA, 599 bp, Oryza sativa
  unsure (1)..(599): unsure at all n locations
gcaagagaggagagaatcccaattccccaagtacacgagaggggagaggagagcagagcgcactacaagagaggagagagagagagagggtgtgaggaggagagaggggcagccagcagcaggggcagaagcattagaagcgggcagcagtagatagagccatctatctgtacagatcacggcaaggagattagagagggagcgaaagatctttccttatttttttttgtatcaaaaatctcagaagagcaggaggaaagaggaataaatcgggagcgagggagaaggcatgatgctggaaggcaactcctgcctcatctcgcgctccctgccgagctcctgcgagccggagtcccagtgggcgtacctctcccacgaggtgctcaacggcaagcgcccggcgccggaggatgcggaagccgaggacatggacgaggttgacttcggcggcgggaacgcacaagccgccatcgccgcagccgcacacgccggacatatctgagggccatggctccagtcgccatgttgccgctctggngggggaagaggagcattggcaacgggagcanctccattggtgcgatttggccgtgacttaa

SEQ ID NO: 391708 - DNA, 629 bp, Oryza sativa
  unsure (1)..(629): unsure at all n locations
agaggggcagccagcagcaggggcagaagcattagaagcgggcacagtagatagagccatctatctgtacaggtataaatccttccttccttcctcctcgctcatcgataggaggagagagagagagggaggggggcagattgggtggtgtggtggtggggatttttctcgggtgcgggggggatataggggatgagctgattggggggtngtcggttcaaagccgcgatctttgagtcgggatctggggttcgtgatcccctcttcccccaactatgggttcgatctagatcacggcaaggagattagagagggagcgaaagatctttccttatttttttttcttgtatcaaaaatctcagaagagcaggaggaaagaggaataaatcgggagcgagggagaaggcatgatgctggaaggcaactcctgcctcatctcgcgctccctgccgagctcctgcgagccggagttccagtgggcgtacctctcccacgaggtgctcaacggcaagcgcccggcgccggatgatgcggcagccgaggacatggacgaggatgacttctgcggtggtaagcgcatcaagccttcatagacgaagccgtacactccggacatatatgagggtcat

SEQ ID NO: 391709 - DNA, 569 bp, Oryza sativa
  unsure (1)..(569): unsure at all n locations
tgcgaccgcgaagcgcctccgctaatccacctattttnattcttctctcccaccccaaaatccccaaatcccgacccgatcaaaatcgaagcttccgccgagttccccgtcgccgactcgcctggatcggcccgccgtcgagctcgcccccgaccatccgctcgattggaggccggggagctgcgtctggtggtgaatcgcatccgccgcggagtggttcgatttcggcggcggatttcgcgggggtagaggagatcgaaggggggcagagcagccatgagcgaggtgttcgagggctacgagcggcagtactgcgaggtgtccgcctccctcttccgcaagtgcaccaccgcctccgccctcgatggagagaaaaagaagcagaagcttgtccgagattcagtccggcgtggaggaggctgagtcgctgattcggaagattggacctggaggcgaaggagcctacaaccgagcgtgaaggccggtttgcttgcgaagctgagggagtacaaatctgacctcaacattctcaagagtgagcttaagaggagtctggctcccaatgcaag

SEQ ID NO: 391710 - DNA, 486 bp, Oryza sativa
cggacgcgtgggcgccgccaccgccagccgcaacagcaccgacgacgaggacgagctgagaatacgaggcgatgccgaaatccaagcgcaaccgccctgtaaccttatccaagaccaagaagaagcctggattagagcgcaagggcaaagttgttaccgatatcaaagatgccgtcgagcactacgctaatgcctatgtcttcacctacgataacatgaggaatcagaagctcaaggacctcagagagcagctcaagtcctccagcaggatattccttgctggaaagaaggtcatgcagatagcgttggggcgttcacctgctgatgaagctaaaacaggccttcataaaactttccaagttcctacaaggttgatacttggacttgttctttacttaatcttccaagaggatgatgtaggagaggattatttcgagaattcgaagagcatgatttcgccaggacaggaagtattgcgacagaaac

SEQ ID NO: 391711 - DNA, 437 bp, Oryza sativa
gcgcccacgcgtccggcccggtgtctcctcctcccaactacacacccccgcaatctcgctcgctagctcgctgatcgatcaagctcaagctcaagctagcttcgggcggcggcaatggcggcgcaggcgtctcctccaacgaagaaggtgttggtgccgatcgtcgccggcacggagccggtggaggcggcggtgcccatcgacgtcctccgccgcgccggcgcggacgtcaccgtggcttccgccgatgatggcgagctggtcgtcgaggtcatgtacggcgtcaggatcgtcgcggacgcgcttcgtcgccgcggcgtctgccccgccgctctcttcgacctcatcgtcctcccgggaggggttccaggcgcggcgaaccccggcggctgcgcggcgctggaagcatggtgaggaggcacgcggcgaccggagtc

SEQ ID NO: 391712 - DNA, 408 bp, Oryza sativa
  unsure (1)..(408): unsure at all n locations
acgaaacgaaggagtctttctctagctctagggttagggtttgcggtcggaacggaagttagtcgaatcggcgcaaatcgatccgatccgatccgccgtcgattcgaccactccgccctccttccttccttccgacgcagacgcaatccataatactactactctagatcggatcccctcctctccctccctccctccctgcatacgaacaacaagagactactccattactatattagattgattgattaggggaggggattgctgattaatttcatctctctaaccctagcagcagatccctctctcccctagcaactagcaagcagagagaagcagccgcctccatggatcctaatcagatgatggggccgaagcttccccatgtgggccgncgncgacgaccct

SEQ ID NO: 391713 - DNA, 681 bp, Oryza sativa
acggtacgtgtgattacccgcactttttcagtggttcggatcccactcgctctgcttagtttctcttcgactcgtggtgggttgcgcgcgcgttctgtccgatcgagatggtttctgtgttgatgcgatcggttggggctcacggtaggggccttgtggatgtgcaggccggagcagtgtggtctctgctccagtgccggtggaggtcgtcgctgccgcagctcgactccgccgacaggtgagccccctactcatgcatgcagattctactcttccggtctccgttgaacgagatttttgttcttttcacggtccgcttcggatttagtgttgtttatgccattgccgccggggcgtgtacgagtgtgcgtgcaaggtccgatgaggaaagcggcggcgaaatcgactgggacaacctggggttcgggctgacgccgaccgactacatgtacgtcatgcggtgctcgctggaggacggcgtcttctcccgcggcgagctcagccgctactgcaacatcgagctcagccccttctccggcgtcatcaactacggccaggggctcttcgagggtctgaaggcgtacagggcggtgaaccaacaggggtcgtacatgctgttccggccggaggagaacgcgcggcggatgcagcacggcgcccagcgcatgtgcatgccgtccg

SEQ ID NO: 391714 - DNA, 416 bp, Oryza sativa
  unsure (1)..(416): unsure at all n locations
gcgcgcacgcgtccgatctctcctcaccttggcgcgccaacggttggttacgaacgaggacgagctgagcctgagacgcgcgcttcccgttcgcacagccgcacaggtctcttgcatggctgctgctgctgctgctgcgtcgtccgcgaagcgccgctcctcccgtgggcacgcgacgcccaccacgcgctggccagggccctgcagggatgcggcggcggcggcggcctcggtctccgcggggcgctcccgacggccggaggcaggtggtctctgctccagtgccggtggaggtcgtcgctgccgcagctcgactccgccgacaggtccgatgaggaaagcggcggcgaaatcgactgggacaacctggggttcgggctnacgacgaccgactacatgtacgtnatgcggtgtcg

SEQ ID NO: 391715 - DNA, 524 bp, Oryza sativa
agaggaaaaggatcgattttttttcttccccaatttcttcctggtgctcacctcctcctcccccgggatcttccagaagcttccagaactgaccttggtgcgggcgagatccaaggaggagggtttcctgccatggtgaaggataccgcgtactacgacaccctgggggtcagcgtggacgcctcccccgccgagatcaagaaggcctattacctcaaggcgaagaggttgcatccggacaagaatcctgggaaccccgatgcggcgcagaaatttcaggaactcggagaggcataccaagttttaagcgatccttcaaaaagggaggcttatgataagcatggaaaggaggggcttcctcaggataacatggtggatcctgctgctgtctttggggatgcttttttggaagtgactattttgaagattatgttggacagcttgcactggcatccatagcatcagtggaagtcgagggaaactttaacagtcaagaagcaagaagggaaggttcaagagaaaat

SEQ ID NO: 391716 - DNA, 591 bp, Oryza sativa
cccacgcgtgcggttctgctttgtgttagtttcgattctgccatggggggacaagagaaaatggtgccacgaaggaaaggtgaaatgcttctgcgatacatcccatgtgcctgattgatatcttagcacaatgataattgataaggtcctcctctatcattcattacccattaccaacattctagatgctatgagtttgtgtgcgatgaaaacaaagcagatatgtatcatttgcaccacaattccaacggatagataagaagggaatgtttcagtcagagggaatacagtgccttactgtgattcatgctggaaaactctactggattgtgaaagggaaccaggtggaatgcaatagatttagctagcgtatgctacatttgcatacacagttacaatagcatgtggtggagaaaaatataggaatacaggaaaaatagagattctgtttgaatttcatggcaatttgacaagctcttcgcagaacaactctcccatttctgtaatgagctgtttcttgtaattcctattgcaacacataggcgttactgaatgttgataaatgatattgccatcgcaatttttttttag

SEQ ID NO: 391717 - DNA, 1157 bp, Oryza sativa
cccacgcgtccgcccacgcgtccgtgatgtttgtcgcggcagagcctttcgaggaggacttgatcatacaaatagaggatcgagttgctcagaacaaggatgaagtgattggtgaaactatgatacctctcgcaaggcttccaaggagggctgaccataagccagtgctgccagcatggtttgatctcagaaggccaggactgattgatctgaaccaactaaaggaagataaattctatgcaaaggtgcaacttcgtatttgccttgaaggtggttaccatgtgctcgatgagtccacacagtactgtagcgatctccggccaacaatgaagcagctgtggaaaccaccaatcggtctgcttgaagttggcattctaagtgcaaatgggctcaatccaacaaagaccagcctttagcgggggtcatgcgatgcatattgtgttgccaagtatggtcagaaatgggtgcggacacgtactattgttgacaacttgaaccctagattcaatgaacagtacacatgggatgtcttcgaccatggaacagtgctcaccattggtttatttgacaactgccacatatctgcagacagcaaccacagtagttcccccggccatatggacaagcccatcgggaaagtgcgaattcggctttcaactcttgagactgggagggtgtacacacacacgtatccattacttgtcctccacccatcaggagttaagaaaatgggagaactccacctggccatcaggttcacagccacatcccttctcaatgtgctcttcacatattctcggccccgcttgcccaagatgcagtacgcgcaaccactgtcaatagtgcagcaggaaatgctccgccaccaagctgtgcaacttgtcgcacagcgtctagggcgcatggagccaccagttcgcagggaagttgttgagttcatgtcagatgcccgctcacacctgtggagcatgcggcgaagcaaggctaacttcttccgtcttatgcaagtcttctccggattcattgctgcaggaaagtggtttggcgacgtttgtcagtggaaaaacccagtcacaacagttttagttcatgtgctatttatcatgcttgtcttctacccagaccttatccttccaacaatcttcctctacatgttc

SEQ ID NO: 391718 - DNA, 598 bp, Oryza sativa
  unsure (1)..(598): unsure at all n locations
ttccatatctccaccattagaccggcttaaacgcccccgcggtggtcttcctccccgacgcaagcagacgagcccacggccgccgacgccgcccgccgccggacttcgccggaatttcgccattctgatataaattagtgcattgcatcagaaaaatggttgtggggttaataaatgctaaccctgtagtttatgagaaaaaagagaggcgttctcggcaggcaccagaaaccacagatgaaaatgcggcagaggctattgaccagctagaaatatttgatcatattagagacataaaggatccagagcacccatactcactcgaagagcttaatgttgtaactgaggattcagttgaaatcaatgatgaacttagtcatgtcagggttacttttaccccaacagtggagcgttgcagtatggcgaccgtcattggactttgcctgcgtgtgaaacttatgcggagtcttccccctcgatacaaggtggacataagggtggcgcctggatcacatgcaactgaaactgcagtgaacaagcactgaacgcaaagaacgtgttgcagtgctctggaaatccaaacctcntggcattgtga

SEQ ID NO: 391719 - DNA, 579 bp, Oryza sativa
cccacgcgtccgcccacgcgtccgggagatggcacctccagggtttgagaattttaagtcatcatggccaccacttcccactctgccccaaactgtaccagatgcagccgcagcggatgctttggcagcaacagtggaagaagcagctgggccaccacctgcattggagttggaggcaatggatgtggacatggatgccatacatccaccaccgctgccttgtgacagtggagtggagtcattgcaaaagccactgccaagagcaccttctcccataatgcaagaagcgccctgttcaccagatagggcaccgccagggtttgaaacctataagtcatcacaggtactgctaccatctccatctctggcacaaaccacaaatgtgcgacaagatcaatcggtaactgaacctgtgtctgtgatagaggaagcccctcaactactgcactcagtggaggtaatgggtgtacatatggatgcattacctccattgctaccatcatctgaaagtggagcagatgggctatcttcgcagcaattcgcgcaacctccttctgcaaaaaaggatacaacaacctg

SEQ ID NO: 391720 - DNA, 475 bp, Oryza sativa
  unsure (1)..(475): unsure at all n locations
cggacggganggngaacgcgtgggtgctgctgcgatcgccggcgaggtcgagcccccacctccgctcgctcctgcgggcgcgaggcttcatctcctccgcctcgccctcggccgccaccgcggcggaaaggggacgacgggaagatcgtggcgtccgtgctgttcgagcgcctccccgtcgtcatccccaagatccaccccgtcgtctacgccttccaagaattctcgtttcggtggaggcagcagtacagacggaagtaccccgacgacgtgctgggaaaggccgacgcgaggggcaagggagattatcagatagattatgtgcctgctccaagaatcacagacgctgacaaaacaaacgacaggaagtcactacaacgagctcttgataatagactctatctccttctgtatggcaaggcttatggggctcctgatgacaagcctgtttggcattttccaaaaaaagttatga

SEQ ID NO: 391721 - DNA, 514 bp, Oryza sativa
cccacgcgtccgggagaagatcttagactttggaagggatgggttgaatctcggttaagacaacttactttaaagattgaaagagacacatatggaatgttacaatgccatccttacccgcatgagtatgctgacccttccagacaatgtgctcattgtgcttttttcatgggtttatcaaggaaagaaggtgcaaaaatacaggagggtcaacagtttgatattcgtggaacagtagatgaatttaggcatgatatcggcatgtatgggtactggagacctgggatggagttggctgtatctcatgttcggaggaagcagattccatcttatgtgtttccagagggctacaagagacctcgtcctctcgaggcatataaatcatccccagcagtcttaataaaaattgatgttgaagatggcacagcgaatagatcctcagatgggcagtccaagcgaaagcatgatacagctggggtttatgatagtgaacctggtagacttgtaagagggc

SEQ ID NO: 391722 - DNA, 558 bp, Oryza sativa
cccacgcgtccgggcgcaccagaggcagagagacacgagcagcgaggaggagctcccacgtgagccgtggacggtggagaaggacgtccacctcctcaacaacttagccgcgcatggcggcgagtatccaacgcgagccgtgggtggagaaggacgacgccgcgtcgtggacggtggagaaagacgacgtcccgctcgtcaacaacatcgtcgcgcacggcgatcccgagggcagttcgaactcgctcgcccgatcaggaggacatttggccaatgtccacgagggagccggcatgttttatcagcccaacttcaagtacattttctgtgatatggatggcacactgctggatagtagcggtctagttccagaaaccaacgctgaggccattagggtggccaggtcaagaggggtacaaacaatcattgcgacaggaaagtcccgccctgctgttattgaagttcttggcaaggttaatttagctggcacaggtggtattcgttcagaatcgtctccaggagtattccttaaggttttgtagcttacggcgagggggg

SEQ ID NO: 391723 - DNA, 524 bp, Oryza sativa
caacttggaagcaattcaaattcttaagaaaactggagggtctctaaaggactcctttttggatgaagggttcattctagacaagaaaatcggtcttggccaaccgaagaggattgaaaacgccaagattttggttgcaaatactgctatggacaccgacaaagttaagatatatggagcacgtgtacgggttgattcaatggctaaggttgctgaaattgaagctgctgaaaagcaaaaaatgagagaaaaagtgcaaaagatcataggtcatggaatcaactgtttcgttaacaggcagttgatctacaacttccctgaggaactctttgcagatgctggcatactggcaatcgagcatgctgattttgagggcattgagcggcttgctcttgtcactggtggtgacatcgcctccacttttgataaccccggagtctgtcaaacttggtcattgcaaggtcattgaagagattatgattggggaggacaggctgattcatttctttttgggttgaaatggg

SEQ ID NO: 391724 - DNA, 460 bp, Oryza sativa
  unsure (1)..(460): unsure at all n locations
nttagggtttccgccgcccgccgccgctgcgccgctgcagcctccttcccccttcgccgccgtacaccctccagccagccatggcggagcagactgagagagctttcctgaagcagcccaaggtcttcctttgcccaaagaaatctggcaaagggaagaagcctggcaagggaggtaaccgcttctggaagaatattggccttggcttcaagacaccccgggaagcaattgaagggacctacatcgataagaaatgcccattcactggaactgtttctatcagaggtagaattattgctggaacatgccacagtgccaagatgaataggacaatcatcgtacgcagaaactacctccattttgtgaagaaatatcagcgatatgaaaagaggcactccaacattccagctcacatttctccatgcttccgtgttaaggaaggtgaccatgtcatcattgg

SEQ ID NO: 391725 - DNA, 635 bp, Oryza sativa
gctgaagctcatctttataccatcataaaggtggctcgagatgagaatttgaaggagcaaattggcaaggatatatattttgacctggtggaccatgaaaaagttcgtagcttccgaattcagaagcagttactgtttaccactttcaaggaggaagttgcaaaggagtatggcatccctgtacaatttcagcgcttctggttgtgggctaagaggcagaaccacacatacaggcctaatcgtccattgagtcctcatgaagaaacacaatctgtgggacaactgagggaggtatcgaataaggcacacaatgctgagctgaagttgtttttggaagtagaacttggcccggatttgcggcctctccctccacctgagaagagcaaggaagatattcttctgttcttcaaactctataatcccgaaaaggaagaactctgttttgtggggaggctcttcgtaaaggccttgggtaaaccctgagaaatcttgaccaaactaaatgaaacggctggatttgtgcctaatgaagaaactgagccctacgaggatattaattttgtgccaagcccgtatcgtgaacctattgacagttgtgcctcttttcccgctagtcagcttgaatatgtggtcat

SEQ ID NO: 391726 - DNA, 742 bp, Oryza sativa
tgcgatttgtcagttccacaggaaatgaggagctactgaagcaaggcctagaaatcaatgatcacttacagagcgtacttgcaaaacatgatgccattgcttctggagctcctttgccggtcgaaacaccaaggaaagacgagatacccagagaagatccaaaaataaagccatctgcacctccgattgcacctccatccgcacctccagttgaagaggatgaagatgacgagttcgctcagatagcaagaagaaaaaacaaatctgtgataagtagtgatgaggcatcatccagtgctggtgatcaggcccttgtacccgttgacccagtaacttctgaagcctcatcttctgttgcaagcaatgcagtggtgcctgttgactcgtctcctgccagtggtactcggacaagagagcaggacatggtcgaccttctaagcctcaccctgtacagcccccctgaagcatctacagattcttcttcacagacccaaaatggcacgcagcagtctgtcacgtcaaatgggccagaattaccaccaaactatcagcctgctgcatcaaatggatcacattactcttctaaccagcaggcatatccaacgaatcaagcttacaccccatacaacaattatgttgtaccttgggcccaagctggacagggcacacaggctggaggagcatatcaaactcagcccatgcaacaatatggatctagctacccagcaccaccatgggcgat

SEQ ID NO: 391727 - DNA, 476 bp, Oryza sativa
cccacgcgtccgcccacgcgtccgaaatattataggaaataaaaaataatttcctggttagaataaacacatttttaaaaaaaccaagaaaagattttcctcttctgttacattccttcttccttctccggccaccggagccgtagccgaattgtgcctcttctccggcgaggggagagggagagagggggtgtgagttttgctccttccggcgagtggtctcctccccgcgcggctgaggagatctctcgggacatcggggttggggcggcgtgcatgatggggttctcgctcacgccgatgaagatctccacgaggcttctgtggagcaccagcttcttccgccacaagatcgccgccaccatcgcgtcctcctcctccttcttataagatcatcttctccgccacagcaatctgtaaatatatacacatcgaacgcgacaagcgcggttgattgagtggatttttcttccctc

SEQ ID NO: 391728 - DNA, 517 bp, Oryza sativa
  unsure (1)..(517): unsure at all n locations
cttaccgtcaccgaccgcnaaaaaattcccccaaaaccctagnggcggcggcgcgcgctcccctccccacctccgccgccgcggcgtcgaggcagcaccggagggcgactggcgtcgacggtgctggaggcgacgcgggcgaagacacgatggacatggagaggctggagcggctggcggtgcgggactgcagcgggacccgcaacgcgcgcgaccgctctaccagtcccaccgcgtgcgccacatgctcgacctcgtcatctccacctccggcaagctcgtggaaatctacgaggacaaggataatgctaggaaggatgagatctccaaccatcttagttccacagtgcaagctgaaatctttccaaagttctatgacaggctcaaagagatccgtgattaccataggcgtaatccttctgcccgtttcgttagtgcaacttaatgatttcgaagagctactaaaggaggaacccgctattgaattcaattggagaggaagcttttggccgatanc

SEQ ID NO: 391729 - DNA, 564 bp, Oryza sativa
ggccgacgcgccggctcgcccgcacgagccccgcctgccgcctcagccggcgccgtacccggagttcgccgccggccttgtgcggcaggactcgttcggcggcggcgagctgccacggcaggactcgttcgccataggcgagctgcggcggcagggctcgtatggcgtcgagctggtgcggcaggactcgttcggcgtcgagctggtgaggcaggactcgttcgcgtgcaccgagccgccgccggtgcggagaggagacctgcaggggagggacacggcaggggatacatccttcaggttccataatttctcgttgcccaacaactgggtgtgaatgtgcgattgaaattgaacaccaaggggcaagtctcactggttgctgcacatatgtatacttcgatggggtggctttgtgctcatacagactgtggagtgcattgtagtgtgatggagcttacatagagtataattttggccggtgaatagtcttgctgtttcagcgatacttagttcgaacactgttgattgtgttgggaggagaataacagtttcatgtttgatttc

SEQ ID NO: 391730 - DNA, 490 bp, Oryza sativa
  unsure (1)..(490): unsure at all n locations
gcgcccacgcgtncgctctctctagtcctctagagccgagggttgctgcgaggaaagcgtaggagagagggttgctggctgcagccccggcgagaagcgccattgttgtcgtcgttgggccaagaaccaagaaaccaagaagacaagaggaggaggaggggggaagaagacggaagagagagaggaagaggcactggataggtgcatcctttgcctctagccgctttctctttctccttcctggaggggggagagagagagaggagtgggagaggaaaggagagtagatgggcgagatggtcttggccgggtatggcatggacaaggcggtgaggagcagcgtcaccttccgagacgccgtgcggcaggcttgctgcgcgacctcgagcaaatatggactgagatttggggagcgctaagaagataagatcgtatgntcttagaacttgaaacagagtgcatgcgtgtgtaccgtcgaaaggttgatagt

SEQ ID NO: 391731 - DNA, 509 bp, Oryza sativa
  unsure (1)..(509): unsure at all n locations
cccacgcgtccgcccacgcgtccggcttagctcagctcaaccacatctcgaactaaccaactaagctaaagctaagctagcttcaccgtcatcctccactgacacatggggagcttggacgccaacccggccgccgcctacgccgcgttcgccgccgacgtcgagcccttccgcccgctcgacgccgacgacgtccgctcctacctccacaaggccgtcgacttcgtctacgactactacaagtcggtggagtcgctcccggtgctccctggcgtcgagccgggctacctcctgcggctgctgcagtcagcgccgccgtcgtcgtcggcaccgttcgatattgctatgaaggaagctcagggaggcggttgtccccgggatgacccactgggcgagcccgaatttcttcgcgttctttccggcgacgaatagcgccgccgcgatcgccggtgagctcatcgcgtcggcgatgaacaccgtcnggttcacgtggcangcggcgccggcgg

SEQ ID NO: 391732 - DNA, 567 bp, Oryza sativa
cactttcccacctcgtcgtcttccgcgccgccctctccctcctccaccgcctccgcctccgccttctctcgtgccgccgatctccatcgccggcgtgcggtgcaccgagatccacccgagatgtggcgcggctgcgtctcgcgtggcctcaggagcctctccaagggcaagggctcctcctcctccgcccccgtctccgccgccgctaggctcttctccaccgcctcgtcgtcgtacacggtggtggatcactcgtatgacgcggtcgtggtgggagccggcggcgcggggctccgtgcggcgatcgggctctccgagcacgggttcaacacggcttgcatcaccaagctcttccccacgcggtcgcacaccgtcgcggcgcagggtggcataaatgctgctcttggaaacatgacggaagatgactggagatggcatatgtatgacactgtcaagggtagtgattggcttggtgaccaggattctattcagtatatgtgcagagaagcaccaaaagcagttatagaacttgaaaactatgggtggccattttcaagaacctgagat

SEQ ID NO: 391733 - DNA, 511 bp, Oryza sativa
gcaagcggaagaaggggaggcagatctccctcggccaaccccaagcagatcccgacgatgctgcccacgacggcgtccaaagggcgcggcgccgcccgctctgcgccgccgctcttcggcccctacctccgccgcatcgtcaagtggcaacaaatggatatcgagtacacattttggcaaatggtccatctctgtacttcaccaaaagtagtctatcagcacaccaaatatcacaagcaaacaaagaatcagtgggctcgggatgatcctgcttttgttgtcattctaattcttttccttgtgtttgcaacatcagcttactgtgcagcgtatggagagagtccttcacatgctgctttaacaatcacttcagttgtgcttgtccatttcttgtttgctgggatagttctggccacactttgctggtttcttacaaattcttacttgagggaggaacctaacagtcatgtggttgagcaacgtgtggagtggctctatgcatttgatgttc

SEQ ID NO: 391734 - DNA, 530 bp, Oryza sativa
acatcatacgccatctcctccctccgccgcggcgacgtcgagggaatcggggcggggccggagctagctagttcgccgccggcgagacgcgtgtgccatggtggcagcggcggggacgatggagctggagatcctggggatcaacttcgggtgcgtcctcgcggcgctcgcggacgccaagatcccggagaaggactgcctgctcccgctcgcctccaagctgctcggctacgccatcgtcgccgcctccaccaccgtcaagctccctcagatattaaagattttgaagcacggaagtgtaagaggacttagtgtagcatcctttgagcttgaggttgtcggctacacaattgctctagcatattgtattcataaaggactgccattttctgcgtatggggaactagcttttctgttaatccaagcaattattttggttgcaatcatttactattactccccaccaatgggaaccaagacatggatgaaagctttactatattgcggactggctccaacagtattgggtg

SEQ ID NO: 391735 - DNA, 713 bp, Oryza sativa
ctgctctagcgtgggcggagaacacgaggcgtggccgcgtcgtcgtcggaggagggagcagagatggacggccgcaaggatgtcgggatcctcgccatggatatctacttcccgcccacctgcgtcctccaggaatcgctcgaggctcatgacggcgccagcaaagggaagtacaccattggtctcggccaagattgcatggccttctgcagtgaggtggaggatgtcatctcgatgagcatgacagttgtcacatccctgctgaaaaaatacaaggtcgatccaaagctgattggtcgattggaggttggcagtgagacagtcatagacaagagcaaatccatcaagacttggctgatgcagattttcgaggaatgcggtaatactgacattgaaggagttgattccagtaacgcgtgttatggtgggacagcagcgctgttgaattgtgtgaactgggttgagagtaactcctgggatggacgctattggcctgttgtttgcacggacagcgcggtttatgcggaaggcccagctcgtccgacaggtggtgctgctgctattgcaatgctcattggtcctaatgctcctattgcattcgagagcaaatacaaagcttctcacatggctcacgtctatgatttctataagcctgatcttgcaagtgaatattcggtcgttgatggaaaactattccaaacatgctacttgat

SEQ ID NO: 391736 - DNA, 597 bp, Oryza sativa
  unsure (1)..(597): unsure at all n locations
gtccgcatcccggtcgcccagcgtccgcaaattccaaatccatggcgacctcaccggatccccgccgggggcgccccctccgccggagttcgagatctcgcggcagtcccgtctcctcgcggcgctgtccaagaaggtgatagatctcgatgagctgaggatgctggctgctcagggggtccctgacggcgccgccgtccgtcctactgtgtggaagctgttgctgggctatttgccgagtgatcgtgccctgtgggagcaggagttggcaaagaagagatcacagtacgcagcctttaaagaagaattccttagcaaccctatggaaattgcacggcaacgggaattagaaggccaagggagtgagaatgcagggagtatctataatggggtacttcatagatcagagggtacacaagaagagcacccattgagccttgggaagacaactgcatggaatcagttcctttgagtattcagagattatcgagcaaattgaccgtgatgtgaagcgcactcaccctgacatgccatttttttgtggagactcatctnttgcaaagtccaatcaggaatctctgaaaaatatactgatta

SEQ ID NO: 391737 - DNA, 493 bp, Oryza sativa
attcttcctcgctagtcgctagcctgcagagtcccgcgtcccctcccctcccctccccatccatggcgcctcctctaaaccctaaccccgcgtagtccccgcccccctcccctacacctcctcggtcccccggctgtccccgtgcccgcgcccctcgctcccgcctcgccggcgggggcgggccctggagcaccaccaccacaagcccgggctgcgggtgcgcctccgcatcaccgccgcgcggcgacgcgcgtggctgtccgcgggcctgcagcccgcctgccgcaagccgccgcgccgcgacccgtccgactccgtccacaaggtcgcgcgccgcgagatcggcggggggcaccgccggccgccgcggcccgcggcgccctccttctccgccttctcctgccccgagaaattccggaatttccagctgcaggaagagtatgacacctatgatgatgaagtccattttcttgttcagctgccatttttgtgg

SEQ ID NO: 391738 - DNA, 472 bp, Oryza sativa
  unsure (1)..(472): unsure at all n locations
gcgcccacgcgtgcgcccacgcgtgcgcgcactcgtccgcaaatcttcaattgcgactactttctgcgaacttctgatcgaccattgcagaatccaactaattgtttcttcagacttcttcagagcattctccaggacacttcgaacgaaacatggcgaacgcgacgtctggtgtggcggtgagcgaggagtgcaaggcgaggttccaggagctgagggcggggcgggcccacaggttcgtggtgttcaagatcgacgacgcgatgcggcaggtggtggtcgacagggtgggcccacgcgacgccggcttcgacgagctcaccgccagcctccccgccgacggctgccgctacgccgtgtacgaccacgacttcaccgtcagcgacgccacggccacggcggccgccggcnagggcggcgaggcgccccgcagcaagatcttcttcgnngtctggtcgcccgcggcggcgga

SEQ ID NO: 391739 - DNA, 1037 bp, Oryza sativa
tcgttttggaaccagaaggcacaagtgaatatcatcttggtcaaagctggcaagagagaaatagtgggagtagagggaaacgtcccgcagggagaaggaaggccttgaacaccgatggcggtagcgccattgggaaggatcgagtggtgggtggcagttcattctccgactctgaggtaacacgcaatggttttgaaccaaaatggagatccacgactagagggcgcacaacgaatgatgttaggaggtggaatccccccaacgaaggcggtaggaatgttcctagaaagggttggacggatgatgagtttggttcaaattcagacagtggaatggatcacaagttgatgccaaaatggaaaactcagaacaggttgaaccgaagcgaaaatggcagagatagaccggagctgaaatatatggctaataccaacaatggggagaggactaggaggtacatgaggggcagcgatggtgagggaagaagagatcggtttgttaatcgcttcgcctcagatttggaggagccagaatggaagccaagaagaaagagtggagcaggcaacgatggtgatggaagaagagatcggtttgttaatcgcttcgcctcagacttggaggagccaaaatggaagccaggaagaaagagtggagctaggatgaacattggcaacagagagtacatcgatgacatgaatgggagattccaggaggggtagcgatggagatggcatgaatgggagattcaggaggggtagcaatggagccgcgagattgttggatgctatggacagcaacagagaaatcggcagtgaggatgatagctacaggatgagcagaaatggaggacagcgcaggggagacgggtactcgtacgcccaacgtcagaattgcacaactctcggaggctgagggaatcaaatgaaatgtagttctttttttcttcttctgatagaaagatgaaatgtagtactagtattttacaatgatgataaacaaataacacacgccctgtgcagactaaaaaaaaaaaaaaa

SEQ ID NO: 391740 - DNA, 495 bp, Oryza sativa
acaaacgatacagacaaagcatcaagggacagactatctcgaattgaagcagaactgtcactattgaaagaaaagcagaaggacctgactgagcagtgggagcgtgagaagtcggtgatgactaagattcaatctattaaagaagagattgatagggtcaatgtggagatccagcaggccgaacgtgagtatgatctcaatcgtgctgctgaactgaagtatggcagtctgaacgcattgcagcgccagcttcaaacaacagagaaagagctagatgaatatcaaagttctgggaaatccatgctaagagaagaggtcacccaagatgatattgcagaaatagtgagcaggtggactggtattccagtatctaaactaaagcaatctgatagggagaagttgctgtatctagaggaagaactgcacaagcgtgttggtgggcaggatcctgcagtcaaagcagtttctgaggctattcagagatccagggctggt

SEQ ID NO: 391741 - DNA, 439 bp, Oryza sativa
cccacgcgtccgcccacgcgtccggtgaaatcgtgtgtctctgctggcgcaattggcagcccccagctgctattgctcagtgggattggacccaagaatgaccttaggagccataaaattcctgtagttctccataacaagtatgtgggtaaagggatggctgataaccccatgaactgcagattcataccgacgaaaagcccccctcgccagtccctgattgagactggtggaataactgaagctggtgtgttcattgaggccagtagtggttttggccagtcaccagaaagcatccattgccaccatggaatcatgtccgctgagattggacagctgtccacaattcctccgaaggaaagaagcctggaaaaagcacagaagtatgcaaataccaaacttaatctacccaaagagatattccatgggggggttatcc

SEQ ID NO: 391742 - DNA, 831 bp, Oryza sativa
gccaatgaagactctctttgttctgcaaatgctgagactcaaggttcggctgccccatgttatggggacaacagcaaagatgctagtgcttgcaatgattgacatgcttcctttgcattattttgtccctgtcaaaaggtgcaccctggtagtttcaagcattgacagatactattgaggacatgaagcacaccgatccttcattgttactattattctcttttgactcggcatgcggttcgtcggttggcagaagtagcctggatagagagggcgagtttttgaagatcccttgcagagcagcagcacctcggttctgctcaatattgatgattcaattgactctttggtttcggtttgacttgaaaccaggacgcgtggggttggactgcgatcacctaactttaagtggtttacctttacctgtaaagtcagcatgtagaactgagatgatagttttattccgtgttttttttttctggatggttaacttagtaccaaaggccaacgtgtgccgcaaaatcttcgtacatgtgggtttacctgctatgtgacagtagctttgtttttgctagcccatttttttgcagccagatctcatctgtaagacactaatgcatgggcaagcagaaaaaaaatctcagatatgccacctgttctcatgttggaagtaaatctgataatgttatggcatctatcctcgtgttcatgcagatgcaaggtgcttttgttcgctgaatcgaactactgatcaggtgagatgtggtcaaagatcgcaaggttataatcactctggaaagcatttacttggaatcatattgtctatctgct

SEQ ID NO: 391743 - DNA, 962 bp, Oryza sativa
  unsure (1)..(962): unsure at all n locations
cggacntgancnggnatagatgatctctctgcccatcttggatcgctcttggtgtgtacgttgcctagtgcctnctatggggtcttcgatggccatggaggcctggatgctgcagcctacatgaaaaggcatgccatgaggttcctgtttgaggacagtnagtncccacaagcatcgcaagtagatgaaacatatgttcagtcagttgagaactctgtgcgcagagcgttcttgcaagcagatcttgccttagctgatgatttagatatcagccgctcttccggaactacagcactcaccgcattagtcttcggaaggcaattgctggttgccaaatgccgggggattgccggtccgggcctttgccggagaggcgtacgattggagatgtctcgagatcacagagcaaactatgccgaggagtgttgaacgggttgctgcatccggaggatacatcgaggatggctacctcaacggagtcctatccgtgacacgggccctaggggactgggacatgaaaatgcccgacggctcgatatcccctctcatcgccgagccagagttccgacagaccatgctcacggaggacgacgagttcctcatcatggggtgcgacgggatctgggacgtgatgaccagccagcacgcggtgagcatcgtccgacgggggctccggcagcacgacgaccccgagaggtgcgcgagggagcttgtcatggaggccaagaggctcgagaccgccgacaacctgacggtgatcgtcgtctgcttcgtctcggagcttgggtcgccgcggcaggagcaggtgggggggcaggcgggggtggcgaggccgaggagttgcaagagcctttctgcggaggccctgtgcaacctgaggagctggctggagactgatcgctagggcaagggcccggtgtttggttgtggccactttacacttgggtacatatgctgacatt

SEQ ID NO: 391744 - DNA, 627 bp, Oryza sativa
cgaggtggtggccgcgccgtaccacctgctcgacgcgctgcggcattacctgccgtcgaacgaggcggcggcggcgctctacagcctcccgtccaccccgacaaggctatcgccggtgacggtcaccaccgcctccggcgccaccgtcaccgtcgagccgctcgacctcgggctcatcgaggaggagcaacccatggagagggtggagtccgggagagctctccgggagaaggtgttcgagcgtctcagcaaagaagccaccgtgtccaccgacgccgccgccgccgccgccggcgtcgcgcccgacgtcggttgggtatccgacctcatcaactgagcaaacccaacaaggcggcagccatggctgagtaagaattttcctcatgcctccatagtggaagcagaaggtagcaggaagagaaggaaaaaaaaagaaaatggaaaagtttttccaaccaaaaaaattctattatttttttattttagtttcttgcttgttagattctcctaatccttgtacatatgttcatcatcatcatctaccatcctatgtgaatattcttggatgggatgtggggggggccagggaggcaggcaaagggcaaggcaggatttgtttggggtttt

SEQ ID NO: 391745 - DNA, 474 bp, Oryza sativa
aatttggacagtgatggatccttctgacggggaactcctaatctccttttgtcaagaggcaatcctctggcagatgctgttctgattgattgtttggtcactcaacaacgcaaatcatgggcatcttgtggctatctagggttggatttggggctacaccatttcttcttcatagatctttgttttcgcaaatcttgcaatctcttttagccttttctggaggatgactatggtagagattgttctaaattcttggtttgatttttcttggatttattagttgatcttgtgaattgcatttccccttcattcaagcttcccaaagttctactggttggttagttattcagatttgatttgattctttttacttatcagcaacttgggttgatttcagatgagaactacatggtggattggctcatgatagtgcaaatcattggctgagatgaggaaaggcatttcatcgactcc

SEQ ID NO: 391746 - DNA, 370 bp, Oryza sativa
gtccgtgttacttggtgtggatgatatggatatcttcaagggaatcaacttaaaacttcttgcgtttgagaatatgctgaggacgcatcccaagtggaagggaagagctgtgttggtgcagattgcaaacccagcacgagggaagggaaaggatctggaggctgtccaggctgagattcgggagagttgtgatagaattaacaaggagtttggccagtcaggttacagtccagtgattttcattgaccagagcgtgccaagtgcggtgaggcttgcatattatacggttgctgagtgtggtgtggtgaccgctgtgagggatgggatgaatttgaccccatatgaatacattggctggcgggaggggata

SEQ ID NO: 391747 - DNA, 503 bp, Oryza sativa
  unsure (1)..(503): unsure at all n locations
cccacgcgtccggttctagatcgcgagcggcgccgctttttcgtctctgggtacctaggtatccaccgcaagccttaacctgtacggctcccaccccttctacatggacgtgcgctccggcggcggcggcggcggcggcgcggcgcacggcgtgctcctccttatacagcaacggcgtggaggtcatctatggcggatcctacgtcacctacaaggtgatcggcggcgtgctggatttctacttcttcgccggcccgtcccctctcgccgtcgtcgaccagtacacccagctcatcggccgacctgcccccatgccgtactggtcattcgggttccaccagtgcaggtacgggtacaagaacgtggctgatcttgagggcgtcgtcgccggctacgccaaggcgaggatcccactggaggtgatgtggacggacatcgattacatggacgcctacaaggacttcacgcttgatccggtgaacttcccggacgancggatgcgg

SEQ ID NO: 391748 - DNA, 725 bp, Oryza sativa
caaccttactgagagttatgactctgatgtcactgctcataagccaatgatgtggtctccatccccaaatgctgcaaaagcccaccccttgacatttcagcagagaccccctatggataattggatgcagttgggaaggcgtgaaactgactttaaggatgtccgttctggctctcaatcttttggtgattccccaggcttctttatgcagaattttgatgaggctcctaaccgtcttacttctttcaagaaccagtttcaggatcaaggttctgctcggcacttctctgacccatactactatgtatctccacagccttccctaactgttgaatcaagcacacagatgcacacagacagtaaggagttacatttctggaatggccagagtactgtgtatggtaattcgagagaccgaccacagaatttcagattcgaacagaactcatcaagttggttaaatcagtcatttgcccgacctgaacagccaagagtgattagaccgcatgcatcaatagctccagttgagttggaaaaaacagaaggcagtgggtttaagatttttgggtttaaagttgatacaaccaatgctcctaacaatcacttgagctccccgatggctgcaacacatgagcctatgcttcaaactccatcatcattgaatcaggtgcaacctgtacaaactgattgcattcctgaggtatcagtaagcacagctggaaccg

SEQ ID NO: 391749 - DNA, 250 bp, Oryza sativa
ggtatcttctcctgagaggcagtagcaggggttcttccatcatggggactgacgattagtacctagacaaactgcagctaattctaggggctatcgatgcgcttctggccatcagctctcggctgccaggagcggcgccgagcgaccgctacgccggtaaggatacaatcatagtgcataggaatgccctcccgactacatggaagatcaggatgcgttaagaggacttgaagtgagcatcatgtgcaac

SEQ ID NO: 391750 - DNA, 361 bp, Oryza sativa
gtcgaccacgcgtccggcagcgatctgtggatctagtggtgaaggggatcttgaacgtcttgtgaccttgactttcattaggggttaactggggtttacattaattattacctactagtcgatcagcacgttgtctgcagtcaaaaaagaatccgaagctcgataaccgtgaagaatagcactaaattatatgccttcagccttcctaaagaaaggctagttggtgggggacacatcatcgggggagagagcatcaattgcaaagatgaaaccaaaggaggaaatacagtacatcgtttttaatctctttggatagtgatagttatcattatgaacttgatatgacagagagagctcagtc

SEQ ID NO: 391751 - DNA, 542 bp, Oryza sativa
cccacgcgtccgcccacgcgtccgcggacgcgtgggctttatctctacttattataaaacttaaagatgattctgtactcatccttatttccgtccatagtccgactttagagctgggatgtcgtgcgtgaacgggtcacgcgatggagggagtatatacgactgaaataaatttaaacgggataatttttatattatggaatgaagggagtatatccgactgaagtgcagaagtattctctccttaaggggttgtttagtttaaaaaaaaaacttttcccaaaaagcatcacatcgaatctttagatatatatgcatggaacattaaaatatagattaaaaaaactaattgtacaattagggaggaaatcgcgagacaaatcttttgagactaattagtccatgatttagccataagtgctacagtaacccacatgtgctaatgacggattaattaaactcaaaagattcgtctcgcggttttcatgcgagttatgaaattaattttttcattcgtgtctgaaaaccccttccgacatctg

SEQ ID NO: 391752 - DNA, 566 bp, Oryza sativa
  unsure (1)..(566): unsure at all n locations
cccacgcgtccgcccacgcgtgcgcgggcgccggggtgcttaagagcttctgagccttatcccagggtcaggacagaacagagcagagaagcatcagaagaatggcttctctgaaggccgtgaaacctgccggacttgccaaggagccggctgccaagctcagtgagacggcgacgagagcgcgcggccgccaagggcggcgtcaagaaggctgagcagaagccccgggagcccaagaagaaggtgaagagcagcaagccggcggcagccaaaaactgatagtggcaacaggagagatggagatagtacgagggtctccatcttacgctatgctatgggattatgaatcccgtctgtcccttcctctcgtcaccccgtgatgtcttgatcatgtagcagcaaccttagtcaagctggtcttgacggtgtgtgcagcccatgtgatgaatattacaaataagatggtacagttgtgacaannnnnnnnnnnnnnnnnnnnnnnnnnnnnnnnnnnnnnnnnnnnnnnnnnnnnnnnnnnnnnnnnnnnnnnnnnnnnnnnnnnnnnn

SEQ ID NO: 391753 - DNA, 473 bp, Oryza sativa
  unsure (1)..(473): unsure at all n locations
tgtgtggaattgtgancggataacatttcaccccgaacagctttgaccatgattacgccaagcgcgcatttaccccctcacttaagggaacaaaagctggagctccaccgcggtggccgcccccaagggcggcgtcaagaaggctgagcagaagccccgggagcccaagaagaaggtgaagagcagcaagccggcggcagccaaaaactgatagtggcaacaggagagatggagatagtacgagggtctccatcttacgctatgctatgggattatgaatcccgtctgtcccttcctctcgtcaccccgtgatgtcttgatcatgtagcagcaaccttagtcaagctggtcttgacggtgtgtgcagcccatgtgatgaatattacaaataagatggtacagttgtgacatccgcttcatattttnnnnnnnnnnnnnnnnnnnnnnnnnnnnnnnnnnnnnnnnnnnnnnnn

SEQ ID NO: 391754 - DNA, 568 bp, Oryza sativa
cacaaatcctatatttcatttcaatttccagatctgaaaattcagaggaatacagggtgtggtcaagccaatacagtaagtaaaattactgcataattaattacttagctaaagtgatttcgacaaatatcacaagattgttaccacaataaaaactccaccaatctactcagaaatacattgccctaaaaacaaactgtctcgtcgtcgtcgtcatcatcgtcgcgcaccaccacctgggtacgaaatgaccagtgtacccccgccgcgatatcaaatttacaagctagtacccctgacccctcctcgcaactaacaacaaagagaagagaaaaaaaaacagctaagaaaacaaccatgaagccctagattgctcgctcgccggagagagagctctacttcttcgccttccgggcgggcaccttcctcgccggagcggccgccttcttcgccggcgcggccttcttggcgggcgccttcttcgccgcggcggcgggcttcttggccgccggcgccgccttcttgctgggcgtgtccttggctgacgtcttcgccgccttcgccggcc

SEQ ID NO: 391755 - DNA, 396 bp, Oryza sativa
gtgaactttcaccatgagatgcactgtgtatggtgtgaggagattttgatcaactgaagatgtttttaagatgaaaggtattctccacctagcggacgtagtcattttttcctctattccaaccgttgttgtgagttgtaactgctagagttaattaatctagatacatgcaacccggcgtgtgcaagggtttaagagcaacgctatgttgattatcgtgattggcagatagaattctgtcatattcaagtgaaaatgtagccacctgccgttcaaaattctgatgtgtgacctgaagattagctgtgtcagctcttgacaaaactgtaatacgattgcaagtacctgtttccttggcatttttttatcatgtccagtacaaatttatttttcctt

SEQ ID NO: 391756 - DNA, 529 bp, Oryza sativa
cccacgcgtccgtggaggtggtggtgaagctggactggcgcgagtcgatgccccaccccgacgagcgggtggagtacgagctgtggaccaacagcaacgacgagtgcggcgcccggtgcgacgagcagatggagttcgtccgcggcttccgcggccacgcccagatcatggagagaggtggctacgccctcttcaccccgcactacatcacctggtactgccccgaggccttcaagctcacccagcagtgcaagtcccagtgcatcaaccatggcaggtattgtgcgccggacccggagcaggatttcggggaggggtacgaggggaaggacgtggtggtggagaacctgaggcagctgtgcgtgcaccgggtggccaacgagaccgggcggccatgggcgtggtgggactacgtcatggactacaagatcaggtgctccatgaaggagaagaagtacagcaagggctgcgccgaggacgtcgtcaaggccctaggtctgtcgcttgacaaggtgctggaatgtatggg

SEQ ID NO: 391757 - DNA, 929 bp, Oryza sativa
tttgtatcgcgcgcgcgcgcctgcctcgtcgccggcggccatggcgctcctcctccgccactctcccaaggtgcgaagagcgcatgctatcctcggatgcgagcgtgggactgttgttcgtcacttctcatccagcacttgctcctctcttgtaaaggaagatactgtatcaagttccaaccttcatccagagtatgcaaaaaaaattggaggatcagatttttcccatgacaggcagtctggaaaagagcttcagaatttcaaggtctcaccgcaagaagcaagtagagcctccaatttcatgagagcatccaaatatggaatgccaattactgctaatggggtacatagtttgttcttatgtgggcaggtagtaccgtctaggtgttttcaagtggagcagatttgcctccacatcaggaaatcggaatgccttcactctcccctaccatgactgaggtgggtgaagaaagaaggagataaagtctcacctggtgaagttctttgtgaagtagagactgataaagcgacagtggagatggaatgcatggaggaaggctaccttgctaaaattatccatggagatggtgccaaagaaattaaagttggtgagattattgccgtaaccgtggaagaagaggaagacatcggcaaatttaaggattataaggctccatcatctgctgaatctgcagctccagccgaatcgaagccccaatctgagcccacagaaccaaaaaaggagaaagagcagcccaaggctcctgagccaaaggctacaaagacagaagaatcttttctttcagaggatcgcacattctccagtccaattgcaaggaaattggcagaagacacaatggaccactgtcaagcataaaagggactggccccgatgggcgaattttgaaggccgatattgaggattactt

SEQ ID NO: 391758 - DNA, 441 bp, Oryza sativa
cccacgcgtccgcccacgcgtccgggctttcttgccatgctcatatgtgatgtaattcccctgaatcgatgtgcttgaaaggttgaagatgttgtaacgtattgtggattcccctattatttccctggggctaaaggggtactcattagtctggtggctggtgaggggtttatattgttccatattggcatttctggccttcagcattttaataagttaatgaaatagtaaaggtacgccacaattggatgcttaattgatttgtcctagtattttaaaattacacatgattctgtgcgggttgattttgtttgagctattttccactgcacttcacactaaactatcttctgatgtgcaggtgtgctgattgttatggcgttctctctatttcaaagccatctgctcttatccttaatatcatattagataggtggcacg

SEQ ID NO: 391759 - DNA, 566 bp, Oryza sativa
  unsure (1)..(566): unsure at all n locations
aattgtaatacgactcactatagggcgaattgggtaccgggccccccctcgagttttttttttttttttttatgctcaattttaggccgatttattccaactcaatttcgtcaatttttattcagatgagctattaataatgctcgaattctaaggcttaattaataggtcatcacgaccttgagatcgaactcctgcccgacgaccagcgtcagcccgctgacgtgcgcgacgcccagcgctcccttctccgggctcccgggcggcgccgccgaccgccgtgctcgcgttcacctggacgccgttggcataaacggcgaaccccttgggcggcgccgccgaccggagccccatgagcaccaccttgccgatggccatcgtccggctcggcgcgttccaattcttgcccacattgcgaactcnctctgancacgccgccgccgctctcggtcgcgccgctgaatttgatntggctccctgctccgcggccnggcatctccgggaatcccgtcgtcaanananatcccggtggcgtncctctcgnaaccaacanaagtgacnnccnc

SEQ ID NO: 391760 - DNA, 635 bp, Oryza sativa
gctgccggcaggcaaaagcacaaacatcaaaacgttataagagttctctagcatccatcacatagccatgaagatctttgtcatcctctctctcctcgccctcgcagcgagcagcgcctcggcacagtttgatgcttgcacctatgggcaatgccagcagcagccgtttatgcaaccgataatgaacccgtgcaatgagttcgtgaggcaacagtgcagccccgtaagcctaccttgggagcagtcacgcaggctacaactgagcagctgccaggtgatgcggcagcaatgctgtcagcagatgaggctgatggcgcaacaatatcattgccaggctatttgcaccatggtcagtctatcatgcagcaagtgcagtttgatgctggctttgttggtgagccccaagctcaggcccaggcccaggtggctctcaatttgccctccatgtgtggagtctaccctaggtactgcagcactccatgcaatgttgctactggtcattgcggttcttggtagtgtgtaccatcatatatatatagttggataaataaagtgtcacacatcatcgtgtgtgtcatgtaataaaatttggaatagtctttggctgttcgtatgaataaatgaaaattataaca

SEQ ID NO: 391761 - DNA, 493 bp, Oryza sativa
tcccgggtcgccaatacgcccgatcccggggctttcggtgtgcatccatttttcggctgcacacggtactgtaggagcatggcttgccagcgaagcttttggcggtctcaagggcctcgtcgccggcaagccggctcctgcaggttccgctgtatttcgaagactgtatttccctcatgcccgatctggcataacacttgctccagccttgccgtgcgactatgaaaaatcgaatagtgacggattattggcatggcgaagagcgaagcagcggtaaaagaacccggcagtaaaagcaaactcaagctgatcatcgtcattgtgctgggcgtgctgctggccatcggcctgtcggtgggtgcgacctggtatttcatgcacagtgcccagagcaaaccggcaccggcagtggccgaagcggcccccagcggcaagcagccggcgatctacgagcccatggccccggcctttgtcaccaacttcaaggacgcca

SEQ ID NO: 391762 - DNA, 448 bp, Oryza sativa
aacgatatgatgttggtcatatacttgtcttctcttatccggagtgtcatcgcactccataacttgatcaataacaagatgctaaacaaggagcatgagaaagccgaggattcgaagccaaccgccatacctagtgctgctgggagctgaatgtgctttatttgccttagattttggacccagtggaagccaaaagaattgtgacatgttagcatgatggcgtttgaaccaattgtctttgaccttggttttacactttcgatgtttatttcatgtacgataaggtcaacggcaaactttacattctgtgagcttaggtcatactacctcttgagctttcatcttgatcttatatacaatgtttcatggggtgcatcatgttttgtgatgcggattgtcgtacgattaacctctagtaaatggttacttgacgcaaaaaaaaaaaaaa

SEQ ID NO: 391763 - DNA, 386 bp, Oryza sativa
cccccacgcgtgcgctccttcctaccgtgcattggcatgaagcctgccggctacgtctctgaggcctcgagggaatccggtctagtcatcatcgacaacagccttgcccttgtagagaccctcatggatgagagacggtggtctgacatgttctcgtgcatgattgctaaggcaacagtgcttgaggaggtgtctaccggcattgcaggaagcagaaatggcgcgttgctgctgatgaaggctgagctacaggtgctctcacctctagtaccaattagggaggttacatttctccggttttgtaagcagctggctgagggtgcatgggcagtagttgatgtgtccattgatgggttagtgagagatcattattctggaaccggacc

SEQ ID NO: 391764 - DNA, 610 bp, Oryza sativa
  unsure (1)..(610): unsure at all n locations
nnnnnnnnnnnnnnnnnnnnnnnnnnnnnnnnnnnnnnnnnnnnnnnnnnnnnnnnnnnnnnnnnnnnnnnnnnnnnnnaacataaatattaagcctgctctttaactttcagtgaagaagaggaaaggagggtaaactatgcatattttcgtcttttacagcagtagcactcactccacgcacggcaaacacatctgcaacccaaggcacaaaacaaaacattgtggtagactcttccttttgacaaccaaaggtattgtgagacgtcgagcgccccctgatctcgcattacacttgctatgatcaggggggcagacatcatcatcgatccgacacaaaacatacacacactcaacacactcagatgtctaataggagaccgagcgaacgacgaaatctcaatcagcaacgcttctcgcctgctgccattgacagtgttcacagttgggagcagggggaggttgaggaaatggtgaatcttcttggagagggtcatatataaccattgtcaaaagctgcaaaaaaagagagagagagagggagaaggggagagaaaagaaaaggctgtaacccgcgatgttccggtagtagcttttagcttcttctata

SEQ ID NO: 391765 - DNA, 435 bp, Oryza sativa
  unsure (1)..(435): unsure at all n locations
cccacgcgtccgcccacgcgtgcgcgcactctgccgcgacaaagaaacagcagaagataagaattaagaattagtttagatactgcaagtattttgccttgaaggtatatggcagacccaactaacatatgaccatgttcttattagaacttcatctgtaacttctttctttgcggggggggggctggccaaatacttgagcggggtgtcagttagtttgatggtgagctgacctgttcctgcagcacataagacaaagaagcctacatgttgttttggcagtgtgcagtgcctaccgatatcctctagactctggcacatacttaaagttctgatctggagatcactagcgtgcgtgggccattgggccagntaacagattttgatcttccattagggtgtttgagcacnggnaaaaggggattttcctgttat

SEQ ID NO: 391766 - DNA, 427 bp, Oryza sativa
cagcggcgaggggagcggtcgccgaggcggcggcggggttcgtcgatgcgttcgaagatctggtagatcctaggagcaaaccatggcttctaagaaagccttggcattgcagccaagcaagaaaatttgcatgaccttgttgccgcaagacattgttgaactgatacttctgaggcttccggtaagcactctgctgaggtgccgtggtgtctgcaagcaatgggatggcattattcgggatcctcagtttgccatggtgcacatccagcgtgcgccgcgtcgccccctatttttctttcaacgagagaatttagtccatctcctctaccctagtgaagcaatcctttttgatgaagcatggtcaccatcaaaatgggttgtacctgggatcgagcctgatgattttttatgtgcttcatgcaatgga

SEQ ID NO: 391767 - DNA, 456 bp, Oryza sativa
  unsure (1)..(456): unsure at all n locations
ggacactaaaaaaattgaccacagtgtgaaggaaagggcagcgcggcttacccattttgcgagaatattaaaggaacaggctcagtcagacttgaagaaagcagcagatcagcattggagcgatggtgctttggaggcagatctgcgacgagctgactcggttgttagacgacgtgccatggaagatgctttcatggctttaaagtttgttcgggatatccatgacatgatggcaaacagattacaagagcaattcgcaaaggatggttcctcttctcctgctaattcaagaagtttcatcacccttgagaaaaatggaaataccttcgagctgtttcctcatgaagtttcaacggaccagatttccgccatagaggttatttctagattaacttatttagcagaaaactcccatcatttgggttattttggggtaatttgttttccatngcccgc

SEQ ID NO: 391768 - DNA, 471 bp, Oryza sativa
cgtccgcattcccggtcgccccgcgtccgtgatcgcgagcggccccttacttgttttttattgttttcattctattgatccttcactatgtttatctctattatcattgttccttgacaaggcggcgaccgtcaccgtaggaggactactgcacgcccgcacaacatgcaggatccgcggaggctgcgcacggtgacccagttggaggaagtgaagtgcatcctgaagatgctgcccatctggctgagcacgatcgtatactcggtggtgtacacccagatggcgtcgctgctcgtggagcaaggaaccaccatgaacaccttcgtcgtggtcgttccacaaaccccgcagccagcatgtcagcgttcgacatccttagcgtgctggcgttcatcgccatctaccggcgcgtgctcgtgccggtcatgtcgcgcctgaccggcaaccccaaagggctgaccgagctgcagc

SEQ ID NO: 391769 - DNA, 525 bp, Oryza sativa
  unsure (1)..(525): unsure at all n locations
cgtccgaattcctggtcgaccagcgtccgattctcggcgtgctaaagctacgacctgcgcagcttggatttggaatcactcgcttgggaagcaaaatcgcacgacaagctgaggtagcacgcggtttgacgtttcttcatgacgaagttttttctgtctttcagtggagatcctgatgatgtttgggccaaggccgtcgggccggttttgtctcctccggttagccggcggcgaaagcctccgcgaccaccgacggtttgttaatacctgccctaattattgtgctaatcatggaacatcgcgcatggtaattctcggttaatccttttgttttgcttgccctcgcttgattcgatgcgtaatactcgtagttgattcgtatgaacaagcgcacatgggaggaagacatgtatacatcttagttaattaaagaccatggataattgcctacgggttatgttcttcatcgaaggtatacgtgctaatagtaatctcctctaatgnatttcttcaattgtttacttc

SEQ ID NO: 391770 - DNA, 524 bp, Oryza sativa
gactcccaataacaccacaagcatgcaaactaaaagatagtaaaacgcagtgatatgggtagagttgagtggagtattttttggcatgaccttaaggaaacattagattacaaatatacgtaaattgataaagttgtaaacttgtagtagaactaggtattcacaatcggagggggcacaataaaaggctatttctctttatatagcttgatcgacttgtattaattatctggatattccttgtcaagctggtgagtaccctcgaaggggtccaagtgagatggggtcaatgccatttcctccaggggtgggtgaacgttctagcggtgaaattggcaatactgaaaattatgaggttatcactgctgatagagcaatagatgagagcaatgtgggcaatcgtattctgcgcaatatgggttggcaagaaggactggtacgttctataactaattttggttattactctttgatggctttccttgctgctgcctggatttgaataattctttctggggtcccgt

SEQ ID NO: 391771 - DNA, 352 bp, Oryza sativa
  unsure (1)..(352): unsure at all n locations
cccacgcgtccgataatcataaaatgcgtgacacggcaatggagaaaaccacctttgcagtgctctcgctgtcactactgcttctcgccggcggcggtggtgccgacgcctgcgaagactacgacgtgccgatgatgtcggcagcggtggcgttcgagagggcgagcacggggcgaggggggtgcgagatgtgcgccgacgaggtgggcaccgcgacngcnccggaccaggaggtgaccgacttcgtgttcgccgccgtgagcgccgccgcccggtcgtgcggcgccaccgcgcgcgccgtccgcgacatggcgcgggacccgncnacgccgccnggcgcgagggaggccgg

SEQ ID NO: 391772 - DNA, 591 bp, Oryza sativa
  unsure (1)..(591): unsure at all n locations
gcgaaacccttgtcttcctcccaacccatcttgacccaaaccctaaaaaaccaaaaaaaaaatccgcaaaattacccccgaaaatcccaaaaaatatccgccggaaccctatccttcgatcggatccacctatccccctccccggtgatggcggcgcaggttcaggcggtgccggcggcggagggtggtggcgcgccgccgcaggccaacggggtcgtggctgcgggctctgctgccgccgctgcggcgaccttccaggcgacgtcgctgtacgtgggggacctcgacgtgagcgtgcaggacgcgcagctgttcgacgtcttcagccaggtcggatcggtggtatcggtgcgcgtttgccgggacgtcaataccaggctgtcgctgggttacgcctatgtcaacttcagcagtcccgccgatgctgcaagggcattggaaatgctgaacttcactcctattaacgggaagcctatcaggataatggtttctaaccgngaccccagttcacgtaaaagtggagccagcaacatatttattaagaatcttgacaagtcaatagataaacaagctttctatgacacattttct
